United States Patent Application Publication US 2011/0296543 A1 - sequence listing, part 15

SEQ ID NO: 63437 - DNA, 1650 bp, Unknown
  Obtained from environmental sample
  misc_feature (1)..(1650): n is a, c, g, or t
atgttcacgtcccttgatgaaacaaaggacaaattctggggactgcaaacgggggcggattattacattgaaaaatcgcctgaaaatataaatatgctgattacccttatagagaaaatattttcttccccgcaggaaatagattttgacgcgattgaaaaagaaagcagaaaaataaatgacgattccattatagaaatagtaaataatcttcttgataataaacttttccagactacaattatcggtcttcttgccgatttatcaaaaaaagcaaattcaattgaaatgacggcgcatggaataattgagcttcttcatacggtatgtgaggctgaaattgtaactttgataattaaaggaaataatggaattatatatacttatacggataatttcagcgcgtatacaaaagaaatatatgataattttttaggggtatgcacgtcagattttaataatctttttcaaggtttcaaaattatttccaataaattaaaaaatttccgcccaaccgggcaaaacaagaaaaacatctcttcatatatttatattcctctcgcctcagcgggtgaaaatttcgcttccttgcatatcgctaattcattaaatgagtattttaccccggcaattttggaaaatgtcaatgtgtttgcaagctcggctgccccaatcatcgcaaacgcgctttccattcatgattttgtggaacttcaaaaaagaacacgcgccgcattcgcccgttatgttccaggggacgtgatggacgagataataaatgaaacggcgaaaaaaaccagcttaagcgaaaacagaaaagtatcggtgttattctgtgatattagggattttacaaatatgtccgaacattatgatgcgcaggttgtagttgattttttaaataattttttcgccaaaatgggaagcgaaataatttccgagagcggacatgttgataaatttatcggtgacgcgattatggccatatttggggcgtttaaaaacaatgaagaatcccccgggaacgcgataaaagcggcggtaaaaatgcttgccgcccttgaaaaaattaataattcgggcatggagttttttaaagaaaaagttaatattggaattggaataaattacggcgaatgtattttgggaaacatcgggtttaaaaacaaaatggactatactataataggcgataccgttaatttggcgtcccggcttgagagtcttacaaagatatattaccatccccttatagtttccgaagccgtatttgaatccgaaaaagaaaaatttctttttcgtaaaatcgataatgtgcgtgtgaaaggaaaagacaagcctgtcggcatatacgccgtttattcgggtttccaaggaactgacgggaaaaaactgcgatctggggaaaccgccgatataatttcggttgaatccatcttaattaaccgcgatacgctaattaattacaataaagggcttagggttttctatttgcgtgaatggaaactcgcgcaggaatattttaacaaggcgttggaaagcgatagaaatgattatctgtcaaagctttatcttgaacgctccatcaaactgtcagaatcggccgtaagcgacgattgggacggggtaattacatttactgaaaaataa

SEQ ID NO: 63438 - protein, 549 aa, Unknown
  Obtained from environmental sample
  DOMAIN (266)...(455): Adenylate and Guanylate cyclase catalytic domain
  misc_feature (1)..(549): Xaa is any amino acid
MFTSLDETKDKFWGLQTGADYYIEKSPENINMLITLIEKIFSSPQEIDFDAIEKESRKINDDSIIEIVNNLLDNKLFQTTIIGLLADLSKKANSIEMTAHGIIELLHTVCEAEIVTLIIKGNNGIIYTYTDNFSAYTKEIYDNFLGVCTSDFNNLFQGFKIISNKLKNFRPTGQNKKNISSYIYIPLASAGENFASLHIANSLNEYFTPAILENVNVFASSAAPIIANALSIHDFVELQKRTRAAFARYVPGDVMDEIINETAKKTSLSENRKVSVLFCDIRDFTNMSEHYDAQVVVDFLNNFFAKMGSEIISESGHVDKFIGDAIMAIFGAFKNNEESPGNAIKAAVKMLAALEKINNSGMEFFKEKVNIGIGINYGECILGNIGFKNKMDYTIIGDTVNLASRLESLTKIYYHPLIVSEAVFESEKEKFLFRKIDNVRVKGKDKPVGIYAVYSGFQGTDGKKLRSGETADIISVESILINRDTLINYNKGLRVFYLREWKLAQEYFNKALESDRNDYLSKLYLERSIKLSESAVSDDWDGVITFTEK

SEQ ID NO: 63439 - DNA, 1275 bp, Unknown
  Obtained from environmental sample
  misc_feature (1)..(1275): n is a, c, g, or t
ttggactcgcttcttattagtggtgccatttgggttggttgcacatatcctgaaatatctcccccagtcacatttctttccatacaagccctgttttatatagttcttatcatggcaggctctttcaggtacagcgttccctgcgcgttcttttccggaatattttcagccgtttgttatctgattgtagtcgttgttaacggaaatgttcttgatctgccttattcatttgtacttgacgataaagtaatacctttgagttttcccctgtacaacgaattactccgcgttattggaatggttgtcgcgggagccacggctggaatggcctgcaaaaggcatcttacattgtttaaaagcatgttagaatcccaggagggggcagccgaggccgctttaacgaccgtggaacaaacccgtacaatggcaaaagttataaaaaaatccactaatgacatattcttttcatcaaaagatatttttacaactgcaaataatcaagccgcaagtattcaggaaattgaaagcacgataaatgaaaacacccaaatagccggcgatatatccgaaaaaaccgccagtgtatccaccatcgcttctaaaatggaaaatgacgttattcaagggttttccgttcttgaacgcaatgttgaccaacttgaagacattaagaaaaagaatgacggcgtaatcacgggaattattaaccttggaaacaagatattaaaaatacgcgatattgtaaaaaacataaatacgataacggatcagacaaaagttatagcgtttaacgccgcattggaagcggcgagcgccggtgaacggggcaagcgtttntcagtcgtggcgagcgaagtaaacagacttgcggacgacatcgcgtcccttaccaggcaaatccgcgaacaagttgaggaaatacaaaattcttcctcatcgctgataatttccagtgaggaaagcgcggataaaataactgaaggtaataatcttataaaggaacttgaagacattttccgcgaaattcgttcaggagcggaaataaccgcaaatcaggcccaaacaattacaatatcaactcaaaaacaacaaaagtcaacggaacaaattaacatagccatatctgacatttcaaaggggctgtcaaattttatacaatcaacaagggtggcaacttcgtccgcggaagaacttacggagatgattcagaaattagattccatattaaaaggagaaacaccttcgttaaacactgaaaataagataaaagaataa

SEQ ID NO: 63440 - protein, 424 aa, Unknown
  Obtained from environmental sample
  DOMAIN (165)...(412): Methyl-accepting chemotaxis protein (MCP) signaling domain
  misc_feature (1)..(424): Xaa is any amino acid
MDSLLISGAIWVGCTYPEISPPVTFLSIQALFYIVLIMAGSFRYSVPCAFFSGIFSAVCYLIVVVVNGNVLDLPYSFVLDDKVIPLSFPLYNELLRVIGMVVAGATAGMACKRHLTLFKSMLESQEGAAEAALTTVEQTRTMAKVIKKSTNDIFFSSKDIFTTANNQAASIQEIESTINENTQIAGDISEKTASVSTIASKMENDVIQGFSVLERNVDQLEDIKKKNDGVITGIINLGNKILKIRDIVKNINTITDQTKVIAFNAALEAASAGERGKRXSVVASEVNRLADDIASLTRQIREQVEEIQNSSSSLIISSEESADKITEGNNLIKELEDIFREIRSGAEITANQAQTITISTQKQQKSTEQINIAISDISKGLSNFIQSTRVATSSAEELTEMIQKLDSILKGETPSLNTENKIKE

SEQ ID NO: 63441 - DNA, 648 bp, Unknown
  Obtained from environmental sample
  misc_feature (1)..(648): n is a, c, g, or t
gtgagtgtggtgcacgtcgcgcacctcaaatccggcgcgctccctcgtcaaaccgccgggaccgagggcgctgacgcggcgcttgtgcgtaagctccgagagcgggttggtctggtccaggaactgcgacagctggctcgacccgaagaacgcctgcacgacggtggacaccgttcgcgcgtttatgacgtcctgcggggtaacggtctccgtgccacccaaactaagacgctccttggccgtcctcaccatcctcgtcaaaccgacggcaaactgcgcggccaaaagctctcccacggaacggacgcgacgattgcccaaatggtcgatatcatctataaacccgacgccggagttgagccctatcatgtacttgagcgcggcgacgatgtcttcctttgtgagcgtggtgatcccttcgggcgggactacgcccaaccgcgtatttatacggtagcgcccgacgctgccgaggtcgtaccgcttgtcgtcgaagaacgccctctgaacgaggttgcgcgcggtctccacattcggcggatcgcccagacgcatggtcgcgtagataaggaagagagcgtcgtcttcgcacttcgtctcgtccttcttcagggtctccatgatgatcctgttttcgtcgctcgataa

SEQ ID NO: 63442 - protein, 215 aa, Unknown
  Obtained from environmental sample
  misc_feature (1)..(215): Xaa is any amino acid
MSVVHVAHLKSGALPRQTAGTEGADAALVRKLRERVGLVQELRQLARPEERLHDGGHRSRVYDVLRGNGLRATQTKTLLGRPHHPRQTDGKLRGQKLSHGTDATIAQMVDIIYKPDAGVEPYHVLERGDDVFLCERGDPFGRDYAQPRIYTVAPDAAEVVPLVVEERPLNEVARGLHIRRIAQTHGRVDKEESVVFALRLVLLQGLHDDPVFVAR

SEQ ID NO: 63443 - DNA, 1623 bp, Unknown
  Obtained from environmental sample
  misc_feature (1)..(1623): n is a, c, g, or t
atggagaccctgaagaaggacgagacgaagtgcgaagacgacgctctcttccttatctacgcgaccatgcgtctgggcgatccgccgaatgtggagaccgcgcgcaacctcgttcagagggcgttcttcgacgacaagcggtacgacctcggcagcgtcgggcgctaccgtataaatacgcggttgggcgtagtcccgcccgaagggatcaccacgctcacaaaggaagacatcgtcgccgcgctcaagtacatgatagggctcaactccggcgtcgggtttatagatgatatcgaccatttgggcaatcgtcgcgtccgttccgtgggagagcttttggccgcgcagtttgccgtcggtttgacgaggatggtgaggacggccaaggagcgtcttagtttgggtggcacggagaccgttaccccgcaggacgtcataaacgcgcgaacggtgtccaccgtcgtgcaggcgttcttcgggtcgagccagctgtcgcagttcctggaccagaccaacccgctctcggagcttacgcacaagcgccgcgtcagcgccctcggtcccggcggtttgacgagggagcgcgccggatttgaggtgcgcgacgtgcaccacactcactacgggcgtttatgccctattgagacgccggaaggtccgaatattggattgatcgcgtcgctgagcactttcgcgcgtgtcaatgaatttgggtttatagagacgccgtatcagaagattgagaacggtgtggccaccggtaagatagaatacttgacggccgaccaagaggacaactacattatcgcgcaggcgaacacgccgacggacaagagcggcaagattacggagaagatgctcttcgcccgttataggggcgatttccccgttgtgacgccgcaggaagtcacctacatggacgtctcgcccatgcagctcgtcagcatcgcggccgggctcattccgttcttggagcatgacgacgcgaaccgcgccctcatgggatccaacatgcaacgccaggcggtgccgctcttaaggacgcaggcgccgtttgtcgggacggggcttgaggggcgcgccgccgtcgattcgggttgcatggtcatagcaaagaatgccggcgttatcgagaaggtcgacgctactaagataacaatccgcaagaccagccgtgacgccagcgacattctcgggctcacggaattcgatacctacgagctgaccaagtttgagcgctccaatcaggataccgcgataaaccaaaaggtttgcgtgagagaggggcagaacgttgatgtagggacggtgctggccgacggtcacgccacaagcttaggcgagttagcccttggcagaaacgtgatggtggcctttatgccgtggcgcggctacaacttcgaggacgccattattatctccgagaaactcgtggcggaagatgtctttacgtcggtgcacatagaggtttttgagacggaggtgcgcgacacgaagcgcggtccggaggagctcacaagggagattcccaacgtcagcgacgaggccgtgcgncacttagatgagaacggcgtgataaagaccggtacggaggtagagccgggcgatatccttgtcgggtag

SEQ ID NO: 63444 - protein, 540 aa, Unknown
  Obtained from environmental sample
  DOMAIN (368)...(540): RNA polymerase Rpb2, domain 6
  misc_feature (1)..(540): Xaa is any amino acid
METLKKDETKCEDDALFLIYATMRLGDPPNVETARNLVQRAFFDDKRYDLGSVGRYRINTRLGVVPPEGITTLTKEDIVAALKYMIGLNSGVGFIDDIDHLGNRRVRSVGELLAAQFAVGLTRMVRTAKERLSLGGTETVTPQDVINARTVSTVVQAFFGSSQLSQFLDQTNPLSELTHKRRVSALGPGGLTRERAGFEVRDVHHTHYGRLCPIETPEGPNIGLIASLSTFARVNEFGFIETPYQKIENGVATGKIEYLTADQEDNYIIAQANTPTDKSGKITEKMLFARYRGDFPVVTPQEVTYMDVSPMQLVSIAAGLIPFLEHDDANRALMGSNMQRQAVPLLRTQAPFVGTGLEGRAAVDSGCMVIAKNAGVIEKVDATKITIRKTSRDASDILGLTEFDTYELTKFERSNQDTAINQKVCVREGQNVDVGTVLADGHATSLGELALGRNVMVAFMPWRGYNFEDAIIISEKLVAEDVFTSVHIEVFETEVRDTKRGPEELTREIPNVSDEAVRHLDENGVIKTGTEVEPGDILVG

SEQ ID NO: 63445 - DNA, 597 bp, Unknown
  Obtained from environmental sample
  misc_feature (1)..(597): n is a, c, g, or t
ttgtggagaccgaatacgggatttccattgtcgccggcgcttccggcttttcccagattgccaacatgggcgagggaagacagaaaactctttatttcggagcttgattcgctgtccaacgcggacataatcatcatagacacaagcgcgggcgtttccagcaatgttttggactttatcgccgccgcggacgacgcggtaattatcaccactccggagcctaccgcgattaccgacgcttacggcataataaaaattatagctacggagtatgactccgtaaacatgggtttaaaacttgtagtaaaccgcgcaaagggcgcggctcaggcaaaaggcgtcgccgacagaatgatcaatattgccggtcaatttttaaacttaaaactggattatcttggatttatttacgacgatatatcggtttctcacgccgttttaaggcaaaaaccctttatggtggtagatccaaaatgcaaggcaagtatttgcgttcaacatatcgtagatcgcatggacaggaacaaaccggtagattccgccggttttggcgggatgcttaaaaggctttttaagtctccgcaggaaaatgtttaa

SEQ ID NO: 63446 - protein, 198 aa, Unknown
  Obtained from environmental sample
  SIGNAL (1)...(24)
  DOMAIN (8)...(144): CobQ/CobB/MinD/ParA nucleotide binding domain
  misc_feature (1)..(198): Xaa is any amino acid
MWRPNTGFPLSPALPAFPRLPTWAREDRKLFISELDSLSNADIIIIDTSAGVSSNVLDFIAAADDAVIITTPEPTAITDAYGIIKIIATEYDSVNMGLKLVVNRAKGAAQAKGVADRMINIAGQFLNLKLDYLGFIYDDISVSHAVLRQKPFMVVDPKCKASICVQHIVDRMDRNKPVDSAGFGGMLKRLFKSPQENV

SEQ ID NO: 63447 - DNA, 426 bp, Unknown
  Obtained from environmental sample
  misc_feature (1)..(426): n is a, c, g, or t
atggatgatcaagctgagaaattgcgggaaataatgaaacggaagaaggacggcgcaggcgcgccgaaaacgtcttcaaaaacgacaagtgtaaaatccgtcgataaagcccgcgttattaccgttacttcaggcaagggcggcgtaggaaagaccaacctttccgttaatatggctcttgccttcgcaagactggggaaaaaagtggtcgtaatggacgccgaccttgggcttgccaacgttaatgttatgctcaacatgattcccaaatacaacctttaccatgtgataaaaaagcaaaaaacaatccgcgagattcttgtggagaccgaatacgggatttccattgtcgccggcgcttccggcttttcccagattgccaacatgggcgagggaagacagaaaactctttatttcggagcttga

SEQ ID NO: 63448 - protein, 141 aa, Unknown
  Obtained from environmental sample
  DOMAIN (40)...(141): CobQ/CobB/MinD/ParA nucleotide binding domain
  misc_feature (1)..(141): Xaa is any amino acid
MDDQAEKLREIMKRKKDGAGAPKTSSKTTSVKSVDKARVITVTSGKGGVGKTNLSVNMALAFARLGKKVVVMDADLGLANVNVMLNMIPKYNLYHVIKKQKTIREILVETEYGISIVAGASGFSQIANMGEGRQKTLYFGA

SEQ ID NO: 63449 - DNA, 1284 bp, Unknown
  Obtained from environmental sample
  misc_feature (1)..(1284): n is a, c, g, or t
atggagaagtatatcgaacagggcgacagccgaatggattgcgaattaaaaattgccgcaaaatacaatcgtcctttccatattttaagccagaaggaagtcaggttcggcggatttttgggcatgttttcaaaacccggagttcaggttgaattttattttacgccgcaaagacaaaatactttggcggcgcatgatcataataccgcccgctcatcaatttcgcataatgcgttgggtatttcgcccgaagatttatttgccgaaagaaatcttgagcaggagaagcagaaagttatcgccgccgccaaaaaaaatatcggcgaaatatcagccggaggcaaagaagcttcccagcagattttagacgcgcttaaagaattaaaggaaaaagtagaaggttccggtaaaaaagaagaacatccctcttttgtccgtactgtggaattattgaaagcgaatgatttttcggaaaaatatatcaacggaatgattgaaagactgagaaaagaattgtctcttgaacaactggataattttgacgttgtgcaggattgtcttcttgaatggataggggagagcatcagtatttttaaagaagacgccgttatacgcaaaccaagaattatggttcttgtaggtcctacgggagtgggaaaaacaaccacgctttcaaaacttgcggcgatttacggcataggaactgaaagcgttcccgcagttgacgtaagaatgataacaatagacaatttccgtatttgcgccaaagaacagcttgaacagatcggggatattatgcgtattcccgtttcctgcgccatgaacaaacacgatataagaaaagaaatcgccctttgcggcgaagatatcgatttgattttaatcgatactataggcaatagtcccaaagattcgtccaaaataggcgagatgaaagagatccttgacggatgcccaaaaagcgcggagtaccacctggttataagcgcggcgaccaaaacaagcgatatagaggttattatgcggcaatttgagccttttgactataaatcgattattcttacaaaaatggacgaaaccgacagttacggtaatataatttccgcgcttgcggagaaaagaaaaagtatttcttttattactaacgggcaagaagttcccgaagatataagaagagcgtctatcgtacgttttcttattaatcttgaaggttttaaggtaaaccgggataaaattgaaaaacgcttcccttccggtgaagcggatcaatttaaatggagataa

SEQ ID NO: 63450 - protein, 427 aa, Unknown
  Obtained from environmental sample
  DOMAIN (206)...(404): SRP54-type protein, GTPase domain
  misc_feature (1)..(427): Xaa is any amino acid
MEKYIEQGDSRMDCELKIAAKYNRPFHILSQKEVRFGGFLGMFSKPGVQVEFYFTPQRQNTLAAHDHNTARSSISHNALGISPEDLFAERNLEQEKQKVIAAAKKNIGEISAGGKEASQQILDALKELKEKVEGSGKKEEHPSFVRTVELLKANDFSEKYINGMIERLRKELSLEQLDNFDVVQDCLLEWIGESISIFKEDAVIRKPRIMVLVGPTGVGKTTTLSKLAAIYGIGTESVPAVDVRMITIDNFRICAKEQLEQIGDIMRIPVSCAMNKHDIRKEIALCGEDIDLILIDTIGNSPKDSSKIGEMKEILDGCPKSAEYHLVISAATKTSDIEVIMRQFEPFDYKSIILTKMDETDSYGNIISALAEKRKSISFITNGQEVPEDIRRASIVRFLINLEGFKVNRDKIEKRFPSGEADQFKWR

SEQ ID NO: 63451 - DNA, 549 bp, Unknown
  Obtained from environmental sample
  misc_feature (1)..(549): n is a, c, g, or t
ttgttgacgagcgttaggagaagcaagggattgcgcgtaacggagatacagaaagtgcttcacggcttattgcgggaaagagtatctatccgcaaccttgtgtctattcttgaagcgatagccgactacgcgcctatttccaaaaacatttggttccttaccgaaaaagcgcgtcaggctctcgcaagccagatatgcgatcaatatgccgatgaagataaacacttgcgcgttcttacagtcgatcccgctattgagcagaaaatcatcgacgcaaaatatgaaacggcaaccggcattgtttgtgcgcttgatcctaatacgcaaaaactttggattacggcggtcgcgaaagcggtcaaggcggttaaggaaaagggctggatgcctgtgattctttgttccgagcaggctcgtttccttattaaaaattcaacggatcgtgaactgccggatttggcggttctttccgtccctgaaattgtttccggtgtaattccggaagcgatagggatgataagattagaagataatacaacggagcagtga

SEQ ID NO: 63452 - protein, 182 aa, Unknown
  Obtained from environmental sample
  misc_feature (1)..(182): Xaa is any amino acid
MLTSVRRSKGLRVTEIQKVLHGLLRERVSIRNLVSILEAIADYAPISKNIWFLTEKARQALASQICDQYADEDKHLRVLTVDPAIEQKIIDAKYETATGIVCALDPNTQKLWITAVAKAVKAVKEKGWMPVILCSEQARFLIKNSTDRELPDLAVLSVPEIVSGVIPEAIGMIRLEDNTTEQ

SEQ ID NO: 63453 - DNA, 873 bp, Unknown
  Obtained from environmental sample
  misc_feature (1)..(873): n is a, c, g, or t
atgatcagatcggccgagcggagatcgggcagcggcaaaagccttaccgccctgtccatccccggcctcctttcctcacgggcgaaaattacgggcggcgaaattttatattcctctgacgacgggactattgatttatgcaaaactgaagagaaatctctgcggcaaattcggggaaaggaaatcagtatgattttccaggaaccgaggcagtcgctaaatccactgatgaaaattggggcgcagattaccgaaacgctggaactgcactccgatacctccatttcttcagcgcaaaacaggaaaaagacagctaagagtctggcggccaacaagttggcggccaacaagttggcggccaacaagttggctttggagatgctggaaaaactgcaattccaacagccggaaaaaatcatggacgcgtggccccaccagctttcagggggaatgtgccagcgggtcatgatcgccatcgccgcgatctgccgccccctgctgcttattgccgacgagccgacaacggcccttgatactgttaatcaaaaccacattttagcgctgctcaaacagataaaccgcgaattcggcacggcgatactttttatttcccacgatatttccatggcgcgtcatttttgcggccgcttcatggtgatgtattcgggaaagataattgaggaggggccgaccgaagcgattttatcttctcccctgcacccgtacaccattgcccttgccaacgccattccccgcaaagaaaacaggggcaggcctcttgcaaacatccccggcagggcgccgccgcttgagataacccctgccgggctgccattttgcatcccgctgcccaaaagcgcaaacacggtgtaa

SEQ ID NO: 63454 - protein, 290 aa, Unknown
  Obtained from environmental sample
  DOMAIN (226)...(287): Oligopeptide/dipeptide transporter, C-terminal region
  misc_feature (1)..(290): Xaa is any amino acid
MIRSAERRSGSGKSLTALSIPGLLSSRAKITGGEILYSSDDGTIDLCKTEEKSLRQIRGKEISMIFQEPRQSLNPLMKIGAQITETLELHSDTSISSAQNRKKTAKSLAANKLAANKLAANKLALEMLEKLQFQQPEKIMDAWPHQLSGGMCQRVMIAIAAICRPLLLIADEPTTALDTVNQNHILALLKQINREFGTAILFISHDISMARHFCGRFMVMYSGKIIEEGPTEAILSSPLHPYTIALANAIPRKENRGRPLANIPGRAPPLEITPAGLPFCIPLPKSANTV

SEQ ID NO: 63455 - DNA, 789 bp, Unknown
  Obtained from environmental sample
  misc_feature (1)..(789): n is a, c, g, or t
ttgcatcccgctgcccaaaagcgcaaacacggtgtaaaaactctccgcccccattggcggaggttggtaatggccgttatgtgcgctgtttctttccggagggaacaaatgcctgaatcacctaagcccatcattgttattcgcagcctttcagccgcttatgtcagccgcagcttcggctggttcgggaagaaggaaatcaagcccgtccttaataacatcaatcttgatataaacgaagccgaaatattcggactgacaggagagtctggctgcggcaaaactacgcttgcccgctgtatactgggccttattgattatgaaggcgagattattattgacggtcttaagcaggacggtttcgacccgaagcacaatatacaaatggtctttcaggacacggcttcgtcgcttaaccccgtaaaaaaaataggctggcttctggaagaaccgcttgtcatacacaaacttggcgcgaaagagcggcgcatgcaaaaggttgacgatatgcttgcccgcgtcgggctggacttgtcatgcaaaacgcgccgcgtacatgagctttcaggcggccagaagcagcgcgtatgcatcgggcgcgccctcatgttgcagccgaaaatcctcatcgccgacgaagccataagctcgctggacgtttccgccggcgctcagatactgaacctcttccgcgagttgcgcgacagcctcggactgacgataattttcatttcgcataacacaggcgcggtggagtatttgtgcgacaaggtgttacagctaaaataa

SEQ ID NO: 63456 - protein, 262 aa, Unknown
  Obtained from environmental sample
  DOMAIN (81)...(262): ABC transporter
  misc_feature (1)..(262): Xaa is any amino acid
MHPAAQKRKHGVKTLRPHWRRLVMAVMCAVSFRREQMPESPKPIIVIRSLSAAYVSRSFGWFGKKEIKPVLNNINLDINEAEIFGLTGESGCGKTTLARCILGLIDYEGEIIIDGLKQDGFDPKHNIQMVFQDTASSLNPVKKIGWLLEEPLVIHKLGAKERRMQKVDDMLARVGLDLSCKTRRVHELSGGQKQRVCIGRALMLQPKILIADEAISSLDVSAGAQILNLFRELRDSLGLTIIFISHNTGAVEYLCDKVLQLK

SEQ ID NO: 63457 - DNA, 573 bp, Unknown
  Obtained from environmental sample
  misc_feature (1)..(573): n is a, c, g, or t
atggaatgtcgttcctataaacccctttttaagactgaatttgactgcgatcccaatgatgttgttatcagttttcttgatctgacggaactgctttttatcaatagttttattcaatatggtattagtattcagaaaataagaaaagccgctattatcgcatcagacttattaaaaacttcacatccatttgccatacggaaaatgtttaccgatggaaagacaatattcgcaaaaatagctgaaaaagagaacgatacatctcttctggatcttttaagaaatcaataccagtttgagaaaatcattgaaccgttattatatgaatgtatagattttggcaaacatgattatgcggaaaaatggtggcctttagggaaaaaacatgaaattgtattggacccggctagaaacatggggcagcctatcctaaataaatacaatgtaaaaactgaattaatatatgagctttataaaaccaatcacagcataagtgaaatcagcgattggtacgaactggatgaagcggcaataaaaacggctattagttttgaaaagggtttagtggcatga

SEQ ID NO: 63458 - protein, 190 aa, Unknown
  Obtained from environmental sample
  misc_feature (1)..(190): Xaa is any amino acid
MECRSYKPLFKTEFDCDPNDVVISFLDLTELLFINSFIQYGISIQKIRKAAIIASDLLKTSHPFAIRKMFTDGKTIFAKIAEKENDTSLLDLLRNQYQFEKIIEPLLYECIDFGKHDYAEKWWPLGKKHEIVLDPARNMGQPILNKYNVKTELIYELYKTNHSISEISDWYELDEAAIKTAISFEKGLVA

SEQ ID NO: 63459 - DNA, 819 bp, Unknown
  Obtained from environmental sample
  misc_feature (1)..(819): n is a, c, g, or t
atggataaagaaaccgaacaatttttaataaatcaagcaaaagaaatccgcaaactgactatcgaagaaatcgggaatttgggaacagggcacattggaggagcgatgtccattgtagaccttttagccctgttgtactttcaccggatgaaaattgatcctaaaaaaccgcgctgggaagatcgcgatcagcttgttgtttctaaaggccactccgggcctgccgtttattcgacgcttgcgcttaaaggatatttccctatggactggcttanaaccctgaacaagggtggaaccagtctgccaagccactgcgaccgtaacaagacacccggcatcgacatgacgaccggctctttagggcagggtttttccgccgccattggaatcgccatgggcttgcgaatggataaaaaagcttcgaccgtgtataccgtgattggggacggcgagtccgacgaggggcagatttgggaaggcgcgctctttgccggctttcataaactttccaaccttgtcgcgtttaccgactacaacaaacagcagcttgacggttttgtaaaggatattcttgatctgggcgaccttgccgccaagtgggccgccttcggctggttcacgcaggaagtagacgggcacgatgtcgccgcgattgacgccgcgattgaaaaagcgcttgcgcaaaaagaaaagccgtccatgattgtaatgcacacaatcaagggaaagggatgtaatttcgcggaaggcgtcgagaaaaatcacagcatggcctttgacatggaaaaagccaaagaagccatagcggcgcttggataa

SEQ ID NO: 63460 - protein, 272 aa, Unknown
  Obtained from environmental sample
  DOMAIN (97)...(237): Thiamine pyrophosphate enzyme, C-terminal TPP binding domain
  misc_feature (1)..(272): Xaa is any amino acid
MDKETEQFLINQAKEIRKLTIEEIGNLGTGHIGGAMSIVDLLALLYFHRMKIDPKKPRWEDRDQLVVSKGHSGPAVYSTLALKGYFPMDWLXTLNKGGTSLPSHCDRNKTPGIDMTTGSLGQGFSAAIGIAMGLRMDKKASTVYTVIGDGESDEGQIWEGALFAGFHKLSNLVAFTDYNKQQLDGFVKDILDLGDLAAKWAAFGWFTQEVDGHDVAAIDAAIEKALAQKEKPSMIVMHTIKGKGCNFAEGVEKNHSMAFDMEKAKEAIAALG

SEQ ID NO: 63461 - DNA, 498 bp, Unknown
  Obtained from environmental sample
  misc_feature (1)..(498): n is a, c, g, or t
atggcagaacaaaaagaaatgcgaatggcatacgttgacacattgatggcgttagctgaaaataataaaaatatagtcgtgctggaagccgaccttatgagctgtacaaacaccggcattttcaaaaaaacataccccgaccgttttattaactgcggcatcgcggaggcgaacatggtcggcatagcatccgggctttccactctgggaaaaatcccgttcgctgccggcttcggctgtttttcgtcgcggcgggtattcgatcaatttttcctttccgccaactacgctcgtcttaacgtaaaattgacaggcaccgatcccggcgtaaccgccgcgtttaacggcgggacacacatgccctttgaggaacttgccctgatgagggttgtacccggtcttacagttcttgagccgtcggatccctcctcctgcgccgcctttgtccgtcttatggcggaaagaatacggctgccattatcttcgtattccgcgtaa

SEQ ID NO: 63462 - protein, 165 aa, Unknown
  Obtained from environmental sample
  DOMAIN (5)...(165): Transketolase, pyridine binding domain
  misc_feature (1)..(165): Xaa is any amino acid
MAEQKEMRMAYVDTLMALAENNKNIVVLEADLMSCTNTGIFKKTYPDRFINCGIAEANMVGIASGLSTLGKIPFAAGFGCFSSRRVFDQFFLSANYARLNVKLTGTDPGVTAAFNGGTHMPFEELALMRVVPGLTVLEPSDPSSCAAFVRLMAERIRLPLSSYSA

SEQ ID NO: 63463 - DNA, 339 bp, Unknown
  Obtained from environmental sample
  misc_feature (1)..(339): n is a, c, g, or t
atggtaaaccaatcgctgaaagcctgcgaaaaacttgccgcagaaggaatcaacgcgggcgtgcttgatgttcttactttaaaaccgattgaccgtgatgcggtattgaatcaggccggtaaagtacgcgccgttatcagcgcggagaacgcccaaataagaggcggtcttggcagcgcggttgcggaaataatcgccgaggagggctgccgctgcaagtttgcgcgtatcggtattcgggacgaattcggcgaagtgggtacgcaggactatcttgtagatcatttcggtcttgatgtaggaagccttgtaaagaaagcgcaggaacttcttgcctga

SEQ ID NO: 63464 - protein, 112 aa, Unknown
  Obtained from environmental sample
  DOMAIN (1)...(103): Transketolase, C-terminal domain
  misc_feature (1)..(112): Xaa is any amino acid
MVNQSLKACEKLAAEGINAGVLDVLTLKPIDRDAVLNQAGKVRAVISAENAQIRGGLGSAVAEIIAEEGCRCKFARIGIRDEFGEVGTQDYLVDHFGLDVGSLVKKAQELLA

SEQ ID NO: 63465 - DNA, 558 bp, Unknown
  Obtained from environmental sample
  misc_feature (1)..(558): n is a, c, g, or t
atgaactttgtaacaattgactttgaaaccgcaaattattcacgggagagtgcctgctctgtaggccttgtaaaatttcaaaatggaaaagccggggacacttactattcgctgataaggccgccccgcctttacatacggccggactttaccgagattcacgggttgaccgctgacgatgtaagagacgccccgacatttgcggatatttgggacagcggaataaaaccgtttatcggcgatcttccgctggcagcccacaacgctgcgtttgacatgggcgtacttgccgctgtccttgactggtatgaactggatataccgcagctgcaatatttctgcacctgcactctttcccgccgcacttggccgcattanaagtctcacgccttaaccgccttggcgaaatatttcggtattgtttacgacgcgcataacgcgcttgacgacgcaatgacctgcggcaaattggtaataatgtctgccgagaaatttggttgtgcaagcgttgatgatttgctttcaggtgttggtttgagatttgggacacttgggtga

SEQ ID NO: 63466 - protein, 185 aa, Unknown
  Obtained from environmental sample
  DOMAIN (3)...(158): Exonuclease
  misc_feature (1)..(185): Xaa is any amino acid
MNFVTIDFETANYSRESACSVGLVKFQNGKAGDTYYSLIRPPRLYIRPDFTEIHGLTADDVRDAPTFADIWDSGIKPFIGDLPLAAHNAAFDMGVLAAVLDWYELDIPQLQYFCTCTLSRRTWPHXKSHALTALAKYFGIVYDAHNALDDAMTCGKLVIMSAEKFGCASVDDLLSGVGLRFGTLG

SEQ ID NO: 63467 - DNA, 471 bp, Unknown
  Obtained from environmental sample
  misc_feature (1)..(471): n is a, c, g, or t
ttgcatcttgtctttttaattgactgtgattataataaagcaaggataaacaatcgaaccatgggaaatgtatatgcggaaataaccgttaaaaacgtaaaggatatgggttttgcccaagaggggcatatcactgaagacaatgtccattccgtaacactcactgcgattgtcgataccggagccacaacattggtaatcaatgaagaaatattcaaacaattaggcttatcggtagtgaaaacacgtaatataaaccttgccggcggcggaaaaacggaatgtaaagtaaccgatcctgtacatattcaatggaaggaccgttttgccgtggtaaatgccgtagtattaccaggcgggaaacccctccttggcgtaataccgctggaatttatggatctcatggttgaccctgtcaatcgtgaactggtcggcgttcatggcgatcatgccgaattaatggcaatgtaa

SEQ ID NO: 63468 - protein, 156 aa, Unknown
  Obtained from environmental sample
  misc_feature (1)..(156): Xaa is any amino acid
MHLVFLIDCDYNKARINNRTMGNVYAEITVKNVKDMGFAQEGHITEDNVHSVTLTAIVDTGATTLVINEEIFKQLGLSVVKTRNINLAGGGKTECKVTDPVHIQWKDRFAVVNAVVLPGGKPLLGVIPLEFMDLMVDPVNRELVGVHGDHAELMAM

SEQ ID NO: 63469 - DNA, 1002 bp, Unknown
  Obtained from environmental sample
  misc_feature (1)..(1002): n is a, c, g, or t
gtgttcgaccaatgccacgatgtcctctttcctctcgcgcagcggcggaagctccacgtggaagatgttgaggcggtagtagaggtcttcgcggaagttccctttatccatagccgccagcaggtctcggttcgacgtggccagtatcctgacgtcgaccttcagcgggtcgtcgccgcccaccttctgtatctccttctcctggatggcgcgaagcagcttggcctgagcgttcattggcatttcgcttatctcgtcgaggagcagcgtcccgccgttcgccgcctcgaacttgccaaccttgtcccttatcgccccggtgaacgcgcccttctcgtggccgaacaactccgactctatgaggctctcgggaagcgccgcgcagtttatcttgacgaacgggcctatctgcctggggctgtggtagtgtatccagcgggcgatcagctccttgcccgtccccgactccccggtgatcagcaccgtggagcggctgcccgccacgctctcggtgaacttgcggatctccatgagtttgggtgcgcagccaacgtagttccaccggtcgcgcagttcgttcttgagcgtctcgttctcgctgttgagcgccttgttctcggtgatgagcgaacggtgctgcagcgccctgtccaccatcagctcgatcttttgcaggagcgtgtcgtccttctcgaggaaggtgaacgcgcccttttccatggcctccaccgcggtcttgatgtcgccgaagcccgtgaatatcaggaagggcacgtcggggttgaccgccttgatgttctgcaggagttccacgccgttcatctgcggcatcttgtagtcggatatgacgaggtcgaagagttcgcgcataaacgcctccatggcctcggcgccgccggagacggttttaacgtcgtagcctttgcggcgaaggacttcggagatggattctctcatgaagtctttgtcgtctactaccaggatgtttctttttccatttaa

SEQ ID NO: 63470 - protein, 333 aa, Unknown
  Obtained from environmental sample
  misc_feature (1)..(333): Xaa is any amino acid
MFDQCHDVLFPLAQRRKLHVEDVEAVVEVFAEVPFIHSRQQVSVRRGQYPDVDLQRVVAAHLLYLLLLDGAKQLGLSVHWHFAYLVEEQRPAVRRLELANLVPYRPGERALLVAEQLRLYEALGKRRAVYLDERAYLPGAVVVYPAGDQLLARPRLPGDQHRGAAARHALGELADLHEFGCAANVVPPVAQFVLERLVLAVERLVLGDERTVLQRPVHHQLDLLQERVVLLEEGERALFHGLHRGLDVAEAREYQEGHVGVDRLDVLQEFHAVHLRHLVVGYDEVEEFAHKRLHGLGAAGDGFNVVAFAAKDFGDGFSHEVFVVYYQDVSFSI

SEQ ID NO: 63471 - DNA, 1341 bp, Unknown
  Obtained from environmental sample
  misc_feature (1)..(1341): n is a, c, g, or t
atgagagaatccatctccgaagtccttcgccgcaaaggctacgacgttaaaaccgtctccggcggcgccgaggccatggaggcgtttatgcgcgaactcttcgacctcgtcatatccgactacaagatgccgcagatgaacggcgtggaactcctgcagaacatcaaggcggtcaaccccgacgtgcccttcctgatattcacgggcttcggcgacatcaagaccgcggtggaggccatggaaaagggcgcgttcaccttcctcgagaaggacgacacgctcctgcaaaagatcgagctgatggtggacagggcgctgcagcaccgttcgctcatcaccgagaacaaggcgctcaacagcgagaacgagacgctcaagaacgaactgcgcgaccggtggaactacgttggctgcgcacccaaactcatggagatccgcaagttcaccgagagcgtggcgggcagccgctccacggtgctgatcaccggggagtcggggacgggcaaggagctgatcgcccgctggatacactaccacagccccaggcagataggcccgttcgtcaagataaactgcgcggcgcttcccgagagcctcatagagtcggagttgttcggccacgagaagggcgcgttcaccggggcgataagggacaaggttggcaagttcgaggcggcgaacggcgggacgctgctcctcgacgagataagcgaaatgccaatgaacgctcaggccaagctgcttcgcgccatccaggagaaggagatacagaaggtgggcggcgacgacccgctgaaggtcgacgtcaggatactggccacgtcgaaccgagacctgctggcggctatggataaagggaacttccgcgaagacctctactaccgcctcaacatcttccacgtggagcttccgccgctgcgcgagaggaaagaggacatcgtggcattggtcgaacacttcatcggcaaggtcaatgaggagaacgacttcaacgtaacggggttggaagagggttgcaagaagcttttatgcgggtacaattggcccggcaacatccgtgagttggagaacaaggtatatcgggcggtagtgcttacgcgcaacggtttgataaagccgacggcgttcgaccttacgtccgacagcgcgcgcgccaaatcctccggcggcggcctcgaggccggaatgaccatcgccgaagcggaaaaagagctcataataaagacgttggagcattgcggcaacaataaaaccaaggccgcggagatgcttgaaatatcggtgcgtacgcttagaaataaactgaatgaatacgctttaggtaccgaggatgagggttga

SEQ ID NO: 63472 - protein, 446 aa, Unknown
  Obtained from environmental sample
  DOMAIN (158)...(304): ATPase family associated with various cellular activities (AAA)
  misc_feature (1)..(446): Xaa is any amino acid
MRESISEVLRRKGYDVKTVSGGAEAMEAFMRELFDLVISDYKMPQMNGVELLQNIKAVNPDVPFLIFTGFGDIKTAVEAMEKGAFTFLEKDDTLLQKIELMVDRALQHRSLITENKALNSENETLKNELRDRWNYVGCAPKLMEIRKFTESVAGSRSTVLITGESGTGKELIARWIHYHSPRQIGPFVKINCAALPESLIESELFGHEKGAFTGAIRDKVGKFEAANGGTLLLDEISEMPMNAQAKLLRAIQEKEIQKVGGDDPLKVDVRILATSNRDLLAAMDKGNFREDLYYRLNIFHVELPPLRERKEDIVALVEHFIGKVNEENDFNVTGLEEGCKKLLCGYNWPGNIRELENKVYRAVVLTRNGLIKPTAFDLTSDSARAKSSGGGLEAGMTIAEAEKELIIKTLEHCGNNKTKAAEMLEISVRTLRNKLNEYALGTEDEG

SEQ ID NO: 63473 - DNA, 459 bp, Unknown
  Obtained from environmental sample
  misc_feature (1)..(459): n is a, c, g, or t
gtggaactacgttggctgcgcacccaaactcatggagatccgcaagttcaccgagagcgtggcgggcagccgctccacggtgctgatcaccggggagtcggggacgggcaaggagctgatcgcccgctggatacactaccacagccccaggcagataggcccgttcgtcaagataaactgcgcggcgcttcccgagagcctcatagagtcggagttgttcggccacgagaagggcgcgttcaccggggcgataagggacaaggttggcaagttcgaggcggcgaacggcgggacgctgctcctcgacgagataagcgaaatgccaatgaacgctcaggccaagctgcttcgcgccatccaggagaaggagatacagaaggtgggcggcgacgacccgctgaaggtcgacgtcaggatactggccacgtcgaaccgagacctgctggcggctatggataa

SEQ ID NO: 63474 - protein, 152 aa, Unknown
  Obtained from environmental sample
  misc_feature (1)..(152): Xaa is any amino acid
MELRWLRTQTHGDPQVHRERGGQPLHGADHRGVGDGQGADRPLDTLPQPQADRPVRQDKLRGASREPHRVGVVRPREGRVHRGDKGQGWQVRGGERRDAAPRRDKRNANERSGQAASRHPGEGDTEGGRRRPAEGRRQDTGHVEPRPAGGYG

SEQ ID NO: 63475 - DNA, 852 bp, Unknown
  Obtained from environmental sample
  misc_feature (1)..(852): n is a, c, g, or t
ttggacatgttctgcagcagatacttagagacgacggacggcgccgccggcaacgagagcagaattgaggagatcaattcgcgattggcaaaaatacagcggctcaagaaaaaatattcatgcacaacagacgaactgattgacaaaagggaacagttggaaaaagatctatccctactaaacaacacagacgcggacatagagctattggagaaaaaggccgctaaggcgcggaaagagtgcgtcgacgccgccgcaatgttgacatcgtcacgaaaaaaagccttaaacacttttgacaaagaggtaacgcgccgcatggaactcttaggtttcaccggcggctcgcttgccacttcgctatcgccgttaagcgaaccggctccaaacggtatggacgcgatacgctttctggttagaacgaaccccggcgaaccgtttctgccgttagccaaaaccgcctccggcggcgaggcctcgcggctgatgctggccgtcaaatcgatactcgccgcgcacgatgaaattccggtgctcatcttcgacgagatagacaccggcataggcggcgtcttggccggagaggtcgctaaagcgttgtattctctttcgtcaacgcaccaagtgctctgcatatcgcacctgcaccagatagcctcggtagcggacaaccactaccgcgtggccaagagggtggacggcggacggacggtgacggaggtcgagcgtctggacggggaacaaaggacgctggagatcgcgcggatgctgggcggagcgggatcggaagcggctttgaaacacgcggaggaattgctgaagtcaaaatcaaccctcatcctcggtacctaa

SEQ ID NO: 63476 - protein, 283 aa, Unknown
  Obtained from environmental sample
  misc_feature (1)..(283): Xaa is any amino acid
MDMFCSRYLETTDGAAGNESRIEEINSRLAKIQRLKKKYSCTTDELIDKREQLEKDLSLLNNTDADIELLEKKAAKARKECVDAAAMLTSSRKKALNTFDKEVTRRMELLGFTGGSLATSLSPLSEPAPNGMDAIRFLVRTNPGEPFLPLAKTASGGEASRLMLAVKSILAAHDEIPVLIFDEIDTGIGGVLAGEVAKALYSLSSTHQVLCISHLHQIASVADNHYRVAKRVDGGRTVTEVERLDGEQRTLEIARMLGGAGSEAALKHAEELLKSKSTLILGT

SEQ ID NO: 63477 - DNA, 1446 bp, Unknown
  Obtained from environmental sample
  misc_feature (1)..(1446): n is a, c, g, or t
atggaaacaaattacataggcgattatcaaacagcggataaattaatatggcgcaatattctggattattttcccactgacaaggaaggccttcttgctctgggggataacaatttaatctggggcgaatacgagaaagaacgccttgaggatgcccgcgaggcatatgccaagcttattgagctttatggtcgtaccgatcccctgctggaaaggatgctaaagtattttatccgcacggatgacctggggcaggtactgagcctccaaagctattttatgttttccgataaaagaaaaatatctgccgctacgcttgccgaaatgggtggctactttctggacaaaaggctggaaaaggtacgcggcgttccgaatgaatatcttgattatatcggcgggataagggaaatacttttaagggccataaagcaggatcctatgatcccggaatcgtattatcaccttgccagatattataactattttgaaaattctacggacgaaaagcttacgcttcaggtagcggtacgcgtttttgatgcggcaaaggaagaaagcccaaaacgcataggctatcatattaatgccctgcgccgttacgcggaagttttaatagacgggaaggaattttttcctgctgaangaaatcttgccaaggggatcaacgtttaccagaacgcgctttcgcgcaggttgctgaaaccctcgcctgaatatggcaggctctatgccgatcttggggatctggaattttttgtaaaagatggagacatgcagactgccttggactattacaattccggcgagcagaatggatgggccccgcctgaaattcagtaccgtatgggcgtcgcgcattatcagatgcgccagtggggacccgcgctggaacgtttctttgaggccttcagggaattaccgttcaaccgacgtattctgtacgcccttgggaatgtgtcgtacatgaggggaaattatttcgccgcacagggctattatgacaggcttctggaaattcttgaggacgacagatcgcgtttccccgtgattgcgcctacggatgatgaagaccagcttgatgtagtggaacgtttgatggttgcccagaacaatctgggagtagtcctggaagctctaacagagcgcaccggcaataaaagttaccgttcccgcgctcaagggctgtattccgattctgaacgcgcctgggatgtgcttaccagaaatcctgtaagcatgattcggatgcgcccttcgcctgacattatggctccgagcgttaatccggcatacctgaatattcaaaacaccctttaccccatacctggttatgaacaccagttctttttaagggtagacagggatgtgctggagccttcgctttgggaagaccttgcccctccgggattccgcctttccgaagggattcacaccggcagatga

SEQ ID NO: 63478 - protein, 481 aa, Unknown
  Obtained from environmental sample
  DOMAIN (311)...(344): Tetratricopeptide repeat
  misc_feature (1)..(481): Xaa is any amino acid
METNYIGDYQTADKLIWRNILDYFPTDKEGLLALGDNNLIWGEYEKERLEDAREAYAKLIELYGRTDPLLERMLKYFIRTDDLGQVLSLQSYFMFSDKRKISAATLAEMGGYFLDKRLEKVRGVPNEYLDYIGGIREILLRAIKQDPMIPESYYHLARYYNYFENSTDEKLTLQVAVRVFDAAKEESPKRIGYHINALRRYAEVLIDGKEFFPAEXNLAKGINVYQNALSRRLLKPSPEYGRLYADLGDLEFFVKDGDMQTALDYYNSGEQNGWAPPEIQYRMGVAHYQMRQWGPALERFFEAFRELPFNRRILYALGNVSYMRGNYFAAQGYYDRLLEILEDDRSRFPVIAPTDDEDQLDVVERLMVAQNNLGVVLEALTERTGNKSYRSRAQGLYSDSERAWDVLTRNPVSMIRMRPSPDIMAPSVNPAYLNIQNTLYPIPGYEHQFFLRVDRDVLEPSLWEDLAPPGFRLSEGIHTGR

SEQ ID NO: 63479 - DNA, 957 bp, Unknown
  Obtained from environmental sample
  misc_feature (1)..(957): n is a, c, g, or t
ttggatttgcctgaatttggtgaaagtgaaagcgaaggagagccgctgtcggatgaggcttttacggatgctttcaatgatgtttcatccgggactgcggaggaaggcgcggaggaaggcgcggaagaagcgcttgatatgtcaagctttggtttggatatgcctgattttggaggcgatgaaagccaggcgtctttcggagaagaagagccggaagttgagtatcctccgtttgacgctgaaacaacagacacagaaagcgatgaagaggcttttggtttcaacgaagagcttcccgccggcgatgaggcaatactggaagaagttcctggcgatgcttttgacaggtttagcccggaatccggttcattgggtgaagactttgacgtcggcggtggagaagcattcggcgcagatgaattcggcagccttgatgattttccgatccccggactagatatcggcattgatgataaggctcccggaaaaggcaaaaaagctggcaagaagggcaagtcctcaaaaggcagggaaagcgatgataaagaaataagccttaccctggaggagttggatcttttacaggagactctctctttttatccactaaatctaagaatagcctgcgaagagctcattgctgaacaagctgtcgcgccggagcagatgtcccggctgattaacctcctcgtagaaggagcgcccgccgaagagactgccgccctggcaggaaaaatactggacaaaaccatacccattccaaagggctatgagagaagaaccggcgaggatatggaagctgaacagtccagttttccatatatttttgtgcacaccttccttcccatgttggcgcgctttatggctattgccattgttgttttctgcgctggctacctttcctggcaatacatctataatcccattaangctgaaaaatatacaaacttggtatag

SEQ ID NO: 63480 - protein, 318 aa, Unknown
  Obtained from environmental sample
  misc_feature (1)..(318): Xaa is any amino acid
MDLPEFGESESEGEPLSDEAFTDAFNDVSSGTAEEGAEEGAEEALDMSSFGLDMPDFGGDESQASFGEEEPEVEYPPFDAETTDTESDEEAFGFNEELPAGDEAILEEVPGDAFDRFSPESGSLGEDFDVGGGEAFGADEFGSLDDFPIPGLDIGIDDKAPGKGKKAGKKGKSSKGRESDDKEISLTLEELDLLQETLSFYPLNLRIACEELIAEQAVAPEQMSRLINLLVEGAPAEETAALAGKILDKTIPIPKGYERRTGEDMEAEQSSFPYIFVHTFLPMLARFMAIAIVVFCAGYLSWQYIYNPIXAEKYTNLV

SEQ ID NO: 63481 - DNA, 603 bp, Unknown
  Obtained from environmental sample
  misc_feature (1)..(603): n is a, c, g, or t
ttgcccttcttgccagcttttttgccttttccgggagccttatcatcaatgccgatatctagtccggggatcggaaaatcatcaaggctgccgaattcatctgcgccgaatgcttctccaccgccgacgtcaaagtcttcacccaatgaaccggattccgggctaaacctgtcaaaagcatcgccaggaacttcttccagtattgcctcatcgccggcgggaagctcttcgttgaaaccaaaagcctcttcatcgctttctgtgtctgttgtttcagcgtcaaacggaggatactcaacttccggctcttcttctccgaaagacgcctggctttcatcgcctccaaaatcaggcatatccaaaccaaagcttgacatatcaagcgcttcttccgcgccttcctccgcgccttcctccgcagtcccggatgaaacatcattgaaagcatccgtaaaagcctcatccgacagcggctctccttcgctttcactttcaccaaattcaggcaaatccaaatcaaagcttggtagatctgattccgattttgctaaattttccagagcctcttctccggcgagctctatgctttcgcctgaaccataa

SEQ ID NO: 63482 - protein, 200 aa, Unknown
  Obtained from environmental sample
  misc_feature (1)..(200): Xaa is any amino acid
MPFLPAFLPFPGALSSMPISSPGIGKSSRLPNSSAPNASPPPTSKSSPNEPDSGLNLSKASPGTSSSIASSPAGSSSLKPKASSSLSVSVVSASNGGYSTSGSSSPKDAWLSSPPKSGISKPKLDISSASSAPSSAPSSAVPDETSLKASVKASSDSGSPSLSLSPNSGKSKSKLGRSDSDFAKFSRASSPASSMLSPEP

SEQ ID NO: 63483 - DNA, 1071 bp, Unknown
  Obtained from environmental sample
  misc_feature (1)..(1071): n is a, c, g, or t
ttggcattgatcagatcggcagaggctagcctcctccgagactacttcgcgttcccagaaaggttcatgttcattgatctatacggcttagacgccctaacgcggggcgacggaagcgcggcctccgccctctctctgcaagtacgcttcgaccggaagctctctgcaaaggtatcgctctcgcgggatacgttcaaactgcactgcgcaccggccgtaaacgtattccgtcgcgacgcggagccgatactcgtagacggcaggaagcacgagtacgaactcgtctccgacgccgggcgcccggaatgcttcgccatacacagcgtggcctcggtcgtggggatagacagcgccaccggcgcgcggcgcaactacgaacgatactgcaagacggggggcggcaaacaacgcttctactccctgcgcgcggaggaactctccggcgacggactgctctacaacaacgacagacgcctgaaactgtcgatgaacggccgccaaacggaggacgggcgactcatacgggagacgctccacatagaggcttggcaaacaaacggcaccttggcgcgaaaggtgctaaccgaaggcgccgcgctgcacaaggccgcgccggagttcccggactacatcacattcacaaatatcacaaaacccagaccgcctatcaatccgccgagcggtgatgaatacctttggacattcctctcgcacatagcaagcgcctacacaaacttcggcgaagcggagcgcctgaaagaactgctgcgaacctatgactggagcggacgcgccgagctgcgcccggagatagaggctattcgctcggtatcgataacgccacgcgacctgtcggttgacagggcggtaataaggggcgcggagatgaacatcgtcgcggacgagcgcgccgcgccggaggaaagtctatttttactaggaacggtattggcaagaagcctctcgtgtatggcctccataaatacgtttctcaaactggtacttacgctgcccgtgtcaggcaaaagccacgagtggtactgcaggtcgggggagaggtgggcggtatga

SEQ ID NO: 63484 - protein, 356 aa, Unknown
  Obtained from environmental sample
  DOMAIN (1)...(356): Bacterial protein of unknown function (DUF879)
  misc_feature (1)..(356): Xaa is any amino acid
MALIRSAEASLLRDYFAFPERFMFIDLYGLDALTRGDGSAASALSLQVRFDRKLSAKVSLSRDTFKLHCAPAVNVFRRDAEPILVDGRKHEYELVSDAGRPECFAIHSVASVVGIDSATGARRNYERYCKTGGGKQRFYSLRAEELSGDGLLYNNDRRLKLSMNGRQTEDGRLIRETLHIEAWQTNGTLARKVLTEGAALHKAAPEFPDYITFTNITKPRPPINPPSGDEYLWTFLSHIASAYTNFGEAERLKELLRTYDWSGRAELRPEIEAIRSVSITPRDLSVDRAVIRGAEMNIVADERAAPEESLFLLGTVLARSLSCMASINTFLKLVLTLPVSGKSHEWYCRSGERWAV

SEQ ID NO: 63485 - DNA, 717 bp, Unknown
  Obtained from environmental sample
  misc_feature (1)..(717): n is a, c, g, or t
gtgcttgagcgggagttttactcgttcgacgtcctgcagttggtcgcggttatcgaggaattgtcggagtatgggggtgacggcgttggtactgataaaggtaacggccggcggatattctttgaagtcgacgccgacctgtcgtttccgccgagcgacgtgagttatgtggggattgatccagacctaggcatgaccgtccgtctgccggttatgaacctattgggctcctcctccccgctgccggtcaacttctccgaccacataaccagggggcgccgcgacgccgatatgtacgccgacttcctatccatcatgcagaaccgcatgcacgtcctgtggcttgacgcgtgccgtaagtactcgctttggggcggaggcggggcggtcgctgaaaagatcttcaagtttatgaccgggttgtcgatagaaaaatccgggttcctcgaatcggcgccgaccgggctttggccgctggcgaacaggactaggagcgttcagggtttaaaggagttgctgttcgcggtgtgggccgaaattcctattaatataggggagaatgtcggccgctgggcggcggtatcgatacgcccgccccctcggcggaggggcgcgtccggacaaaaaccgcgcccttgggtagctcgggtctacgaacggacgatcaacacttcacggataatcgatattccctgcagccacgggggatccatctag

SEQ ID NO: 63486 - protein, 238 aa, Unknown
  Obtained from environmental sample
  DOMAIN (3)...(226): Protein of unknown function (DUF1305)
  misc_feature (1)..(238): Xaa is any amino acid
MLEREFYSFDVLQLVAVIEELSEYGGDGVGTDKGNGRRIFFEVDADLSFPPSDVSYVGIDPDLGMTVRLPVMNLLGSSSPLPVNFSDHITRGRRDADMYADFLSIMQNRMHVLWLDACRKYSLWGGGGAVAEKIFKFMTGLSIEKSGFLESAPTGLWPLANRTRSVQGLKELLFAVWAEIPINIGENVGRWAAVSIRPPPRRRGASGQKPRPWVARVYERTINTSRIIDIPCSHGGSI

SEQ ID NO: 63487 - DNA, 696 bp, Unknown
  Obtained from environmental sample
  misc_feature (1)..(696): n is a, c, g, or t
ttgcctacaccgagggtttttattaccggcccccgtgttgatgaagaattgctgaagcaataccacggcgggcttatcgccctttccgcctgtgtttccggcgaaataccccggcttatccgcgcgggaaaaaccgccgaagcggaacaaaaggcccttcactaccgcgaacttttcggcgcggatgagcagggaaaccccaacttttacctggagttgcaggatcacggcattcccgccgacgtactgagaggctccctctcccagcgggagattaacagggagatcatcgccatttcccgcaaaaccggcatacctctggttgcgactaatgacgtgcattatcttaaccgtgaagattatattgcccatgacattctgctctgcatcggcaccgccaaattccgcaccgatgaaaaacggaaaaaatacttcggcgagcagttttactttaagaccgccgatgaaatggccaggctctttgccgattgccccgaagccgttgaaaacaccgtccgcattgcccggcgctgcgccgccgacgttccgaagatcggcgtcaaagaattaacccggtatctgcccgattttgatattccgcctgattttgaaaatgccgatgtgtacctgcgccaccttgcggtcgagggccttgccaaacgttatgcgaaagaaaaggcagccgccaggtattga

SEQ ID NO: 63488 - protein, 231 aa, Unknown
  Obtained from environmental sample
  misc_feature (1)..(231): Xaa is any amino acid
MPTPRVFITGPRVDEELLKQYHGGLIALSACVSGEIPRLIRAGKTAEAEQKALHYRELFGADEQGNPNFYLELQDHGIPADVLRGSLSQREINREIIAISRKTGIPLVATNDVHYLNREDYIAHDILLCIGTAKFRTDEKRKKYFGEQFYFKTADEMARLFADCPEAVENTVRIARRCAADVPKIGVKELTRYLPDFDIPPDFENADVYLRHLAVEGLAKRYAKEKAAARY

SEQ ID NO: 63489 - DNA, 372 bp, Unknown
  Obtained from environmental sample
  misc_feature (1)..(372): n is a, c, g, or t
atgagcgattttgtccatctccacgtacattccgacttctctctgcaggatgccgctgtttcggtgatgcagttggcggacagggcggaagaactggggatgagccacctggcattgaccgatcacggcaatatgttcgggataatggaatttattgccacctgccaaaaacgggaaaagccggtaaatcccataatcgggtgcgaagtatatgtttcgccggattcccgctttgaaaaaaaaggaaccgaaaacgaaaacaagtactaccacctggtactgctggtgacaaaccgcgagggttactttaatctggtaaaactctgttcccttgcctacaccgagggtttttattaccggcccccgtgttga

SEQ ID NO: 63490 - protein, 123 aa, Unknown
  Obtained from environmental sample
  DOMAIN (5)...(115): PHP domain
  misc_feature (1)..(123): Xaa is any amino acid
MSDFVHLHVHSDFSLQDAAVSVMQLADRAEELGMSHLALTDHGNMFGIMEFIATCQKREKPVNPIIGCEVYVSPDSRFEKKGTENENKYYHLVLLVTNREGYFNLVKLCSLAYTEGFYYRPPC

SEQ ID NO: 63491 - DNA, 417 bp, Unknown
  Obtained from environmental sample
  misc_feature (1)..(417): n is a, c, g, or t
ttgacccggcaaattatgcctaaaacgtccgtcttaggaaaagaaggggaagaaaaagccgccgccgcccttgaagccgcaggaatgaagataatatgcagaaattaccgctcaaaaaccggggaaatcgatattatcgccattgacggggaaacaatcgtttttgtagaggtaaaatcctggtctgtttacggcatggaagacttgcaatacagcctggataacaaaaaaaagcataaaatcatcaaaaccgctaattttttcctctcagaaaatcgaaaatatagtaatatggcaattcgttttgacgtcgtttttgtcaataatagcaagaatagcaaagaatccgacggattcaaggaatccaacggattccagcttacccatcttgcgtcagccttcacggagagtgtatga

SEQ ID NO: 63492 - protein, 138 aa, Unknown
  Obtained from environmental sample
  DOMAIN (15)...(108): Uncharacterised protein family UPF0102
  misc_feature (1)..(138): Xaa is any amino acid
MTRQIMPKTSVLGKEGEEKAAAALEAAGMKIICRNYRSKTGEIDIIAIDGETIVFVEVKSWSVYGMEDLQYSLDNKKKHKIIKTANFFLSENRKYSNMAIRFDVVFVNNSKNSKESDGFKESNGFQLTHLASAFTESV

SEQ ID NO: 63493 - DNA, 543 bp, Unknown
  Obtained from environmental sample
  misc_feature (1)..(543): n is a, c, g, or t
atgaaattattgatgttacacaggaaggcggacgtcatgagcggcagcggaaaaggcggaaataaccgaaagaaccgacagcgtttctccggtcggagagacgattctcaaaaacatttaaagaaatataatcagacaaacactcacgaagatttattttttgacgggaaaacggaaaaaaataaattgagtatgtatgagcgcccaaaatggacgactcccgaattacccgcaaatccgataaccactcccgattgtccgtggtgcggaaaaaagatcaacgatattacaacttcaataacagataaagataccggacttcccgtacactttgattgcgttcttgcgcggattgcggaaacggaaaagctggaagcaaacgacagtgtttgttacattggaggcggacgttttgggataatacattataccaatccgccggagacaaagggctttaccataaaaaaaatatttgagtgggaagccaaagacgttgtcagcgaatggcggcgtccgataagcgaatatttttcgataacataa

SEQ ID NO: 63494 - protein, 180 aa, Unknown
  Obtained from environmental sample
  misc_feature (1)..(180): Xaa is any amino acid
MKLLMLHRKADVMSGSGKGGNNRKNRQRFSGRRDDSQKHLKKYNQTNTHEDLFFDGKTEKNKLSMYERPKWTTPELPANPITTPDCPWCGKKINDITTSITDKDTGLPVHFDCVLARIAETEKLEANDSVCYIGGGRFGIIHYTNPPETKGFTIKKIFEWEAKDVVSEWRRPISEYFSIT

SEQ ID NO: 63495 - DNA, 504 bp, Unknown
  Obtained from environmental sample
  misc_feature (1)..(504): n is a, c, g, or t
atgaatgtacaaattttagttgtcgaggacgatacgcggatacaggatatggtatgcaaatttttccgcaaggaaggatggcttgtggacgcgtgcgtcaatggcgataaagcattggaattattctacgataaacattatcatcttgtcattttagacataatgctgcccggaatgaacgggcaagagcttttgaaagagcttaggtttatccgcgacacgccggtattgatgatgactgctctttcggacgacgatagtcaattacgggcgttcaataaccgcgcggacgactatgtgactaaacctttttccatgcaaattcttgtcaaacgggctgaagccctgctccggcgcagcggggcgttgaaaaaggaaattcaggcaggcaagctcctcttatttcccgaaagctacggcgttgattatggcggcgtaaagattgcgttaacgccaaaggaattcgagatagggaattgttcgcgcgaaatgcagggaaaataa

SEQ ID NO: 63496 - protein, 167 aa, Unknown
  Obtained from environmental sample
  DOMAIN (3)...(114): Response regulator receiver domain
  misc_feature (1)..(167): Xaa is any amino acid
MNVQILVVEDDTRIQDMVCKFFRKEGWLVDACVNGDKALELFYDKHYHLVILDIMLPGMNGQELLKELRFIRDTPVLMMTALSDDDSQLRAFNNRADDYVTKPFSMQILVKRAEALLRRSGALKKEIQAGKLLLFPESYGVDYGGVKIALTPKEFEIGNCSREMQGK

SEQ ID NO: 63497 - DNA, 915 bp, Unknown
  Obtained from environmental sample
  misc_feature (1)..(915): n is a, c, g, or t
atgcctatcaaaattccaagggatctgcctgcatacaacgccttaacggatgagcgggtttttgtaatgaccgatgatcgggcggagcatcaggacatacgcccgctaaagatcgcgattgtaaacctgatgccgaccactgtagacacggagatacagttgctccgccttttggggaacacacccctgcaagtcgatattagttttttgcgtatgggaagccacgaatcccgaaacgccccgccgggacacctggacaagttttacacccgcgccgttgacataatgaagcagggttcctattacgacggctttatcatcacaggcgcgcctgtggaaactctgccttttgaagaggtggattactggaacgagcttgtttccgttattgattttgcgaatgaaaatgtatggtcaactctgcacatttgctggggcgctcaagcgggcctttacaggcgctacggcattccgaaaaaaccgcttgagcaaaagctctttggaatttttccccacggtgtaaacgagcgtttttctccgcttttccgcggctttgacgacgagtttctggcgccccagtcacgccacaccgcaagcgacagggacgccatagccgcagaaaaagcgctgactattcaatcagaaactcccgaaaccggcgtctttatagccactgcaaaagggggccgtgaaatttacgttacaggccatctggagtacgatccccttacgcttgacaaggaataccgccgcgatttggaaaaagggcttgctattgcgatcccaaaaaattataccccggcgatgatccatcacagcacccgattgtacgctggcgggctcatgcgcatctttttttctccactggcttactatgtgtatcaggaaactccctataatcctggggaactttaa

SEQ ID NO: 63498 - protein, 304 aa, Unknown
  Obtained from environmental sample
  DOMAIN (2)...(299): Homoserine O-succinyltransferase
  misc_feature (1)..(304): Xaa is any amino acid
MPIKIPRDLPAYNALTDERVFVMTDDRAEHQDIRPLKIAIVNLMPTTVDTEIQLLRLLGNTPLQVDISFLRMGSHESRNAPPGHLDKFYTRAVDIMKQGSYYDGFIITGAPVETLPFEEVDYWNELVSVIDFANENVWSTLHICWGAQAGLYRRYGIPKKPLEQKLFGIFPHGVNERFSPLFRGFDDEFLAPQSRHTASDRDAIAAEKALTIQSETPETGVFIATAKGGREIYVTGHLEYDPLTLDKEYRRDLEKGLAIAIPKNYTPAMIHHSTRLYAGGLMRIFFSPLAYYVYQETPYNPGEL

SEQ ID NO: 63499 - DNA, 465 bp, Unknown
  Obtained from environmental sample
  misc_feature (1)..(465): n is a, c, g, or t
gtgtcaaagtcgatgcaaaaaatacttaggcagaagatctttacggttactttcaataaggatttctcaggcgtaatcacttcctgctccaaggcaaaaagacctggtcagtacggtacatggattaccaatgacataatagaagcctacactgaacttcaccgcctgggctgggcgcactcggcggagacgtatcttgacggagaattgtccggcggctgctatggcatactgataggggaaatttttttcggcgaatccatgttcagcagaaagcccaacgcaagtaaggccgcttttattacccttgcacagatgctttttgaaaatggcgtgcgtctcatcgactgccagcagcacacgcctcaccttggaagcctgggggcggaagacataagcagaacggaatttatcgccctgctaagagacgcggtaaggggcaaggcaactacatttaaagactaa

SEQ ID NO: 63500 - protein, 154 aa, Unknown
  Obtained from environmental sample
  DOMAIN (1)...(134): Leucyl/phenylalanyl-tRNA protein transferase
  misc_feature (1)..(154): Xaa is any amino acid
MSKSMQKILRQKIFTVTFNKDFSGVITSCSKAKRPGQYGTWITNDIIEAYTELHRLGWAHSAETYLDGELSGGCYGILIGEIFFGESMFSRKPNASKAAFITLAQMLFENGVRLIDCQQHTPHLGSLGAEDISRTEFIALLRDAVRGKATTFKD

SEQ ID NO: 63501 - DNA, 561 bp, Unknown
  Obtained from environmental sample
  misc_feature (1)..(561): n is a, c, g, or t
atggattacgcaacccttaccgacaacaatggccgcaaggcggatttcaggcacgttatactaatcatgaccagcaacgccggagcaagggacatagggaaaagccttatcggtttcggtgagcggattgaagacgagaccgtagttgacgacgcggtagaaaaaatctttaccccggaattcagaaaccgtctggacgccatagtccgcttcggccacctgtcaaaagaaataatgacttctatcgtaaacaaggagcttaaaactttcagggcgcagttggcggagaagaaggtaactcttgaggtttccgaagcctgtgtcaaccagcttgccatcgaagggtactcaagggaatccggggcgcgaaacgtaggacgccttattgaagaccggataaaatccttctttgtggacgaagttctctttggccggcttgaatccggcggtcacgccagcgcggattacgttgatggagaatacataattgagatcgttgattcgagccggagggaagaagacgaaaccgaactgggagtttgtcaggcttccagtaactga

SEQ ID NO: 63502 - protein, 186 aa, Unknown
  Obtained from environmental sample
  misc_feature (1)..(186): Xaa is any amino acid
MDYATLTDNNGRKADFRHVILIMTSNAGARDIGKSLIGFGERIEDETVVDDAVEKIFTPEFRNRLDAIVRFGHLSKEIMTSIVNKELKTFRAQLAEKKVTLEVSEACVNQLAIEGYSRESGARNVGRLIEDRIKSFFVDEVLFGRLESGGHASADYVDGEYIIEIVDSSRREEDETELGVCQASSN

SEQ ID NO: 63503 - DNA, 1488 bp, Unknown
  Obtained from environmental sample
  misc_feature (1)..(1488): n is a, c, g, or t
atgaatatacgagaccgctacgccccttctcctacaggatttcagcatatcggcgggataaggacagcgcttttcaattatcttttcgcccgttccaaaggagggaaattcatcctgcggctggaagatactgaccgtacccgctccgaagattgttatgtgcaaaacctttacgatacatttcaatggctgggtgttaaatgggacgaaggtcctgataccggaggcgtgtttgccccttatattcagtcggaacgcagcggcttatacaaaaaatacgcgcaggaactggttgataaagggcaggcttattattgtttctgcacggcggagaggatagaaaaagtcaggcaggaacgggaagcttctcattcttctgaaacaggctatgatcgccgttgccgcgcaattgatccgcaggaagcggcaaaaagagccggcgcaggcgaagcttgcactgtcagactgaaaatcccgcttggcgaaaccacccgctttttcgatcacctgctcggcgatattgaatggaagaatgacgatgtgaaccccgatcctgtcttgttaaaatcagacggtttccctacctatcaccttgcaaatgtagttgacgatcatttaatggaaataagccatgtcatgcgcgcccaggagtggctcgcgtccacgccgttacacgtaatcatgtacaggagcttcggctgggcggcgcccgagtactgccaccttcccatggttatgggccaggacgggaaaaaactcagcaaacgccacggcgcgaccagcattgacgaattcaggaagcagggctatctgcctgaggcgctgatcaactatgtcgccctgcttggcgcgtcttatgaagaaggaagggatatatttaaactgagcgagcttgaacagttgttcagcatagacaaactcaacaaggccccggctattttcgattacaaaaaactggaatggttcaacggccagtacatcaggatgaaaagcgacgaggaactcgcggccctttgccttccctccgccgtagaagcgggtcttttcggcacaaaaggggccgagccatcaccggatcagaaaaaaatcttcattgccgccatgccccttatccgcgaacgcctgacctacacccatgaggccgcgggaaaaatagcttatctgttcgcgcctcccgagttgcccgctaaggaagaattcatccccaaaaaggctgaccttgccgaatcgatcaggctgttgcggctttcgcgggacatggttaaccatctcgccaacgcggttaacgacacggcggcggaagcgtacatcaaggaacaggccgaaaaagccgcagtcaagttaggcgatctgatgatgcccctgcgcgtcgccattaccggcagccgcgtcagccctccccttttcggctcgcttcggattttaggagcggaagagtcgctggcgcgggttgagaaggctttggaacaaatagcaaaaagcaattag

SEQ ID NO: 63504 - protein, 495 aa, Unknown
  Obtained from environmental sample
  DOMAIN (2)...(321): tRNA synthetases class I (E and Q), catalytic domain
  misc_feature (1)..(495): Xaa is any amino acid
MNIRDRYAPSPTGFQHIGGIRTALFNYLFARSKGGKFILRLEDTDRTRSEDCYVQNLYDTFQWLGVKWDEGPDTGGVFAPYIQSERSGLYKKYAQELVDKGQAYYCFCTAERIEKVRQEREASHSSETGYDRRCRAIDPQEAAKRAGAGEACTVRLKIPLGETTRFFDHLLGDIEWKNDDVNPDPVLLKSDGFPTYHLANVVDDHLMEISHVMRAQEWLASTPLHVIMYRSFGWAAPEYCHLPMVMGQDGKKLSKRHGATSIDEFRKQGYLPEALINYVALLGASYEEGRDIFKLSELEQLFSIDKLNKAPAIFDYKKLEWFNGQYIRMKSDEELAALCLPSAVEAGLFGTKGAEPSPDQKKIFIAAMPLIRERLTYTHEAAGKIAYLFAPPELPAKEEFIPKKADLAESIRLLRLSRDMVNHLANAVNDTAAEAYIKEQAEKAAVKLGDLMMPLRVAITGSRVSPPLFGSLRILGAEESLARVEKALEQIAKSN

SEQ ID NO: 63505 - DNA, 540 bp, Unknown
  Obtained from environmental sample
  misc_feature (1)..(540): n is a, c, g, or t
atggcaaacaagctggcgaaaatccaaaacatgatttatgaaattcgggggcaaaaggtcatgctcgaccgcgaccttgcggatttatatggagtggaaataaaacgcttaaatgaaagcgtaaaacggaatattggccgttttccgtctgactttatgatccaattgacagatatagaatggtcaaatctaaggtcgcaaattgcgacctttaataacgataccagaaaatacaggccttttgcttttaccgaacatggaatactaatgctctcaagcattttaaactctgacaaggcaattaaaataaacattcatataatgaagatatttgtaaaaatgcgtcattatatactttctcaaaatgggacaaatgaacaaattgctgaattacggaaactgttcatggtctacattgaaaatactgactataaacttttaaaacacgacaagacaattggacaaatcattatcgctctgaacaaccttattgacaaaccgcccaaaaccaaaaggatagggttcaacgccggaaattaa

SEQ ID NO: 63506 - protein, 179 aa, Unknown
  Obtained from environmental sample
  misc_feature (1)..(179): Xaa is any amino acid
MANKLAKIQNMIYEIRGQKVMLDRDLADLYGVEIKRLNESVKRNIGRFPSDFMIQLTDIEWSNLRSQIATFNNDTRKYRPFAFTEHGILMLSSILNSDKAIKINIHIMKIFVKMRHYILSQNGTNEQIAELRKLFMVYIENTDYKLLKHDKTIGQIIIALNNLIDKPPKTKRIGFNAGN

SEQ ID NO: 63507 - DNA, 666 bp, Unknown
  Obtained from environmental sample
  misc_feature (1)..(666): n is a, c, g, or t
atgcatcccgaagctaaagcaagacttataattgacaaaaaactcgccgattcaggctggctgcttcaggattataaaggtgaatttaaccctgcggcttctttgggcgttgcggtacgtgaatttccaacaagttccggtcctgcggactatatgctgtttattgataaaaagccggttggcgtagttgaagccaaaaaatccgatgaagggcaaaatatcacatcatcagaaattcaaagtcttcgctatgctaacagcagtctaaaatggcaaatacaagggcatcctatccgctttgtttatgaatctaccgatatacttacccgctttaccgattacgccgatataaatgaacgctcaagagaagttttttcttttcaccgtcctgaaacgttattagcactttccaaagatgactcaaccttgcgaaaccgccttaaaaactttcctaattttaactcaaagggtttccgtgattgtcaaactaaagcgatcatcaatttggaaaaatcgtttgccgccaataaaccccgtgcgttaatccaaatggcgacaggagcgggcaaaacctttaccgccattaccaacacatatcgcctgctgaaacatggacgggcaaagcgcattctttttctggtggatacaaaaaatttgggttcataa

SEQ ID NO: 63508 - protein, 221 aa, Unknown
  Obtained from environmental sample
  DOMAIN (1)...(120): Type I restriction enzyme R protein N terminus (HSDR_N)
  misc_feature (1)..(221): Xaa is any amino acid
MHPEAKARLIIDKKLADSGWLLQDYKGEFNPAASLGVAVREFPTSSGPADYMLFIDKKPVGVVEAKKSDEGQNITSSEIQSLRYANSSLKWQIQGHPIRFVYESTDILTRFTDYADINERSREVFSFHRPETLLALSKDDSTLRNRLKNFPNFNSKGFRDCQTKAIINLEKSFAANKPRALIQMATGAGKTFTAITNTYRLLKHGRAKRILFLVDTKNLGS

SEQ ID NO: 63509 - DNA, 813 bp, Unknown
  Obtained from environmental sample
  misc_feature (1)..(813): n is a, c, g, or t
atgcaggcaaagagaattattccctgccttgatgttgacgacggcagagttgttaaaggagtaaagtttgaaggtatacaggacgcaggcgatcctgtagaacttgcccgccgttacaacgatgacggcgctgacgaacttacttttcttgacatcggcgcttcatacaaaagccgcgctacattgcttgacgtagtgaacaaagtagccgccgaagtttttataccgctttgcgtcggcggaggtatccgtaccattgacgatatgcgagaagcaatgaacgccggagcggataaagtttctgtctgcactgccgccctgaaacaccccgaattgttacgtgaaatggcttatgcctacggcagccaatgcgtagtgctttcgatagacgcaaagcgcgtaaacagcgctgacggtcaactgcgctggaacgcattttcccgcggcggcaggactgacacaggaattgacgcaattgagtgggcgattcgggcagttgaacttggagcaggagaaattcttctcaattccattgacgcggacggcacgggcgcaggctacgatcttgagcttacacgccgcatccttaacgcggttccggttcctgtaatcgcttcaggcggagcgggcactctcgaacagattgcaaatgttttactcaatactattaatcctgaaatgggcatggctcttcccgaacaagcgcccggcgcagacgccgcattgcttgcgtcgcttttgcacttcggaaaaaccacgatcagagagataaagcaatttgcggaggcgaagggcgtttgcgttaggtggtga

SEQ ID NO: 63510 - protein, 270 aa, Unknown
  Obtained from environmental sample
  DOMAIN (5)...(253): Histidine biosynthesis protein
  misc_feature (1)..(270): Xaa is any amino acid
MQAKRIIPCLDVDDGRVVKGVKFEGIQDAGDPVELARRYNDDGADELTFLDIGASYKSRATLLDVVNKVAAEVFIPLCVGGGIRTIDDMREAMNAGADKVSVCTAALKHPELLREMAYAYGSQCVVLSIDAKRVNSADGQLRWNAFSRGGRTDTGIDAIEWAIRAVELGAGEILLNSIDADGTGAGYDLELTRRILNAVPVPVIASGGAGTLEQIANVLLNTINPEMGMALPEQAPGADAALLASLLHFGKTTIREIKQFAEAKGVCVRW

SEQ ID NO: 63511 - DNA, 612 bp, Unknown
  Obtained from environmental sample
  misc_feature (1)..(612): n is a, c, g, or t
gtgattggcgtaattgactacggagcgggaaatctcggctctgttatgaacgctcttaaacggctcggcgtttcagcccgttttgcggccggaccggaagaacttttactttcgtcttctccatttgaaaagataattttccccggagacggacatttcgctaccgcaatggcatcgataaacaaatcaggttatgcgcaagcgataaaggattggataaaagcggacaaaccttttttgggtatttgtatcggtttacagttgttgtttgaaacttccgaggaggccccgaatgtgcagggtctttcggtaattccgggaacggtgcggcgttttccggggcgtaaagttccgcagattggctggaatcaaactgccgccggaaaagaatcaaaaatcttccgcggtttaaatgataatagtttcttctattatatacattcatactacgccgatccggcggacaatgcggtatgcgcggcgcaaaccgattattatctccggtactgctgcgctgtagagtgcggcgctctggcggcagtgcagtttcatcccgaaaaatcaggctctacagggcttgcgcttttgaaaaattggacggagggcgtataa

SEQ ID NO: 63512 - protein, 203 aa, Unknown
  Obtained from environmental sample
  DOMAIN (40)...(155): CobB/CobQ-like glutamine amidotransferase domain
  misc_feature (1)..(203): Xaa is any amino acid
MIGVIDYGAGNLGSVMNALKRLGVSARFAAGPEELLLSSSPFEKIIFPGDGHFATAMASINKSGYAQAIKDWIKADKPFLGICIGLQLLFETSEEAPNVQGLSVIPGTVRRFPGRKVPQIGWNQTAAGKESKIFRGLNDNSFFYYIHSYYADPADNAVCAAQTDYYLRYCCAVECGALAAVQFHPEKSGSTGLALLKNWTEGV

SEQ ID NO: 63513 - DNA, 1020 bp, Unknown
  Obtained from environmental sample
  misc_feature (1)..(1020): n is a, c, g, or t
gtgattacccccgaaatagtggataaatcgctttggataaaaagcggccatgcagacaaatacgattccaatatgttcaaaaccttggcaggcgagaaagatatggcggtaaagcctatgaactgcccctgtcatattgaaattttcaatcagggtttgaaaagctggcgcgacttgccgcttcgctttgccgaatttggaaaatgccaccgcaacgaaccagccggcacaatgcacggcttgatgagagttcgcggctttgttcaagacgatgcccatatattctgcaccgaggagcaaatcactcaggaagtgagcagtttttgcacattggtaaaagacctttacaaagtctttggctttgaaaaaataaccgtgaaattcagcacacgcccagaactcagaattggctcagacgaactttgggacaaagcggaaaattccttggaagaagccacaaaacttgctggcttggaattcaagttaaacccaggtgaaggtgcattctatggaccaaaactggaatttgtgctcaaagattctttgggcagagactggcaatgcggcactatacaggtggatttcaatatgccgggccgccttggagcggaatatgttggcaaagacaaccaaaaacacacgcccgttatgctgcaccgcgccgccttaggctcacttgaacgctttataggcattctaaccgaagaattcgcaggtgatttcccattttggctcgcccccgtacaagttcgcgttttgcccgtttccgaaaaattttcagaatatgcggagaaaattcacaaggaactcgtggagaaaggcattcgcgctgagatagacaactcaaacgaaaaggtcggctacaaaattcgcttgggcgaattagcgaagataccttatttgcttgttgttggcgaaaaggaaattgcagaaaacgccgtatctgttcgcaagaggaaagagggcgatttggggaaaaagagcttgggggagtttttgaaagagattgccctcagttag

SEQ ID NO: 63514 - protein, 339 aa, Unknown
  Obtained from environmental sample
  DOMAIN (249)...(339): Anticodon binding domain
  misc_feature (1)..(339): Xaa is any amino acid
MITPEIVDKSLWIKSGHADKYDSNMFKTLAGEKDMAVKPMNCPCHIEIFNQGLKSWRDLPLRFAEFGKCHRNEPAGTMHGLMRVRGFVQDDAHIFCTEEQITQEVSSFCTLVKDLYKVFGFEKITVKFSTRPELRIGSDELWDKAENSLEEATKLAGLEFKLNPGEGAFYGPKLEFVLKDSLGRDWQCGTIQVDFNMPGRLGAEYVGKDNQKHTPVMLHRAALGSLERFIGILTEEFAGDFPFWLAPVQVRVLPVSEKFSEYAEKIHKELVEKGIRAEIDNSNEKVGYKIRLGELAKIPYLLVVGEKEIAENAVSVRKRKEGDLGKKSLGEFLKEIALS

SEQ ID NO: 63515 - DNA, 660 bp, Unknown
  Obtained from environmental sample
  misc_feature (1)..(660): n is a, c, g, or t
atgaacattaccaagaaaatgatttcatgtgattgtcagaacaagagttgcaaagaatttgccggctgttgttttacggctaccgaggtggtcataatggacggaagcaacgtaggcgacggttacggcgatattcacctgatgtttgtcggtcagggcgcgggcaaggatgaggacataaacatgaatccgcgcaacctgatgcgccagccttttgtgggcaaggccggggcctacctgcgcaacgtcataaaatttctgtgggacggcgggctgacgttcaacgtggcgataagcaactccgtcaggtttcatccgcttgacgccggcgggaaggacagggcgccgacgcagggggagctgaacgactgcatccatttactggacagggacatcgatactataaaaccaaaggcgcttgtggccctcggcatgtccacgtcgaacgctctggttccggagacaaccggcgcggtcatggggaagatcgccggattatcatatctatataagggtataaaaacggtgccgctgtaccatccgagttttttgactaggaactacggaaagttcactgcggaccaacgcggcgactaccacgtccggtgcgtggagatactgcggcatctggcgtcggaagctttaggtaccgcacgttaa

SEQ ID NO: 63516 - protein, 219 aa, Unknown
  Obtained from environmental sample
  DOMAIN (38)...(212): Uracil DNA glycosylase superfamily
  misc_feature (1)..(219): Xaa is any amino acid
MNITKKMISCDCQNKSCKEFAGCCFTATEVVIMDGSNVGDGYGDIHLMFVGQGAGKDEDINMNPRNLMRQPFVGKAGAYLRNVIKFLWDGGLTFNVAISNSVRFHPLDAGGKDRAPTQGELNDCIHLLDRDIDTIKPKALVALGMSTSNALVPETTGAVMGKIAGLSYLYKGIKTVPLYHPSFLTRNYGKFTADQRGDYHVRCVEILRHLASEALGTAR

SEQ ID NO: 63517 - DNA, 954 bp, Unknown
  Obtained from environmental sample
  misc_feature (1)..(954): n is a, c, g, or t
gtgggacagggaaacgggctcttcgcggagcttgagacggtcaaaggcacaatcgtgctgcaattggagtttgagaagacgccgctaaccgtggcgaacttcgtcgggctttccgagggaacaatcaagcacaataggggagagggcgtgcgcttctacgacgggctgaccttccaccgagttgagccgaacttcgtcattcagggcggcgaccccaacgccaacgggaccggcggccccggataccagttcgccgacgagataaaccctgacctcaaacactcctccgaaggcatcctctccatggcgaacgccggtccgggaacaaacggcagccaattctttataacgctctcggcgacgccgcacctcgacggacgccacgccgtcttcggcaaggtcgtcaaggggatggatgtcgtaaagaaaatagccaagggagacgctataaagaaggtcaacatcgtgaggtcaggcaagagcgccaaagagttcaagaccgaccagcaggcattcgaactctacgctcggcaacttgccgagaagaagggaaaggcggagatggagcagatagaaatgcagaaaaagatcattgccgagaaatacggcacggccaaaacgaccaacagcggaatatgctacatcattgataaaacgggagatgggaagaaaccggcgcaggggcagacggtcatagtccactataccggaacccttttgatagacgggaagaagttcgactcgtcgcgtgaccgcaacgaacctcttgatttccaagcgggcgtaggggaggtaatccagggttgggacgagacgatcctagacatgcggaagggcgagcgtaggactgtggtgctgccgccggaacttgcctacgggaaacgcggcgccggcggcgtcattccgcccaacgcgtatttggtgtttgatatcgagctgttggacattaaataa

SEQ ID NO: 63518 - protein, 317 aa, Unknown
  Obtained from environmental sample
  DOMAIN (220)...(314): FKBP-type peptidyl-prolyl cis-trans isomerase
  misc_feature (1)..(317): Xaa is any amino acid
MGQGNGLFAELETVKGTIVLQLEFEKTPLTVANFVGLSEGTIKHNRGEGVRFYDGLTFHRVEPNFVIQGGDPNANGTGGPGYQFADEINPDLKHSSEGILSMANAGPGTNGSQFFITLSATPHLDGRHAVFGKVVKGMDVVKKIAKGDAIKKVNIVRSGKSAKEFKTDQQAFELYARQLAEKKGKAEMEQIEMQKKIIAEKYGTAKTTNSGICYIIDKTGDGKKPAQGQTVIVHYTGTLLIDGKKFDSSRDRNEPLDFQAGVGEVIQGWDETILDMRKGERRTVVLPPELAYGKRGAGGVIPPNAYLVFDIELLDIK

SEQ ID NO: 63519 - DNA, 432 bp, Unknown
  Obtained from environmental sample
  misc_feature (1)..(432): n is a, c, g, or t
atgccgttggcgaatgtggagatttttgacttcgctccctattatttgactttccacccgcccttttttattttcaattacaatatgaacgtatccgccgcagccccgtccgcgcctaagccgcccaggttggcgccctttcttatatggcttatggtctccatacttggcaagacgtggcgtttcaacgtagtatcccctaagtctgtggacatttttgacgcccacgccgcgccgaagatttactgtttctggcactcaacgctgctcgtcgtctcctatctgttccgaaatacgggcaaaaccgccatagtctcgaagagccgcgacgggcttatagccgccggcgtggcggcgcggttgggccacgaggcggtctacgggtcgtcgcgcagagggggcgccggggcgctaagggacgctcggccataa

SEQ ID NO: 63520 - protein, 143 aa, Unknown
  Obtained from environmental sample
  misc_feature (1)..(143): Xaa is any amino acid
MPLANVEIFDFAPYYLTFHPPFFIFNYNMNVSAAAPSAPKPPRLAPFLIWLMVSILGKTWRFNVVSPKSVDIFDAHAAPKIYCFWHSTLLVVSYLFRNTGKTAIVSKSRDGLIAAGVAARLGHEAVYGSSRRGGAGALRDARP

SEQ ID NO: 63521 - DNA, 801 bp, Unknown
  Obtained from environmental sample
  misc_feature (1)..(801): n is a, c, g, or t
atgaatcaggacaatgtaaaacaaaaattattgtcaatcgaagacgcgccgcttgagttctcgcttatctattccggaaaaaaaagcaaaaaagtaaacggactttacaaacccgcctcaagagaaattataattcataaccgtaattttcaatcagacgacacagggcagaatttactgctctatacagcaatacatgaatacgctcatcatctgcacgcctgctcgcggggcggcacgctttcgccgagggcgcataacagcgagttttgggcgatttttcacgctttgcttgaaaaggctgaaaagaaaaaaatctacagcgatgttttttccgtttcgcctgagttgttaaaattgacggatgttatccgcagcaaattcttaaaaaacaacggagagcttgtaaaagaaatgggaaaacacctgctgaaagcccatgatctttgtacgggaataggcgtgcgattcgaggactatgttgacaggatgctgcgtattccaagaacagccgccaacatggcgataaaaatgtttgagtacgatattgcccccgaagtcggagccgataatatgcgctttcttgccggtatccgcgacggcgatgagcggaaagccgccgagagcgcgcttattaaaggcaaaagtcccgacagcgttaaagttcaggtgcgtaacaagaacaaggaagaagaccccgttgttttgctggaaaaagaaaaaacaagactggagagaacaattgccactctcagcaaacgtcttgatgaagttaaaaaggaattaaaagaaaaaaaatga

SEQ ID NO: 63522 - protein, 266 aa, Unknown
  Obtained from environmental sample
  misc_feature (1)..(266): Xaa is any amino acid
MNQDNVKQKLLSIEDAPLEFSLIYSGKKSKKVNGLYKPASREIIIHNRNFQSDDTGQNLLLYTAIHEYAHHLHACSRGGTLSPRAHNSEFWAIFHALLEKAEKKKIYSDVFSVSPELLKLTDVIRSKFLKNNGELVKEMGKHLLKAHDLCTGIGVRFEDYVDRMLRIPRTAANMAIKMFEYDIAPEVGADNMRFLAGIRDGDERKAAESALIKGKSPDSVKVQVRNKNKEEDPVVLLEKEKTRLERTIATLSKRLDEVKKELKEKK

SEQ ID NO: 63523 - DNA, 1218 bp, Unknown
  Obtained from environmental sample
  misc_feature (1)..(1218): n is a, c, g, or t
atgagaaaagtgtacattgattacaacgcgactactccgttaagaaaagaggtaatgtccgcgattacggaagatttggagatattcggcaacgcttccagtatgcacgcgtcgggaagactggctcacgcaagggtagagcaggcaagaagcgcgattaaagctcttatcggcgcaaaggacggaacaataattttcacgtcgggcgggtcggagtccaacaatactgtttttcaaacaatgcggcatttaatcgatacgtgcgcttcaaagaaccgcgatgaatttattacaacggctattgagcacccgtgcgtaatgaattcagcggcgtttttaaaagattcagggtataaagtcgccattctgcccgttgatgaatacggaaaacttaaaattgacgaacttgaaaaagcgcttaacgataaaactttatttgtatctgtaatgacagctaataatgaaatcggcactatacaggatattaagaaaattaccgctcttgtaaaaaaagcgggcgcttatatgcacgtagacgcggtgcaggctgtcggaaaaatcccgataaatgtggaagagcttggcgtagattatcttacaatgtcggcgcataaaatctacggtccaaaaggaataggcgcgttatatgtaaagaaaggcgctccattgtttccgcttatacacggcggtcatcaagaagacggtttaagggcgggaacttacaacaacattggaattctcggctttggaaaagccgcggaacttgcctcaggcgaagttgaggaatacggcaaaaaactctccgtactgcgcgataaattgcgccgagaacttacggaaaaaatcccgaacataaaaataaacggtcaccctacggacgtacttccgaatacgcttaatgtttcttttcccggcgcggaaggggagtcgatactgctttccatggacatgcagggaattgaggcatccacaggctcagcctgcgcatcagggagccttgagccttctcatgtgcttcttgcgacgggggtgggacctgagcttgcgcacggttctatccgttttagcctggggtggggtattacagaagacgatattgattatataatagaggtacttccgccgattatcgcgcgggcttcgggcaatgtcaaccttgggcggaacttaaaaagaaggggaaatatgtcggactggttatactcagatactgtttaa

SEQ ID NO: 63524 - protein, 405 aa, Unknown
  Obtained from environmental sample
  DOMAIN (37)...(304): Beta-eliminating lyase
  misc_feature (1)..(405): Xaa is any amino acid
MRKVYIDYNATTPLRKEVMSAITEDLEIFGNASSMHASGRLAHARVEQARSAIKALIGAKDGTIIFTSGGSESNNTVFQTMRHLIDTCASKNRDEFITTAIEHPCVMNSAAFLKDSGYKVAILPVDEYGKLKIDELEKALNDKTLFVSVMTANNEIGTIQDIKKITALVKKAGAYMHVDAVQAVGKIPINVEELGVDYLTMSAHKIYGPKGIGALYVKKGAPLFPLIHGGHQEDGLRAGTYNNIGILGFGKAAELASGEVEEYGKKLSVLRDKLRRELTEKIPNIKINGHPTDVLPNTLNVSFPGAEGESILLSMDMQGIEASTGSACASGSLEPSHVLLATGVGPELAHGSIRFSLGWGITEDDIDYIIEVLPPIIARASGNVNLGRNLKRRGNMSDWLYSDTV

SEQ ID NO: 63525 - DNA, 537 bp, Unknown
  Obtained from environmental sample
  misc_feature (1)..(537): n is a, c, g, or t
gtgcttctggaagacgaggctgtttttgcgccggacgcgaaagggcagactggaaatataaaatgcggcgatcaaatgttgatgctcttaaaaattaaagacgatgttattacggacgtgcgttggaaaacttacggttgcgcgagtgccatcgcttctaccagtatgctctcagaaaccattaagggaatgaaactggaagaggcttataaaattcgccccgaagaccttgtagccaaacttggagggcttccaagttttaaaatacactgttcggtattaggcgacaaggcccttcgcgccgcgatagacgattatctttcaaagacgggacggccggggctttttgtggaagaaaccgttgttatctgtcattgtttgggaattacggataaagacatagaggacgcttttcataacggagcgagaaactgggaacagcttcaacaggcgaccaaaatcggcacggtctgcggaagctgcaaagaaaaagccgtggatattctccacggctttgaacacatttacggcaattaa

SEQ ID NO: 63526 - protein, 178 aa, Unknown
  Obtained from environmental sample
  DOMAIN (121)...(173): BFD-like [2Fe-2S] binding domain
  misc_feature (1)..(178): Xaa is any amino acid
MLLEDEAVFAPDAKGQTGNIKCGDQMLMLLKIKDDVITDVRWKTYGCASAIASTSMLSETIKGMKLEEAYKIRPEDLVAKLGGLPSFKIHCSVLGDKALRAAIDDYLSKTGRPGLFVEETVVICHCLGITDKDIEDAFHNGARNWEQLQQATKIGTVCGSCKEKAVDILHGFEHIYGN

SEQ ID NO: 63527 - DNA, 1026 bp, Unknown
  Obtained from environmental sample
  misc_feature (1)..(1026): n is a, c, g, or t
ttgccccgacttgataggaagagggtgaaacggatgtttatagacgaaacaaccatcgaggtaaaagcgggcgacggcggcaacggctgccactcctacgaacgccagaagtacaagcccaaaggccgccccgacggcggcgacggcggacgcggcgggcatatctatctctccggatcaaaacagatccacacactgcaagacgtggcctaccgcaggcactacaaggccgagcgcggagcccacggcaaggggaaaaaccagaccggcagaagcgccgaggacgtcgtgatcccagtaccgctgggcaccatcgtctacgacgacgccaccggggagacgcttctcgactgcctgaacgagggtcggcaagagctgatagctaaaggcggacgcggcgggcgcggcaacgcggcgttggcctcattccacgaccctaacccgcagttctgcgaacccggaaagccgggcgaggagaggaaactgaagctggtattgaaagtattggccgacgttggactagtgggacgtcccaacgccggtaagtcgactttcctatcgcgcatctcgcacgccaggccgaagatcgccgattacccatttaccaccaaagaaccgcaactcggcatagtcaagagcgcaagcgggccgttcgggtcgtcatacgtagtggcggacattcccggattgatagagggatgccacgagggcaaggggatgggaatacgctttctgcggcatatcgagcggacaggtgtgctggcgattatggttgaagcggggtcggaggatccggagggcgacgctaaggtgcttctgaacgaattgacgcattacagcgaactgctggcggggaagcctaaatgctttattatgactaagacggatttgatcggcgacggctcgtcggatataaagattcccgacgggtggcttgggatgtcggcggttacgggggacggggtagataaagtattgttagaactggagaagatgttggcggcggcaaaaaagtcagaatcttaa

SEQ ID NO: 63528 - protein, 341 aa, Unknown
  Obtained from environmental sample
  DOMAIN (170)...(296): GTPase of unknown function
  misc_feature (1)..(341): Xaa is any amino acid
MPRLDRKRVKRMFIDETTIEVKAGDGGNGCHSYERQKYKPKGRPDGGDGGRGGHIYLSGSKQIHTLQDVAYRRHYKAERGAHGKGKNQTGRSAEDVVIPVPLGTIVYDDATGETLLDCLNEGRQELIAKGGRGGRGNAALASFHDPNPQFCEPGKPGEERKLKLVLKVLADVGLVGRPNAGKSTFLSRISHARPKIADYPFTTKEPQLGIVKSASGPFGSSYVVADIPGLIEGCHEGKGMGIRFLRHIERTGVLAIMVEAGSEDPEGDAKVLLNELTHYSELLAGKPKCFIMTKTDLIGDGSSDIKIPDGWLGMSAVTGDGVDKVLLELEKMLAAAKKSES

SEQ ID NO: 63529 - DNA, 342 bp, Unknown
  Obtained from environmental sample
  misc_feature (1)..(342): n is a, c, g, or t
ttgccaatacaaggtaatagactattgttacagtatgacatgacaagtttgaggtctttattagcaagtaatatcaaaaaaagaaggaaagaattaggtatttcccaggctgttttagcggaaaaagtaaatactgcagcccattatatagcccaaattgaacaaaaaaacagattcccaacacctgaaatgctggaacgtatcgcccttgctctggaaatagacagttttgagttgttttcagcagggccttatcctttcgagaagatacaaaagttcaaggaaggtatgagggcagattttgaggcaagactaaaagaccttttgacgcctgataagtag

SEQ ID NO: 63530 - protein, 113 aa, Unknown
  Obtained from environmental sample
  DOMAIN (25)...(79): Helix-turn-helix
  misc_feature (1)..(113): Xaa is any amino acid
MPIQGNRLLLQYDMTSLRSLLASNIKKRRKELGISQAVLAEKVNTAAHYIAQIEQKNRFPTPEMLERIALALEIDSFELFSAGPYPFEKIQKFKEGMRADFEARLKDLLTPDK

SEQ ID NO: 63531 - DNA, 1323 bp, Unknown
  Obtained from environmental sample
  misc_feature (1)..(1323): n is a, c, g, or t
ttgaacacccattgcggaacatttgaacaccaatacctcatgcccccccaataccctcacgggtgggttgcatccggaaggagaaaacttagcatgaggagaatcgtcatggagaaagcgaaagaaatcctgcgcctgtccctgcacatggggctgagccagcgggaggtggcagcgaaccttcggttcgacggaaccggttgttcccttggaatggtcaacgccgtactggcgcgggtaaaggaagcgggtgtcgccgaccccctcagccttgataccaaggaactggggtcaatcatctatccccctgaacacgggggaaggaaggaggaacctgacttcccgtacatcgacaaggagatgaagaagaaaggggtaaccttgttcctgctctgggaggaatacaaagtcaggcatcctgaaggctgcatgtattcccagttctgcgccaaataccgggaataccggaaacagaactcggtgtacatgcggaaggtctacaaggcgggggagcagatgctggtagactgggccggtcttaccatgaagtataatgggggaggcggtactgagaagacagcatatgtttttgtggcagtacttcccgccagttcaatgctgtacgcgcagccgttagccgatatgaagatggaaagctggatagaaggccatgtaaacgccttcgagtattttggaggggttccccggctgttggttcctgacaatgcaaagacggcggtaacgaaagcaaaccgttatgaagcggagctgaacaaaacctacaaggagatggcgggccattacggctgcgcaattgtccccgcccggccgtactcaccaaccgacaaggcccctgctgagaccggggtacagatagtcgaacggcggataatcgccaagctcaggcataccaagttcttttccctggaagaactcggcgaagccttccgcgcggagcttgaagcgctcaacgaccggccgttccagaaacaggcgggcagccgccggagcgtgttcctgtcaaccgaacagcatgaactgatgaggctgcctgcaaggcggtatgaatacgctcggttcaagcaggcaaaagccgggtttgactaccatgtcgccctggataaggagcattattacagcgttccctatcaatttgcgggcagggaagtgcatattcgcagcacttcgcgcaccgtagaggtattctgtgaggggggaacggatagcatgccatgtgcgcagcacggatccccgcaaacgtttcattaccgagccttcccacatgccggaaaaccaccgggctgtcgccgactggtcgcctga

SEQ ID NO: 63532 - protein, 440 aa, Unknown
  Obtained from environmental sample
  DOMAIN (165)...(340): Integrase core domain
  misc_feature (1)..(440): Xaa is any amino acid
MNTHCGTFEHQYLMPPQYPHGWVASGRRKLSMRRIVMEKAKEILRLSLHMGLSQREVAANLRFDGTGCSLGMVNAVLARVKEAGVADPLSLDTKELGSIIYPPEHGGRKEEPDFPYIDKEMKKKGVTLFLLWEEYKVRHPEGCMYSQFCAKYREYRKQNSVYMRKVYKAGEQMLVDWAGLTMKYNGGGGTEKTAYVFVAVLPASSMLYAQPLADMKMESWIEGHVNAFEYFGGVPRLLVPDNAKTAVTKANRYEAELNKTYKEMAGHYGCAIVPARPYSPTDKAPAETGVQIVERRIIAKLRHTKFFSLEELGEAFRAELEALNDRPFQKQAGSRRSVFLSTEQHELMRLPARRYEYARFKQAKAGFDYHVALDKEHYYSVPYQFAGREVHIRSTSRTVEVFCEGGTDSMPCAQHGSPQTFHYRAFPHAGKPPGCRRLVA

SEQ ID NO: 63533 - DNA, 411 bp, Unknown
  Obtained from environmental sample
  misc_feature (1)..(411): n is a, c, g, or t
gtgaggggggaacggatagcatgccatgtgcgcagcacggatccccgcaaacgtttcattaccgagccttcccacatgccggaaaaccaccgggctgtcgccgactggtcgcctgagcgtttcatgtcctgggcggcaaagacgggggataagaccaaggcgtatattacctggctgttagagcggaaagaacacccgcagcaggcgttcagaacctgtgcgggcatactccgtataggcgcgactgtaacgccccagcggatggaagaagcctgcgctctggccttggaacgcaatgtgtactcgtattcgtatttcgcaaaactgctggaaaaccgcaaacccggtacgccgctcgttcatgaaaacttgcgggggaaagactatttcaccggaggcggccatgtttga

SEQ ID NO: 63534 - protein, 136 aa, Unknown
  Obtained from environmental sample
  misc_feature (1)..(136): Xaa is any amino acid
MRGERIACHVRSTDPRKRFITEPSHMPENHRAVADWSPERFMSWAAKTGDKTKAYITWLLERKEHPQQAFRTCAGILRIGATVTPQRMEEACALALERNVYSYSYFAKLLENRKPGTPLVHENLRGKDYFTGGGHV

SEQ ID NO: 63535 - DNA, 618 bp, Unknown
  Obtained from environmental sample
  misc_feature (1)..(618): n is a, c, g, or t
atgtgtactcgtattcgtatttcgcaaaactgctggaaaaccgcaaacccggtacgccgctcgttcatgaaaacttgcgggggaaagactatttcaccggaggcggccatgtttgataatgccaccctcagccaactccatgagctcaggctctcggccatggctcattgtttcaccgagcagcaaacccagaccggcattcactcgctgtcgtttgaagaacgcttcgccctgttagtcgaaaccgaatggctgtcccgccgcaacaagcgcaccgaacggctggtcaggcaggcgggcttccgcttcaacgccgctgttgaggatatcgacttccacagcaaaaaaggtatcggcagaccggaagtactcaaactctccctgtgctcatacatcaagaaagcccagaatatttttttctcaggccctaccggcgtcggcaaaacctatcttgcctgcgccctgggccgcgccgcatgcgcccaaggctttcaggtcatctataccaggctaaacgatttcttccgctgcgccttcgccgcccattctcacggccaggcccgcttcagcgacaagtgcgcaagggttccgcttctcatctttatgactggggtctaa

SEQ ID NO: 63536 - protein, 205 aa, Unknown
  Obtained from environmental sample
  DOMAIN (89)...(205): IstB-like ATP binding protein
  misc_feature (1)..(205): Xaa is any amino acid
MCTRIRISQNCWKTANPVRRSFMKTCGGKTISPEAAMFDNATLSQLHELRLSAMAHCFTEQQTQTGIHSLSFEERFALLVETEWLSRRNKRTERLVRQAGFRFNAAVEDIDFHSKKGIGRPEVLKLSLCSYIKKAQNIFFSGPTGVGKTYLACALGRAACAQGFQVIYTRLNDFFRCAFAAHSHGQARFSDKCARVPLLIFMTGV

SEQ ID NO: 63537 - DNA, 765 bp, Unknown
  Obtained from environmental sample
  misc_feature (1)..(765): n is a, c, g, or t
gtggcttcaggacaggtgctcttttttcccgtgggtatcaacctggacggttacagagaggtacttaaaaacaaaggggtcatgcggggcttttttaattccatttactacacggctttggggactacgattaaccttatcgttaccctccccaccgcctacgccttgtcccgcccggatttccacgggcgtaagggcatctcgattttttatatcttaactatgtttgtttcaggcggcctcattcccacatacctcgtggttcgctccatggggatgctcaacactgtttgggcactggttattcccggggcaatttcggtctacaacatgatggttgcccggactttctttaagaccaacatcccgggagaaatgctggatgccgccaaggttgacggttgttcggacaccacgttctttttccgcatggtactgcccttatccggggcgataatcgccattctggtgctttggtacggcgtagggcactggaactcgtatttttcggccctgctttacatttcagacaggacgaagcagcccctccagcttgaactccgcatggtgctgctacagaacacccagtcgccggagatggaattgacagaggaattcctcgccgaaaaacgccgccttgaggccctgcgggatatgatgaaatattccctcataatcatctcaagccttcctgtcctggttctctacccctttatccaaaggcactttgtgaagggcgttaccgtcggttcccttaaaggttag

SEQ ID NO: 63538 - protein, 254 aa, Unknown
  Obtained from environmental sample
  DOMAIN (27)...(249): Binding-protein-dependent transport system inner membrane component
  misc_feature (1)..(254): Xaa is any amino acid
MASGQVLFFPVGINLDGYREVLKNKGVMRGFFNSIYYTALGTTINLIVTLPTAYALSRPDFHGRKGISIFYILTMFVSGGLIPTYLVVRSMGMLNTVWALVIPGAISVYNMMVARTFFKTNIPGEMLDAAKVDGCSDTTFFFRMVLPLSGAIIAILVLWYGVGHWNSYFSALLYISDRTKQPLQLELRMVLLQNTQSPEMELTEEFLAEKRRLEALRDMMKYSLIIISSLPVLVLYPFIQRHFVKGVTVGSLKG

SEQ ID NO: 63539 - DNA, 540 bp, Unknown
  Obtained from environmental sample
  misc_feature (1)..(540): n is a, c, g, or t
atgagaaaggcaattattgttctttttgcgttatttgtctgcacggggctttatgcccagacgacctacaagataggggacatcggccctgccggaggtattgtgttttacgacaagggctttgcctcggacggctggcggtatctggaggccgcgcctgccgggacggaattcaccgccgattgggggtggtatgaaacgaatgtcgccggaacgaggacagaggtcggaagcggaaggtggaacacccggcttattgtcgcggctttgggggcaaacgaaagcgcggcgcggctatgcgccagcctgaatgtcaacgagtacgccgactggtttttgcccggcatcgacgagctggatttgatttacaaaaacctgaagcagaacgggcttggcggctttaaggacggattttattggtcttcgtcgcaggactccggcaactattccctcgcattgagcaggtcgttcagcgacggcaaacagtacatgggctacaaggactacgccaacaacgtgcgggcagtgcgggcgttctaa

SEQ ID NO: 63540 - protein, 179 aa, Unknown
  Obtained from environmental sample
  SIGNAL (1)...(19)
  misc_feature (1)..(179): Xaa is any amino acid
MRKAIIVLFALFVCTGLYAQTTYKIGDIGPAGGIVFYDKGFASDGWRYLEAAPAGTEFTADWGWYETNVAGTRTEVGSGRWNTRLIVAALGANESAARLCASLNVNEYADWFLPGIDELDLIYKNLKQNGLGGFKDGFYWSSSQDSGNYSLALSRSFSDGKQYMGYKDYANNVRAVRAF

SEQ ID NO: 63541 - DNA, 435 bp, Unknown
  Obtained from environmental sample
  misc_feature (1)..(435): n is a, c, g, or t
gtggtatggtttataaaaaattcagggagctttataaagctttatttaggaggaaaaatgaaaaagaatttgtatttgtttgtagttttatgtgctactgccttattgttaggatgttcaatgatgcaggaacaaaaaacagcaataattgaactcgaagccaacgcaactactggttatacttggatctatactatatcaccaaaaggtatagtacatgaagtgtcaaacgaatacattcctgataaaaaaaatgaaggaatagacggtgctggtgggaaacatatctttacttttgaggctattgccgaaggggaagccgaactagttttttcatatctcagagaatgggaagtaggcatacctccgataaagacagtaacttacacagcgattgtagataccaagaataacctgacgcttaaaaaaaattga

SEQ ID NO: 63542 - protein, 144 aa, Unknown
  Obtained from environmental sample
  misc_feature (1)..(144): Xaa is any amino acid
MVWFIKNSGSFIKLYLGGKMKKNLYLFVVLCATALLLGCSMMQEQKTAIIELEANATTGYTWIYTISPKGIVHEVSNEYIPDKKNEGIDGAGGKHIFTFEAIAEGEAELVFSYLREWEVGIPPIKTVTYTAIVDTKNNLTLKKN

SEQ ID NO: 63543 - DNA, 660 bp, Unknown
  Obtained from environmental sample
  misc_feature (1)..(660): n is a, c, g, or t
atgaccgaatatgcccctgacaaaatgatacagaaatacccgaaagaacatctgctttttgccgaaggcgaaacagggcataccatgtatatcattcaggaaggttcggtaaaaataacaaaaatcgttgacaataaagaaattatcctcgcggttctgggcaaaggcgatattttcggcgaaatggcgctgttggaagacaaaccccgcgcggccaccgccgaagtttacgaagattgcacattattggcggttaaccgtgataacttctcaaaccttataaaagatcaacccgacatggtagtccgcatggcgactttaatgtccgagcgcatttggctgctctatcgccaacttgataacacatttatagataatccgttagggcgcgtttatgacgctctgcttatccagcttgaaaaaaaccgtgttaacataaacagcgatgaaccgtatcaatgcaattttggtataaaggaattaataggtatggcgggcatgcaggaatccgagaacaaataccttgatcgtaaaatagccggtgacggaaaactgacctttaacgacgataaaattcagatagacaaaatctcggacatactaaaagaatccgtattctaccgcaaggcgcaaaaaatagccgaaaacagaaaaaggtaa

SEQ ID NO: 63544 - protein, 219 aa, Unknown
  Obtained from environmental sample
  DOMAIN (10)...(99): Cyclic nucleotide-binding domain
  misc_feature (1)..(219): Xaa is any amino acid
MTEYAPDKMIQKYPKEHLLFAEGETGHTMYIIQEGSVKITKIVDNKEIILAVLGKGDIFGEMALLEDKPRAATAEVYEDCTLLAVNRDNFSNLIKDQPDMVVRMATLMSERIWLLYRQLDNTFIDNPLGRVYDALLIQLEKNRVNINSDEPYQCNFGIKELIGMAGMQESENKYLDRKIAGDGKLTFNDDKIQIDKISDILKESVFYRKAQKIAENRKR

SEQ ID NO: 63545 - DNA, 1122 bp, Unknown
  Obtained from environmental sample
  misc_feature (1)..(1122): n is a, c, g, or t
ttggccgagaatgccgcaatttcggcgacatcaattatggcgggaaaacctgccgctacaatttttgtattgcagccggattgggcgcttgccttgtatcgccagaaccttatttatcctgtagggaaaagtaaagcggttgactggaaagctactacgccgattgaatggaatagagctgttacatcagcttttacatttaagaatggacgaactcaagacgcttatgcttttgcagaaggttacggcggaagctatcatgccgcttgtgtgttctttaataaaagattattcagagaagccggatttccagataactatctttatgatcttcagaaatccggacagtggacatgggataaattccttgaagtcgccaagaaacttacaagagatataaacaacgacggtattcccgatacttacgcgatgcctgcggacctttccacagaaattctggacgcttttgtttccggtaacggcgcaatgtatgttgataaaaacaagaacactgggatgcttgaactcgctacaaaaagacctgaatttatccaggctgttcagttttatatggaagtaagagacgcaaaagttatgaagccgaaaccgccgggagagaataccccttggaactggcacattcccgaatttaacgacggaaaagtcgctatgcgtattgaccagcaatatttggcgacaaatgatcttcgcaacatgaaagatgactggggcatggttcttccgccgaaaggacgcaatcctaaagtaaagaactatgtagtatttaacgatgaaaacgtaagagtaattcccgccaagggatatacagacgctgagattgacgcgattatttgggcttatcaggcttgggtaactcctcctgatgatagatggcagcagtcggaatatcccaactacagagacagaagagcagttgatgaaactgttgcaatgatccgcgaccagaaactctggcagtggaaatatcaccttcatgtacccggacttaaccgcggcggtatcgcgtgggaaatctggtggcacgatggtcagccggcgcagttagttgaaaaagttacaaataactggaacgccttgattgccgacgcaaacggactgtaa

SEQ ID NO: 63546 - protein, 373 aa, Unknown
  Obtained from environmental sample
  misc_feature (1)..(373): Xaa is any amino acid
MAENAAISATSIMAGKPAATIFVLQPDWALALYRQNLIYPVGKSKAVDWKATTPIEWNRAVTSAFTFKNGRTQDAYAFAEGYGGSYHAACVFFNKRLFREAGFPDNYLYDLQKSGQWTWDKFLEVAKKLTRDINNDGIPDTYAMPADLSTEILDAFVSGNGAMYVDKNKNTGMLELATKRPEFIQAVQFYMEVRDAKVMKPKPPGENTPWNWHIPEFNDGKVAMRIDQQYLATNDLRNMKDDWGMVLPPKGRNPKVKNYVVFNDENVRVIPAKGYTDAEIDAIIWAYQAWVTPPDDRWQQSEYPNYRDRRAVDETVAMIRDQKLWQWKYHLHVPGLNRGGIAWEIWWHDGQPAQLVEKVTNNWNALIADANGL

SEQ ID NO: 63547 - DNA, 801 bp, Unknown
  Obtained from environmental sample
  misc_feature (1)..(801): n is a, c, g, or t
gtgttccgctgcgacgataccgcgcgtcaaatggagattcactcaggcaggagcaaagacggaatcaactgggagatagaagaccatcctattaaatttattaaaaccgatcctgagttgccggactccgaatacaaatacgatccgagggtgatttttatcgaggatcgttattatattatttggtgcaacggttactttggtccaaacctgggtttgggctatacttttgattttgaaaaattctatcagatggaaaacgcgcttatgccctacaaccgaaacggcgcgcttttcccgcgtaaaatcggcaggaactacgccatgtacagccggcccagcgattcggggcatacgccgtttggcgatattttctattcagaaagtccggaactggtgtattggggaaagcaccgccatgtcatggggcctgtgggcggatggcagagtacgaaggtcggcgcggggccatgcccaatcgaaaccaccgaaggctggctgttgttctatcacggagtgttgacaagctgtaacggctttgtgtattcattcggcgccgccctgcttgatcttgaaaagccctggaaggtaattgcccgcagccggccatacatcatcaacccgcgggaaatatacgaattagccggcgatgtgccgaatgtaacattcccctgcgccgcgctggtggataaagataccggcaggatcgcaatttactacggcgctgcggattcggtaaccggattggtttttggcaaaatcgacgaagtcgttgagtggataaaagcgaataaattatag

SEQ ID NO: 63548 - protein, 266 aa, Unknown
  Obtained from environmental sample
  DOMAIN (1)...(263): Domain of unknown function (DUF377)
  misc_feature (1)..(266): Xaa is any amino acid
MFRCDDTARQMEIHSGRSKDGINWEIEDHPIKFIKTDPELPDSEYKYDPRVIFIEDRYYIIWCNGYFGPNLGLGYTFDFEKFYQMENALMPYNRNGALFPRKIGRNYAMYSRPSDSGHTPFGDIFYSESPELVYWGKHRHVMGPVGGWQSTKVGAGPCPIETTEGWLLFYHGVLTSCNGFVYSFGAALLDLEKPWKVIARSRPYIINPREIYELAGDVPNVTFPCAALVDKDTGRIAIYYGAADSVTGLVFGKIDEVVEWIKANKL

SEQ ID NO: 63549 - DNA, 1896 bp, Unknown
  Obtained from environmental sample
  misc_feature (1)..(1896): n is a, c, g, or t
gtggatcagatgcgctttgaagaccgcaccaaccctcaaacaaaaatcaagataatgacggacgggatgctcctgcaggagatgaaactggatccctggctgtcaaaatacggcgcgcttgtcgtggatgaggcccacgaacgcagccttaacattgattttacccttggcctgctgaaacgcgtgctggaaagccggcgcgacttcaaggtgattatctcttccgccacaataaacgcgcaagtgttctgtgattacttcggcggatgccccgtggtaaagatcgacgcgcaaagattcccggtaacgcttatatacgatccgattgccctgagctctgacaattaccctgataatggcggaaccaacgggtctgacactgcggctgaagcgctcctgttaaagattgaaaaaatcgtcgcaaggtttatcgctgaaaagcgcgaaggggacattctggttttcctttccggcgagaaggcgatcaaggactgcatgaaccgtcttgccttaagccgcatgggcggcaaactgcatcttcttccattatacggcaggcttggcaaggaagagcaggaacgggtattcgagccggcgccgaaaaacaagacgaaggtagttctctcaacgaatatcgcggaaacgtcggtaactatagaaggaatcaccgccgttattgattccgggctttcaaaactcaactggtacaaccctaacacctatacgtccagccttgtggaagcgccgatctccaaagcgtcggctgaccagcgcaaggggcgggccgggcgcacctgcgaagggagttgttaccgtctgtacacgcgcggggattttgaaaaacgcccgcaatttaccaccgaagaaattttccgtacggatctttccgaggtgatactgcgtatggctgaccttggaatcgcagattttgaaaactttgactttatctcaacgccgggaatggaggggcttgcctccggtatagaaacattgaatctgcttaaggctcttgaaagcgaccgcagcctttccaatatcggcaaaatgatgacggaattccccctcgccccccggcagtcaaggatcattgtggaggcgatcctccattaccccaaagtaatccacgagactctcatcgcggcggcgtttctttccacgcaaagcccgtatctgctgccgcccggtgaagaaacagaggcgcgcaaggcccacggccgtttccgcgacgataatggggattttgtttcatatctcaaaattttcaaagcctacggcgattctttgaacaaggctaagttctgcgagcgcaattatcttgacgagaaggcgatggcggagattgtaaacgttgtcgcccagcttgaagaaattctcgccaacctgaaaatacccgtgcttgagcgcaatggcgccgcaagcggcgttatcatagacggcgcggatgccgccgactatctttgctgtataggcatggggatgatccagttcgtctgcgtcagcgaaagcgccgccaaaggtggcggtaaaaaaggcgggtccaaaaaaaacgccacttaccgcagcctgaccgctgacagaataaccatacaccccggctcggtaatgttccgcacagatcccatgtacatagtagccggagaaatcgtccgcaccagcaggatgtatgccatgtccgtctcgcccttatcaacggagataattgaaagattgggaatagggatagggactggggactggggatcggggactggggatataggaatagggactagggatcagggactggggaccagggaaaaaagaaaagacaagagagcaatgaaaaaagaaaaatctcacgcggagaacgcggaggcgcagaggaagaggaaaagaaagtcaaaaaagagggagtag

SEQ ID NO: 63550 - protein, 631 aa, Unknown
  Obtained from environmental sample
  DOMAIN (326)...(418): Helicase associated domain (HA2)
  misc_feature (1)..(631): Xaa is any amino acid
MDQMRFEDRTNPQTKIKIMTDGMLLQEMKLDPWLSKYGALVVDEAHERSLNIDFTLGLLKRVLESRRDFKVIISSATINAQVFCDYFGGCPVVKIDAQRFPVTLIYDPIALSSDNYPDNGGTNGSDTAAEALLLKIEKIVARFIAEKREGDILVFLSGEKAIKDCMNRLALSRMGGKLHLLPLYGRLGKEEQERVFEPAPKNKTKVVLSTNIAETSVTIEGITAVIDSGLSKLNWYNPNTYTSSLVEAPISKASADQRKGRAGRTCEGSCYRLYTRGDFEKRPQFTTEEIFRTDLSEVILRMADLGIADFENFDFISTPGMEGLASGIETLNLLKALESDRSLSNIGKMMTEFPLAPRQSRIIVEAILHYPKVIHETLIAAAFLSTQSPYLLPPGEETEARKAHGRFRDDNGDFVSYLKIFKAYGDSLNKAKFCERNYLDEKAMAEIVNVVAQLEEILANLKIPVLERNGAASGVIIDGADAADYLCCIGMGMIQFVCVSESAAKGGGKKGGSKKNATYRSLTADRITIHPGSVMFRTDPMYIVAGEIVRTSRMYAMSVSPLSTEIIERLGIGIGTGDWGSGTGDIGIGTRDQGLGTREKRKDKRAMKKEKSHAENAEAQRKRKRKSKKRE

SEQ ID NO: 63551 - DNA, 1146 bp, Unknown
  Obtained from environmental sample
  misc_feature (1)..(1146): n is a, c, g, or t
atgatagaccgcaaaacagtattacagcggcataatcctcattataaaaccttgaaaaaatccgcgccgctttccgtaggcaacggcgttttctgctttaccgcagattttacaggcttgcaaactttttttgactactattctgcggcgcaagacgctttccctctctgcacaatggctgaatggggctggcattcgtatcctcaaacagaggacgaagctgatttgcggctaacaccctatgatacttacggcaggactgtttattacgctacagatgataaaggacaggaagaaatttttaaaaagattagagttaacgctcataaatttcatttagggttgattggttttgaattacaggataaaaaaatttcattgaaaaattgcgaacctgtcagccaactgctctctttatgggaagggattttatcttccgagtttaagattgacggcaatattgttaaaacagaaacttttatccacccgaaagaagatacgttgtatgtatgcgcacggtcatcattcctaaaaaatttgctcataactattaattttccttatggcagtcataaaaaaacaggagcggaattctctgctccgcattctcatcaaactaaaataataaaaaacaaggacgggtcggttttcatagaaagagaacttgacggcactatttataaagttacggttaacggaaaagggtttacgatttcatttaatgaaaatcaacatattttacaattaattccgcatgaagaatgtatcaatttaagcgttcgatttgaacctgtaaatattccttctttcaaaaaagccgaaatagcgttaaacaaattacaaaataaagaagcggactcgttcgatgaagcaaaagcaaaatgcctttcgttttgggaacattattggtcatcaggcggatttatcgaatttacaggatcaaccgatccgcgtgcggttgaattggaacggcggataatactttcacaataccttacggcaattcaaagcaggggcaaaattcctccggcggaaacagggcttacttgcaatagctggtacggcaagtttcaccttgagatgcatttttggcatcacgctcatttgccgcttggaacaggacagaggaactgtaaaatcccttga

SEQ ID NO: 63552 - protein, 381 aa, Unknown
  Obtained from environmental sample
  misc_feature (1)..(381): Xaa is any amino acid
MIDRKTVLQRHNPHYKTLKKSAPLSVGNGVFCFTADFTGLQTFFDYYSAAQDAFPLCTMAEWGWHSYPQTEDEADLRLTPYDTYGRTVYYATDDKGQEEIFKKIRVNAHKFHLGLIGFELQDKKISLKNCEPVSQLLSLWEGILSSEFKIDGNIVKTETFIHPKEDTLYVCARSSFLKNLLITINFPYGSHKKTGAEFSAPHSHQTKIIKNKDGSVFIERELDGTIYKVTVNGKGFTISFNENQHILQLIPHEECINLSVRFEPVNIPSFKKAEIALNKLQNKEADSFDEAKAKCLSFWEHYWSSGGFIEFTGSTDPRAVELERRIILSQYLTAIQSRGKIPPAETGLTCNSWYGKFHLEMHFWHHAHLPLGTGQRNCKIP

SEQ ID NO: 63553 - DNA, 939 bp, Unknown
  Obtained from environmental sample
  misc_feature (1)..(939): n is a, c, g, or t
atgagcgtatgcacccgtacattgtacaaagagtttcctaaaataaaagctttcggctgctgccacgaggtctttcacacccggaaacttcttgctacggttttggaagaagcgggttacgccccgccgaacaccattaaaccggaagagatgaaagtaaatgttttaggcattaatcactttacatggattgacaaagcgtattggaaagacatagacatattccccatatatgaagcatttgtaaaaaaatactccttaacaggttttataaaagagaaatcttgtgaaaaagacaataacgccgacgaacttgaacgtcaaaaatattttggttcaaccgaccgcgtaaaaatggacctcttccgccgtttcggattgattgccgccgccggcgacaggtacctggctgaattctgccctcattcatggtatttgtcatccccggaaaccgctgaacgctggggatttgcccttattccggtctcatggcgcattaaagaccgtgaaaaattaaaacagaaatcaaaagcgtacagcgacggaatagaagaaatgattccggaggaatccggcgaggaaggcataaaaattatcaaagcgttaatgggtttgggggacattaccacaaacgtaaattttccgaataacggacagatgccggaccttccaaaaggggttattgttgaaacaaacgcaggtttaaaacgggataatattgagcctgtttcaagtttcgaacttcccgtcgatataagagcgcttgtaacgcatcatatactcagtcaggaaggaattatagaagcggtatttgaagacgatacagaaaaagcatttcgtgttttttcacatgatctcgctgttcaaaaattaccgcttggcgaagcgcattcgctttttgatgaaatgcgccgtgcgaataacacaaaaaaaggataa

SEQ ID NO: 63554 - protein, 312 aa, Unknown
  Obtained from environmental sample
  DOMAIN (1)...(288): Family 4 glycosyl hydrolase
  misc_feature (1)..(312): Xaa is any amino acid
MSVCTRTLYKEFPKIKAFGCCHEVFHTRKLLATVLEEAGYAPPNTIKPEEMKVNVLGINHFTWIDKAYWKDIDIFPIYEAFVKKYSLTGFIKEKSCEKDNNADELERQKYFGSTDRVKMDLFRRFGLIAAAGDRYLAEFCPHSWYLSSPETAERWGFALIPVSWRIKDREKLKQKSKAYSDGIEEMIPEESGEEGIKIIKALMGLGDITTNVNFPNNGQMPDLPKGVIVETNAGLKRDNIEPVSSFELPVDIRALVTHHILSQEGIIEAVFEDDTEKAFRVFSHDLAVQKLPLGEAHSLFDEMRRANNTKKG

SEQ ID NO: 63555 - DNA, 1404 bp, Unknown
  Obtained from environmental sample
  misc_feature (1)..(1404): n is a, c, g, or t
atgagaggcgtcgaatacaagggcttaagccgaatagaagggccggtggttgttgtcgccagaagcaggaacgtaggctttaacgaggtggtggcaatttacgacagggaaaagggccgcaggcttggccgggtggtggacatgagcgaagactggacggcggttcaagttttcggaagcaccaccggcctttccgccgatcacagccgcgtggagtttctgggggagccgatgaagctccgggttgggccggggcttttgggcaggatcttcaacggcattggggagcctgtggacggctacggggatattttttcctcaacctgcctggacgtgaacgggcttcccattaacccctatgcccggacttacccgagggactttattcaaaccggcatatccgccattgacggcatgaatacccttatcagggggcagaagcttcccattttttctggcaacgggcttccccataacaggctggccgcccagatcgtgcgccaggcaaaaatcctgcatggctctaccagcgaagcggagcgtttcgtgattatattttgcgccatgggggtcaagtacgatgtcgcccgcttcttcctggatgactttgagcgttcgggtgtcctggccaacgtcgtggtctttctttctttggcggacgcgcctacccttgaacgccttgtagctccccgctgcgcccttaccgccgccgagtacctggcctacgagaaaaacatgcacgtccttgtggtgatgaccgacatgaccaattactgcgaggccctgcgggaagtttcttcgattaggggggaagtgcccagcagaaaaggctatccgggctacctttactcggatctggcttctctatacgagagggcgggcaagataaacggttcaagcggctcaataacccagataccgattcttaccatgcccaacgatgacataagccaccccattccggatctttcaggctacatcaccgaagggcagattgtccttgatcgggaactgttccagcgggggatttatcccccggttgcgggactgcccagtctttccaggcttatgaaggatggaataggcgagggtatgaccagggaggatcataaggacgtttcaagccagctctttgcggcctattcccgcgtcaggcagatacgcaacctggcttctataatcggcgaggaagagctttcggtcaccgacaagcaatacatcaaattcggggaaaggtttgagagcatttttctgacccaggacgaatttgaaaaccgcgacattgaccgtacccttgatctgggctggaaggttctgaatgaaattcccagggacgatctgttgagggtaaaaccggaattcataggcaaataccttgagccgacaaaggcaatgagaatttaa

SEQ ID NO: 63556 - protein, 467 aa, Unknown
  Obtained from environmental sample
  DOMAIN (9)...(75): ATP synthase alpha/beta family, beta-barrel domain
  misc_feature (1)..(467): Xaa is any amino acid
MRGVEYKGLSRIEGPVVVVARSRNVGFNEVVAIYDREKGRRLGRVVDMSEDWTAVQVFGSTTGLSADHSRVEFLGEPMKLRVGPGLLGRIFNGIGEPVDGYGDIFSSTCLDVNGLPINPYARTYPRDFIQTGISAIDGMNTLIRGQKLPIFSGNGLPHNRLAAQIVRQAKILHGSTSEAERFVIIFCAMGVKYDVARFFLDDFERSGVLANVVVFLSLADAPTLERLVAPRCALTAAEYLAYEKNMHVLVVMTDMTNYCEALREVSSIRGEVPSRKGYPGYLYSDLASLYERAGKINGSSGSITQIPILTMPNDDISHPIPDLSGYITEGQIVLDRELFQRGIYPPVAGLPSLSRLMKDGIGEGMTREDHKDVSSQLFAAYSRVRQIRNLASIIGEEELSVTDKQYIKFGERFESIFLTQDEFENRDIDRTLDLGWKVLNEIPRDDLLRVKPEFIGKYLEPTKAMRI

SEQ ID NO: 63557 - DNA, 996 bp, Unknown
  Obtained from environmental sample
  misc_feature (1)..(996): n is a, c, g, or t
gtgtcttccgttgtggcccggacagacgagggcagggaaattacgcttgcccagtggtggcccgtgcgcattcccaggccaagtgcggaacggctctccaccgatatgcccctgatcacgggccagcgggtaatcgacgtatttttcccgatttccaagggtggcacctccgccatacccggaggcttcggcacgggcaagaccatgacccagcacgccatcgctaagtggtgcgatgcggacgtgatcatctacatcggctgcggagagcgtggaaacgagatgaccgacgtgcttaccgaattcccccatcttatagatccccgcagtgggcgttcccttatggagcgtaccgtgcttattgcaaacacttccaatatgccggttgcggcgcgggaagtttcaatttacacgggcgttaccatagcggagttttaccgcgacatgggctaccacgtcgccatcatggcggattccacaagccgctgggcggaagccctgcgggagctttccgggcgcatggaagaaatgcccgccgaggaaggctttccagcgtacctgccgacgcggcttgcggagttttacgaacgcgccggaagggttaaaacactttcaggcgcggaaggttcggtttcccttataggcgcggtttccccgccgggcggagatttttccgagccggttacccagcatacaaaaaggtttatccgctgtttttgggcactggatcgcgagcttgccaacgccaggcattaccccgctatttcgtggatcgacagttacagcgagtatgccgccgaggttgagccctggtgggaaaaggtaaatccccagtgggcggcggtgcgccgcagtgcgatagagcttttgaagagggaacaacgccttgcggagatagtccacatcattgggcctgacgccctgccggacaaccagcggcttatcctgcttgccgcagaaataataaagaacggattttacagcagaacagtttga

SEQ ID NO: 63558 - protein, 331 aa, Unknown
  Obtained from environmental sample
  DOMAIN (40)...(262): ATP synthase alpha/beta family, nucleotide-binding domain
  misc_feature (1)..(331): Xaa is any amino acid
MSSVVARTDEGREITLAQWWPVRIPRPSAERLSTDMPLITGQRVIDVFFPISKGGTSAIPGGFGTGKTMTQHAIAKWCDADVIIYIGCGERGNEMTDVLTEFPHLIDPRSGRSLMERTVLIANTSNMPVAAREVSIYTGVTIAEFYRDMGYHVAIMADSTSRWAEALRELSGRMEEMPAEEGFPAYLPTRLAEFYERAGRVKTLSGAEGSVSLIGAVSPPGGDFSEPVTQHTKRFIRCFWALDRELANARHYPAISWIDSYSEYAAEVEPWWEKVNPQWAAVRRSAIELLKREQRLAEIVHIIGPDALPDNQRLILLAAEIIKNGFYSRTV

SEQ ID NO: 63559 - DNA, 540 bp, Unknown
  Obtained from environmental sample
  misc_feature (1)..(540): n is a, c, g, or t
ttgaataacgggaaacttgctcttttaggtgacgaagccgtcgctctcggcgcgattcacgcggggttaagcgcggcttacggttatccggggactccttcaacggagatacttcagtatttaatagacgaacacgaaaaaaaccccgagagtcccctcgccgcgtggtgcgccaatgaaaaaaccgcgatggaagcggctttaggcgtttcctttgccggaaagcgcgccattgtcaccatgaaacatgtagggcttaacatagcgtccgacccgtttatcaatgccgctcttttaaaaataaagggcggccttgtcgtcgccgtcgccgatgatcccggaatgcacagttcccaaaatgagcaggattcccgtttttacgccgatttcgccatggttccctgtcttgagccgcgcagccagcaggaagcctacgacatggtccgcgaggcctttgacgtatcggaacgttttaacgtgcctgtgcttctgcgccttgttacacgccttgcccatgcgcgcggcgggagtcgtaattga

SEQ ID NO: 63560 - protein, 179 aa, Unknown
  Obtained from environmental sample
  misc_feature (1)..(179): Xaa is any amino acid
MNNGKLALLGDEAVALGAIHAGLSAAYGYPGTPSTEILQYLIDEHEKNPESPLAAWCANEKTAMEAALGVSFAGKRAIVTMKHVGLNIASDPFINAALLKIKGGLVVAVADDPGMHSSQNEQDSRFYADFAMVPCLEPRSQQEAYDMVREAFDVSERFNVPVLLRLVTRLAHARGGSRN

SEQ ID NO: 63561 - DNA, 906 bp, Unknown
  Obtained from environmental sample
  misc_feature (1)..(906): n is a, c, g, or t
ttgggctgtaattattacgaggaaaaccttgatgattttaacgccatgcggaaaaaacagggaaaaaagccccatcttcatcttcatataggcgcgtatccccttccctcaaaaaaaattaaacagttatgtgataacgtggacgggataattatcattgaggaagggtataatttaatagcaaggaaaattttcggcgttacaggcggctcttttaccaatataaagactcttatccaatgcggagaacttgaccctgacaatgtaagggccgctcttgggcttcctcccagaaaaagcgcattaaaaattcccgccaaccttccccaaaggccgccccaactctgtcagggctgccctcacgccgacagttacgaaacaatcaacaaagcggtgaacgcattagacccgaacccgcaaaagcccgacataggaattaactccgatataggctgttattcgcttggcgctactccgccttattcggccattgagagcgttatctgcatgggcgcctgcataggcatggcgaaaggcgcgtcggacgcgggactcaagcactctcttgccgttatcggcgattcaacatttatccattcagggataacgccacttattgacgcggcggcggcggatactccaatgaccgttatcatattggacaattccaccgttgcgatgaccggctgccaaccgactatagtaccctcaggcaacttagtgaacctcattcttggctgtggagtaaaacgcgaacatcttcttgaacttgaagcaaaaaaacaactgctggaagaaaataccgcgaaattaaaagctgaaatcgagcatcgcggtctttctgttgttattttcaagcgcgagtgtcttgaggcgttcagaaaaaacaaaaaatctaatttttga

SEQ ID NO: 63562 - protein, 301 aa, Unknown
  Obtained from environmental sample
  DOMAIN (149)...(285): Thiamine pyrophosphate enzyme, C-terminal TPP binding domain
  misc_feature (1)..(301): Xaa is any amino acid
MGCNYYEENLDDFNAMRKKQGKKPHLHLHIGAYPLPSKKIKQLCDNVDGIIIIEEGYNLIARKIFGVTGGSFTNIKTLIQCGELDPDNVRAALGLPPRKSALKIPANLPQRPPQLCQGCPHADSYETINKAVNALDPNPQKPDIGINSDIGCYSLGATPPYSAIESVICMGACIGMAKGASDAGLKHSLAVIGDSTFIHSGITPLIDAAAADTPMTVIILDNSTVAMTGCQPTIVPSGNLVNLILGCGVKREHLLELEAKKQLLEENTAKLKAEIEHRGLSVVIFKRECLEAFRKNKKSNF

SEQ ID NO: 63563 - DNA, 729 bp, Unknown
  Obtained from environmental sample
  misc_feature (1)..(729): n is a, c, g, or t
ttgatcattggagaggacaaatcgtgctgtctccggtgggccggccctgttttacccttgcccgcctccgcaaccttcaagcggggccaagtttccacaaagaggccctcccccaaaaaaacaacggccccgctctcctctcggaagcggggccggtttctcttgacgatcaaattatttcagttcttccatgacgcgatgcagctcatgggccgtctccgaaagcttgtgcagggacatggcggactggtgcatgccgtcggcggtctcgcccgtaatcttgttgatttcctcaagggagcggttgatctcttcggaggtcgcgctctgctcctccgccgccgtggcgatggaggcgactatcgcggagttggccgaggccaaatccacgatctccgtcagggcttggcccgaagtattggcaagctccgtggcctcgaagacggccttggccgcctcgctcacttccctgatgttggtctgggcggactgctggatggccgcgatgttggcccccacttcctgggtcgcggtcatggtcttttccgcaagcttgcgcacctcgtccgccaccacggcaaagccccggcccgcgtcgcccgcccgcgccgcttcaattgccgcgttcagcgccagaaggttggtctgatccgcgatgtcggaaatgacgttcatcaccccgccgatgctctccgccttgccgccccagtttcctgcatgttcgcntga

SEQ ID NO: 63564 - protein, 242 aa, Unknown
  Obtained from environmental sample
  misc_feature (1)..(242): Xaa is any amino acid
MIIGEDKSCCLRWAGPVLPLPASATFKRGQVSTKRPSPKKTTAPLSSRKRGRFLLTIKLFQFFHDAMQLMGRLRKLVQGHGGLVHAVGGLARNLVDFLKGAVDLFGGRALLLRRRGDGGDYRGVGRGQIHDLRQGLARSIGKLRGLEDGLGRLAHFPDVGLGGLLDGRDVGPHFLGRGHGLFRKLAHLVRHHGKAPARVARPRRFNCRVQRQKVGLIRDVGNDVHHPADALRLAAPVSCMFA

SEQ ID NO: 63565 - DNA, 504 bp, Unknown
  Obtained from environmental sample
  misc_feature (1)..(504): n is a, c, g, or t
gtgatgaacgtcatttccgacatcgcggatcagaccaaccttctggcgctgaacgcggcaattgaagcggcgcgggcgggcgacgcgggccggggctttgccgtggtggcggacgaggtgcgcaagcttgcggaaaagaccatgaccgcgacccaggaagtgggggccaacatcgcggccatccagcagtccgcccagaccaacatcagggaagtgagcgaggcggccaaggccgtcttcgaggccacggagcttgccaatacttcgggccaagccctgacggagatcgtggatttggcctcggccaactccgcgatagtcgcctccatcgccacggcggcggaggagcagagcgcgacctccgaagagatcaaccgctcccttgaggaaatcaacaagattacgggcgagaccgccgacggcatgcaccagtccgccatgtccctgcacaagctttcggagacggcccatgagctgcatcgcgtcatggaagaactgaaataa

SEQ ID NO: 63566 - protein, 167 aa, Unknown
  Obtained from environmental sample
  DOMAIN (1)...(167): Methyl-accepting chemotaxis protein (MCP) signaling domain
  misc_feature (1)..(167): Xaa is any amino acid
MMNVISDIADQTNLLALNAAIEAARAGDAGRGFAVVADEVRKLAEKTMTATQEVGANIAAIQQSAQTNIREVSEAAKAVFEATELANTSGQALTEIVDLASANSAIVASIATAAEEQSATSEEINRSLEEINKITGETADGMHQSAMSLHKLSETAHELHRVMEELK

SEQ ID NO: 63567 - DNA, 459 bp, Unknown
  Obtained from environmental sample
  misc_feature (1)..(459): n is a, c, g, or t
atgacgcgatgcagctcatgggccgtctccgaaagcttgtgcagggacatggcggactggtgcatgccgtcggcggtctcgcccgtaatcttgttgatttcctcaagggagcggttgatctcttcggaggtcgcgctctgctcctccgccgccgtggcgatggaggcgactatcgcggagttggccgaggccaaatccacgatctccgtcagggcttggcccgaagtattggcaagctccgtggcctcgaagacggccttggccgcctcgctcacttccctgatgttggtctgggcggactgctggatggccgcgatgttggcccccacttcctgggtcgcggtcatggtcttttccgcaagcttgcgcacctcgtccgccaccacggcaaagccccggcccgcgtcgcccgcccgcgccgcttcaattgccgcgttcagcgccagaaggttggtctga

SEQ ID NO: 63568 - protein, 152 aa, Unknown
  Obtained from environmental sample
  misc_feature (1)..(152): Xaa is any amino acid
MTRCSSWAVSESLCRDMADWCMPSAVSPVILLISSRERLISSEVALCSSAAVAMEATIAELAEAKSTISVRAWPEVLASSVASKTALAASLTSLMLVWADCWMAAMLAPTSWVAVMVFSASLRTSSATTAKPRPASPARAASIAAFSARRLV

SEQ ID NO: 63569 - DNA, 1551 bp, Unknown
  Obtained from environmental sample
  misc_feature (1)..(1551): n is a, c, g, or t
atggcggncgcgatcaaagacctgatggggcagttccaagcaggggtgcttcccctcaaggacgtcatggaggcgtccctgatcaccctgctgaacgacgcgcagcagagcgacaacacggctctgctttttctcctcaatcaaacgggacttgagtacgcgagcctgcgcttcgccctggcgaatttcacccatacgcgctccgccgatcaggcgaaggccgctgcggaaaaaatcacggacatcgtttctctggtggagaacatgaaaccggtcatccaggtgcaggcgaaccatgaagaccgcgacaagctggccgttgcagccgggagtcttgccaacgccttgaaggagatgattgagtcggccgggatcgccgacaaggcccttgccgccatgcgcgcaaaccatgcggccatagacaaaaaacttacggacttgagtccggtttacgatggactcatgcgagaaaccggacggattgtcgccgcgcagatcgccaacgcccagaccatgctgctgggcggcagcgccatcggcgtcctcatcggctttcttgccgcgctgtttctcatttggggactcatcagaacgctgaaggcggcggcttcctttgccgaggccattgccgacggcgacttccaggccagtctggagagccgggaaaagggcgaaatcggaaaaatgctggcggccatgcagaatgtttcccgtgttctgcaatctgtcttgaacgatttcaacaggctggatgagcggattgaagccggcgagatggacgccaaggccgacgccgccgcctacaagggcggcttcgcccggctgatcaccgatacccatgccattttggatcgcttcctctccattctggaggctgtgcccatccctcttctggtcttggacaagaacctcaagctcacttacgtcaacgccatctgccggcagcttgccggttcggactacaagggcaagaccgaggcgcagatatccgggcgcgaagatgccgacacgcccgacgatgccctgcaaaaggccgcgcaaaccctgcagcccgcctccggcgcaacccgcgcccatccgctgggcatgatcatggatgtcacctatatgtccatgcccctgctcgatcataagggcaaactcgcttccatgctccagttggtcacggatgtcaccgccctcaaagaaacccagcgcaccattcacaaagtggccgaacaggctgcttccatcgccaaccgggtggctgcctcttccgaagaactctccgcccaggtggaggaagtttcgcgcggggcgcagcagcagcgcgcccgcgtggaaagcacagccacagccatgacccaaatgaattccaccgtgctggaagtggcgaanagcgccgcccaggcttcggagcagtccgagaagaccaggaacaaggcgggcgatggggccgctctggtggacagggtggttgcgtccatcaacacggtgaaacaggcggcctccgcgcttcangcgaacatgcaggaaactggggcggcaaggcggagagcatcggcggggtga

SEQ ID NO: 63570 - protein, 516 aa, Unknown
  Obtained from environmental sample
  DOMAIN (173)...(242): HAMP domain
  misc_feature (1)..(516): Xaa is any amino acid
MAXAIKDLMGQFQAGVLPLKDVMEASLITLLNDAQQSDNTALLFLLNQTGLEYASLRFALANFTHTRSADQAKAAAEKITDIVSLVENMKPVIQVQANHEDRDKLAVAAGSLANALKEMIESAGIADKALAAMRANHAAIDKKLTDLSPVYDGLMRETGRIVAAQIANAQTMLLGGSAIGVLIGFLAALFLIWGLIRTLKAAASFAEAIADGDFQASLESREKGEIGKMLAAMQNVSRVLQSVLNDFNRLDERIEAGEMDAKADAAAYKGGFARLITDTHAILDRFLSILEAVPIPLLVLDKNLKLTYVNAICRQLAGSDYKGKTEAQISGREDADTPDDALQKAAQTLQPASGATRAHPLGMIMDVTYMSMPLLDHKGKLASMLQLVTDVTALKETQRTIHKVAEQAASIANRVAASSEELSAQVEEVSRGAQQQRARVESTATAMTQMNSTVLEVAXSAAQASEQSEKTRNKAGDGAALVDRVVASINTVKQAASALXANMQETGAARRRASAG

SEQ ID NO: 63571 - DNA, 1815 bp, Unknown
  Obtained from environmental sample
  misc_feature (1)..(1815): n is a, c, g, or t
gtgaagcagaatgtctaccggcttttggaaacggaaatatgggacgggatttcaaagcgcctgcaggaatttttgatccgcctttcactcatcgatcatttgtccgttgatttgatttcccagctgtcagaaggggaagaggggatgatcgcggaaatggagagacaaagcgcgtatatccggcgggacagttatatcaacgcgtacctcattcaccctctgtttttggaattcctgagaacaaagcaggaattgctttcggaaaaacaaaaaaaggaaacctacgccgtttcaggcgattggtgcgcccataacggttttaagatagacgccatttcctaccatgaaaagacgggaaactatcaatcaatactgctgattttagccgggttaaccacacagataccgcaggatatcgcgaaatacgcggccgccgtttttgaccgcgcgcctgatgaagcgttcgaaaagacggaattcctcgcggatatgcacttgcgtacctatatatgtcagggacttctgcaaaaatcacttgagttggtgaaacgctacgaagcgaaatttctcaaactgccgaatgatgatcctttaaaaaaacgtacgctgacaaggctttacatttgctggacatatatacgctgtttaatgagtgtaacggatgacattttcgattacgatatttatgttgaaaaagcctgtaaatgcgcgcaagaggaagattcgggcaaactcgacatttattatcctggggcgtggatcaattacaccggttcctcaaggaagggcggcccggatgaatatattgccgcgatagcccgcaatcaggcgcatatacaaaaaagttttattaaagggtttatggccggagaacttgaactggcgcggggcgaaaaaaaattctaccggggcgatacttcttccgctgagactcatattgccctcgcggtaaaacaggcgcgggcggaaaagcaattcggtcttatgcacagggcgctgctttatactctgcgcatcgccgctttccatgggaatttcgcggcggcggaacagacgctgaaagacacaaaagcccaacaggacgaaaccgcgtacctttacagtttttcggattacgacatttcactttcatggtatttctgttttctgggaatgcctgaaaaagtttccggctggcttcaggaagatttttcgccttacattcatcctgcttttattgaaaatttcgggaatcaaataaaagcgcggttctgttacgcgacaaggaattttatccctcttctcgcgtacatcgaagaaatgaaagctcgggaatcgattttattcgggcgaatagaaatgctggcgatggaagcctgcatacatcataaaatgaaaaataaaaaaaaggcctttgccgctctgcggaatgcctatgaaaacgcgtttcccaacgaaatcgtaatgccctttattgagatgggaaaagatatgcgtacattgacatccgtcgtattgaaagaatctgacgatgttattcctaaagcatggctggaagaaataaaccgcaagtccgcctcctatgccaagcgccgcgcccatgtcattgcggaatacgcgcaggcaaaccgcatgtcggacagcatcagcattaccccgcgtgaatcggacatcctcagcgacctttcccacggcttttcacgcgctgaaatcgccgccagccgcaacctttcgattaataccataaaaatggtgataaacgatctgtattacaagctgggagccgagaatctggcggatcttatacgcattgcgacgatacggaaaatcatataa

SEQ ID NO: 63572 - protein, 604 aa, Unknown
  Obtained from environmental sample
  DOMAIN (541)...(598): Bacterial regulatory proteins, luxR family
  misc_feature (1)..(604): Xaa is any amino acid
MKQNVYRLLETEIWDGISKRLQEFLIRLSLIDHLSVDLISQLSEGEEGMIAEMERQSAYIRRDSYINAYLIHPLFLEFLRTKQELLSEKQKKETYAVSGDWCAHNGFKIDAISYHEKTGNYQSILLILAGLTTQIPQDIAKYAAAVFDRAPDEAFEKTEFLADMHLRTYICQGLLQKSLELVKRYEAKFLKLPNDDPLKKRTLTRLYICWTYIRCLMSVTDDIFDYDIYVEKACKCAQEEDSGKLDIYYPGAWINYTGSSRKGGPDEYIAAIARNQAHIQKSFIKGFMAGELELARGEKKFYRGDTSSAETHIALAVKQARAEKQFGLMHRALLYTLRIAAFHGNFAAAEQTLKDTKAQQDETAYLYSFSDYDISLSWYFCFLGMPEKVSGWLQEDFSPYIHPAFIENFGNQIKARFCYATRNFIPLLAYIEEMKARESILFGRIEMLAMEACIHHKMKNKKKAFAALRNAYENAFPNEIVMPFIEMGKDMRTLTSVVLKESDDVIPKAWLEEINRKSASYAKRRAHVIAEYAQANRMSDSISITPRESDILSDLSHGFSRAEIAASRNLSINTIKMVINDLYYKLGAENLADLIRIATIRKII

SEQ ID NO: 63573 - DNA, 786 bp, Unknown
  Obtained from environmental sample
  misc_feature (1)..(786): n is a, c, g, or t
atgggtacagattacaaagcactgaaaaacggcggattcatgcggcaaacgcagaagaataatttttccctgcggctcaaagtagtaggcggaaacttaaccgcagagcaattggttgctattgctgaaatcagcaaaaagtacggggacgggtatgttcacttaacttcacggcaaggtgtggaaattccgttcataaagctggataatgttgaagcggtaaaaaccgaactggaagcgggaggagtgaataccggcgtttgcggtccgagagtgcgtactgtaacagcctgccagggcagtgcgatatgcccatccggttgcatagatacatatcctttggcggtagaaatttccaatcgttattttgggcaggaactgcctcataaatttaaattcggaattactggctgcatgaataactgcctcaaagcagaggaaaatgaccttggcataaaaggcggttatagcgttgagctggttaaggaaaactgtaccttatgcggcgtgtgtgtaaaggcttgccgtgagggtgcaattaccaaaaccagcgaagggcttgcaatagataaatccagatgcaattactgcggacgttgtgccaaatcttgcccctttgatgcgtggaaaggagaacctggatatatcctctcatttggcggaacatttggcaacttgattgcaaagggcgagcagtttttgcccattatccgcagcaaggaagttctgtttaaaattactgatgctgcactgaatttttttgccaaatatgcaaaggccaagtga

SEQ ID NO: 63574 - protein, 261 aa, Unknown
  Obtained from environmental sample
  DOMAIN (88)...(261): Nitrite and sulphite reductase 4Fe-4S domain
  misc_feature (1)..(261): Xaa is any amino acid
MGTDYKALKNGGFMRQTQKNNFSLRLKVVGGNLTAEQLVAIAEISKKYGDGYVHLTSRQGVEIPFIKLDNVEAVKTELEAGGVNTGVCGPRVRTVTACQGSAICPSGCIDTYPLAVEISNRYFGQELPHKFKFGITGCMNNCLKAEENDLGIKGGYSVELVKENCTLCGVCVKACREGAITKTSEGLAIDKSRCNYCGRCAKSCPFDAWKGEPGYILSFGGTFGNLIAKGEQFLPIIRSKEVLFKITDAALNFFAKYAKAK

SEQ ID NO: 63575 - DNA, 588 bp, Unknown
  Obtained from environmental sample
  misc_feature (1)..(588): n is a, c, g, or t
gtgatttgcgatggaaactttgggataataaaagcggccaagcgattgtggaagaatgcgagaatacagcggtgtttagttcatatcaccagagatgcggaacggaaattaggcaagcgcagcccactagaaataaaccatgtttttcgccggcacattaaaaaattgtattgcgttgacaccatcagaaaaacagaaatttggcttggtaaatttgacaaattgtataacaggcataaagaattcattgaggaattgacattaaaaattgacgaggcaaccggggaggcaatccgccaagacagaacccataaaaatctattctcggcgtgttatatggtgcgcaatgcgataaagaaaaatatgctattcttgcatattgaaaataaaatcccaaacaactcaaattgtttggagggcggcataaactctccgctcaaaaatctgttaagatgccatcgaggtatctcattggaacatcaaaaaagaatgctcgaatggtatcttttaacacgttctagaacatctataaacaacttcataaattcactggatttcgacaatctatatcccaaaaatggcaattaa

SEQ ID NO: 63576 - protein, 195 aa, Unknown
  Obtained from environmental sample
  misc_feature (1)..(195): Xaa is any amino acid
MICDGNFGIIKAAKRLWKNARIQRCLVHITRDAERKLGKRSPLEINHVFRRHIKKLYCVDTIRKTEIWLGKFDKLYNRHKEFIEELTLKIDEATGEAIRQDRTHKNLFSACYMVRNAIKKNMLFLHIENKIPNNSNCLEGGINSPLKNLLRCHRGISLEHQKRMLEWYLLTRSRTSINNFINSLDFDNLYPKNGN

SEQ ID NO: 63577 - DNA, 990 bp, Unknown
  Obtained from environmental sample
  misc_feature (1)..(990): n is a, c, g, or t
ttgaaagggattcaggcttacttcaagaaagattaccgcagcgaggacatacgcgaaggtacggcagcggcggtagcggtgaagctgaaaaacccggtttttgaaagccagacaaaaaataaacttggaaactcggatatacggagctggatagtccaggaagtaaaagacgctaccgaggactggcttcataaaaacaccgaggccgccaaaaagctggagcgcaagattctcgccaacgaaagcctccgcaccgagcttaaccaggttaaaaaagaagcgcgtgaggccgctaaaaaaatcgcccttaagatcccaaagcttaaggattgcaagtaccaccttgaagacggcgaagaaggggaactttctaccatctttattacagaaggagattccgctgccggttccatggtgtcaagcagggacgtgatgacccaggctatcttcgccctccgaggcaaggtagaaaacgtgtttggcaaaaagcgggcggccatttacaagaacgaagagctgtacaacatgatgatggcgctgggaatagagaatgacgtttccggcctccgttacgccaggattgtgattgcgaccgacgcggattttgacggcttccatatcagaaatcttcttttaactttctttctgtcttattttgaagaactcgtaacctcaggcaggatatatatccttgagactccccttttccgggtgaggaataaaaaagaaaccagttactgctacaacgccgacgaaagggacacggctgtttacgcgctgggcagccaggccgaggtaacccgttttaagggccttggggaaattaacccgaaggagttcggccagtttatcggcgaagacatgcgccttgtgccggtttcggtgagtaccctaaaaaccgttccacaggtattgaatttttacatgggcaagaacacccctgagcgacgggaatatattatgaaaaacttaatcgaggacgctggttaa

SEQ ID NO: 63578 - protein, 329 aa, Unknown
  Obtained from environmental sample
  DOMAIN (257)...(321): DNA gyrase B subunit, carboxyl terminus
  misc_feature (1)..(329): Xaa is any amino acid
MKGIQAYFKKDYRSEDIREGTAAAVAVKLKNPVFESQTKNKLGNSDIRSWIVQEVKDATEDWLHKNTEAAKKLERKILANESLRTELNQVKKEAREAAKKIALKIPKLKDCKYHLEDGEEGELSTIFITEGDSAAGSMVSSRDVMTQAIFALRGKVENVFGKKRAAIYKNEELYNMMMALGIENDVSGLRYARIVIATDADFDGFHIRNLLLTFFLSYFEELVTSGRIYILETPLFRVRNKKETSYCYNADERDTAVYALGSQAEVTRFKGLGEINPKEFGQFIGEDMRLVPVSVSTLKTVPQVLNFYMGKNTPERREYIMKNLIEDAG

SEQ ID NO: 63579 - DNA, 522 bp, Unknown
  Obtained from environmental sample
  misc_feature (1)..(522): n is a, c, g, or t
atggtgggtataagcggcgaaagagcgcagcagcttttgctgnaggaattcggctctgattttccctatgaggcaatacgcgacgagtacaggatacttgtcagcaaagaaattgaaaaaaatggagttcccaaaaaacccggacttatgtacttgcttgaccgtcttcgcgccgcaaatatccctcttggggtagcgacttctacccgcagtccaagagccattgacctgttggaaagagccggcattcttgaccgtttcaagacgctaacatgcggcgaagatattacaaacggaaaaccagcgcccgatattttccttcttgccgcaaaaaaactgggccagccgccctgtaattgcgtaggctttgaggattccaccgccggccttatgggccttcacgccgccgggatacgctcggtctacataaaagacgttcttgacccgcccgaagaagtccttgccaccgtctggcacagatgcaatgatctgtccgaggctgcggttttattcgggctgtaa

SEQ ID NO: 63580 - protein, 173 aa, Unknown
  Obtained from environmental sample
  DOMAIN (4)...(146): haloacid dehalogenase-like hydrolase
  misc_feature (1)..(173): Xaa is any amino acid
MVGISGERAQQLLLXEFGSDFPYEAIRDEYRILVSKEIEKNGVPKKPGLMYLLDRLRAANIPLGVATSTRSPRAIDLLERAGILDRFKTLTCGEDITNGKPAPDIFLLAAKKLGQPPCNCVGFEDSTAGLMGLHAAGIRSVYIKDVLDPPEEVLATVWHRCNDLSEAAVLFGL

SEQ ID NO: 63581 - DNA, 423 bp, Unknown
  Obtained from environmental sample
  misc_feature (1)..(423): n is a, c, g, or t
gtggcggatctngccgccgtctacggtcttggagaaataaccgcctctgtaattacagaaggtcttaaagaatgcgccgccgaaatggacgcggttttaaaaacaggaattattacgatagccccaccgccctcggaagaatcccaacccatgcgcggcttgtctttttgtttcaccggagaactaaagtcaatgaaaaggggagaggcggaggagaaaataaaagccctcggcgcgcaggcgaaatcctcggtagtaaaaggactatcctatcttgtaacaaatgatcccgcctccggctcctcaaagaacaaaaaagcgaaagaactgggagtgcgaattatcaatgaagatgaattcttggctttgctttcaggtggtaaaccggaaaaaaacgcgccgacgcaaggggagttgttttaa

SEQ ID NO: 63582 - protein, 140 aa, Unknown
  Obtained from environmental sample
  DOMAIN (46)...(124): BRCA1 C Terminus (BRCT) domain
  misc_feature (1)..(140): Xaa is any amino acid
MADLAAVYGLGEITASVITEGLKECAAEMDAVLKTGIITIAPPPSEESQPMRGLSFCFTGELKSMKRGEAEEKIKALGAQAKSSVVKGLSYLVTNDPASGSSKNKKAKELGVRIINEDEFLALLSGGKPEKNAPTQGELF

SEQ ID NO: 63583 - DNA, 687 bp, Unknown
  Obtained from environmental sample
  misc_feature (1)..(687): n is a, c, g, or t
atgtgtaacatgacagatgttatcatcccggacagcattgagagaattgggaatggggccttttgtaattgcgggcttacaagcatcgttattccggacagcgttaaaaaagcgggtgaatatatattttcacattgtacatccctaaaaagcgccgtgctttctaaaaatatgaaaaccagttggaaatatgcttttagcgtctgtacaagcctcgccagtgtaactattcctgacggagttaaagaaatcgggagttgttgttttgcaggttgtacagggctaaccagcataacaattccgaaaagccttacagaatatgtcagtgcatttgaacgttgtacagggctaaccagcgtaacatttcagaagggcgttaaggtaatagggagatcagcattttattactgtacagggctaaccagtataacaattccagaaggcgttgaagaaattctatcaagcgcatttgaaggctgcacgggtctgaccagcataacaatcccgaaaaccgtagtgaaaatggatattagtgtttttggaggttgtgataagcagttgactgttaatgtgcttggattgagcgaaatgcctaaatcatggaatagtggttggaaaggcaaatgcgaatgcaaagttatatgggatttcggcggcaagaatatagttgaagaaagaggcgcgtaa

SEQ ID NO: 63584 - protein, 228 aa, Unknown
  Obtained from environmental sample
  misc_feature (1)..(228): Xaa is any amino acid
MCNMTDVIIPDSIERIGNGAFCNCGLTSIVIPDSVKKAGEYIFSHCTSLKSAVLSKNMKTSWKYAFSVCTSLASVTIPDGVKEIGSCCFAGCTGLTSITIPKSLTEYVSAFERCTGLTSVTFQKGVKVIGRSAFYYCTGLTSITIPEGVEEILSSAFEGCTGLTSITIPKTVVKMDISVFGGCDKQLTVNVLGLSEMPKSWNSGWKGKCECKVIWDFGGKNIVEERGA

SEQ ID NO: 63585 - DNA, 1251 bp, Unknown
  Obtained from environmental sample
  misc_feature (1)..(1251): n is a, c, g, or t
atgaataacgggcaatttgaacagatggtcggagcgaaagccacagccataaagcatatttataaaacgtcaaaagcgttaattacagggcatgataaagatatagaaacaacatttagtgaaaattcgttggacggcgtaaatacattatacgatctgtttcccgtgcttaaaacgcaaatacttgttaatcacagcggttatcatttcgggaggcatgacgagaaaggagccgcggaaaaagcgaaagaggctattttactcgggcagagtaagaattcattctgtcttccgcaggcataccggcttttctcgcttgtatgtctttccaaacagcaggtaaacgagacgattgaataccttggattcgctctttcaaacgctgaaaaaaccggcaattaccatgagatgtcattatctgcgtattattccgccgccgcgcaatttttacacggcgacgtatttcacgccgccgatctcgctaacagatcgattaagcaatcgcttgcctcaggccgtcccgattgggctgatcgttcccgttttttggaaggtcggatagaatttgatcttggtcattacaggaaagcccatgatatttttgacggcttgttaaaggagccttatggcagcatgacatgtgaaaaggaaaacctgatggccgcgtggatttaccgttcaaaaatatattttgacaatccaaatattccaaaacccgaacccgcgaatcacgacgctgatttatttgaaattgaagcggcatatctggccggcgattataaaaaggcggtagaattgtcatcatcacataacaatccttttgtggaagaaaactttctgtacaccgaacaggctgactggcgcagcggattcgcccaatgcgaacaactgtattttacccacggagagatccaaagcagaatgatttccctttatcattccctggccctaagccgcctgtcaaaaggcaactgcgaagaagctcttcatgaaattcaaaatattcttcgcgatgaaaaactctgtgaaatggacccctgggacgcgttttatttttacgcgaagtaccgaattcttgtacaggctgaagccagtcttgtagacatgagcacggccgtcagcatggcctttaagcgccttcagcgccgtgcagggcgcatagacgacaacgaaacccgccgtcaatacctgaacggctcccgctggaaccgtgaattaagcctggcggctaaagaatttaagttgatttag

SEQ ID NO: 63586 - protein, 416 aa, Unknown
  Obtained from environmental sample
  misc_feature (1)..(416): Xaa is any amino acid
MNNGQFEQMVGAKATAIKHIYKTSKALITGHDKDIETTFSENSLDGVNTLYDLFPVLKTQILVNHSGYHFGRHDEKGAAEKAKEAILLGQSKNSFCLPQAYRLFSLVCLSKQQVNETIEYLGFALSNAEKTGNYHEMSLSAYYSAAAQFLHGDVFHAADLANRSIKQSLASGRPDWADRSRFLEGRIEFDLGHYRKAHDIFDGLLKEPYGSMTCEKENLMAAWIYRSKIYFDNPNIPKPEPANHDADLFEIEAAYLAGDYKKAVELSSSHNNPFVEENFLYTEQADWRSGFAQCEQLYFTHGEIQSRMISLYHSLALSRLSKGNCEEALHEIQNILRDEKLCEMDPWDAFYFYAKYRILVQAEASLVDMSTAVSMAFKRLQRRAGRIDDNETRRQYLNGSRWNRELSLAAKEFKLI

SEQ ID NO: 63587 - DNA, 1911 bp, Unknown
  Obtained from environmental sample
  misc_feature (1)..(1911): n is a, c, g, or t
atggaaaaaacccttcctttgatgttgcgaacccgcgcaaaagacagcccggacattaacatccaatactataaagattcttcaggctcatataaggctaaaacataccggcaattctatgaggaagtttgttttctcacatccgcccttatcgggcttggcgttgaaaggcaggaccgcatagggctgattgccgacaacaggcaggaatggatggttgccagttttgccattcactcggccggggccgccgacgtgccgaggggaggcgacgtaacggttcaggaaattggctacattctgggctttactgaatgtaagcttgccttcgcggagaatcagaaacaggcgctgaaaatcatctcttgtaaacaggatattccgctgctgaagaccatgataacgtttgaccctgttgacagggaaacagaggataaagccgcggaagagggaataaccattcattactttccaagcgtaatcgccattgggcagaagcgcgagtatgaaaagcccggaagcgccgaggccgagatggacaaaggcggggaagaggatacggcctcgatcatttttacttccggcaccacgggtgaaccaaaaggggtcatgctctgccaccgcaattttttatgccagcttcccgcgttcaacctgtattttgagcttaagcccggcgatatatggctttccatgctggcggtctggcacgtatacgagcgtgaaatcgaatatgttatcttctattaccgcacgggcatcgcctattccaagcctgtcgcgtctgttcttatggaagacttccaggccataaggccccagtggatggtaagcgtcccccgcgtctgggaagcgattatggacggcattacccgcagcgtaaagccgatgggctcgctcgcgaaaaacttttttaacctggccgtttccgtgtcaatgatatacacatactttaaggatctgactttcggcctcctgcccaatttccacggccgctggcgggcgcttgattcggcgataggatttttcccctggctgcttctgctgcccattaaggggcttgcccaggcgctggtgttcaaccggataaaaaagcggctgggcgggcgtttcaaagcgggtatttccggcgggggcagtctgccggcgcgggtggatctgtttttcaattctgtgggcctgcgcctgcaggaagtctacggccttaccgagacggccccgtttttaaccgcgcgccaatacaagcgctcgcggcgcggaaccataggccagctgctgccgggcaccgaagcgagggttcttgacgccaacggcaaatccctgccgcccggccgcaacgggatcatctgggtcaggggcaggcaggtaatgaaaggctactataaaaagcccgaagccacagccgctgtactcagtccggacggctggttcaataccggcgatatcggaatgcttacccacgacaaagaattacgcataacgggacgggccaaggacaccatagtgctgagggggggcgaaaacgtcgagcctgttcccatcgaacataaaatgcgggaaagcccctacatatttcagtgcatggtgctggggcaggatcagaaattccttgccgcccttatcgttcccaggcaggagaagataatggcctttgccgaagaaaacaacatccctatagttgactacgagctgttattgcagcagccggaaataaaccagcttatcagtaccgagctttccgacaggatcagcacaaaaaccggctttaaaccttttgagcgggtttttaaatttaccctgctgacaaaaccctttgagataggcagggagctttcctccaagcaggatctgatgcgccaccggataagcgcgatatacgctaaggagatacagaggttgttcagacagtag

SEQ ID NO: 63588 - protein, 636 aa, Unknown
  Obtained from environmental sample
  DOMAIN (35)...(529): AMP-binding enzyme
  misc_feature (1)..(636): Xaa is any amino acid
MEKTLPLMLRTRAKDSPDINIQYYKDSSGSYKAKTYRQFYEEVCFLTSALIGLGVERQDRIGLIADNRQEWMVASFAIHSAGAADVPRGGDVTVQEIGYILGFTECKLAFAENQKQALKIISCKQDIPLLKTMITFDPVDRETEDKAAEEGITIHYFPSVIAIGQKREYEKPGSAEAEMDKGGEEDTASIIFTSGTTGEPKGVMLCHRNFLCQLPAFNLYFELKPGDIWLSMLAVWHVYEREIEYVIFYYRTGIAYSKPVASVLMEDFQAIRPQWMVSVPRVWEAIMDGITRSVKPMGSLAKNFFNLAVSVSMIYTYFKDLTFGLLPNFHGRWRALDSAIGFFPWLLLLPIKGLAQALVFNRIKKRLGGRFKAGISGGGSLPARVDLFFNSVGLRLQEVYGLTETAPFLTARQYKRSRRGTIGQLLPGTEARVLDANGKSLPPGRNGIIWVRGRQVMKGYYKKPEATAAVLSPDGWFNTGDIGMLTHDKELRITGRAKDTIVLRGGENVEPVPIEHKMRESPYIFQCMVLGQDQKFLAALIVPRQEKIMAFAEENNIPIVDYELLLQQPEINQLISTELSDRISTKTGFKPFERVFKFTLLTKPFEIGRELSSKQDLMRHRISAIYAKEIQRLFRQ

SEQ ID NO: 63589 - DNA, 588 bp, Unknown
  Obtained from environmental sample
  misc_feature (1)..(588): n is a, c, g, or t
gtgactaaaccagccagatatgtccgaggcatcgacttcctccagcgccgtcttcatggccgccaccagaccgccgtacgtgcgcgccttcagccgcctgagggacgccttcatcttcgaccggcacagctctatcgggttgaagtcggggctgtagggcggcaggaacagaaccgacgcgcccaccccgcatatcggctccaacgcgcccttcaccttgtggaccgccagattgtccatgaccacgatgtcgccctcccccaggacgggggccaggacgtccctgacgtagacggcgaaggtcgcgccgtccagggcgtccttgaacaccatcgtggcgtccccgccgcccagccgcacggccgaaatgacggtcgtgcgctcgaagcgggagtcaggcgcgtggtcgccgaccctctcccttttcttccccctgccgtaccgcctggtcatgccgcagtcgacgctgctcttgtccaggaccccaagctgcctgggtctaggccctccctggcttcggcccaggcgtccctcttttggcggacgtcctccctgagctgggcctcggggaagaccgtttttttttga

SEQ ID NO: 63590 - protein, 195 aa, Unknown
  Obtained from environmental sample
  misc_feature (1)..(195): Xaa is any amino acid
MTKPARYVRGIDFLQRRLHGRHQTAVRARLQPPEGRLHLRPAQLYRVEVGAVGRQEQNRRAHPAYRLQRALHLVDRQIVHDHDVALPQDGGQDVPDVDGEGRAVQGVLEHHRGVPAAQPHGRNDGRALEAGVRRVVADPLPFLPPAVPPGHAAVDAALVQDPKLPGSRPSLASAQASLFWRTSSLSWASGKTVFF

SEQ ID NO: 63591 - DNA, 468 bp, Unknown
  Obtained from environmental sample
  misc_feature (1)..(468): n is a, c, g, or t
atgaccaggcggtacggcagggggaagaaaagggagagggtcggcgaccacgcgcctgactcccgcttcgagcgcacgaccgtcatttcggccgtgcggctgggcggcggggacgccacgatggtgttcaaggacgccctggacggcgcgaccttcgccgtctacgtcagggacgtcctggcccccgtcctgggggagggcgacatcgtggtcatggacaatctggcggtccacaaggtgaagggcgcgttggagccgatatgcggggtgggcgcgtcggttctgttcctgccgccctacagccccgacttcaacccgatagagctgtgccggtcgaagatgaaggcgtccctcaggcggctgaaggcgcgcacgtacggcggtctggtggcggccatgaagacggcgctggaggaagtcgatgcctcggacatatctggctggtttagtcactgtggatactgctaa

SEQ ID NO: 63592 - protein, 155 aa, Unknown
  Obtained from environmental sample
  misc_feature (1)..(155): Xaa is any amino acid
MTRRYGRGKKRERVGDHAPDSRFERTTVISAVRLGGGDATMVFKDALDGATFAVYVRDVLAPVLGEGDIVVMDNLAVHKVKGALEPICGVGASVLFLPPYSPDFNPIELCRSKMKASLRRLKARTYGGLVAAMKTALEEVDASDISGWFSHCGYC

SEQ ID NO: 63593 - DNA, 1248 bp, Unknown
  Obtained from environmental sample
  misc_feature (1)..(1248): n is a, c, g, or t
atggagttaaatttgaaggaaagacaaaaactaaccgcgataacggctaagaaataccgtatggcgagaaagagggaaaagaccaaaatactggatactttcattgaacaaaccggatatgaccggaaatacgcgatacatatcctcgccaatgaaggccggatcaaggcggcggaaaaacgagttcgaataaaaacaacacataaaaaaacaaagcggcgccgttatcccgttatttatgacaaagcggttcagaacgcgctggcgctcatctgggaggcttttaaccgccagtgcgggaaattgcttgagcctttcctgcgcgcgaacatcgaccgcattgtacaagaacccaggttcgatccgggcgctgatgtaacggccaagttacggaagatcagcgcctcaacaatcgaccgtcttctgaaaccaaacaaggccaaattgaaaatcaagggcaccggcggcaccaagcccgcggccacgcacattaagaaattgatacccacgctcagccatttcgaatgcgtcgaacaaggggatggtttgtggcaaatagaccttgtccagcatgacggcggcaatccgtcaggggaattttgctatactttgaccattaccgaggttaaaaacgcatggacggtacattacgcgctgaaaaacaaggctttcgcatgggtctaccaagccctcaacgacgcctgtttgcaactcccccttccggtacgcatcctgcattcggataacggcagcgagtttattaacaacgccctcatgacatggtgcgaacggcaggaaataacccttaccagaagccgcggcagcaggaaaaatgacaattgtttcgttgaacagaaaaatggcgcgaccgtcagaaaacacgtcggttacctgcgttattccggcgacaggggcgttatcgcgctgcaggatgtttacacgcattacgaccggctgttcaatttcttttacgccgcccgcaaactggtttccaaagaaagggcgggaagcaaagtaagaagaacttacgacaagccgcagactccttttgaacgggccatgttgtctgccgacacttcagaggaaataaaaagacatctcaagtctttgaagaaacggttaaatctcatgaccgagatgaaaaaaatgcagcaggctcttgacaaattaccttctttcgctgaacctgttcctgagtttgtttccaagccaaacatgaagccgttgcgcttcggttcctatggttag

SEQ ID NO: 63594 - protein, 415 aa, Unknown
  Obtained from environmental sample
  DOMAIN (176)...(354): Integrase core domain
  misc_feature (1)..(415): Xaa is any amino acid
MELNLKERQKLTAITAKKYRMARKREKTKILDTFIEQTGYDRKYAIHILANEGRIKAAEKRVRIKTTHKKTKRRRYPVIYDKAVQNALALIWEAFNRQCGKLLEPFLRANIDRIVQEPRFDPGADVTAKLRKISASTIDRLLKPNKAKLKIKGTGGTKPAATHIKKLIPTLSHFECVEQGDGLWQIDLVQHDGGNPSGEFCYTLTITEVKNAWTVHYALKNKAFAWVYQALNDACLQLPLPVRILHSDNGSEFINNALMTWCERQEITLTRSRGSRKNDNCFVEQKNGATVRKHVGYLRYSGDRGVIALQDVYTHYDRLFNFFYAARKLVSKERAGSKVRRTYDKPQTPFERAMLSADTSEEIKRHLKSLKKRLNLMTEMKKMQQALDKLPSFAEPVPEFVSKPNMKPLRFGSYG

SEQ ID NO: 63595 - DNA, 327 bp, Unknown
  Obtained from environmental sample
  misc_feature (1)..(327): n is a, c, g, or t
ttgcttttttatcacatggaactgcgttgttttgttgtaatagagttaaaagcgggaaaatttgaagccgagcatatcggaaaacttggtttgtatatatcggcggttaaccatcaaatgaaaaaagaagctgacggaccgacaataggaatgattatctgcaaaacaaaagacagcgttgaagtgcagtattctttagaaattgtaaaccagcccatcggcgtttccgaataccggctttcaaaacttttgccggataatttgaaaagcagtctgcccagcattgaagagttggaagaacaattaaaaaagatggatgatgtgtga

SEQ ID NO: 63596 - protein, 108 aa, Unknown
  Obtained from environmental sample
  misc_feature (1)..(108): Xaa is any amino acid
MLFYHMELRCFVVIELKAGKFEAEHIGKLGLYISAVNHQMKKEADGPTIGMIICKTKDSVEVQYSLEIVNQPIGVSEYRLSKLLPDNLKSSLPSIEELEEQLKKMDDV

SEQ ID NO: 63597 - DNA, 402 bp, Unknown
  Obtained from environmental sample
  misc_feature (1)..(402): n is a, c, g, or t
gtgttaaaatttgtttccgttattttgcaaattaaagagtacgaaaagggaacgccgatcagttacaacagaagatttgttacaaagcgaaaaagcagaatagcgacagtttccgcaggctattcagacggcatcagccggaaattgtttgatcccaaaaacaagaaaaacgggttttttgccgtaaacggacaacgcgctcccattgccggaacagtctgcatggacctgacaatgatagatattaccgacattaaaggcgacgttaacgtaggcgatgaagtcgccatttttgacaatgtcaacgtaaccgtagaggaaatggccggtatttgcgggacaatcgggtatgagattatctcgcaaatagaggacaaagccgacagggtggagagtttctaa

SEQ ID NO: 63598 - protein, 133 aa, Unknown
  Obtained from environmental sample
  DOMAIN (1)...(132): Alanine racemase, C-terminal domain
  misc_feature (1)..(133): Xaa is any amino acid
MLKFVSVILQIKEYEKGTPISYNRRFVTKRKSRIATVSAGYSDGISRKLFDPKNKKNGFFAVNGQRAPIAGTVCMDLTMIDITDIKGDVNVGDEVAIFDNVNVTVEEMAGICGTIGYEIISQIEDKADRVESF

SEQ ID NO: 63599 - DNA, 1428 bp, Unknown
  Obtained from environmental sample
  misc_feature (1)..(1428): n is a, c, g, or t
atgtgcggaatttccgcggaaaatattcaggcggacgataatccctcgtcttttgacgttgtttataaagggcaatcctttccctgttcgcttccggcaatcggaaagcacaatgtaaccaacgcgctttttgcgcttttttgcggcgtaaaactaggcatagacataacagacgcgataaacgaaattaagcgttataccgtctcttctatgcgcacggaaaccgcatacgtaaaaggaattacgataataaaagattattacaacgccagccccgattccgcccgcgccgctctggaagttcttgcgaactatccttcgtccgggaaaaagctcgccatattaggtgaaatatttgagttaggcgatttcagcgcgcctgaacacacaaatctcgcaaagacgtgcaatgataaaaagattgattatgtgtttttcataggcgcggattttgaatgttttaaaaaggaattgaaaaacggcgaatgtttcagcgaccgcgaaagggacgctttttccaggtcgcttaaaaattatatttccggcggcaatttaaaaaagggcgatgttatactgataaaaggctcaagagggatgaagatggaggaattttacgaaccgcttaaaagttatataaacgccgcaatgatcgattctacccatctgcccccaagcgcgacaaaattgtatgtggatattaacgccgtaaaattcaattattcgcagataaaaaaagaagtcggaagccatgtggaaataatgccgatggtaaaagccaatgcctacggctgcggaacggacgttatcgccaatgttttccgccacagcaagtatctggctgtggccgacgttaaggaagcagcgttaatccgccgtgttttgccggaagcgaatatcgtaataatttatcagccgtacgcgggggatattgaggaaattgttgcgggaggctatacagtttccgtaagcaatttggattttgccgagaaactgaatgaagaagcgggaaagcacggtaaaaaaataaaaattcatattgaagttgataccggagccggaagactgggcttgagcgtccgcgaaagtaaagattttgcgcaatccgtaaaaactcttgctaatataatcacggaaggcgtttttatgcactatgcctgcgccgacagtttcgataagagcgatttggaatttacaaagaagcagacagatttattcaaaacggcggctgttgaaattgaaagcgtattaggcgttatcccgtacaaacacgcatgcgccggagccgcgatttttaaccaaaacgccgcgcattttaatatggtgcgtcccggctacatgatctacggctattatccaagcgaggcgcttcgcggtaaaatcctgcttaaaacccgtgttaaaatttgtttccgttattttgcaaattaa

SEQ ID NO: 63600 - protein, 475 aa, Unknown
  Obtained from environmental sample
  DOMAIN (226)...(453): Alanine racemase, N-terminal domain
  misc_feature (1)..(475): Xaa is any amino acid
MCGISAENIQADDNPSSFDVVYKGQSFPCSLPAIGKHNVTNALFALFCGVKLGIDITDAINEIKRYTVSSMRTETAYVKGITIIKDYYNASPDSARAALEVLANYPSSGKKLAILGEIFELGDFSAPEHTNLAKTCNDKKIDYVFFIGADFECFKKELKNGECFSDRERDAFSRSLKNYISGGNLKKGDVILIKGSRGMKMEEFYEPLKSYINAAMIDSTHLPPSATKLYVDINAVKFNYSQIKKEVGSHVEIMPMVKANAYGCGTDVIANVFRHSKYLAVADVKEAALIRRVLPEANIVIIYQPYAGDIEEIVAGGYTVSVSNLDFAEKLNEEAGKHGKKIKIHIEVDTGAGRLGLSVRESKDFAQSVKTLANIITEGVFMHYACADSFDKSDLEFTKKQTDLFKTAAVEIESVLGVIPYKHACAGAAIFNQNAAHFNMVRPGYMIYGYYPSEALRGKILLKTRVKICFRYFAN

SEQ ID NO: 63601 - DNA, 354 bp, Unknown
  Obtained from environmental sample
  misc_feature (1)..(354): n is a, c, g, or t
ttggctacccctacatcaccattccctgcgccagccgcgaccgtcatcgtatcgctgcctgcggataccgttttcctgtgtcatcctgaaggctggaacatggaaattacggacggtaatgttcttggcaggacaaatggccctcacgcggccgcgctcggcaagtttccggtgatctcttcaaaccacgcgaaagttacgcggcaaaacaacgaatggtttatcacggacttgaattccaccaacaagacccatgtcaacggcgtaaaactggagccgaatgttccggtaaaaataaaacaggatgacattgtcatacttgccaatgttacatttaccgtgagactcgcatga

SEQ ID NO: 63602 - protein, 117 aa, Unknown
  Obtained from environmental sample
  DOMAIN (40)...(108): FHA domain
  misc_feature (1)..(117): Xaa is any amino acid
MATPTSPFPAPAATVIVSLPADTVFLCHPEGWNMEITDGNVLGRTNGPHAAALGKFPVISSNHAKVTRQNNEWFITDLNSTNKTHVNGVKLEPNVPVKIKQDDIVILANVTFTVRLA

SEQ ID NO: 63603 - DNA, 753 bp, Unknown
  Obtained from environmental sample
  misc_feature (1)..(753): n is a, c, g, or t
atgaaagtaacagcaggagcttattccgataaaggcggccgctctcacaacgaggacgcttttttgtgtgccgtgtttatgggcggcagcgccggagacggattcggcagcgttgaattttcaggctttgttgacgcgccccttttctttgttgtcgccgacggcatgggcggtcacgatgccggggatgacgccagcgcctttgtggtagaaagcatgcgccgggcggcggtaaacgagaagcgcgtttatgacgaaaccgccgttgaggcgctggttaaatcggttcacaccgcattattaaaagaaggtaaagaaaaaggaacgcccaacatgggaacaaccttaacgggaattttactgcaaaaagacgctccctgcggattcttcaacgcgggggacagccgtgtctaccgcctgcggaacggttactttcagcagttgagcanggacgattcgctttccggcattatacttggcgcggcaaagaacattatcaccaacgctgttggcgccggattgccgaacgtgtctgttgcaagccggttttcaccctctgtcgcggttgcgggagacacgttcctgatgtgcagtgacggagttcatggctctgttaatgatgatgaccttgaaatgtttcttaccgaaacattttcgccgctggagattgcaagacggattgtacaaactgcaatcgacaataattctgatgataactgtaccgccgtggtggtgaaactttatgaggagtaa

SEQ ID NO: 63604 - protein, 250 aa, Unknown
  Obtained from environmental sample
  DOMAIN (3)...(240): Protein phosphatase 2C
  misc_feature (1)..(250): Xaa is any amino acid
MKVTAGAYSDKGGRSHNEDAFLCAVFMGGSAGDGFGSVEFSGFVDAPLFFVVADGMGGHDAGDDASAFVVESMRRAAVNEKRVYDETAVEALVKSVHTALLKEGKEKGTPNMGTTLTGILLQKDAPCGFFNAGDSRVYRLRNGYFQQLSXDDSLSGIILGAAKNIITNAVGAGLPNVSVASRFSPSVAVAGDTFLMCSDGVHGSVNDDDLEMFLTETFSPLEIARRIVQTAIDNNSDDNCTAVVVKLYEE

SEQ ID NO: 63605 - DNA, 1263 bp, Unknown
  Obtained from environmental sample
  misc_feature (1)..(1263): n is a, c, g, or t
atgatggcagaaaatattcaacagcggcaacaggaagccgtcgtacagaaaaaagaatccgcagttcaggaaactaccgctttatgcaggcactgtggcgcggcccttgactctgagtttcctttctgcccttcttgtggtgaaaaagtagacggcagtgagtacacgtgcgagttctgtcaaaccaaaacttcaaaagaattttgcccgcactgcggcaggcgtgtcatccccgttccctgtccccaatgtcaaactccggtaatctacgacatctgcgaaagttgcggcacgatcatcagccccgtccttgaaaaattatttgctcaggatgcgccggctgaattggcggtgatgagcggcgaggaagccaagaagattgaatctgattttaaattgatggagtcaaatcagagcgcggagttcaaagcatttcagaagaaattgattgaacgacagattttgcttgaggagagagactactttaccaaacgtgaaaagcgaatcattaaagcatttggcagtcgtcccttcacgctggaactgcctgaccctgcggaagaggcttttaggctgaaagcttatgccgcgctggaaaaaaccgtgattgagcgtgaagagaaagcaatagagacggagttggataaattgtttccgtcacaacctgagccggacacaagcgctgaagacgcacagcttgcggaaatagaacggaaccgcgctgagatggaaagaaaatttaaggaggcgctggcaaatgtgagcggtgaggttgacgctttccgcaaagaggaagaacgcaagcggcttgaagaagagcgaaagcggcttgaagaggagcgccgccgtcttgaagaagaacgcaaacgtaaagaagaggaagcccgcaaagaggccgagcgtcagagagaaattgagcgccagcggctggaagaagagcggcgcagcagacgttttcagggaaattactatcatatgagtcataacggaatgttgaccgcggaactangaatcggcggcaatcaggctgaatgttggtatcattgtactgtctgcggacgcgctacggttgtttattcaatttcaattaacggcgacaatattacattgaccggaggaagaaaacgcggcgactattgcagttttcaggaatacaaactggttgaaaattatcagggaaccgtaaatagttcaggaaccatactgagcgggtactggtacaataatggcataagcgtgccaattgttttttacaagctctaa

SEQ ID NO: 63606 - protein, 420 aa, Unknown
  Obtained from environmental sample
  misc_feature (1)..(420): Xaa is any amino acid
MMAENIQQRQQEAVVQKKESAVQETTALCRHCGAALDSEFPFCPSCGEKVDGSEYTCEFCQTKTSKEFCPHCGRRVIPVPCPQCQTPVIYDICESCGTIISPVLEKLFAQDAPAELAVMSGEEAKKIESDFKLMESNQSAEFKAFQKKLIERQILLEERDYFTKREKRIIKAFGSRPFTLELPDPAEEAFRLKAYAALEKTVIEREEKAIETELDKLFPSQPEPDTSAEDAQLAEIERNRAEMERKFKEALANVSGEVDAFRKEEERKRLEEERKRLEEERRRLEEERKRKEEEARKEAERQREIERQRLEEERRSRRFQGNYYHMSHNGMLTAELXIGGNQAECWYHCTVCGRATVVYSISINGDNITLTGGRKRGDYCSFQEYKLVENYQGTVNSSGTILSGYWYNNGISVPIVFYKL

SEQ ID NO: 63607 - DNA, 888 bp, Unknown
  Obtained from environmental sample
  misc_feature (1)..(888): n is a, c, g, or t
atgagaacacaattttctaaactcgcattggtggcagcctttgggcttgctatggctttcacctttggctgctcttcggacaatggcggtaatgagcctgatcctcaacccttgccagtttcgtcttcgtctggcggcaacggcagcgtaagtggctcgtcttcctctgtcgcaacaggcggtagcggttctagcagttccacaactggtaacggcggttcgtcttcgtccggtggcggtggtagccccagcgaatacacaggcggttcttgcaatgcgagtgattacggaagagctgaaattggcggtaaagtatggatggctaagaattggggctgctatgcttctggcagcaaatgctacgataatgaccccgccaactgcacaaaatacggtaggctttacgactgggcaaccgcgatggctcttccttccaaatgcaacactattctttccacaagtgatgcagcttgtgctataagaactccgcatcagggaatatgccccagtggttggcatattcctacaaacgctgagtgggatgctttgttccgctctgcggatggcacgagcggcacatcaagcccttacgatagtcccacagctggcaagcatttgaaggcaaaggaaggctggaataattgcggtccttctggctcaggcaaagattatttatgcgaggacactttcgggttttcggctctgccgggcggctacggcagttcctttggtttcggcggtgtcggcaacggcggcgactggtggagtgccttggagggcagtgctaacctcgcctacgtccgggatatgaactacaacgacgacgggagcatcagcggctacatccttaagggcaacttgcaaagtgttcgttgcttgcaggattga

SEQ ID NO: 63608 - protein, 295 aa, Unknown
  Obtained from environmental sample
  SIGNAL (1)...(26)
  misc_feature (1)..(295): Xaa is any amino acid
MRTQFSKLALVAAFGLAMAFTFGCSSDNGGNEPDPQPLPVSSSSGGNGSVSGSSSSVATGGSGSSSSTTGNGGSSSSGGGGSPSEYTGGSCNASDYGRAEIGGKVWMAKNWGCYASGSKCYDNDPANCTKYGRLYDWATAMALPSKCNTILSTSDAACAIRTPHQGICPSGWHIPTNAEWDALFRSADGTSGTSSPYDSPTAGKHLKAKEGWNNCGPSGSGKDYLCEDTFGFSALPGGYGSSFGFGGVGNGGDWWSALEGSANLAYVRDMNYNDDGSISGYILKGNLQSVRCLQD

SEQ ID NO: 63609 - DNA, 900 bp, Unknown
  Obtained from environmental sample
  misc_feature (1)..(900): n is a, c, g, or t
ttggaaggtccggataacctgtatgtattgcagtacgctaccgaagaagacgccagggaagcgaatgagctattcaatgaaaatcctgacattttattcagccagcccgataaggttcttaacagccagggggcatcagaccctttatcctggggcgtcggtagaatcggcgcggattattttacaaaacagttagagcagaataaatcaaataaaaacgaagtgcttgtggcagtgattgatacgggaatagattttggccatccttttctaagaaacagaataagcgataaaaaatggaattttataagggcgaacaataaccccaatgatgacaatactgatggtcacggaacccatgtgagcgggatagtcgtagattccacgccgtcaaatgtaaaaataatgccattaaaagtttttgatggagatgaactggcagacgctttgaatatttttaacgctatcagatttgccgccgataacggggcagatgtaattaacatgagccttggctgtaaaatgagaaaaaatgaaacaagagacccgttttatgagagagagatagattatgccctttccatgaatgttatagttgtagtggcatccggaaacgataataaggatgtaatgaattatgcccctgcttattattctaaacttattacagtagcggcaacagatgaaaacgataaaaaagctgatttctctaatttcggagacgcgatagacattgctgccccgggtgtttcaataaacagttccatacctggcggacgttttgcggaattacaagggacttcgatggcggcgctcttttgtcgcagcaggcgcggcattgctcagaataacaaacaagtcgctgtctcaggaagatgtcatttcaatgctttccaataa

SEQ ID NO: 63610 - protein, 299 aa, Unknown
  Obtained from environmental sample
  DOMAIN (60)...(296): Subtilase family
  misc_feature (1)..(299): Xaa is any amino acid
MEGPDNLYVLQYATEEDAREANELFNENPDILFSQPDKVLNSQGASDPLSWGVGRIGADYFTKQLEQNKSNKNEVLVAVIDTGIDFGHPFLRNRISDKKWNFIRANNNPNDDNTDGHGTHVSGIVVDSTPSNVKIMPLKVFDGDELADALNIFNAIRFAADNGADVINMSLGCKMRKNETRDPFYEREIDYALSMNVIVVVASGNDNKDVMNYAPAYYSKLITVAATDENDKKADFSNFGDAIDIAAPGVSINSSIPGGRFAELQGTSMAALFCRSRRGIAQNNKQVAVSGRCHFNAFQ

SEQ ID NO: 63611 - DNA, 684 bp, Unknown
  Obtained from environmental sample
  misc_feature (1)..(684): n is a, c, g, or t
atgaaaatagtcattttaacgggggcagggattagcgcggaaagtgggctaaaaacctttcgtgatgcagacggtctgtgggaaaacgagcctgtacggattgtagctaccccagagggctttgaaagcgagccaaatagagtgataaagttttatgataagctcagaaatggcctgaaaaacgtgaagcccaatgcagcacaccaagctcttgcaaaactagaagagaaatttggcgatgattttttgctaataacgcaaaacgttgacgatttgcaccagcgagctggcagcaaaagggttatacccatgcacggcgagcttttaaaagtccgctgcctaggaccagatgagcacgtaacaagctgctcagaagaccagcccgaaaaatgccctacctgcggggcaaaaatgcggccgcacatagtttggttcggcgaaatcccctttgaaatgaataaaatccaaagggcattgatggggtgcaatttgttcgcatacataggcacaagcggggttgtgtacccagcagcgggctttaagcaaatagcaaaaatggctggtgcccgcgttgtatgcctaaacttggaaaccaccagagacagctacacagacgaattcatacaaggcaaagccaccgaggttgtgccaaaatggattaaaaccattacagatgcttgctaa

SEQ ID NO: 63612 - protein, 227 aa, Unknown
  Obtained from environmental sample
  DOMAIN (8)...(176): Sir2 family
  misc_feature (1)..(227): Xaa is any amino acid
MKIVILTGAGISAESGLKTFRDADGLWENEPVRIVATPEGFESEPNRVIKFYDKLRNGLKNVKPNAAHQALAKLEEKFGDDFLLITQNVDDLHQRAGSKRVIPMHGELLKVRCLGPDEHVTSCSEDQPEKCPTCGAKMRPHIVWFGEIPFEMNKIQRALMGCNLFAYIGTSGVVYPAAGFKQIAKMAGARVVCLNLETTRDSYTDEFIQGKATEVVPKWIKTITDAC

SEQ ID NO: 63613 - DNA, 555 bp, Unknown
  Obtained from environmental sample
  misc_feature (1)..(555): n is a, c, g, or t
ttgtgccaaaatggattaaaaccattacagatgcttgctaacttcacaaaagaacacaatctaattttgccagagaattttcccagcaaaattcaagaattttgcaagctgctcctagaagcaaacaaaaccacaaacctagtctcaaaaaacgacgaacaaaaactcctaacaagacacatagcagactccctaatattcgccaccccccccattatcaactatcaattatcaattatcaactatcaatggacagacataggctctggcgcaggctttcccgttattcctcttagcctttattttccgcaaataaaattttacgccaccgaaagccgcaaaaaaagatgtgattttttaaaactagcaaaacaaaatttagatttacagaatttagaagtaattcaaggcaaagcggaaacctgcggtttaaaaaatatggactttgtctcttgccgagcagttggctctttggacgaggattttgagagggcaaaaaaaatcttaaaaaaaggtgggcacttttttacggtaaaatcaaagcnggttggttga

SEQ ID NO: 63614 - protein, 184 aa, Unknown
  Obtained from environmental sample
  DOMAIN (27)...(183): Glucose inhibited division protein
  misc_feature (1)..(184): Xaa is any amino acid
MCQNGLKPLQMLANFTKEHNLILPENFPSKIQEFCKLLLEANKTTNLVSKNDEQKLLTRHIADSLIFATPPIINYQLSIINYQWTDIGSGAGFPVIPLSLYFPQIKFYATESRKKRCDFLKLAKQNLDLQNLEVIQGKAETCGLKNMDFVSCRAVGSLDEDFERAKKILKKGGHFFTVKSKXVG

SEQ ID NO: 63615 - DNA, 1263 bp, Unknown
  Obtained from environmental sample
  misc_feature (1)..(1263): n is a, c, g, or t
ttgccggcaaggtatgcagggagcggtttaaccagaggcttttcggtggatgccacagacggctacagaatagaatttgaaaacggagacatcatccatttgcgcaaaagcggaaatgctccagaatttcgttgctacacggaaagcaaaaccccagaacaggcagaacttttgagcgataagtgcataaagacttttgagctttggaaaattatgggttcaaaactatacgatgaattaaaggaattgacaaaaaaagaaataaaacacatagaagaaaacattaccccaatggattttgaaatgctccgagataacccaaaatacagtgaatttgataaaaaaggcaaggaaattatagaacgaggaaaagcagcggcttatttaattgcaggcggtcagggttccagacttggttttgatggaccaaaaggagtatttagactggaatcgcttggcaaatctatttttcaaatacacgcagaaaatatattgaagctgggaaaaaacattccgttggttataatgacaagcccactcaacaataaggagacaatccaacattttgagcaaaatgattatttcggtttggacaagaataaaattaaatttattgagcaaggtaccatttttgcaatgtctccgaatagagaacttatatttgaaaacaacggtgatttatttttagcccccgatggcaatggcggctgttttagggcactttgcgagactggagctttgaaatggctagaagaacaggatatagaaattgtttttctatacggcgtggataatattctagcaaaaccctgtgacccgccttttataggggcttttttagactcaaaaatggctgcggcttccaaggttgtgaaaaagaaataccccgaagaaaaaatgggcgtatttgccttcaaaaacggcttgccaggtgttattgagtatagcgaaatttcccccgaactggcaaaaaaactggacggcggcaatattctcgctcatttattcacaatggaatctttaaagaaacttgaaaaggaatctctgccttggcatttggctgttaagcgtgtttgcggtatagaaaaagcgtttaagtttgagcaactcttgtttgatgcctttccaaaactcggaactatgtatttaacaggcgttttgcgagaagaggaatttgctccaataaagaacgcaagcggcgatgattcgcctgagagtgcggtggagatgtttagaaaaagatatgaactccaatcccactga

SEQ ID NO: 63616 - protein, 420 aa, Unknown
  Obtained from environmental sample
  DOMAIN (1)...(71): Phosphoglucomutase/phosphomannomutase, C-terminal domain
  misc_feature (1)..(420): Xaa is any amino acid
MPARYAGSGLTRGFSVDATDGYRIEFENGDIIHLRKSGNAPEFRCYTESKTPEQAELLSDKCIKTFELWKIMGSKLYDELKELTKKEIKHIEENITPMDFEMLRDNPKYSEFDKKGKEIIERGKAAAYLIAGGQGSRLGFDGPKGVFRLESLGKSIFQIHAENILKLGKNIPLVIMTSPLNNKETIQHFEQNDYFGLDKNKIKFIEQGTIFAMSPNRELIFENNGDLFLAPDGNGGCFRALCETGALKWLEEQDIEIVFLYGVDNILAKPCDPPFIGAFLDSKMAAASKVVKKKYPEEKMGVFAFKNGLPGVIEYSEISPELAKKLDGGNILAHLFTMESLKKLEKESLPWHLAVKRVCGIEKAFKFEQLLFDAFPKLGTMYLTGVLREEEFAPIKNASGDDSPESAVEMFRKRYELQSH

SEQ ID NO: 63617 - DNA, 789 bp, Unknown
  Obtained from environmental sample
  misc_feature (1)..(789): n is a, c, g, or t
atgtcgatggcctctgagagcgagattctgcccgtaagcgcaaagacaggttttaacattaaccagttaaaagaaaaaattgcggttctggcgcttgaaaaggaacctgaacaaaggcttgtcgaggatttaatcaaaccaaatgattttatagtccttgtaattcccattgacaaggccgctcccaagggaaggttgattcttccccaacagcagatgatacgcgacattctggaagcgggcgcaaacgcaatcactgtaagggaaactgaattgcggcaaacgctcgccgacatcggtaaaactccgtctcttgtaatcacggacagccaggctttcgcgcaggtttccgccattgtgccgcaggaaataccgctcacttctttttcaattttattcgcccgctacaagggttttttaaaaaccgccgtcaaaggagccgccgctcttgacagcctgcaggacggcgacaaagcgcttatctgcgaaggctgtacccaccaccgccagtgcgatgacatcggcacggtgaagttgcccggcatgatacggaagcacacggggtntgagccggatttcagtttccgctcgggcggcgatttcccggatgatctttcacagtacaaggtggtcattcactgcggggcctgtatgcttaacgaccgggagatgcagtaccgcagccgctgcgccgccgaccagggaacgccttttaccaattacggcataaccatcgcccatatccagaagatattgcggcgcagtatagcggtttttaaaagggagtaa

SEQ ID NO: 63618 - protein, 262 aa, Unknown
  Obtained from environmental sample
  misc_feature (1)..(262): Xaa is any amino acid
MSMASESEILPVSAKTGFNINQLKEKIAVLALEKEPEQRLVEDLIKPNDFIVLVIPIDKAAPKGRLILPQQQMIRDILEAGANAITVRETELRQTLADIGKTPSLVITDSQAFAQVSAIVPQEIPLTSFSILFARYKGFLKTAVKGAAALDSLQDGDKALICEGCTHHRQCDDIGTVKLPGMIRKHTGXEPDFSFRSGGDFPDDLSQYKVVIHCGACMLNDREMQYRSRCAADQGTPFTNYGITIAHIQKILRRSIAVFKRE

SEQ ID NO: 63619 - DNA, 1212 bp, Unknown
  Obtained from environmental sample
  misc_feature (1)..(1212): n is a, c, g, or t
ttgtcaagcatgggcaatcctgaagattatccggtatactttgataaaataattataaacgcttcgcaggttacaaacccgtccatagaccctttgcgcgagccgatggagacaaagatatttctgggcgcaagaccaaaaacaatagaacgcgacagcaatggccggattaggaacaacctggcgccgcagcttaacctgtccatgccggtaatgttctcggccatgagctacggttccttaagctacaacgcgcacgaaagtctggcgcgcgcctcggaagaactcggcattttttacaacacaggagaaggcggcctgcatcaggatttttaccgttacggcaaaaacaccgtcgtgcaggtcgcgtcgggacgtttcggcgtacatccggattacctgaatgcgggcgcggcaattgagataaaaatcggccagggcgccaagccaggtatcggcgggcatttgccgggcatgaaaatcgtcggcgacatatcccgcacaagaatgattccggaaggtaccgatgctatctctcctgcgccgcaccacgacatatattcgatagaagacctgcgccagcttgtctattccttaaaggaagcaacgaattaccaaaagccggtaatcgtcaaaattgccgcagtccataacgttaccgcgatcgcaagcggcatagcgagaagcggcgcggacatcatcgccatagacggctttcgcggcggaacgggtgccgcgccgacgcgcatacgcgaccatgtgggcatccccatcgagcttgcgcttgccggcgttgacaagcgactcagggacgaggggatccgcgacagtgtatccctcatcgtaggcggcagcatccgttccagcgccgacattgtgaaagctgtagcgctgggcgctgactgcgtatacgtcgccacagcggcgctcatagggctgggctgccacctttgcaggagctgccacaccggcaaatgcaactggggcatcgcgacacaggttccggagcttaccaaacgcctgaaccccgacattgggtacaagcgcctcataaatttaatgtccgcatggcagcatgaaatcatggagatgatgggcggtatgggcattaattcaatcgaaggcctgaagggaaaccggctcatgctccggggagtggggcttaacgaaaaagagcttgatatccttgggattaagcacgcaggagaataa

SEQ ID NO: 63620 - protein, 403 aa, Unknown
  Obtained from environmental sample
  DOMAIN (8)...(371): Conserved region in glutamate synthase
  misc_feature (1)..(403): Xaa is any amino acid
MSSMGNPEDYPVYFDKIIINASQVTNPSIDPLREPMETKIFLGARPKTIERDSNGRIRNNLAPQLNLSMPVMFSAMSYGSLSYNAHESLARASEELGIFYNTGEGGLHQDFYRYGKNTVVQVASGRFGVHPDYLNAGAAIEIKIGQGAKPGIGGHLPGMKIVGDISRTRMIPEGTDAISPAPHHDIYSIEDLRQLVYSLKEATNYQKPVIVKIAAVHNVTAIASGIARSGADIIAIDGFRGGTGAAPTRIRDHVGIPIELALAGVDKRLRDEGIRDSVSLIVGGSIRSSADIVKAVALGADCVYVATAALIGLGCHLCRSCHTGKCNWGIATQVPELTKRLNPDIGYKRLINLMSAWQHEIMEMMGGMGINSIEGLKGNRLMLRGVGLNEKELDILGIKHAGE

SEQ ID NO: 63621 - DNA, 870 bp, Unknown
  Obtained from environmental sample
  misc_feature (1)..(870): n is a, c, g, or t
atgatggaagaaaacgtgaaaaaaataatcagcggaaaagtgcgggaagtatacgaaatttcggacgaggtctcggacgacaaactggtcattgttacaacggacagaatttccgcttttgacgtgattctgtcaaagcctgtcgcgaacaagggaaaggtactaaacgcggtctccctttattggtttaacttcacaaaaggcattatccccaatcacattatctcaagcgacctaaaagatatgcctgagtttttccaaaaggacgagtttgaggggcgcacggttttagtgaagaagctaaaaatgctgccgtttgaatttatcgtcaggggatatatgttcggcaatatgtgggaagcatattccaaaggcgaaaaattctgcggccaaaagatcgagggcaattacaaacttgccgagaaactggccgtcccgctttttaccccttccacaaaagcgcgtgtcggacatgacgagtatatttctgttcaacacgttaaggacgtgattggcgcggagctggtaaacaggatagaaagagtttgcctgaaaatttacaacgactgctacaactacgcttacaacaaaaacataattattgccgatacgaaatttgaattcggcctggacgcgcacaacagcctctttatcgcggacgaaatgcttacgccggattcaagcaggttctggagccttccggattataaggtaggggtctcgcccaaaagttacgacaaacaattggtaagggaatggctcacggaaaacaaaataaacggcgaaatgcaatttgacaacgtgagcgacgatgttttaaggaaaacatcagagatatacgcggagtgccttcgaaaaataaccgaatag

SEQ ID NO: 63622 - protein, 289 aa, Unknown
  Obtained from environmental sample
  DOMAIN (5)...(272): SAICAR synthetase
  misc_feature (1)..(289): Xaa is any amino acid
MMEENVKKIISGKVREVYEISDEVSDDKLVIVTTDRISAFDVILSKPVANKGKVLNAVSLYWFNFTKGIIPNHIISSDLKDMPEFFQKDEFEGRTVLVKKLKMLPFEFIVRGYMFGNMWEAYSKGEKFCGQKIEGNYKLAEKLAVPLFTPSTKARVGHDEYISVQHVKDVIGAELVNRIERVCLKIYNDCYNYAYNKNIIIADTKFEFGLDAHNSLFIADEMLTPDSSRFWSLPDYKVGVSPKSYDKQLVREWLTENKINGEMQFDNVSDDVLRKTSEIYAECLRKITE

SEQ ID NO: 63623 - DNA, 657 bp, Unknown
  Obtained from environmental sample
  misc_feature (1)..(657): n is a, c, g, or t
atgggccaggatatcgacagaccaattacggtctgggatgatatgttcctgccatcggaaatcgccacgcggattaaggattatcattatttggattccgcggggaatgacagatccctggtaagttctgttgatgttataaacagatctgttggacggcccattgtgcttgatatcccaaggaaacaatggccaagggagctctttgccagtcttgttttttcagcccttcttgtgtctgtttatttattttgtggcaaaaaaaagctcgtcaggatattactggggcttgcccaaagtttattaggtttgtttttcggcatagcgggtagtgtgcttttctttatgactttctttaccgatcatgattatacctatcataacagcaatattttctttgttaaccccctgtttttcgcggcgcttcctatggggctgatattcgcttttacccataatgataaaaaacgttttgttgccacccgcctgtccagggcattctggacctatgttttattgggcgggtttctcacgatggctataaaaatctcccctgctttttaccagcagaaccaggtaacccaggcgttggttatgcctattgctttagtgatgcttgttttaatgggtcttgaggggaggcttaaaaagcaatga

SEQ ID NO: 63624 - protein, 218 aa, Unknown
  Obtained from environmental sample
  misc_feature (1)..(218): Xaa is any amino acid
MGQDIDRPITVWDDMFLPSEIATRIKDYHYLDSAGNDRSLVSSVDVINRSVGRPIVLDIPRKQWPRELFASLVFSALLVSVYLFCGKKKLVRILLGLAQSLLGLFFGIAGSVLFFMTFFTDHDYTYHNSNIFFVNPLFFAALPMGLIFAFTHNDKKRFVATRLSRAFWTYVLLGGFLTMAIKISPAFYQQNQVTQALVMPIALVMLVLMGLEGRLKKQ

SEQ ID NO: 63625 - DNA, 396 bp, Unknown
  Obtained from environmental sample
  misc_feature (1)..(396): n is a, c, g, or t
atggcgcggactggtatggcaggggagatgtccaggacattaccatggcagcaaccatcgcggcttacgaactttttatcgcccagtggaaggcgagtgcgcgttaaggaggcaaatatggaatggcgggcaagtcacattttggttaaggacaggtccctggcggacgacctattaaagcgcctgaagcagggggcttcttttgagtcgctggccagggaacattccacctgcccgtccaggtcatccggcggggatcttggctggtttgggccggggaaaatggtggctccctttgaatcggcggtaaaacgcctgtcgcctggttccgtcggggatgtggtgcagacccagtttggctatcacctgattaaatgtacaggccggaaagattaa

SEQ ID NO: 63626 - protein, 131 aa, Unknown
  Obtained from environmental sample
  DOMAIN (46)...(128): PPIC-type PPIASE domain
  misc_feature (1)..(131): Xaa is any amino acid
MARTGMAGEMSRTLPWQQPSRLTNFLSPSGRRVRVKEANMEWRASHILVKDRSLADDLLKRLKQGASFESLAREHSTCPSRSSGGDLGWFGPGKMVAPFESAVKRLSPGSVGDVVQTQFGYHLIKCTGRKD

SEQ ID NO: 63627 - DNA, 1230 bp, Unknown
  Obtained from environmental sample
  misc_feature (1)..(1230): n is a, c, g, or t
atgaagaaaactccagcgcccattggccttataatcagtctttgcataattgggatgtttatgaattgctcattagacgagagttacggcaaatcaatcaacgtggttaatgttaaagcgaaggaactcctggcgcctgtatacggcgaacaggattcggctgcgataaaagccgccacaggcgcgaatgactttgctttccggttgagcgcggcgcttgtaaagaacgtcggcaatagcaattttgtctgctccccgtattccgcctggattccccttgccgcccttgtcaacgcgactgacgcccagaacaaagccgcccttttgacggctttgggcgcgtcgggaattaccgaatcggacatcaacagggcatcttcgcggatgctgtatagtttgacgaatttacagaacaaagaatacaaggaatactacaatccccttagaatcgcaaacgccatatttgtaggggacaatgtaaccctaaaaaaagatttcgcccaaacgtttatggattattacaggggaaacagcataaatgtagacttttcttcccgcgacgcggtggacgctgtaaaccgcggggcaagcaaaaacacaaaggtcctgattactgacatttatcaggtatttgatccgtatacagttaccgttattgccaacgcgatttatttttcagacaggtggtcatgggaatttgataccagccaaacaaaagaggacgtattccacgcgccgggactggatactacagcgtctttcatggtgcggcagggcgatgcgcaaacttactacgaagactcaaaggtacaggccatgccgttatattttaagaatagcggcggtttatacatcattctgccaaaaaccggcggggcggtgcaattgctttcctcaatgacaaacagttattttaacgagatacaatcgggttccgttcaggctacgggcaagctgctattgccgcgtttttccattggaagcactattgatggtttggaggaagcgcttgtgtcactgggcgttccgctattcgacgaagaagccgcgccgcttacaggcggcttaatcgaggaacctttgttcgtatggctgtcgaaggcgatacaaaaggccgttatcaaagttgacgagaaagggacaaccgccgccgccgtaacggtaatggaagcaggtgcaagttatgcggggccgccggaacccaccaagccttttgaaatgatcgtgtaa

SEQ ID NO: 63628 - protein, 409 aa, Unknown
  Obtained from environmental sample
  SIGNAL (1)...(22)
  DOMAIN (51)...(404): Serpin (serine protease inhibitor)
  misc_feature (1)..(409): Xaa is any amino acid
MKKTPAPIGLIISLCIIGMFMNCSLDESYGKSINVVNVKAKELLAPVYGEQDSAAIKAATGANDFAFRLSAALVKNVGNSNFVCSPYSAWIPLAALVNATDAQNKAALLTALGASGITESDINRASSRMLYSLTNLQNKEYKEYYNPLRIANAIFVGDNVTLKKDFAQTFMDYYRGNSINVDFSSRDAVDAVNRGASKNTKVLITDIYQVFDPYTVTVIANAIYFSDRWSWEFDTSQTKEDVFHAPGLDTTASFMVRQGDAQTYYEDSKVQAMPLYFKNSGGLYIILPKTGGAVQLLSSMTNSYFNEIQSGSVQATGKLLLPRFSIGSTIDGLEEALVSLGVPLFDEEAAPLTGGLIEEPLFVWLSKAIQKAVIKVDEKGTTAAAVTVMEAGASYAGPPEPTKPFEMIV

SEQ ID NO: 63629 - DNA, 1032 bp, Unknown
  Obtained from environmental sample
  misc_feature (1)..(1032): n is a, c, g, or t
atggccgagaaaggcttgggcattagcgacgtaatgctcaccgatcactgttatgtgatagcccgtcttcccgcaagcaaaggcaaagaaaactgtccaacagttggattccttgcccatcttgatacagctgccgatgtttccggcaaggacgtgaaggcgtgtctggtagagaattacgatggaaagcccatagaccttggcggtggccaaagtcttgaccctgctttagatccggcgctggcggagcacaaaggcaaggcccttatccacaccgacggaagcacccttttaggcgctgatgacaaggcggggatcgccattattgtcgccgccgccgaataccttttaaaccacgctgaaattctccacgggcctttggaactcatattctctcccgatgaagaaaccggcaaagggctgcctgagtttccggccagcgatgttcacgccaaggtatgctacaccctggacggcggcccgctgggcgaacttgagtgggagtgctttaacgcgtgggcggcccaaataaagttttccggcatttcgatgcatctgggacaggcgcggggcgttatggtcaacgccgcccttatggcttcggtgtacgctgccatgctgcccagaaacgaaagccccgaagccaccgatggctactatggctactattgccctctttcaattaggggagatgtggaaaacgcagagctggaagtgtttattcgggattttgacaaaaaggaaggcgaaagaaaaattgccgcgttggaaactttcgctcgcgcggtagaagcccagtttccgggcggtaaggttgaggtaagcagcaaatcccagtatttaaacatgaaggaaaaaatcggcttgcatccggaagtgatagaaaaactgcgccaggcttttttaaacacccatattgagatagaagaaaaacctatcccgcggcggtaccgacggttccaggctcaccgagatgggcatacccaccccgaatatttttacaggcggccgcaactatcacagccgccttga

SEQ ID NO: 63630 - protein, 343 aa, Unknown
  Obtained from environmental sample
  DOMAIN (167)...(271): Peptidase dimerisation domain
  misc_feature (1)..(343): Xaa is any amino acid
MAEKGLGISDVMLTDHCYVIARLPASKGKENCPTVGFLAHLDTAADVSGKDVKACLVENYDGKPIDLGGGQSLDPALDPALAEHKGKALIHTDGSTLLGADDKAGIAIIVAAAEYLLNHAEILHGPLELIFSPDEETGKGLPEFPASDVHAKVCYTLDGGPLGELEWECFNAWAAQIKFSGISMHLGQARGVMVNAALMASVYAAMLPRNESPEATDGYYGYYCPLSIRGDVENAELEVFIRDFDKKEGERKIAALETFARAVEAQFPGGKVEVSSKSQYLNMKEKIGLHPEVIEKLRQAFLNTHIEIEEKPIPRRYRRFQAHRDGHTHPEYFYRRPQLSQPP

SEQ ID NO: 63631 - DNA, 1533 bp, Unknown
  Obtained from environmental sample
  misc_feature (1)..(1533): n is a, c, g, or t
atggcccgcggccgagaggcgggaataaaagaaactgcgggcgcggataaggattcttctcttgttgacgatccaataaggctttatttacgcgaaatagggcgcgaacatttgttaaccgcggaacaggaaattgagctttccaaaaaaatggaagaaggcgagaacatcgttaaaaatgtaataaaaagatcgggcatgataatacccgaattctttaatatcgcccaaaaaacattttcaaaacgagatataagggagcttaatctttctaagaaagaaataaccgagcacatgacggaataccgcagattaaatcaattttacaaagatacgttacgcgcaatacaagtggaattaagaaattatatagatttaaaaaaagtattaatcgtaaaagatattgattacaaagaagacaaagaatgttccgctattcgtaaaaaaataatgaagacgcttaaaaatactcagatacatcccgatgaaattcaggcattttcagacaaatttataatagcctccaagaaaataaaacgttacataaaagagcaggaacgtcttgaaaaacacttaaaagttggctcattaaaagaacttcgcacaatgggaagataccttacaatcaaggaagagcgcgaaaaacttgaaaatgagttggggctttccgccgatgaaataaaggaaaaaatacgtcttatacaggtaacggataaaaaattaaggactcttgaagaagaatttgaagagtccatagaaaatatcaatcaaatggcaaatgaaatttatcatggtcgtgtgatgatgaaaaacgccaaagacaggctgataagggcaaatttaaggcttgttgtttcaatcgcgaaaaaatacacaaacagaggaatgccgttttttgatcttgtacaggaaggaaatatcggtcttatcaaagccgttgaaaaatttgagtaccaaaaagggtttaaattttccacttacgcgacatggtggatcaggcaggcgattacccgttccatctcggatcaggcaagaacaatacgcgtgcctgttcacatgatagagcagataaacaaagttgttcgcgaatcaagacagcttttacagagtttgggcagagagccgactgatgaagaaatagcggaaaaattgggctggcctgcgttaaaagtaaagtcggtaaaaaatgtcgcgcgcgaacccatcagtcttgaaacgccgattggcgaagaagaagattcgctgttaggtgattttatcgaggacaaagatgtggaaaatcccgctaaccagacggcgtttaaagtgcttcaggaacagatgggcagcgttctttccacgcttcccgcgcgcgagcaggaagtgttaaaaatgcgtttcggtcttgacgacggatattcgcttactcttgaagaagtaggtttatattttaatgttactcgcgaaagaataaggcagatagaagcgaaagctctgcgccgattaaggcatccgaagagaagccgcaaattaaaagattatttggaccattaa

SEQ ID NO: 63632 - protein, 510 aa, Unknown
  Obtained from environmental sample
  DOMAIN (23)...(59): Sigma-70 factor, region 1.2
  misc_feature (1)..(510): Xaa is any amino acid
MARGREAGIKETAGADKDSSLVDDPIRLYLREIGREHLLTAEQEIELSKKMEEGENIVKNVIKRSGMIIPEFFNIAQKTFSKRDIRELNLSKKEITEHMTEYRRLNQFYKDTLRAIQVELRNYIDLKKVLIVKDIDYKEDKECSAIRKKIMKTLKNTQIHPDEIQAFSDKFIIASKKIKRYIKEQERLEKHLKVGSLKELRTMGRYLTIKEEREKLENELGLSADEIKEKIRLIQVTDKKLRTLEEEFEESIENINQMANEIYHGRVMMKNAKDRLIRANLRLVVSIAKKYTNRGMPFFDLVQEGNIGLIKAVEKFEYQKGFKFSTYATWWIRQAITRSISDQARTIRVPVHMIEQINKVVRESRQLLQSLGREPTDEEIAEKLGWPALKVKSVKNVAREPISLETPIGEEEDSLLGDFIEDKDVENPANQTAFKVLQEQMGSVLSTLPAREQEVLKMRFGLDDGYSLTLEEVGLYFNVTRERIRQIEAKALRRLRHPKRSRKLKDYLDH

SEQ ID NO: 63633 - DNA, 597 bp, Unknown
  Obtained from environmental sample
  misc_feature (1)..(597): n is a, c, g, or t
atggacgtggtaaacactcaaagagagtacgaagctcttgataaggaaatcaaagacgcgtccgagaaagaacagcagtaccgcaaggatttacagcagagggagcgtattctctcggaattggacgaacaaatcagacagcaggcgggattaattgaacaacaggaaaaagaactggaagaacgcagaaagaaaattgaagctgaaattaacgacaaaaagaaacaaattgaaaacttgcagaaaaaagagagcaagctgacggaaaaccttgatcctgaagttgtgtataaatttgagcgtattatcaaaaataaaatgggtattggtattgtcgcgattaagggcaatgtctgtatgggctgccacatgatccttcccgtccaattcgccaatgaagtaagaatcggcgaggaatatgtattctgcccgtattgttcgcgtattctgtattacgaggaatcaggagaaggcgaggaagaattctttaacaccgaagatacaggcgctctttccgatcttgatgaatctgaggaagacgagtacgaagacgacgatgaggaagaagaaatcgttaatattgattctgaagaatag

SEQ ID NO: 63634 - protein, 198 aa, Unknown
  Obtained from environmental sample
  DOMAIN (1)...(154): Uncharacterized ACR, COG1579
  misc_feature (1)..(198): Xaa is any amino acid
MDVVNTQREYEALDKEIKDASEKEQQYRKDLQQRERILSELDEQIRQQAGLIEQQEKELEERRKKIEAEINDKKKQIENLQKKESKLTENLDPEVVYKFERIIKNKMGIGIVAIKGNVCMGCHMILPVQFANEVRIGEEYVFCPYCSRILYYEESGEGEEEFFNTEDTGALSDLDESEEDEYEDDDEEEEIVNIDSEE

SEQ ID NO: 63635 - DNA, 1020 bp, Unknown
  Obtained from environmental sample
  misc_feature (1)..(1020): n is a, c, g, or t
ttgagcgaagcgttacggcaaaacaattataacgcggcgttatcttctattccccgcgattttaccggcagcactcagcacacctacagatcggctgcctttctgggcggaatgtcaagcgcttaccgtacgtttatatcggaagaaaataaaatgttaaacgccattaatacattaatgaaggaaaattcacttgacgttcttaaagaagaacatattattgattatcttcttacccgcggcgatacggttcttgcctatgacattatccggttaatcaaagatacaagttcggaaaaactgacaattgattattgccccggccttttggaggcctactccgacatcaagcgctggaacgcttcaatagataatcccgttgagccgctgatagagcaaattctaatacttgtttccgagaatctcagtaaagacacggtttcaaatttagtgtacgcttccggttccaaagaacgtgatttgtattacagcgtcaggcttggaaacacgcttattaactgggcggaagacgcaaaaaattccgattgggcggacataggccgttctcttgttttatcggcgctgacaaacgcgggccccggcgccgggaatttatacgccaatttaaaactttcggaatattatccaagggcgttatggctgggagaacccggattctgggcatggactgcttccccttccgtcaaaccttcatggcaggacggcaacctgaacatttcgtttactttcccggtaagcgcgactcatcatgtaataatccgcggagtaaaaccatttcttagcctgcgaatccacgacactaactggaggacggacagccagtatgaacgctatgactcgtcgggctgggtatattaccagcaggagcaaatactggttttaaaattacggcaccgcgaatctacagaaaatatcaggatcgtttataaatacgcggcgcctccgcctgttgttgaagaaccaaaagaagacgctgatgccggagatgatgttgattaa

SEQ ID NO: 63636 - protein, 339 aa, Unknown
  Obtained from environmental sample
  misc_feature (1)..(339): Xaa is any amino acid
MSEALRQNNYNAALSSIPRDFTGSTQHTYRSAAFLGGMSSAYRTFISEENKMLNAINTLMKENSLDVLKEEHIIDYLLTRGDTVLAYDIIRLIKDTSSEKLTIDYCPGLLEAYSDIKRWNASIDNPVEPLIEQILILVSENLSKDTVSNLVYASGSKERDLYYSVRLGNTLINWAEDAKNSDWADIGRSLVLSALTNAGPGAGNLYANLKLSEYYPRALWLGEPGFWAWTASPSVKPSWQDGNLNISFTFPVSATHHVIIRGVKPFLSLRIHDTNWRTDSQYERYDSSGWVYYQQEQILVLKLRHRESTENIRIVYKYAAPPPVVEEPKEDADAGDDVD

SEQ ID NO: 63637 - DNA, 1095 bp, Unknown
  Obtained from environmental sample
  misc_feature (1)..(1095): n is a, c, g, or t
ttgttgaagaaccaaaagaagacgctgatgccggagatgatgttgattaataatcttcccgtacgattgtttttattattgttgttatgcgctctatttatttcctgcaagaaaaaagaaacgccgccgcctgccgttgaagaaacagttttggttcaggaagaggaggttataccggaagaaaccccgcccgaactctcgggaaacgccgccgccgctaataccggcgtcggagtttcgtactccgtacagcgtcccaaacaggggctttcgtccgtcggcggcagggtaaacacccgcgaaataaatcctgttaattatgaaaacccggatattgaaatattaaaacagatgggcgcggaaccggctgtaatatcatattttacaggtgaaaaattttacaaagcgggaaattacgacaaagcccttgttgaatataacgccgcgcttgtcaaagacggagaatttctggaagcaattatttcacgcggtaacacatggttaaaaaagaaagattacaggcgcgcaatagaggattatacccgcgcgataagaataaactcaggcagggcggaattgtacaattaccgcggctacgcaagggcggaattggcggccggccatgcgtccgaattaaggctcgcaatcgaggattattcaaaggcaatctccattacagccaattacaccgacgcccttatcaaccgttcgcaggccttactcgaaatcggcgaatacaggagggtaatcgacgactgcacccgcattatcaccctggagccgaaaaattcctacgcgtggaacaggcgcggcagcgcgtggtacgccctcggagacgacgacaaagcaattaacgacttttccgaggcgataaaaataagaaacaaccacgcgtccgcctggcacaacagaggcaacgcctggtacagcaaaggggagcatgaaaaagctctttccgacataaaccgctctatctcgataaatccgtcttatgccgaagcgtacgtcagccgcggcaacatacaccgctctcttggaaacaccgaaagcgccgccgcggatttcgcggaagctaagagactgaaacaacgttga

SEQ ID NO: 63638 - protein, 364 aa, Unknown
  Obtained from environmental sample
  DOMAIN (157)...(190): Tetratricopeptide repeat
  misc_feature (1)..(364): Xaa is any amino acid
MLKNQKKTLMPEMMLINNLPVRLFLLLLLCALFISCKKKETPPPAVEETVLVQEEEVIPEETPPELSGNAAAANTGVGVSYSVQRPKQGLSSVGGRVNTREINPVNYENPDIEILKQMGAEPAVISYFTGEKFYKAGNYDKALVEYNAALVKDGEFLEAIISRGNTWLKKKDYRRAIEDYTRAIRINSGRAELYNYRGYARAELAAGHASELRLAIEDYSKAISITANYTDALINRSQALLEIGEYRRVIDDCTRIITLEPKNSYAWNRRGSAWYALGDDDKAINDFSEAIKIRNNHASAWHNRGNAWYSKGEHEKALSDINRSISINPSYAEAYVSRGNIHRSLGNTESAAADFAEAKRLKQR

SEQ ID NO: 63639 - DNA, 462 bp, Unknown
  Obtained from environmental sample
  misc_feature (1)..(462): n is a, c, g, or t
atgaaaaagattttcaaagttttagcaacgcaaagccgctggctttgcgctatcgctcttgtagcggtaatcgggttttctttcgtaacttgcgatgacagtggaggcggcggcggtggcggcactggcggtggtggcggcactggcggtggtggcggcactggagaaacaggtggcactggtgaaacaggaggtactggcggcttaacaaccgtcccagtaacaggcgtatccctaaacaaaaccagtctttcactggctgtaggcggttcggaaacattaaccgcaacatttgcgccgactaacgcgacaaaccaaactgtaacatggagctcaagcaatacaacaaaggcaactgttgtaaatggcacagttaccgccgttgcggcaggttcggcgacaattaccgttactaccacagacggagggaaaaacagctttntgctccgtagatgtaaatga

SEQ ID NO: 63640 - protein, 153 aa, Unknown
  Obtained from environmental sample
  SIGNAL (1)...(21)
  DOMAIN (73)...(149): Bacterial Ig-like domain (group 2)
  misc_feature (1)..(153): Xaa is any amino acid
MKKIFKVLATQSRWLCAIALVAVIGFSFVTCDDSGGGGGGGTGGGGGTGGGGGTGETGGTGETGGTGGLTTVPVTGVSLNKTSLSLAVGGSETLTATFAPTNATNQTVTWSSSNTTKATVVNGTVTAVAAGSATITVTTTDGGKNSFXLRRCK

SEQ ID NO: 63641 - DNA, 624 bp, Unknown
  Obtained from environmental sample
  misc_feature (1)..(624): n is a, c, g, or t
gtggtagtaacggtaattgtcgccgaacctgccgcaacggcggtaactgtgccatttacaacagttgcctttgttgtattgcttgagctccatgttacagtttggtttgtcgcgttagtcggcgcaaatgttgcggttaatgtttccgaaccgcctacagccagtgaaagactggttttgtttagggatacgcctgttactgggacggttgttaagccgccagtacctcctgtttcaccagtgccacctgtttctccagtgccgccaccaccgccagtgccgccaccaccgccagtgccgccaccgccgccgcctccactgtcatcgcaagttacgaaagaaaacccgattaccgctacaagagcgatagcgcaaagccagcggctttgcgttgctaaaactttgaaaatctttttcatgttaaaactcctttcttttttttacaccgccctttgggcagtgcttgtcctacggacaaatttattccctatattaagaaaaattataaaatccttgaaactggttgtcatgagtagttacgcacggtttctgtggaaaactcattttttttctcctttaacttaccgaattttagtaataactcatgggatttgtcatgagtag

SEQ ID NO: 63642 - protein, 207 aa, Unknown
  Obtained from environmental sample
  misc_feature (1)..(207): Xaa is any amino acid
MVVTVIVAEPAATAVTVPFTTVAFVVLLELHVTVWFVALVGANVAVNVSEPPTASERLVLFRDTPVTGTVVKPPVPPVSPVPPVSPVPPPPPVPPPPPVPPPPPPPLSSQVTKENPITATRAIAQSQRLCVAKTLKIFFMLKLLSFFYTALWAVLVLRTNLFPILRKIIKSLKLVVMSSYARFLWKTHFFSPLTYRILVITHGICHE

SEQ ID NO: 63643 - DNA, 438 bp, Unknown
  Obtained from environmental sample
  misc_feature (1)..(438): n is a, c, g, or t
atgatgtatagcattatttgtcaagcaggggaaagactttattatgatgtaggaagtaataaaatgactaatcttcgggagatttttgcccataatttgaaaaaaaaacgccgtaattgtaggctctctcaggcaaaatttgctgaaatggtcaaagtttccacccaccacatagccacgatagaaactgcccgaaattatcccacgttggatttggtagaacgtatggcaaaagccttaaatatagaaatctatgaattatttactgacccacattcttcccctgtagaaatagaacggctttatcaaactgtagcgaaaaacattgaccacctgataatcgaaagcatggaacggattttccagacaacagcaaaaaacattgagcaagtagtaatcgaaaccatagaaaaagctctaaaaaaaagaggcggttaa

SEQ ID NO: 63644 - protein, 145 aa, Unknown
  Obtained from environmental sample
  DOMAIN (33)...(87): Helix-turn-helix
  misc_feature (1)..(145): Xaa is any amino acid
MMYSIICQAGERLYYDVGSNKMTNLREIFAHNLKKKRRNCRLSQAKFAEMVKVSTHHIATIETARNYPTLDLVERMAKALNIEIYELFTDPHSSPVEIERLYQTVAKNIDHLIIESMERIFQTTAKNIEQVVIETIEKALKKRGG

SEQ ID NO: 63645 - DNA, 831 bp, Unknown
  Obtained from environmental sample
  misc_feature (1)..(831): n is a, c, g, or t
atgcaaataagagattattcgttgcccgcaggctggtatccgcgcgaaaaaggcgaagtttccgcgtttttatcggattttgataataaaaaacgctcttcccgcgccgtaatcatgcctcacgcaggctggtattacagcggcagaaccgccgctcttgccgcctcaagccttaacccgtccgccgagacagtggttgttctgggcgggcatttgggcgcgggcaatccgccccttttcgccatggaagacgccgtgaaaacccccttcggctatatgcccatagacgccgccctgcgctccgcaatgataaaagaaataggcggcgcggaagaccagtaccgagataacaccgtagaagttattttaccaatggcgcaatattttctccccaaagcgagtttattgtggctgcgccttcccgccgacataaaatcttttgaaagaggaaaactcctatcgcaaattgcggcgaagataaacaaaaaaatagcggtctgcggctcaacagacctaacccactacggacgaaactacggcttttcgccgcagggttacggagaacgcgccctgcgctgggtgcgcgaagtaaacgacgccgcttttataaaagccgtggaatccggcgacagcgaagaagttctgcgccgcgccgaagaggatagttcctcatgttccgcaggcgcggttcttggcgcgatgggtttcgccgaagcggaagggctgcaaaaagcgcggcttttggcgtatgccacaagcgccgatgtgaatgaagatggcgatgtgccggattcgtttgtggggtatgcggcgtttgcgtttgatgagtga

SEQ ID NO: 63646 - protein, 276 aa, Unknown
  Obtained from environmental sample
  DOMAIN (8)...(273): Protein of unknown function DUF52
  misc_feature (1)..(276): Xaa is any amino acid
MQIRDYSLPAGWYPREKGEVSAFLSDFDNKKRSSRAVIMPHAGWYYSGRTAALAASSLNPSAETVVVLGGHLGAGNPPLFAMEDAVKTPFGYMPIDAALRSAMIKEIGGAEDQYRDNTVEVILPMAQYFLPKASLLWLRLPADIKSFERGKLLSQIAAKINKKIAVCGSTDLTHYGRNYGFSPQGYGERALRWVREVNDAAFIKAVESGDSEEVLRRAEEDSSSCSAGAVLGAMGFAEAEGLQKARLLAYATSADVNEDGDVPDSFVGYAAFAFDE

SEQ ID NO: 63647 - DNA, 762 bp, Unknown
  Obtained from environmental sample
  misc_feature (1)..(762): n is a, c, g, or t
atgcaggtaaagaagaaagccgcgaaaaagacctataagtcgtcggccaagaaaaagaccgttccgagcctcaacaagattacggttgaggatttagctgccgcccacgccaaaacagaggccgcgctcgctatgttggccgaaaaccacgccaaaacagaggcctcgattgataggctatccgccgaaaaccggttgttatccgccgaaaatcggaaaacctctgacgaggttcggaaaacctcggaggctgttcgggaactgcatgccgaagtcatggaaacctcggaggccgtccggcaactgaacgacacgctcggcgggatgggcggacacctcggcgaagtgatagagtttatcgtcatacccaagatacgccccgccataaacgctttgggtaaccactcgtttaaagaaatcactgcaaggaaaatcgtcgagaccgttataaacgatagaaagagaaaactcaccgaggtagacgtgctgctgtacggcgacaccgaggttatggccgtcgagataaagacctgtttgcagacaagcgacgtcgataaacatttggagcgtctgcaaaaactgcgcgaccacgaagcggacgccgaggtcaaaggcaagacgcttttcggcgcggtggtaggcgcaatcgtacacgatcctatcagaacctacgccctgaaaaatggcctatacgtcatagagatccgcgaggaagaggataaactcgacatagacaaacccgacacctgccggaagtggtaa

SEQ ID NO: 63648 - protein, 253 aa, Unknown
  Obtained from environmental sample
  misc_feature (1)..(253): Xaa is any amino acid
MQVKKKAAKKTYKSSAKKKTVPSLNKITVEDLAAAHAKTEAALAMLAENHAKTEASIDRLSAENRLLSAENRKTSDEVRKTSEAVRELHAEVMETSEAVRQLNDTLGGMGGHLGEVIEFIVIPKIRPAINALGNHSFKEITARKIVETVINDRKRKLTEVDVLLYGDTEVMAVEIKTCLQTSDVDKHLERLQKLRDHEADAEVKGKTLFGAVVGAIVHDPIRTYALKNGLYVIEIREEEDKLDIDKPDTCRKW

SEQ ID NO: 63649 - DNA, 306 bp, Unknown
  Obtained from environmental sample
  misc_feature (1)..(306): n is a, c, g, or t
atgtttaagaagcgttattatgatcctgagtttaagcgggaggccgttcgtttagtattaaaagaagggcgccgagtcagcgaagtagagaggtcgttgggtataaccgtcggagtgcttaagaactgggtgaagagccatcagaagcatgctagcgtgccgcctggcagtcatgaggcggcggttgacgctaaacgtacccgtgagcttgagaggcagttggcgcgagtgaccgaggagcgcgacatcctaaaaaaagccgtagccgtcttctcgtcggacccgtatcggtattcgggttcatag

SEQ ID NO: 63650 - protein, 101 aa, Unknown
  Obtained from environmental sample
  DOMAIN (4)...(84): Transposase
  misc_feature (1)..(101): Xaa is any amino acid
MFKKRYYDPEFKREAVRLVLKEGRRVSEVERSLGITVGVLKNWVKSHQKHASVPPGSHEAAVDAKRTRELERQLARVTEERDILKKAVAVFSSDPYRYSGS

SEQ ID NO: 63651 - DNA, 936 bp, Unknown
  Obtained from environmental sample
  misc_feature (1)..(936): n is a, c, g, or t
ttgtttcaggatcgaaaaagtttcagcagggtttcaacttacgcttgtaacagggacggcgtattaaagagcgaatgtaaaagcattgtgtttgcctgcggctgccgtgagcgaacatcgcgccagattgggattcacggcagacattccgccggagtgttaacagcggggacagctcagtattacacaaatattttgggcaagatgccgacaagacgctgtgtgattctcggctcaggcgacatcgggcttatcatggcgagacggcttaagcttgaaggagcggaagttatcggcgtttttgaagcaaagcccaccgcaagcggacttatgcgcaatgtttaccagtgtcttgaagactttgatatcccgctccacacaagcaaaaccgtaactcgcatcttcggcgaagggcgtatcaacgctgtcgaggtatcttctgtcgatgccaacatgacgcctattgccggtaccgaacaaattatcgaatgcgacgcccttattctgtctgtcggcttgatccccgaaaacgaacttgccgaaagtcttggagtcccgttggacaaccgtacaaagggacctattgccgatcaaaactacatgacaatggcggacggcgttttcacctgcggcaacgctctacacgttaacgatcttgtcgattatgtttctgagagcggcgaaaccgcaggtcaggcggcggctagatgggcaataaccacagtttcgccttctgcgtacaaacgagcttctgccgaaataaaaagcgataacagcctgctgtacgttgttccgcaaaggctcaatgtaaacgagcttaactcccgcacagccgtttacttccgttcaaataaagaaacgggcaaaactcgcctttcggtaacatcggacaatagagaaattttctctaatgtaccagcgtcttcgcccgcctga

SEQ ID NO: 63652 - protein, 311 aa, Unknown
  Obtained from environmental sample
  DOMAIN (73)...(172): Pyridine nucleotide-disulphide oxidoreductase
  misc_feature (1)..(311): Xaa is any amino acid
MFQDRKSFSRVSTYACNRDGVLKSECKSIVFACGCRERTSRQIGIHGRHSAGVLTAGTAQYYTNILGKMPTRRCVILGSGDIGLIMARRLKLEGAEVIGVFEAKPTASGLMRNVYQCLEDFDIPLHTSKTVTRIFGEGRINAVEVSSVDANMTPIAGTEQIIECDALILSVGLIPENELAESLGVPLDNRTKGPIADQNYMTMADGVFTCGNALHVNDLVDYVSESGETAGQAAARWAITTVSPSAYKRASAEIKSDNSLLYVVPQRLNVNELNSRTAVYFRSNKETGKTRLSVTSDNREIFSNVPASSPA

SEQ ID NO: 63653 - DNA, 366 bp, Unknown
  Obtained from environmental sample
  misc_feature (1)..(366): n is a, c, g, or t
atgaaacagatcacatgcataacctgtccaatcggctgccgtatttcaatcgacattgcggaaggcgaatatgttttttcaggaaacaaatgcgcaaagggaaaagactttgcgaaaaccgagatgacctctccggtacgctcgcttacaacaacagtgcggactgcgttccccgatgcgcctgtttttccggtgagaacaaacggagaagttccgaaagaaaaaataaaagaaataatacgggaattgtctggtataataataactacgaaaatcggaattggtgaaacagtcgccgctgatatttcgggaacggggtgcgacattatagcatcaagcgatatgttaaaatcaaattatatctaa

SEQ ID NO: 63654 - protein, 121 aa, Unknown
  Obtained from environmental sample
  DOMAIN (2)...(113): Protein of unknown function (DUF1667)
  misc_feature (1)..(121): Xaa is any amino acid
MKQITCITCPIGCRISIDIAEGEYVFSGNKCAKGKDFAKTEMTSPVRSLTTTVRTAFPDAPVFPVRTNGEVPKEKIKEIIRELSGIIITTKIGIGETVAADISGTGCDIIASSDMLKSNYI

SEQ ID NO: 63655 - DNA, 1551 bp, Unknown
  Obtained from environmental sample
  misc_feature (1)..(1551): n is a, c, g, or t
gtggggctgaaggtgctgctcggccacgcctatctcggcgcggcgatgcgcgagggcagcgcgctctcctacgacgaggaggagaaaacagtacaggccgcggcggccctcgacgtgctgagcgcggggtcggggctgcacgacgacttccggtacaacggtaactacctcgtgaacagcccggtaaacggtcaggggtgggggctggatctggggatggtcttccacagcaacagccacgccgtatccttcgacgtgcgtgatatcggaatgatactgtggaacggccgcgaggtgcgccgcggcactttggttatgcgtaaggaattcgacctgagcgacttcgcgctggggatggaggggatgttcgacttcgacacgcttgtgcgcgataccgcgaactacgcgatgtggctgcccgcggagttgaacgcggggtacacgtacaccctgcgttttggcggcaatttgggcattattttgggcggcgtctcggctggggcttgttacagccggcggctggtcgcgggctacggcgagggcgtccccctccggccggagcgtttttccggcggagtcacgttgggactgctgtcggggcacctgccgctgcgctacggcgtggcctacggcgggccggagggcgtcgcctccgtcgccggggtggggctggacgccaagtacgtctctatagacgcgttctacaaggccgtgggcagccttacgatgcgctctaagaagggcttcgaggcgggcgtagggatggccttcagatggggttggaatcgcggcaggaactacgtgaaggacgggtcggccaagactgaggaggaacagacgtggatattagacagcataccggagccggctttgccggctttgggggatttcaagacggagatagatggtgaggaggtttacgagcctattgaagtgatcacgcagccgccgcaactgccgcagccgccgccagagatgccgcaaccggaaccgccgcaaccggaaccgccgcaaccggaacagccggaagcgccgacgcctgaaccgcagccggagcaaccgccgcttatgccggagcagccgcagctcaccgccgaggaagccgagtctctggccgtcgcgcagagcgcgatcaacttcacccccggcagcgcaagcctgacggagagttcatacgccccgctggaccggattgcgggcctgctaaaacgctacccgcacatccgatacgaggtgcagggacacaccgactcgtggggcgcggaggcgcacaacctcctcctatcagccgaacgcgccgccgtggtaaaacactaccttatgaccaaaggcgcccccgattcgtgcttagtgtctataggctacggaagaaatatgcccatagccgacaacaacaccgtggtgggccgtgccttgaacagacgggtggtattcgtgcggatagactcccaagaacaatacgacaccctgaaacgcttcgaaatggagatgatgaggaggctcacggagagggttttagagaagagggagtggaggaagacgattaggtaa

SEQ ID NO: 63656 - protein, 516 aa, Unknown
  Obtained from environmental sample
  DOMAIN (379)...(474): OmpA family
  misc_feature (1)..(516): Xaa is any amino acid
MGLKVLLGHAYLGAAMREGSALSYDEEEKTVQAAAALDVLSAGSGLHDDFRYNGNYLVNSPVNGQGWGLDLGMVFHSNSHAVSFDVRDIGMILWNGREVRRGTLVMRKEFDLSDFALGMEGMFDFDTLVRDTANYAMWLPAELNAGYTYTLRFGGNLGIILGGVSAGACYSRRLVAGYGEGVPLRPERFSGGVTLGLLSGHLPLRYGVAYGGPEGVASVAGVGLDAKYVSIDAFYKAVGSLTMRSKKGFEAGVGMAFRWGWNRGRNYVKDGSAKTEEEQTWILDSIPEPALPALGDFKTEIDGEEVYEPIEVITQPPQLPQPPPEMPQPEPPQPEPPQPEQPEAPTPEPQPEQPPLMPEQPQLTAEEAESLAVAQSAINFTPGSASLTESSYAPLDRIAGLLKRYPHIRYEVQGHTDSWGAEAHNLLLSAERAAVVKHYLMTKGAPDSCLVSIGYGRNMPIADNNTVVGRALNRRVVFVRIDSQEQYDTLKRFEMEMMRRLTERVLEKREWRKTIR

SEQ ID NO: 63657 - DNA, 1242 bp, Unknown
  Obtained from environmental sample
  misc_feature (1)..(1242): n is a, c, g, or t
atgatcagatcggccgagcctagggacggcgtttgccgtttccaaacggaattggtaacagcttttcatgtaatcaaccttggttatgaaagcatggttttcaataaatactttatcagggattcaagcgggagtgtttttgaactggaccagattatcagcggttcaaacgaaaaagattacctgatttttaccgtaaaagataaaacttttgataaattcttccaattagagaagaattttaaaacaggcgacactgttttaagcataggaaacgctctgggcgaaggcgttgtggtgcgaaacgggcttattttaggcactattcctgaagaagattcgggccggtggaatctgctaaaaagttctgcggacggcaatccgggaaattcaggcgggccgctggttactcaggacggaaaagttgtcggagtggtatgctcccttaaggaaaatattctttattcgcttccggcggaggttgttattaacggcagccggtccgaactctcttaccgtcaaaaatccggcgtatcccacctgatattggcaaataaattgaacggaatattcgaatttaaggtaagtttgccggattcttatacaaaaatcagaaaatctatttgtgaggcttataacacccattatgttgactcaatgacaaagcttttcaaggaagcgccggaatatctttccgggccgaacaacgcgttccttcttaacagttcaatttcatctatttttccggaaatcagctttgtggatcgtaatgacgataactggaaattatcggggctggacaagaaaaattatcctttggatgacgacgggcggctttatcaggcctcggtatccggtttttccttctataaactaaaaaggcccctttccgtgtccgtagaaaaaatttgcaccgatccaaaatatattatggatttgatcctccgcaatatccgtaccgacagatccctttggggcaatgataaataccggatactctcttacggggaaccttcctccaggggatcttttcgggacgcgctcggaaggacatggatttccgcccattgggttataggctttgaggatgaagtcctgataatgtatatcctcccccagcccaacggggcggctattgattcaaccaagcaggacagctcgttcctccacatttatgaatgggatctgcgcaagacatgcgatcacctttttgcggcctacaacggatcttttgaggagtga

SEQ ID NO: 63658 - protein, 413 aa, Unknown
  Obtained from environmental sample
  misc_feature (1)..(413): Xaa is any amino acid
MIRSAEPRDGVCRFQTELVTAFHVINLGYESMVFNKYFIRDSSGSVFELDQIISGSNEKDYLIFTVKDKTFDKFFQLEKNFKTGDTVLSIGNALGEGVVVRNGLILGTIPEEDSGRWNLLKSSADGNPGNSGGPLVTQDGKVVGVVCSLKENILYSLPAEVVINGSRSELSYRQKSGVSHLILANKLNGIFEFKVSLPDSYTKIRKSICEAYNTHYVDSMTKLFKEAPEYLSGPNNAFLLNSSISSIFPEISFVDRNDDNWKLSGLDKKNYPLDDDGRLYQASVSGFSFYKLKRPLSVSVEKICTDPKYIMDLILRNIRTDRSLWGNDKYRILSYGEPSSRGSFRDALGRTWISAHWVIGFEDEVLIMYILPQPNGAAIDSTKQDSSFLHIYEWDLRKTCDHLFAAYNGSFEE

SEQ ID NO: 63659 - DNA, 612 bp, Unknown
  Obtained from environmental sample
  misc_feature (1)..(612): n is a, c, g, or t
atgcggaataaaatattaaactcaggcgatgaggctgtggccccgataaaagacggttccgttattatggtcggcggttttatgacctgcggcacgccggaaattttaattgacgcgctggttaaaaaaggcgttaaagatttaaccattatttgcgacgacggcggatggccggacaagggcgtcggcaggctcatagccaacggacaggcaaggcgccttatagcgtcccatgtggggcttaatcccgaagtcgcaaggcgcactaataccgatgtcgaggccgacaagctcgaattgacgctggttccccaagggacgctcgccgaacgcataagggcgggcggcgcgggacttggcggcgttcttactccgaccggagtggggacaataatagccgggggcaaacaggttgttaatattgacggcagggattttctgttggagaaacccctccgcgccgagttcgcccttatcagggcttccaaaattgatacgttcgggaacacggttttttacggaaccacaaaaaattttaaccctcttatggcgactgccgccgattatgtaattgccggagcctgtgagattgtggaaaccaggcagtattga

SEQ ID NO: 63660 - protein, 203 aa, Unknown
  Obtained from environmental sample
  DOMAIN (6)...(200): Coenzyme A transferase
  misc_feature (1)..(203): Xaa is any amino acid
MRNKILNSGDEAVAPIKDGSVIMVGGFMTCGTPEILIDALVKKGVKDLTIICDDGGWPDKGVGRLIANGQARRLIASHVGLNPEVARRTNTDVEADKLELTLVPQGTLAERIRAGGAGLGGVLTPTGVGTIIAGGKQVVNIDGRDFLLEKPLRAEFALIRASKIDTFGNTVFYGTTKNFNPLMATAADYVIAGACEIVETRQY

SEQ ID NO: 63661 - DNA, 738 bp, Unknown
  Obtained from environmental sample
  misc_feature (1)..(738): n is a, c, g, or t
atgaacattgttattcaaacccttagagaacacatagccaaccggaatatacgctttgtgtttccttcccagatcgcttccgaatcgtgggccagaaaaacctgtaccctgggaatagcccgctcggtcgcgaggaaccgctttcttgcctgggacgattttaaaaaagaagtaatccaggaaaatgaaacgaagcgcaaacccgccacggcggtaatacgcgatctttttgcggacgctttggcaaaaaaaaattccgaagtgattttcttaaaatctatcatccctcctgaattcgcgggcaacgggaaggtctttgctccttttatagccaggcttcttccctcgctaaagtattgggaaacgctgacgcgaaaatttcccacacaccgganagacgctgaagacgaaggttacgaaaccgttaaaaaagaatacgaggcttttcttgagcgttacgatctttttgaaccctcatgggaagacctggaaacccatgaagggaaaacgcgctacgttattttctttccggagcttatcgaagacttcgccgaatcgacgctttactttcggccccgcaatttacccgtatatcggcgaataatttggattacgcgaaatcaggcgctcagaatttactttactataaatccgcgaaggcagagattcgggacgccgttatggagctccgcagacttcacgaggaagagaacataccctacgaagatatggcggtaa

SEQ ID NO: 63662 - protein, 245 aa, Unknown
  Obtained from environmental sample
  misc_feature (1)..(245): Xaa is any amino acid
MNIVIQTLREHIANRNIRFVFPSQIASESWARKTCTLGIARSVARNRFLAWDDFKKEVIQENETKRKPATAVIRDLFADALAKKNSEVIFLKSIIPPEFAGNGKVFAPFIARLLPSLKYWETLTRKFPTHRXDAEDEGYETVKKEYEAFLERYDLFEPSWEDLETHEGKTRYVIFFPELIEDFAESTLYFRPRNLPVYRRIIWITRNQALRIYFTINPRRQRFGTPLWSSADFTRKRTYPTKIWR

SEQ ID NO: 63663 - DNA, 348 bp, Unknown
  Obtained from environmental sample
  misc_feature (1)..(348): n is a, c, g, or t
ttgttttcagagcccctgcgtccggcgacggcgaagccgcttccgaattcaacgccttttacgcccggtatgccaaagacaatccccgcgatacggttctcaatgccgtcgaacatcggatcgcctaacccgacgggcagcccggttgccgcgcactcgacgatgcccccgaccgagtcgcctttttccttcgcttccagaatttgctgtctcattgcttcgccggcttcacgcttgagtacgggcagcgggtttcttagaatcgtctcgaaatccgcgcttgatacggtcacagggtcaaagggatcgtcttgcgctccgccgatccgcaaatctcggccaatctga

SEQ ID NO: 63664 - protein, 115 aa, Unknown
  Obtained from environmental sample
  misc_feature (1)..(115): Xaa is any amino acid
MFSEPLRPATAKPLPNSTPFTPGMPKTIPAIRFSMPSNIGSPNPTGSPVAAHSTMPPTESPFSFASRICCLIASPASRLSTGSGFLRIVSKSALDTVTGSKGSSCAPPIRKSRPI

SEQ ID NO: 63665 - DNA, 612 bp, Unknown
  Obtained from environmental sample
  misc_feature (1)..(612): n is a, c, g, or t
ttgcggatcggcggagcgcaagacgatccctttgaccctgtgaccgtatcaagcgcggatttcgagacgattctaagaaacccgctgcccgtactcaagcgtgaagccggcgaagcaatgagacagcaaattctggaagcgaaggaaaaaggcgactcggtcgggggcatcgtcgagtgcgcggcaaccgggctgcccgtcgggttaggcgatccgatgttcgacggcattgagaaccgtatcgcggggattgtctttggcataccgggcgtaaaaggcgttgaattcggaagcggcttcgccgtcgccggacgcaggggctctgaaaacaacgacagcttttacatggatggggaaaaggtgaaaacgcgcacaaacaacgcaggcggcatattgggcgggataacaaacgggatgcccttgttgttccgcgcggcgttcaagcctacgccatccataggcgtggaacaggacagcgtgagcctgtcgaaggcggaaaacgccgttttgcaggtaaagggacgccatgatccctgcatcgtcccccgcgccctgccctgcgtggaagcggcggcggccatcgcgttatacgacgcttttttggattgttaa

SEQ ID NO: 63666 - protein, 203 aa, Unknown
  Obtained from environmental sample
  DOMAIN (1)...(201): Chorismate synthase
  misc_feature (1)..(203): Xaa is any amino acid
MRIGGAQDDPFDPVTVSSADFETILRNPLPVLKREAGEAMRQQILEAKEKGDSVGGIVECAATGLPVGLGDPMFDGIENRIAGIVFGIPGVKGVEFGSGFAVAGRRGSENNDSFYMDGEKVKTRTNNAGGILGGITNGMPLLFRAAFKPTPSIGVEQDSVSLSKAENAVLQVKGRHDPCIVPRALPCVEAAAAIALYDAFLDC

SEQ ID NO: 63667 - DNA, 354 bp, Unknown
  Obtained from environmental sample
  misc_feature (1)..(354): n is a, c, g, or t
atgatccctgcatcgtcccccgcgccctgccctgcgtggaagcggcggcggccatcgcgttatacgacgcttttttggattgttaaacgtaaaggaggaaacataatggatttacaggattaccgggcgcagatagacaaggtggacgatcagcttctgtcgctgtttaaggagaggatgggcatatccggacagatcgcccagttcaaaaaagagcatggacttcaggctctggatgtcacgcgggagagggaaaagttggccgatatcggcgaanaggccggcgatgacatccgttctttcgcgtatatcctgtacacgacgctgtttgaatcagccgcgcccatcaggtaa

SEQ ID NO: 63668 - protein, 117 aa, Unknown
  Obtained from environmental sample
  DOMAIN (42)...(109): Chorismate mutase type II
  misc_feature (1)..(117): Xaa is any amino acid
MIPASSPAPCPAWKRRRPSRYTTLFWIVKRKGGNIMDLQDYRAQIDKVDDQLLSLFKERMGISGQIAQFKKEHGLQALDVTREREKLADIGEXAGDDIRSFAYILYTTLFESAAPIR

SEQ ID NO: 63669 - DNA, 849 bp, Unknown
  Obtained from environmental sample
  misc_feature (1)..(849): n is a, c, g, or t
gtggaacacacggacagagtcttccctcagcacgcgcttgtcgcctgtcagggcgtggaaggcgcgtattcgcagatcgcctgcgacaggctgtttgccgatccgaacattttttatttcacgggctttgacggcgtgttttcggcaatccgcgacggactttgccaatacgggatattgcctctggaaaacagcacggccggttcggtcaatctggtatacgaccttatgatgaagcacagtttcaagatcgcgcggagcgtacggctgaaaatcgatcacaacctgctcgcgaaggcgggcgtaaaaaaagaaaacatccgtgaaatcttttcgcatgaacaggcgattcaacaatgcgcggggtatttgaaggggcttggcaaaaacgtgaaagtcaccaccgtcaccaataccgccgaagccgcaaaaatggttgcggaatccgaccggaacgacgttgcggcccttgcctcccattcgtgctgcgatctgtacgccctgaaatgcgtggaaagctccgtgcaggacaggggcaataactacacgcgcttcatctgtatctccaaaaacctcgaaatatatccgggagcagaccgtaccagcatcatgctgaccaccgcgcacaagcccggctcgctgtacaaggtactcggcctgatatacgccctcggcgtgaatgtcgtaaaactggaaagccgcccgatccccgaccgcgatttcgagttcatgttttatttcgatcttgaaacatcggtatattcaaaaaaattcagccaactgatgtgcgaactggaaaatttgtgcgaggaattccattaccttggaagttacacagagattgtttga

SEQ ID NO: 63670 - protein, 282 aa, Unknown
  Obtained from environmental sample
  DOMAIN (14)...(193): Prephenate dehydratase
  misc_feature (1)..(282): Xaa is any amino acid
MEHTDRVFPQHALVACQGVEGAYSQIACDRLFADPNIFYFTGFDGVFSAIRDGLCQYGILPLENSTAGSVNLVYDLMMKHSFKIARSVRLKIDHNLLAKAGVKKENIREIFSHEQAIQQCAGYLKGLGKNVKVTTVTNTAEAAKMVAESDRNDVAALASHSCCDLYALKCVESSVQDRGNNYTRFICISKNLEIYPGADRTSIMLTTAHKPGSLYKVLGLIYALGVNVVKLESRPIPDRDFEFMFYFDLETSVYSKKFSQLMCELENLCEEFHYLGSYTEIV

SEQ ID NO: 63671 - DNA, 1227 bp, Unknown
  Obtained from environmental sample
  misc_feature (1)..(1227): n is a, c, g, or t
atgaaaaaaacattcggtttgttaggcgaaaaacttggacacagcttctcaccattgatacacgggtatctcggcgaatatgattattcactgtacgaggtatccgccgctgatcttgattcgttcatgactgacagacgctttgacgggattaacgtaaccatcccctacaaacaacaggtaatgccttactgcgttaccctttcccatgaggcccagactataggcagtgtgaacacgattataaaggatggggacggggcgttgcacgggcacaacacggactaccatggttttaaccagatgatggaacatggcggaatagatccgaagggaaaaaaagttttagtgttaggcgacggcggatctgcgaagacagtgagggcggcgctggacggactgggcgcgcgcgagattgttacaatctcccgccggggggaaaatcactacggcaatatcgagcgtcattatgacgcgcaggtcatcgttaataccacacccgtcggtatgtatcctgacaacggcagcagtcccttggctcttgcgggattcaagcaattaacgggcgtggccgatttgatctacaatcccacacggaccaaactcctgcttgaagccgaagggcttggtattccatgtgtaaacggccttacgatgctggtagcccaggcggaggcggcgtcccgcttatttctgaacgggcccgcacgacctgaactggtgaataaaattcatgacgcgattctcaaaagaacgcaaaacatcgcccttatcggcatgcccggctgcggaaaaagcactgccggcaaatgcctcgcccaaaaaatggggcggccctttgtggatattgacgaacagattgaggctgccgaggggaagaaaatcccccaaattttcgccgaagacggggaagaaacattcaggcggctggagacccgcgtactcgccggggaagccaaaaaaagcggtacggtactggcgacaggcgggggcgtggtaacgcggcctgaaaatcttgacttgctgaggcaaaacagtttaattatttacttaaaacgcgatctaacagaccttattacagatggccggccgctttcgcagaacattgggattcaagcccttgccgacaaacggctgcctttatatgaggcgtggaatgatttcgccgttcaggtggaagcgaagcctgagcaaacggcggcgaggatagaggaggtggtacaatga

SEQ ID NO: 63672 - protein, 408 aa, Unknown
  Obtained from environmental sample
  DOMAIN (98)...(203): Shikimate / quinate 5-dehydrogenase
  misc_feature (1)..(408): Xaa is any amino acid
MKKTFGLLGEKLGHSFSPLIHGYLGEYDYSLYEVSAADLDSFMTDRRFDGINVTIPYKQQVMPYCVTLSHEAQTIGSVNTIIKDGDGALHGHNTDYHGFNQMMEHGGIDPKGKKVLVLGDGGSAKTVRAALDGLGAREIVTISRRGENHYGNIERHYDAQVIVNTTPVGMYPDNGSSPLALAGFKQLTGVADLIYNPTRTKLLLEAEGLGIPCVNGLTMLVAQAEAASRLFLNGPARPELVNKIHDAILKRTQNIALIGMPGCGKSTAGKCLAQKMGRPFVDIDEQIEAAEGKKIPQIFAEDGEETFRRLETRVLAGEAKKSGTVLATGGGVVTRPENLDLLRQNSLIIYLKRDLTDLITDGRPLSQNIGIQALADKRLPLYEAWNDFAVQVEAKPEQTAARIEEVVQ

SEQ ID NO: 63673 - DNA, 414 bp, Unknown
  Obtained from environmental sample
  misc_feature (1)..(414): n is a, c, g, or t
atggaccgaacatcaatatgctcggtctgcgggagcccggatatatacggcattaaaagttatgcgtcattgctggaattcatacgggatgtagccgcacaatatggcgtggaagtagagtgtatgcagtcgaaccacgagggggcgatcgtggacgctatccaggccgcttacggcaagtttgacagcatcgtgatcaacccggcggcatatacgcacacaagcgttgccattcttgacgcgttgaaggcggtcgcgcttcctgcggtagaggtgcatttatcgaacatccatgagcgcgaagctttccgtaaaacatcatacccggcgcaggcctgcgaaaaagtatactccggcatggggtttgaaggatacgcaatggcgatacgttatcttgtgggaaaagaggaataa

SEQ ID NO: 63674 - protein, 137 aa, Unknown
  Obtained from environmental sample
  DOMAIN (4)...(137): Dehydroquinase class II
  misc_feature (1)..(137): Xaa is any amino acid
MDRTSICSVCGSPDIYGIKSYASLLEFIRDVAAQYGVEVECMQSNHEGAIVDAIQAAYGKFDSIVINPAAYTHTSVAILDALKAVALPAVEVHLSNIHEREAFRKTSYPAQACEKVYSGMGFEGYAMAIRYLVGKEE

SEQ ID NO: 63675 - DNA, 1206 bp, Unknown
  Obtained from environmental sample
  misc_feature (1)..(1206): n is a, c, g, or t
ttgacggtgggcttgcttaccgattccgctatcgcgtcgcataaacgcctgccctatttaacctatgagcagagaaaagatgtaattgaaaatattaaaggcgttgcccgtgtaattccccaggaagagtggagttacgtgcccaatttgcggaagctaaagcccgattacatcattcatggagacgactggaaaagcggccctttgcaaaaagaacgcgatgaagtttttgcggtaatgaaagaactgggcggcgaagttattgagattccctatacatcgggaataaattcatcttcaattaatgaggcgatacgctccattggaacaacgcctgacattcgcctgaaaacattacgcagacttcttgaaacaaaacatcttgtaagaatcatggaagctcattcaggtttgtccggtttaataatagaaaatcttgaagttgaaaaagaagacggtctgcacagttttgacggaatgtggtcgtcaagtttaaccgactcgacaagcaaaggaaaacccgatattgaagcggttgatcttactacccgcctgcaggacttaaccaatattcttgaatgtacgacaaagcctataatttttgacggcgacactggtgggcatcatttcgcgttcaccgtaaaaacacttgaacgaaacggcatatcggctgtcattatagaagacaagaccggccttaaaaaaaattcactttttggaactgacgtaaatcaggaattatgccccattcctgaattctgcggtaaaataaaggcaggaaaacacgcgcaggttacgaaagaatttatgatcatcgcgcgccttgaaagcctaatcgcgggttttccggtttctcacgcgcttgaaagggcgcgcgcctttgtcgaagccggcgcggacggcgttatgatacacagcaaggaaaaaaccggagatgacattaaacaattttgttcgctgttccgcgccgaatatccgcatgtgccgctggtgcttgttccgacaacgtacaataagttcacggaaagagaacttgcctcctggggcgcgaatatcgttatttacgcaaatcatatgctccgctccgcatatcctgctatgttcaataccgctaaaatgatcttaaataacgaacgttcattggaggcggattcagtctgtatgcctataaaagaaatacttgaattaattccgggcgggaaataa

SEQ ID NO: 63676 - protein, 401 aa, Unknown
  Obtained from environmental sample
  misc_feature (1)..(401): Xaa is any amino acid
MTVGLLTDSAIASHKRLPYLTYEQRKDVIENIKGVARVIPQEEWSYVPNLRKLKPDYIIHGDDWKSGPLQKERDEVFAVMKELGGEVIEIPYTSGINSSSINEAIRSIGTTPDIRLKTLRRLLETKHLVRIMEAHSGLSGLIIENLEVEKEDGLHSFDGMWSSSLTDSTSKGKPDIEAVDLTTRLQDLTNILECTTKPIIFDGDTGGHHFAFTVKTLERNGISAVIIEDKTGLKKNSLFGTDVNQELCPIPEFCGKIKAGKHAQVTKEFMIIARLESLIAGFPVSHALERARAFVEAGADGVMIHSKEKTGDDIKQFCSLFRAEYPHVPLVLVPTTYNKFTERELASWGANIVIYANHMLRSAYPAMFNTAKMILNNERSLEADSVCMPIKEILELIPGGK

SEQ ID NO: 63677 - DNA, 636 bp, Unknown
  Obtained from environmental sample
  misc_feature (1)..(636): n is a, c, g, or t
ttgatagaaacgtcatatttttataacagtcttgttgaaaatggaaccggttttttttcaggcgtacctgattcgctccttaaagatttttgcgcgtatattaccgatcacacggaaaagcaaaaccatattatctcggttaatgaaggaaccgccgtcggccttgcctgcgggtatcattttgccacaggccgcattccgcttgtctatatgcaaaattcaggcatcggcaacgcggtcaatcctctgctctctcttgcggataacaatgtttaccgcatacctatagttcttgtcataggctggcgcggagaaccgggcgtacatgacgagcctcagcatgttaaacaaggcaaagttacctgttcactccttgatagtatgggtatcccatatacggtattggaaaaagataagaactccgtaaacagccagattgaaaattgttttaaaacaatttctgaaacaggctccccttatgctttttgtatacgcaagggacaccattccccccctatacacttccaaaaaaagaagaattatgacgcggctgattacgcgcgaggaaacgatcgaagaaattgcagcaacccgagaaggagtnatcgtttccactaccggcatgatctcccgtga

SEQ ID NO: 63678 - protein, 211 aa, Unknown
  Obtained from environmental sample
  misc_feature (1)..(211): Xaa is any amino acid
MIETSYFYNSLVENGTGFFSGVPDSLLKDFCAYITDHTEKQNHIISVNEGTAVGLACGYHFATGRIPLVYMQNSGIGNAVNPLLSLADNNVYRIPIVLVIGWRGEPGVHDEPQHVKQGKVTCSLLDSMGIPYTVLEKDKNSVNSQIENCFKTISETGSPYAFCIRKGHHSPPIHFQKKKNYDAADYARGNDRRNCSNPRRSXRFHYRHDLP

SEQ ID NO: 63679 - DNA, 690 bp, Unknown
  Obtained from environmental sample
  misc_feature (1)..(690): n is a, c, g, or t
ttgaaaattgttttaaaacaatttctgaaacaggctccccttatgctttttgtatacgcaagggacaccattccccccctatacacttccaaaaaaagaagaattatgacgcggctgattacgcgcgaggaaacgatcgaagaaattgcagcaacccgagaaggagtnatcgtttccactaccggcatgatctcccgtgaattgtacgagttacgcgataaagcgggcgcaggtcatgctcgtgattttcttactgtaggctctatgggtcatgcgtcatccattgcgttgtctatcgctttgcaaaaaccgcagttgcaggttacctgccttgacggagacggcgcggcgcttatgcacatgggttctttcgccgcaatcgggacgcaaaaaccgcgtaactattgccacattgtacttaataacggcgctcatgattctgtcggcggacagccgactatcgccccatttattgatattccgtccgtcgctcgggcttgcggttatacaaaagtgtatcaggtaaaaacaaagaaagagttgcaaaagattttagctaaaaaaaacgaagtgcttacatttattgaggtaaaagtaaaaaaaggcgcacgtaaggatttggggcgtccaaaatcatcgccgcaggaaaacaaagaagcgtttatgaaatttattgaggaatacagatga

SEQ ID NO: 63680 - protein, 229 aa, Unknown
  Obtained from environmental sample
  DOMAIN (60)...(197): Thiamine pyrophosphate enzyme, C-terminal TPP binding domain
  misc_feature (1)..(229): Xaa is any amino acid
MKIVLKQFLKQAPLMLFVYARDTIPPLYTSKKRRIMTRLITREETIEEIAATREGVIVSTTGMISRELYELRDKAGAGHARDFLTVGSMGHASSIALSIALQKPQLQVTCLDGDGAALMHMGSFAAIGTQKPRNYCHIVLNNGAHDSVGGQPTIAPFIDIPSVARACGYTKVYQVKTKKELQKILAKKNEVLTFIEVKVKKGARKDLGRPKSSPQENKEAFMKFIEEYR

SEQ ID NO: 63681 - DNA, 585 bp, Unknown
  Obtained from environmental sample
  misc_feature (1)..(585): n is a, c, g, or t
atgataaaacaggcggttattgtcgcggcgggtcttggttcgcgtcttaaagaaaaaacagtttcaatgccaaaaggttttcttgaattggacggtatcgccattgttgaatggtcggttcaaaaactgctcgcctgcggcgttgaaaaaattattataggtacgggttatcacgccgaggcatacgacgctcttgcgaaaaaataccccgctattcaaaccgctttcagcgccgactacgagacaacaagcagtatggcgacattgaacgtatgcgccccttatgtaaccgatgattttctgcttttggaatcagaccttatttacgacagcatcggactgagtgttctttgcaacgatatacatgaaaatgttattctcgcttccggcgcgaccaattcaggcgacgaagtgtatttagaagcggctaacggctctttcttaaaggcgctttcaaaaaataaagccgaacttgcttttacctacggcgagcttgtcggaattacaaaaatttcccgctctctccttacagcgatgtgcgcttattacgaaaaaaaacgcgctgagcttccgaaactcgattag

SEQ ID NO: 63682 - protein, 194 aa, Unknown
  Obtained from environmental sample
  misc_feature (1)..(194): Xaa is any amino acid
MIKQAVIVAAGLGSRLKEKTVSMPKGFLELDGIAIVEWSVQKLLACGVEKIIIGTGYHAEAYDALAKKYPAIQTAFSADYETTSSMATLNVCAPYVTDDFLLLESDLIYDSIGLSVLCNDIHENVILASGATNSGDEVYLEAANGSFLKALSKNKAELAFTYGELVGITKISRSLLTAMCAYYEKKRAELPKLD

SEQ ID NO: 63683 - DNA, 735 bp, Unknown
  Obtained from environmental sample
  misc_feature (1)..(735): n is a, c, g, or t
atgagacgtcggagggaggattctccggtgtttgagaatatcatcgcgcaggcggcggcaagccagttaaaagcggatattctttcacacaggcttgccccttccatgcttttcttcgggcctgccgcgtcgggaaagggcagcacggcaatggaactggcgcgttccctttcatgcgagaagggggacgcattgtggagttgctcctgtccttcttgcgtccgtcatcgatcccttatccatgccgatcttgcgatgattgggccgaggatttttaccgcggagatagccgcctcgcgcgccgctttcctgagagacccgtcatcggcggcgggccgttccctttttatccgttccctgaggaaattgcttgcccgtttcgcgccctctgtctgggagtatgagcctaagtcaaataagactaaccccttgcccctccttcattcgctggaagaggagcttgacgagtttgaggcaataacggctgatacttcatcaagtgatacattgaatgacgataaacaaaacaaaacatttgagaagctgaccgattcgcttgtcaagaacgctgtcaaacttgacgagtgcataagcgaaggcgtccccatagcgcaggtacgcaaggcggcatactgggcccggctttccccggcggggaaacgtaaaacactgatcatcgagaacgccgaccgtatgaaggaagaagcccgcagcngctttactcaaactgcttga

SEQ ID NO: 63684 - protein, 244 aa, Unknown
  Obtained from environmental sample
  misc_feature (1)..(244): Xaa is any amino acid
MRRRREDSPVFENIIAQAAASQLKADILSHRLAPSMLFFGPAASGKGSTAMELARSLSCEKGDALWSCSCPSCVRHRSLIHADLAMIGPRIFTAEIAASRAAFLRDPSSAAGRSLFIRSLRKLLARFAPSVWEYEPKSNKTNPLPLLHSLEEELDEFEAITADTSSSDTLNDDKQNKTFEKLTDSLVKNAVKLDECISEGVPIAQVRKAAYWARLSPAGKRKTLIIENADRMKEEARSXFTQTA

SEQ ID NO: 63685 - DNA, 1350 bp, Unknown
  Obtained from environmental sample
  misc_feature (1)..(1350): n is a, c, g, or t
atgcagtcccaatccaaacctcgttgcttgcagggaaacatggagactgcggatcagggaagcgtatacggcttattctgtctggaaccaaagaccggaggccgcgctggaatcgctgtttttccggctcagggaagaagctgcgggagcggcgttgacatgagcagcttttaccggcgggcgctcagcaaacttaacaggctcaaccttgagcagtgccgggaattgcttgtatcggcttcgcaggaaatcttccgtcttgataccgtgcttgactcgctgccctgcggcatactggtatgcgatgaaaaacaccgcctgctaatggcgaataaagccgccctgcgttttctgcccatgagctacacggaaggcgaccttttgtgggagcttattcccgatgagcctatagcaaatttttttcaacaggtgttaaaaaacggcgacaaggtactggaacatgaaatggatattcacacgcaggggcctggctccggccgcctgctttcgatcagcgttcatcctcttgtcgagaagcggcatataaccggctctctcgtttatatagaagatataaccgagaaacggggcagggaggttcgcctgcgccgcgctgaaaatcttgccagccttaccacgctcgctgcgggcgttgcccatgagataaaaaatccgttaggggctatttcgatccacctccagcttatgcgtaaagccctggacaaaaataaaaaccagcaagaacccgccgctacggacgcattagttgataaatatttttccgtgttaaacgaagaggttgatcggctgaacggcattgttgtcgattttttgtttgccgtgcgccccatgtctctggaactctgcgagggagacctncacgcgctgatcacggggcttggcgaatttatccgcgctgaactggagcagtccaatatacggcttctgcttgagctggatgacaaactcccccccgtgcttttcgacgagcgttatatgaaacaggttttgcttaacctgattaaaaacgcccaggccgccatgccaaaggggggactgttgaccattgccacactgggaagggacaacgagatacggataagcgtatgcgacacaggcacggggattagtcaggaaaaccttaaaaaaatatttgaaccttattttacgacaaaaggcaacggcacgggtcttgggctgacccttgtatataaaattatcagggaacatcagggcgagatgtcggttgattcgagggaaggggagggaacggattttgagatcatccttcccgtctatcagaaagaacagcgtttgattaattattcaggagcaaaaaatgaagtttaa

SEQ ID NO: 63686 - protein, 449 aa, Unknown
  Obtained from environmental sample
  DOMAIN (91)...(197): PAS fold
  misc_feature (1)..(449): Xaa is any amino acid
MQSQSKPRCLQGNMETADQGSVYGLFCLEPKTGGRAGIAVFPAQGRSCGSGVDMSSFYRRALSKLNRLNLEQCRELLVSASQEIFRLDTVLDSLPCGILVCDEKHRLLMANKAALRFLPMSYTEGDLLWELIPDEPIANFFQQVLKNGDKVLEHEMDIHTQGPGSGRLLSISVHPLVEKRHITGSLVYIEDITEKRGREVRLRRAENLASLTTLAAGVAHEIKNPLGAISIHLQLMRKALDKNKNQQEPAATDALVDKYFSVLNEEVDRLNGIVVDFLFAVRPMSLELCEGDLHALITGLGEFIRAELEQSNIRLLLELDDKLPPVLFDERYMKQVLLNLIKNAQAAMPKGGLLTIATLGRDNEIRISVCDTGTGISQENLKKIFEPYFTTKGNGTGLGLTLVYKIIREHQGEMSVDSREGEGTDFEIILPVYQKEQRLINYSGAKNEV

SEQ ID NO: 63687 - DNA, 1338 bp, Unknown
  Obtained from environmental sample
  misc_feature (1)..(1338): n is a, c, g, or t
atgaagtttaaactccttgttgttgatgatgaaaaaaacattcgtgaggggcttgccgcttctcttgaaatggacggctacaacgcggtctgcgccgcaagcggcgatgaagcctgggatctttattgcaagggcgacatagaccttgttattaccgacctgcgaatgcccggcatggacggcgaggaacttatgcgcagaatactggcggaaacccccggcctgccggttattatactcaccgggcacggtaccatagaaaacgctgtcagcgctatgcacgatggggcctgggatttccttaccaagcctgtcaatctggatcatcttggaatgttggtaaagagggcgcttgaaaacagggaactcgtgctgcgccaccgggaactgcaagtcgatctggagcggagcaggctctcatccagcatgatcggcaaatcgaccgttatgcgaaaagtgttcgacacgataaaccgcgtcgcgcctaccaaagcttcggtcctgatcacgggggaatccggcgtcggcaaagaactggtcgccgacgccattcacgagctttcgccccgcaagggtaagcctttggttaaagttcactgcgccgcgcttgcggcgaacctccttgaaagcgagctgttcggccatgaaaaaggggccttcacaggcgcggtttcccggcggcgggggcgttttgagcttgcgaacggaggcacgctttttctcgacgagataggcgagatagaccagaacatacagataaagcttctgcgtgttttgcaggaacatcagtttgagcgcgtcggcggggaagaaacccttgaaaccgacgtccgcattgtcgccgcgaccaacaaagacctcaaagccgagatagaaaaaggcaatttccgcgaagacctgtacttccgccttaacgtggtgagcatccatgttcccccgttacgcgaaagaaaggacgacatccccctgatggcggccagcttcctcaaggaaatcgccgccgaaaataacaaaaccatcgaaggcatccatgaaaaggcctatgcccgtctctacgcctacgattggcccggcaatatccgcgagcttcgcaactgcattgaaagcgccgtggtcatgtgccgcaaaccgatcatcgccgtggacgatctgccccccgcgctgcaatcctattctgacgatgaaggctgggtaaaggttcctctggattgcagccttgaggaagccgaaaaaatcattatcaaggcggcgattggttttcacaagaacaagaccaaggccgccgaagttctgggcattgggcggaagacactgcacaggaaaattctggaagaataa

SEQ ID NO: 63688 - protein, 445 aa, Unknown
  Obtained from environmental sample
  DOMAIN (166)...(314): ATPase family associated with various cellular activities (AAA)
  misc_feature (1)..(445): Xaa is any amino acid
MKFKLLVVDDEKNIREGLAASLEMDGYNAVCAASGDEAWDLYCKGDIDLVITDLRMPGMDGEELMRRILAETPGLPVIILTGHGTIENAVSAMHDGAWDFLTKPVNLDHLGMLVKRALENRELVLRHRELQVDLERSRLSSSMIGKSTVMRKVFDTINRVAPTKASVLITGESGVGKELVADAIHELSPRKGKPLVKVHCAALAANLLESELFGHEKGAFTGAVSRRRGRFELANGGTLFLDEIGEIDQNIQIKLLRVLQEHQFERVGGEETLETDVRIVAATNKDLKAEIEKGNFREDLYFRLNVVSIHVPPLRERKDDIPLMAASFLKEIAAENNKTIEGIHEKAYARLYAYDWPGNIRELRNCIESAVVMCRKPIIAVDDLPPALQSYSDDEGWVKVPLDCSLEEAEKIIIKAAIGFHKNKTKAAEVLGIGRKTLHRKILEE

SEQ ID NO: 63689 - DNA, 513 bp, Unknown
  Obtained from environmental sample
  misc_feature (1)..(513): n is a, c, g, or t
atggatgctcaccacgttaaggcggaagtacaggtcttcgcggaaattgcctttttctatctcggctttgaggtctttgttggtcgcggcgacaatgcggacgtcggtttcaagggtttcttccccgccgacgcgctcaaactgatgttcctgcaaaacacgcagaagctttatctgtatgttctggtctatctcgcctatctcgtcgagaaaaagcgtgcctccgttcgcaagctcaaaacgcccccgccgccgggaaaccgcgcctgtgaaggcccctttttcatggccgaacagctcgctttcaaggaggttcgccgcaagcgcggcgcagtgaactttaaccaaaggcttacccttgcggggcgaaagctcgtgaatggcgtcggcgaccagttctttgccgacgccggattcccccgtgatcaggaccgaagctttggtaggcgcgacgcggtttatcgtgtcgaacacttttcgcataacggtcgatttgccgatcatgctggatga

SEQ ID NO: 63690 - protein, 170 aa, Unknown
  Obtained from environmental sample
  misc_feature (1)..(170): Xaa is any amino acid
MDAHHVKAEVQVFAEIAFFYLGFEVFVGRGDNADVGFKGFFPADALKLMFLQNTQKLYLYVLVYLAYLVEKKRASVRKLKTPPPPGNRACEGPFFMAEQLAFKEVRRKRGAVNFNQRLTLAGRKLVNGVGDQFFADAGFPRDQDRSFGRRDAVYRVEHFSHNGRFADHAG

SEQ ID NO: 63691 - DNA, 522 bp, Unknown
  Obtained from environmental sample
  misc_feature (1)..(522): n is a, c, g, or t
atggatgtattaaccccggatcaacgtcataaatgcatgtctcatatcagaagcaaaaatacttctatagagattttattgcgtaaagccctatggcgtgaaggcatccgttatagaaagaattatgacaaattacagggaaaacctgatattgccataacaaaatataaaattgctgttttttgtgacggtgaattatggcatggtaaggattggggagataaaaaagaacaaattaaaacaaacaaagattattggattaaaaagatcgaatgtaacatagtgcgggataacaaaaacgaaaagaagcttgaaagtatgggatggacggttatcaggttttggggaaaagaaataaaagataaccttatggattgtgtaaatgtaattaaagagaccatttacgaaataaaacataatttaaacaatatagaatatgaacaaggttatgatgaaaatattgctttaatggcggcagatgccgaacctgaatataatgagcaggcggcatcgccaacataa

SEQ ID NO: 63692 - protein, 173 aa, Unknown
  Obtained from environmental sample
  DOMAIN (1)...(75): DNA mismatch endonuclease Vsr
  misc_feature (1)..(173): Xaa is any amino acid
MDVLTPDQRHKCMSHIRSKNTSIEILLRKALWREGIRYRKNYDKLQGKPDIAITKYKIAVFCDGELWHGKDWGDKKEQIKTNKDYWIKKIECNIVRDNKNEKKLESMGWTVIRFWGKEIKDNLMDCVNVIKETIYEIKHNLNNIEYEQGYDENIALMAADAEPEYNEQAASPT

SEQ ID NO: 63693 - DNA, 777 bp, Unknown
  Obtained from environmental sample
  misc_feature (1)..(777): n is a, c, g, or t
ttgcgcaacaaaaacgaggaggtgagccgtgatttggcgcaggtttacctgctcatcgggcagatatacttgtacgcgggcaaatttgaggagagtatagcgtggatcaacaattccatagtggtggacgacatgtaccctgtttcttaccacagtttggcgctggcgtttcggagcatcggggacgaatctatgtccataaagagcttggagcaggagatacgcgtcgcgccggggaattactactcctatctgatgctcgccgatctatacgagaaaaacggggattttgcgagttttgaggatgtgttgcggcggcttctggaacgcgcgccggacaatgttcaggggctgcacaggttgatacggcactgcgaacgcgtggacggcggcgccgacgtggagttgctgaggcggcggctgctgggcaacgataaggggctaagccgcatagaggcggtgatccgcgcctatcatctggcgcagggggggcgtgaaagggaggctgtggagtttttggaagcttggggcgaggaggcgccggacgtctcgatcaaccacttagcgaacgcgcacatctacgggcggatgcacctgcactcaaagaagcgcaacgaattatcgcggtttcgaatgaaaaatcgcgcgcgggaagacgtaatggagataaagatagccgaattcgcctcggtattcggggaagaagcggcggagaaaatcaggcgaagcctgcgggtagccggtatcggcaaaggtttcggttataataataattaa

SEQ ID NO: 63694 - protein, 258 aa, Unknown
  Obtained from environmental sample
  misc_feature (1)..(258): Xaa is any amino acid
MRNKNEEVSRDLAQVYLLIGQIYLYAGKFEESIAWINNSIVVDDMYPVSYHSLALAFRSIGDESMSIKSLEQEIRVAPGNYYSYLMLADLYEKNGDFASFEDVLRRLLERAPDNVQGLHRLIRHCERVDGGADVELLRRRLLGNDKGLSRIEAVIRAYHLAQGGREREAVEFLEAWGEEAPDVSINHLANAHIYGRMHLHSKKRNELSRFRMKNRAREDVMEIKIAEFASVFGEEAAEKIRRSLRVAGIGKGFGYNNN

SEQ ID NO: 63695 - DNA, 354 bp, Unknown
  Obtained from environmental sample
  misc_feature (1)..(354): n is a, c, g, or t
atgcagaacaatcgtaccgagcgtctgggtggtctgattcaggaacttatcagcagtcttattcttgaaagcagaatcaaagacccaagaatttcacaatttgtctcaataacaagggtaaacgtcacacgcgatctttcatacgccgatgtgtatgtctccaacatccgcgaaacggcgaaccttgagcgcaacgcgcaggggcttcaaagcgccgccggttttatacaggctcagcttggctccgctttaaaaatacggaaaatcccccatctgcgcttccatgcagataccagcattcgggatggttttgatatggtgcagaagattgaacaattggcaaaagaagaatga

SEQ ID NO: 63696 - protein, 117 aa, Unknown
  Obtained from environmental sample
  DOMAIN (5)...(110): Ribosome-binding factor A
  misc_feature (1)..(117): Xaa is any amino acid
MQNNRTERLGGLIQELISSLILESRIKDPRISQFVSITRVNVTRDLSYADVYVSNIRETANLERNAQGLQSAAGFIQAQLGSALKIRKIPHLRFHADTSIRDGFDMVQKIEQLAKEE

SEQ ID NO: 63697 - DNA, 2394 bp, Unknown
  Obtained from environmental sample
  misc_feature (1)..(2394): n is a, c, g, or t
ttgggggcgcgaaagaagctcgttgtcgcaagccaccctaaagatgaggcccaagagtcggcggaaaaaacagccacaccttcggaaacccaatcgcaggctgatggaacgcctgtaaaacagtatgacgcttcggcgacagggagcaaggtttccccaggcgccgcttctacgccattcccctttacgcagcgtccggctgttgccgtaggcagagtgggcggcaagcaggtcggcagaaaaatccatgatgataaccgcagcggaggttccgccggaggcggtaatgctgtccggagttccgccagcaagggcgcgggccaacagaggcatccatcacccgtaccgcggcagaatcagggctttcggcaaaattttggcgctcagcagcacaacacgccgcgtcccggctctcagggcagaacgggctttacgccgcgtcccggcggacaaggccggggcggacccgctggttcttcgcccccaagcatcctgccggaaggaaagagcggcgcgaagcgcagttttaaggcaaaaaggcccacatacaaccgcaaggaaaaagaacttgagatggaggagaaactccgccagaccaggaaaaaaatcacttacgttgccaacccggtgcccaagtcaatagaaatcatggaaaacatttcggtgtcggaattggcgaaaaaaatgaacctcaaggcgtcggatttaattcaaaagctaatgaagcttggcatgatggttaccattaaccagcagatagacgccgataccgcgacgatactggccgccgaattcggcgcggatgtaaaaattatcagcctgtatgacgaaaccataattgacaccgggacggacgaaggcgccgatatgctgccccggccgccggttgttaccgttatgggacatgttgaccacggcaaaaccaaactgctggacgctatccggaaagcggacgtggtgtcaggcgagttcggcggtataacccagcacatcggcgcgtacatggtggaaaccccgcacggcagaatcaccttccttgacacgccgggccacgaggcgtttacgcgcatgagggcgcgtggcgcgcaggtaactgacattgttattcttgttgtcgccgcggatgacggggtcatgccccagaccattgaggcgatcaaccacgcgaaggaagccgaagttccaatcattgtcgctgtaaataaaatcgacaagccggaggcaaaccccgaccgcgtaaagagccagctttccgagcttggccttatgcccgaggaatggggcggccagacgatgtttgtcgagctttctgccctgcaaaaaaccggaatagacaagctcattgacgccatactccttgagtcggagcttcttgatctcaaagccaatttccaccggggcgccgaaggaaagattcttgaatcgagaatcgatcacgggcgcggcattgttgccactgtcattgtgcaaagagggaccatctccgtgggcgattcttttgtggcgggtatatggcccggaaaagtacgcgcgatcttcaatgaccgcggcgacaaactcaaacacgcgtccccctccatgcccgttgaaatccttggctttgagggaatccccaacgcaggcgatcccttgcaggctgttgaggacgagaaaatcgcccgcgagtattcgtccaaacgccaggaactgaaacgtttcgaggacgccaagaacttcaagcaggtaaccgccgagaccctgcgcgacaggataagcgacggcaccatacaggaacttaaggtaatcatcaaggctgacgtgcagggttcggctgaggcgctcaagagcagccttgaaaaactttccaccaaagaaataaggctgcatgtcatacaggccctgcccggcccgattaacgaaggcgatgtcgatctagcgattgcgtccaaggccatcatcataggctttaatgtgcggccccttcccaaggctaaagttttggcggagcaggaaaaagttgatatacgcaaatataacatcatatacaaggcggtcgaggaaattcatcaggcgatggagggcatgctaaagcccgataccaaagaggaagttatcgcttcggtagaggtgagaaataccttcaaagtgccaaaggtcggaaccatcgccggctgctttgtgcaaagcggcatagtcaagcgcagcgccagcgtcaatgtaatccgcgcggagatagtgatccactcgggcaaaatcgcatcgctcaggcgtttcaaggatgacgcccgtgaagttgcggccggttacgaatgcggcatagggctggaaggctttgacgacatacaggtcggtgatcaatttgaagtgatcgagattgtagaggtcgcaaggaagttaagcccaaataaggagtag

SEQ ID NO: 63698 - protein, 797 aa, Unknown
  Obtained from environmental sample
  DOMAIN (295)...(404): GTPase of unknown function
  misc_feature (1)..(797): Xaa is any amino acid
MGARKKLVVASHPKDEAQESAEKTATPSETQSQADGTPVKQYDASATGSKVSPGAASTPFPFTQRPAVAVGRVGGKQVGRKIHDDNRSGGSAGGGNAVRSSASKGAGQQRHPSPVPRQNQGFRQNFGAQQHNTPRPGSQGRTGFTPRPGGQGRGGPAGSSPPSILPEGKSGAKRSFKAKRPTYNRKEKELEMEEKLRQTRKKITYVANPVPKSIEIMENISVSELAKKMNLKASDLIQKLMKLGMMVTINQQIDADTATILAAEFGADVKIISLYDETIIDTGTDEGADMLPRPPVVTVMGHVDHGKTKLLDAIRKADVVSGEFGGITQHIGAYMVETPHGRITFLDTPGHEAFTRMRARGAQVTDIVILVVAADDGVMPQTIEAINHAKEAEVPIIVAVNKIDKPEANPDRVKSQLSELGLMPEEWGGQTMFVELSALQKTGIDKLIDAILLESELLDLKANFHRGAEGKILESRIDHGRGIVATVIVQRGTISVGDSFVAGIWPGKVRAIFNDRGDKLKHASPSMPVEILGFEGIPNAGDPLQAVEDEKIAREYSSKRQELKRFEDAKNFKQVTAETLRDRISDGTIQELKVIIKADVQGSAEALKSSLEKLSTKEIRLHVIQALPGPINEGDVDLAIASKAIIIGFNVRPLPKAKVLAEQEKVDIRKYNIIYKAVEEIHQAMEGMLKPDTKEEVIASVEVRNTFKVPKVGTIAGCFVQSGIVKRSASVNVIRAEIVIHSGKIASLRRFKDDAREVAAGYECGIGLEGFDDIQVGDQFEVIEIVEVARKLSPNKE

SEQ ID NO: 63699 - DNA, 594 bp, Unknown
  Obtained from environmental sample
  misc_feature (1)..(594): n is a, c, g, or t
ttgtatatgatgttatatttgcgtatatcaactttttcctgctccgccaaaactttagccttgggaaggggccgcacattaaagcctatgatgatggccttggacgcaatcgctagatcgacatcgccttcgttaatcgggccgggcagggcctgtatgacatgcagccttatttctttggtggaaagtttttcaaggctgctcttgagcgcctcagccgaaccctgcacgtcagccttgatgattaccttaagttcctgtatggtgccgtcgcttatcctgtcgcgcagggtctcggcggttacctgcttgaagttcttggcgtcctcgaaacgtttcagttcctggcgtttggacgaatactcgcgggcgattttctcgtcctcaacagcctgcaagggatcgcctgcgttggggattccctcaaagccaaggatttcaacgggcatggagggggacgcgtgtttgagtttgtcgccgcggtcattgaagatcgcgcgtacttttccgggccatatacccgccacaaaagaatcgcccacggagatggtccctctttgcacaatgacagtggcaacaatgccgcgcccgtga

SEQ ID NO: 63700 - protein, 197 aa, Unknown
  Obtained from environmental sample
  misc_feature (1)..(197): Xaa is any amino acid
MYMMLYLRISTFSCSAKTLALGRGRTLKPMMMALDAIARSTSPSLIGPGRACMTCSLISLVESFSRLLLSASAEPCTSALMITLSSCMVPSLILSRRVSAVTCLKFLASSKRFSSWRLDEYSRAIFSSSTACKGSPALGIPSKPRISTGMEGDACLSLSPRSLKIARTFPGHIPATKESPTEMVPLCTMTVATMPRP

SEQ ID NO: 63701 - DNA, 906 bp, Unknown
  Obtained from environmental sample
  misc_feature (1)..(906): n is a, c, g, or t
atgcagccttatttctttggtggaaagtttttcaaggctgctcttgagcgcctcagccgaaccctgcacgtcagccttgatgattaccttaagttcctgtatggtgccgtcgcttatcctgtcgcgcagggtctcggcggttacctgcttgaagttcttggcgtcctcgaaacgtttcagttcctggcgtttggacgaatactcgcgggcgattttctcgtcctcaacagcctgcaagggatcgcctgcgttggggattccctcaaagccaaggatttcaacgggcatggagggggacgcgtgtttgagtttgtcgccgcggtcattgaagatcgcgcgtacttttccgggccatatacccgccacaaaagaatcgcccacggagatggtccctctttgcacaatgacagtggcaacaatgccgcgcccgtgatcgattctcgattcaagaatctttccttcggcgccccggtggaaattggctttgagatcaagaagctccgactcaaggagtatggcgtcaatgagcttgtctattccggttttttgcagggcagaaagctcgacaaacatcgtctggccgccccattcctcgggcataaggccaagctcggaaagctggctctttacgcggtcggggtttgcctccggcttgtcgattttatttacagcgacaatgattggaacttcggcttccttcgcgtggttgatcgcctcaatggtctggggcatgaccccgtcatccgcggcgacaacaagaataacaatgtcagttacctgcgcgccacgcgccctcatgcgcgtaaacgcctcgtggcccggcgtgtcaaggaaggtgattctgccgtgcggggtttccaccatgtacgcgccgatgtgctgggttataccgccgaactcgcctga

SEQ ID NO: 63702 - protein, 301 aa, Unknown
  Obtained from environmental sample
  misc_feature (1)..(301): Xaa is any amino acid
MQPYFFGGKFFKAALERLSRTLHVSLDDYLKFLYGAVAYPVAQGLGGYLLEVLGVLETFQFLAFGRILAGDFLVLNSLQGIACVGDSLKAKDFNGHGGGRVFEFVAAVIEDRAYFSGPYTRHKRIAHGDGPSLHNDSGNNAAPVIDSRFKNLSFGAPVEIGFEIKKLRLKEYGVNELVYSGFLQGRKLDKHRLAAPFLGHKAKLGKLALYAVGVCLRLVDFIYSDNDWNFGFLRVVDRLNGLGHDPVIRGDNKNNNVSYLRATRPHARKRLVARRVKEGDSAVRGFHHVRADVLGYTAELA

SEQ ID NO: 63703 - DNA, 678 bp, Unknown
  Obtained from environmental sample
  misc_feature (1)..(678): n is a, c, g, or t
ttggctttgagatcaagaagctccgactcaaggagtatggcgtcaatgagcttgtctattccggttttttgcagggcagaaagctcgacaaacatcgtctggccgccccattcctcgggcataaggccaagctcggaaagctggctctttacgcggtcggggtttgcctccggcttgtcgattttatttacagcgacaatgattggaacttcggcttccttcgcgtggttgatcgcctcaatggtctggggcatgaccccgtcatccgcggcgacaacaagaataacaatgtcagttacctgcgcgccacgcgccctcatgcgcgtaaacgcctcgtggcccggcgtgtcaaggaaggtgattctgccgtgcggggtttccaccatgtacgcgccgatgtgctgggttataccgccgaactcgcctgacaccacgtccgctttccggatagcgtccagcagtttggttttgccgtggtcaacatgtcccataacggtaacaaccggcggccggggcagcatatcggcgccttcgtccgtcccggtgtcaattatggtttcgtcatacaggctgataatttttacatccgcgccgaattcggcggccagtatcgtcgcggtatcggcgtctatctgctggttaatggtaaccatcatgccaagcttcattagcttttga

SEQ ID NO: 63704 - protein, 225 aa, Unknown
  Obtained from environmental sample
  SIGNAL (1)...(26)
  misc_feature (1)..(225): Xaa is any amino acid
MALRSRSSDSRSMASMSLSIPVFCRAESSTNIVWPPHSSGIRPSSESWLFTRSGFASGLSILFTATMIGTSASFAWLIASMVWGMTPSSAATTRITMSVTCAPRALMRVNASWPGVSRKVILPCGVSTMYAPMCWVIPPNSPDTTSAFRIASSSLVLPWSTCPITVTTGGRGSISAPSSVPVSIMVSSYRLIIFTSAPNSAASIVAVSASICWLMVTIMPSFISF

SEQ ID NO: 63705 - DNA, 1389 bp, Unknown
  Obtained from environmental sample
  misc_feature (1)..(1389): n is a, c, g, or t
ttgatggcaaacaagattggtgatgaaagtatttatctgcgtatcagtgaattaaagagggggaatatccagtttactgattccacaaacgcttcaaggctgttgcgtgaacatggccgggatattcgttatttcccttcatggaagaaatggctggtgtggaacggtacgcattgggaaactgacgagggcggctcattggtacacgaaaaggggcttgagagtgtgcggaacatatacgatgacttgttaaagacagacgactacagagaacgcaacgagattgagaattttgcaaaaataagcgaaagcatgaggcgcagggaagcaatgataaaaacagcgtcatatataaaagccttaaatatcagaagcgatgaccttgataaaaacccctggctgtttaatgtacggaacggaacgattgacgtattatcgggggaattcagggaacacaggcaagaggatttaataacgaaatgcgccaatgtggattatgaccctgccgccgactgtccgcaatggaagcaatttatccgtgaaataatgaactacaaaaccgacataatcacttttctacagactgctgccggctgggctatgacaggggataattctgagcaagtaatgtttattttgttcggaagcggagcaaacggaaaaaccacgttccttaatacgctaatgcatattttaggcgattatgcactggctacaccgactgaaacatttatgaaaaaatcgggagaccaaaacactaacgatatagcccgactgcgtggcacaaggtttgttaccactaccgaagcggagcaggggcggcggctttctgaaccgattataaaaaagataacaggaaatgaccaaatgaccgcaaggtttctgtacggagaatatttttgctttgcgccgacttttaaaatttggatggctacgaaccataagcctgtaatcaaggggactgactacggaatatggcggcggataaagctgatacctttcactgaaaagataccggaagaaaaacaggacaagcatttggaattgaaactgcgggaagaagcaagcggtatacttaactggctgttggaagggatggcgaactggaaacaggaacgcctaaaaacgccgaaggctgtattgttcgctactgacgaatacaggggagaaatggacgttatcggaaatttcataaaagaaaaatgcggtcagaaaaaggaaatgacgatagctattaaaaagctatacaaagcttattctgactggtgcgaagaaaacaacgaacacgctgtaagcgataggtttttcactctgcgccttaaagaaatgggctttgagcagggcaggacttcagcggaaaggttttgggtggggataggtcttggttaa

SEQ ID NO: 63706 - protein, 462 aa, Unknown
  Obtained from environmental sample
  DOMAIN (135)...(446): Poxvirus D5 protein-like
  misc_feature (1)..(462): Xaa is any amino acid
MMANKIGDESIYLRISELKRGNIQFTDSTNASRLLREHGRDIRYFPSWKKWLVWNGTHWETDEGGSLVHEKGLESVRNIYDDLLKTDDYRERNEIENFAKISESMRRREAMIKTASYIKALNIRSDDLDKNPWLFNVRNGTIDVLSGEFREHRQEDLITKCANVDYDPAADCPQWKQFIREIMNYKTDIITFLQTAAGWAMTGDNSEQVMFILFGSGANGKTTFLNTLMHILGDYALATPTETFMKKSGDQNTNDIARLRGTRFVTTTEAEQGRRLSEPIIKKITGNDQMTARFLYGEYFCFAPTFKIWMATNHKPVIKGTDYGIWRRIKLIPFTEKIPEEKQDKHLELKLREEASGILNWLLEGMANWKQERLKTPKAVLFATDEYRGEMDVIGNFIKEKCGQKKEMTIAIKKLYKAYSDWCEENNEHAVSDRFFTLRLKEMGFEQGRTSAERFWVGIGLG

SEQ ID NO: 63707 - DNA, 1230 bp, Unknown
  Obtained from environmental sample
  misc_feature (1)..(1230): n is a, c, g, or t
atgggtacgatagttctttttaagcctacatttattcaacgtaaagctcttgcccttctaaaaagcggggctaaacatattttgctgtttggcggttcccgttcaggtaaaacgacagtattggttatggcgattatttaccgcgctttgcggtttgccggttccaggcatttgatatgccgttatcgcgctaaagacgctcgttcatctgttttgagggaaacgctgttaccgtggctcgataatactgtcgggaaaagcggatatgtttatcttgcccatgaaagtatgataacacttttcaacggttctgaaatttggattggtgggcttggggatagagagcaagcggataaaattctaggacacgagtattgcacaatttattttaatgagattagccaattaagttatgccgccgttactaccgcctattcaagattggcaatgagagttaagggctgtaggaacttgttttattatgactgtaatccaggttctcccctacattgggcttataagatttttgttttgaagcggactttccttactggcgaactgttagagaaacctgaattgtatcaatcaatgttattaaatccagaggataaccgggaaaacttaccggaagattatatcaatgacattcttgacatattgccggaaaaacaaaaagcccgctttcgtgatggtctttgggtaaaagccgagggcgttatatacgacaagtttgacgaaagtatgattgttaaggcttctgaccttcctgaatattttgaccgatacgctgcgggacaggattttggtcttaacattactttcgtgaaaattgggtgggttggcgatgtggtttatgtcctgtgcgattatggggctttcaatatgactactcaaagttttaatgaggagttacaggcgcggggctggtttgattgtcctgacggaatgggcttgcctgtgtattgcgatccagcggggggagaaaggatacaggaaataacaggcggtactaaagcaaataattctgttgacagcggtatagattttatcaatgccaaaattgaacggcgtcaattttatgtttgtgaaacttgtacaggcgttctttctgaaatttgggattactgccgtgatgaggcagggcagattgtaaaagttaacgaccactatttagacgctttgcgttatgcgatatttacagacgttcagcagggggttgtattatcgtga

SEQ ID NO: 63708 - protein, 409 aa, Unknown
  Obtained from environmental sample
  DOMAIN (28)...(401): Terminase-like family
  misc_feature (1)..(409): Xaa is any amino acid
MGTIVLFKPTFIQRKALALLKSGAKHILLFGGSRSGKTTVLVMAIIYRALRFAGSRHLICRYRAKDARSSVLRETLLPWLDNTVGKSGYVYLAHESMITLFNGSEIWIGGLGDREQADKILGHEYCTIYFNEISQLSYAAVTTAYSRLAMRVKGCRNLFYYDCNPGSPLHWAYKIFVLKRTFLTGELLEKPELYQSMLLNPEDNRENLPEDYINDILDILPEKQKARFRDGLWVKAEGVIYDKFDESMIVKASDLPEYFDRYAAGQDFGLNITFVKIGWVGDVVYVLCDYGAFNMTTQSFNEELQARGWFDCPDGMGLPVYCDPAGGERIQEITGGTKANNSVDSGIDFINAKIERRQFYVCETCTGVLSEIWDYCRDEAGQIVKVNDHYLDALRYAIFTDVQQGVVLS

SEQ ID NO: 63709 - DNA, 1080 bp, Unknown
  Obtained from environmental sample
  misc_feature (1)..(1080): n is a, c, g, or t
ttgccttccaaaattttaagaggtcataaaacatataaaaagggaagtttcccgaattcatccgccgcggaaaataatttttcgccgcggaaattcataattgaacatgaggaagctggcggtatttattcaaaaatgatatttacaaatgttttgataaatcagttaaaaggagataaatcccgcaagttaagcgcaagggaagaactttggcaggcacaggactcaaaccttttttcccccggtaacggataccttaggaatgagcttcgcaaatcggcgtacagttctcttttacgcgctgaaatgctgacccgtgaaaccgggaaatttattccgtcgttaatacagtatgattttgattttgacggcgtaaaagaatttatttttcaggactcggtgattaactgttacattcagccgaagggagccggtatttttgagcttgattatctgcccaaggaatggaattaccttgactgcggttcaggcgatttcggcagacgagcggcattcgccgatattctggttcctttggatataaaaatagataaacatgaagacgctattacggaagattcaagactttgttttaatgaagtatatgaatctatagagcaggataaaaaagggaagatatgttttaaacttcccgcgtccggcgatacgccgtttggggagatagaaataaataaatgttttttattaaaaaaggacgttcttacagtttcatataatttaaaaaatacggggaaagagccgatatcgtttaaatttatccccataatttgcttttcattcgcaaatataacggacgagtacgttcgtttttataaaatcgacgctaacggaaaagatattcatttaggcagggaatttgacaccgataactttaaaatacttgatgtaaaaaacgaagtgcagatattaatttcgtccgcaaagacattttcgggaaaccttgcccctgtttacagcaatgactattaccaggcggcgagaataatgccgatattttcagcttctcttaaagaaggcggctcatggctgaacgagttcaccataaagttctcccattag

SEQ ID NO: 63710 - protein, 359 aa, Unknown
  Obtained from environmental sample
  misc_feature (1)..(359): Xaa is any amino acid
MPSKILRGHKTYKKGSFPNSSAAENNFSPRKFIIEHEEAGGIYSKMIFTNVLINQLKGDKSRKLSAREELWQAQDSNLFSPGNGYLRNELRKSAYSSLLRAEMLTRETGKFIPSLIQYDFDFDGVKEFIFQDSVINCYIQPKGAGIFELDYLPKEWNYLDCGSGDFGRRAAFADILVPLDIKIDKHEDAITEDSRLCFNEVYESIEQDKKGKICFKLPASGDTPFGEIEINKCFLLKKDVLTVSYNLKNTGKEPISFKFIPIICFSFANITDEYVRFYKIDANGKDIHLGREFDTDNFKILDVKNEVQILISSAKTFSGNLAPVYSNDYYQAARIMPIFSASLKEGGSWLNEFTIKFSH

SEQ ID NO: 63711 - DNA, 852 bp, Unknown
  Obtained from environmental sample
  misc_feature (1)..(852): n is a, c, g, or t
ttgcggtccacttcgactattctggtaaagaaacagccgtttacggagcgcgatcttaacgacctggataaatttaccaaaaaatgttcttttgagcttttttacgctcctgacgcggatctgcccttacgcgattttgacatacttatggcgagttaccgtcatcagtttgttgacaatgactccgaaaagtcagcaggaacggacagcgaggacaaggataaaacggaaagcattacaaacgctgatatgtacagaaccgtaatcccgtttttcctggcgggggaagcccaaaaaatagaagacgcctatatttttgacatccggcccattacggattcccgcccctattacacggggttcctaaaaatgaacgaactgtccatgtatctggaccaactgcgtgacatttcggaggaatgggggtatctgcttctctttgcaatgctgattcaggcctgcatattcggcgttattgtaatcctgatccccgttatcggcaaaagaaaaacccttttcaaaaaaagaaggggaaccatcggggtaattctgtattacgccgggctcgggcttgggtatatgctcatagagatctaccttatccagcgtctggcggtattcctttccaacccgacatattcgacgagcatggtaattaccgtaatgttaatttcatccgccctgggcaatattacaagcgggctcttaaaacgctacagggtctttgtcgttccggcggcctgcgtcctgattggcggtggatttttattttacattttcggcctggacgggttccttgcgattttccattcttcttccatggtgtcgcgctttctagtttcggcgttataa

SEQ ID NO: 63712 - protein, 283 aa, Unknown
  Obtained from environmental sample
  misc_feature (1)..(283): Xaa is any amino acid
MRSTSTILVKKQPFTERDLNDLDKFTKKCSFELFYAPDADLPLRDFDILMASYRHQFVDNDSEKSAGTDSEDKDKTESITNADMYRTVIPFFLAGEAQKIEDAYIFDIRPITDSRPYYTGFLKMNELSMYLDQLRDISEEWGYLLLFAMLIQACIFGVIVILIPVIGKRKTLFKKRRGTIGVILYYAGLGLGYMLIEIYLIQRLAVFLSNPTYSTSMVITVMLISSALGNITSGLLKRYRVFVVPAACVLIGGGFLFYIFGLDGFLAIFHSSSMVSRFLVSAL

SEQ ID NO: 63713 - DNA, 678 bp, Unknown
  Obtained from environmental sample
  misc_feature (1)..(678): n is a, c, g, or t
atgggggtatctgcttctctttgcaatgctgattcaggcctgcatattcggcgttattgtaatcctgatccccgttatcggcaaaagaaaaacccttttcaaaaaaagaaggggaaccatcggggtaattctgtattacgccgggctcgggcttgggtatatgctcatagagatctaccttatccagcgtctggcggtattcctttccaacccgacatattcgacgagcatggtaattaccgtaatgttaatttcatccgccctgggcaatattacaagcgggctcttaaaacgctacagggtctttgtcgttccggcggcctgcgtcctgattggcggtggatttttattttacattttcggcctggacgggttccttgcgattttccattcttcttccatggtgtcgcgctttctagtttcggcgttataatcgctcctccggctttctttatgggtattccgtatccaaacggcctggacagccttcaacaaacaaaacctcatctgctcccctgggcatggggaatgaacggcggcctttcccttgtcggaagcgcgatggcccggcttctttccgtggccaacgggttccccgtactcctaaaagtgggaataggaatatatttgatggtaggcgttcttttcccgatcaatcaaaaattgacccgggattaa

SEQ ID NO: 63714 - protein, 225 aa, Unknown
  Obtained from environmental sample
  misc_feature (1)..(225): Xaa is any amino acid
MGVSASLCNADSGLHIRRYCNPDPRYRQKKNPFQKKKGNHRGNSVLRRARAWVYAHRDLPYPASGGIPFQPDIFDEHGNYRNVNFIRPGQYYKRALKTLQGLCRSGGLRPDWRWIFILHFRPGRVPCDFPFFFHGVALSSFGVIIAPPAFFMGIPYPNGLDSLQQTKPHLLPWAWGMNGGLSLVGSAMARLLSVANGFPVLLKVGIGIYLMVGVLFPINQKLTRD

SEQ ID NO: 63715 - DNA, 552 bp, Unknown
  Obtained from environmental sample
  misc_feature (1)..(552): n is a, c, g, or t
atggaccgagacaggcggcgcgacgctcccggtagaaagcgcccgcttgaaggaagcggcgaagtgcttatgaccggcaacctcggagacgtgatgaaggaaagcgcccgcatcgccctttcctatctgcgcagcgttcagcatagctataaatatgttgtcaaaaatgttggcaagaccgattttcatatccatgtcccggaaggggcaatccccaaggacggcccctcggcaggcttagcaatcgccgtttccctgctttcaacactctgccaaaaaccgccgcgccccggtatagctatgaccggcgagcttaccctgaccgggcgggtgctgcccataggcggcctcaaggaaaagctgttagccgccatccgcaacggccttgaaaaagtgcttctgcccgctgacaaccgcggcgaatgggacgagcttgacaaggatataacaagcgcgattaacgttgaattcgtagagaatgccgcggacgcgttcgggattttgtttgataaaagcattaaaatggggtcaggagtgagggccagacactaa

SEQ ID NO: 63716 - protein, 183 aa, Unknown
  Obtained from environmental sample
  DOMAIN (2)...(171): Lon protease (S16) C-terminal proteolytic domain
  misc_feature (1)..(183): Xaa is any amino acid
MDRDRRRDAPGRKRPLEGSGEVLMTGNLGDVMKESARIALSYLRSVQHSYKYVVKNVGKTDFHIHVPEGAIPKDGPSAGLAIAVSLLSTLCQKPPRPGIAMTGELTLTGRVLPIGGLKEKLLAAIRNGLEKVLLPADNRGEWDELDKDITSAINVEFVENAADAFGILFDKSIKMGSGVRARH

SEQ ID NO: 63717 - DNA, 333 bp, Unknown
  Obtained from environmental sample
  misc_feature (1)..(333): n is a, c, g, or t
atgcttttatcaaacaaaatcccgaacgcgtccgcggcattctctacgaattcaacgttaatcgcgcttgttatatccttgtcaagctcgtcccattcgccgcggttgtcagcgggcagaagcactttttcaaggccgttgcggatggcggctaacagcttttccttgaggccgcctatgggcagcacccgcccggtcagggtaagctcgccggtcatagctataccggggcgcggcggtttttggcagagtgttgaaagcagggaaacggcgattgctaagcctgccgaggggccgtccttggggattgccccttccgggacatggatatga

SEQ ID NO: 63718 - protein, 110 aa, Unknown
  Obtained from environmental sample
  misc_feature (1)..(110): Xaa is any amino acid
MLLSNKIPNASAAFSTNSTLIALVISLSSSSHSPRLSAGRSTFSRPLRMAANSFSLRPPMGSTRPVRVSSPVIAIPGRGGFWQSVESRETAIAKPAEGPSLGIAPSGTWI

SEQ ID NO: 63719 - DNA, 2064 bp, Unknown
  Obtained from environmental sample
  misc_feature (1)..(2064): n is a, c, g, or t
ttgaagcgggacggttcaaaaaaaaacggttttccttcgttcctttcaggtcttatgaaggaggcagctttagatccctcgcgcagcgaaaaaataacagaagaatgtcttaccctgctcccccttcgcgacctggtgctgttccccaatacggttgtcccggtatttataaccggccagcccggcatgtccgcccttgctcagtccctccgccgcgacaaccgcctttttgccgtctgccagaagaagcaggatgtacctcaaccgagccccaagggcgtcgaaccgatggttcgcggttccgctcttgaagggaatgaccccggcgaatatatctggcccgtgggcacggcggtccgcataatccagcacttaaggcttcctgacagcacctttcgcgtggtgctgcagggcgagtaccggggcagaattaacgaatttgagccgcacggggattattcgctggtaaaagtctccccgcttgatacaggcaggtttaacgatacgccttctccccaggacatcgccctgctcagggccgtgcaaagggctttcaatcaatacgccgagctttcaaaaaaaatcgggacagacacgcttttggctgttgagcgatcggaaaacccggaacgcgcggcaaacctgatctgtaactcgtctaattttaagaccgaaaaaaaggtagagcttctcgcggttcctgacatcagggagcgtcttgaggcggttcttgaaactcttgaacgggagaacgaaatattcggcatacagaaaaatatttccggaaaggttaaaagccgcatagacaagcaccagcgtgaatactatcttcatgagcagcttaaggagatcaacaaggaacttggcaaggacaaggacagcaaggaagacgaattttcagagattgaaaaacagatcgaagcgaaggccccccccgcggaagttgtcgccaaagcggccaaagaactggcccggctccgcaaactccagcccctctcgccggaagccggcgtattgcgcggctaccttgagtggatttccgatcttccctggagtgagacaagcgtcgattcaggcgacctcgacacggcgcagactatacttgatgaagatcattttaatatgcggaaagccaaggaccgcatactggaatttatcgccgtacggcaattattggcttcgaccgatgaggctgataaaacggggataaaggggcctatcctctgtttcgtggggccgccgggtaccggcaagaccagtctgggaaagtccgtggcaagggctttgggccggcgttttgtccgtatctcgctcggcgggctaagggacgaagccgagatccgaggccacaggaaaacgtatgtaggtgcgcttcccggcaaaataatccagtccatgcgtaaagccggaacgatgaaccctgttatcctgttagacgaaattgacaagctgtcaagcgattttcggggcgaccctgccagcgcgcttttggaagtgcttgacccggagcagaacaacaccttcaccgatcattacatggaagtggcttatgatctttccaaagtattgttcataaccaccgccaactcgctgcacggtattccttacccgcttttggaccgcatggagataatcgaaatccccggctacggggagaacgaaaaactttctatcgcgaagcaattccttgtccccaaggaactaaaagaaaacggcctttcggacgcgaaaatacgttttactgacgacgctatcaagagcgttatacgctattggacaacggaatccggtgtgcgcggccttgagcgggaaatagcccgctgcataaggcgcgtagcccggcaggctgtcgccacagggtatggcgcgacgatcagcgatttcaggaaaatcatcaaaagcgacggtctggaaaaactgctgggcaggcggaaatacaagaacgacgttatgttccgcgaggcgagggtaggggtaagctgcgggcttgcatggaccgagacaggcggcgcgacgctcccggtagaaagcgcccgcttgaaggaagcggcgaagtgcttatga

SEQ ID NO: 63720 - protein, 687 aa, Unknown
  Obtained from environmental sample
  DOMAIN (408)...(544): ATPase family associated with various cellular activities (AAA)
  misc_feature (1)..(687): Xaa is any amino acid
MKRDGSKKNGFPSFLSGLMKEAALDPSRSEKITEECLTLLPLRDLVLFPNTVVPVFITGQPGMSALAQSLRRDNRLFAVCQKKQDVPQPSPKGVEPMVRGSALEGNDPGEYIWPVGTAVRIIQHLRLPDSTFRVVLQGEYRGRINEFEPHGDYSLVKVSPLDTGRFNDTPSPQDIALLRAVQRAFNQYAELSKKIGTDTLLAVERSENPERAANLICNSSNFKTEKKVELLAVPDIRERLEAVLETLERENEIFGIQKNISGKVKSRIDKHQREYYLHEQLKEINKELGKDKDSKEDEFSEIEKQIEAKAPPAEVVAKAAKELARLRKLQPLSPEAGVLRGYLEWISDLPWSETSVDSGDLDTAQTILDEDHFNMRKAKDRILEFIAVRQLLASTDEADKTGIKGPILCFVGPPGTGKTSLGKSVARALGRRFVRISLGGLRDEAEIRGHRKTYVGALPGKIIQSMRKAGTMNPVILLDEIDKLSSDFRGDPASALLEVLDPEQNNTFTDHYMEVAYDLSKVLFITTANSLHGIPYPLLDRMEIIEIPGYGENEKLSIAKQFLVPKELKENGLSDAKIRFTDDAIKSVIRYWTTESGVRGLEREIARCIRRVARQAVATGYGATISDFRKIIKSDGLEKLLGRRKYKNDVMFREARVGVSCGLAWTETGGATLPVESARLKEAAKCL

SEQ ID NO: 63721 - DNA, 441 bp, Unknown
  Obtained from environmental sample
  misc_feature (1)..(441): n is a, c, g, or t
atgatcgcgagaggaccactcggaaaaagcatgagggaactgtatgacgcccttcatcccgacgatcttatccattacggcatgatccccgaattcatcggcaggcttccgatcaccgtgagccttgatgaacttaaacgcgaggacctcaggcggatcatcaccgagccgaataacgccatagtaaaacagtaccaggcttcccttgcctatgacgatgtgaagctggaatttaccgaagaggccatagacgccatagccgataccgcaatcaagcagaagaccggcgcgcgcggcctgcgcgccatcgttgaaaaactgatgatcgatattatgtttgagttaccgtctatgaagggcagcaaacatgtgattatcaccgaggacgtagtcaaaaatttacagacgcccataattaaccagcttcaaaaaagcgcgtaa

SEQ ID NO: 63722 - protein, 146 aa, Unknown
  Obtained from environmental sample
  misc_feature (1)..(146): Xaa is any amino acid
MIARGPLGKSMRELYDALHPDDLIHYGMIPEFIGRLPITVSLDELKREDLRRIITEPNNAIVKQYQASLAYDDVKLEFTEEAIDAIADTAIKQKTGARGLRAIVEKLMIDIMFELPSMKGSKHVIITEDVVKNLQTPIINQLQKSA

SEQ ID NO: 63723 - DNA, 786 bp, Unknown
  Obtained from environmental sample
  misc_feature (1)..(786): n is a, c, g, or t
gtgactaaaagcggcgcgaaaaatgccgccgtcaaaatggaagggtttagccgtatccagtgtaccgtcgatcttcttcctcaggatattctcgggtttaaccgatttatcggtcattcgggagagatgatttttaacaagggtcctgtgttcgcgcattttgtgttatgcgatgagattaacttgcttacgccgaaaacgcagggaagcttttttcaggtaatggaagaacagagcgtgactatcgaggggaaattgtaccaattgacagaccctttctttataattgcaacaatgaatttaaagggcgttcatttattcccgctgccaacgcctcagcttgatcgttttatgattcgcctttctctcggctatccaagcgaggaagatgaaacggaaattataaacaggcacggaaaaattgacgcgtgggataaattcacaagcgtcatagacagcgcggatttaatccgctggaaaaaaatggtggacactgtgcagatgcaccccgatgttacttcctaccttgtaaattgcgtccgtcaaaccagagttcaccccgacattgagactccggcgagtccgcgcgcgggtgtgcgtatttcgcggctggcgcgttccctcgctctctgccgcggtatggactatgttccggtcgatattatcaaagaaatttttatacactcaatggctcacaggataattacccgtgatccttccataccgccggaagcgccgttggaaaatatcctgaacacagtccctgtcgaaccgaaacgggggtaa

SEQ ID NO: 63724 - protein, 261 aa, Unknown
  Obtained from environmental sample
  DOMAIN (2)...(119): ATPase family associated with various cellular activities (AAA)
  misc_feature (1)..(261): Xaa is any amino acid
MTKSGAKNAAVKMEGFSRIQCTVDLLPQDILGFNRFIGHSGEMIFNKGPVFAHFVLCDEINLLTPKTQGSFFQVMEEQSVTIEGKLYQLTDPFFIIATMNLKGVHLFPLPTPQLDRFMIRLSLGYPSEEDETEIINRHGKIDAWDKFTSVIDSADLIRWKKMVDTVQMHPDVTSYLVNCVRQTRVHPDIETPASPRAGVRISRLARSLALCRGMDYVPVDIIKEIFIHSMAHRIITRDPSIPPEAPLENILNTVPVEPKRG

SEQ ID NO: 63725 - DNA, 663 bp, Unknown
  Obtained from environmental sample
  misc_feature (1)..(663): n is a, c, g, or t
ttgatgttcaaaacaacgctttataaactcttgataaaaaatagacaaccacttcctccaagtaataaaatcaattatgaagtatgtttaagtgtgttaaattattttcatgaaatatatatttggaaaaatgcggaaagtcggcttcaaaataaaaacagtttaaaatattatgctgtccttatgaataaatggattattggtttgccgttaagccaaataattgttcagtcaattaattggtactccgagaataatagcgatatttggatagattatacaaaaaaagtaccttttgataaaaataataaacaacatatcaatattcgtatagaagaaattattgatgatatagaatatatacttagatttttgttagaaaaatattttaatcactattaccaggttcttgtaaaaatacttggagaagacaatgctggagaaaattgggctacactattagagtatggcactcaaaacagaatagtgatagctatgcaaaacattggattttcgagaaatactgcattaaaaattcatcaaaactataaaaacgcgttagtaatttcagaaggaaaattgcaagaaataaacaaatcaatgctgatgaattgttttaaaccaagctcattagaatatgaagaggttagaaatgttttataa

SEQ ID NO: 63726 - protein, 220 aa, Unknown
  Obtained from environmental sample
  misc_feature (1)..(220): Xaa is any amino acid
MMFKTTLYKLLIKNRQPLPPSNKINYEVCLSVLNYFHEIYIWKNAESRLQNKNSLKYYAVLMNKWIIGLPLSQIIVQSINWYSENNSDIWIDYTKKVPFDKNNKQHINIRIEEIIDDIEYILRFLLEKYFNHYYQVLVKILGEDNAGENWATLLEYGTQNRIVIAMQNIGFSRNTALKIHQNYKNALVISEGKLQEINKSMLMNCFKPSSLEYEEVRNVL

SEQ ID NO: 63727 - DNA, 333 bp, Unknown
  Obtained from environmental sample
  misc_feature (1)..(333): n is a, c, g, or t
ttggtgaaatgtaacgaaatcggcggaatcattgaaaaattctttgatgaaaaattccatgccgattttagagacagtttcaaaaaaagcggcctatacgctttgcaaaatctatacggtaaacggccctcccagctcgagaaaggcaacgctaacacatgggcttgcgggatagtctacgctatatgctcaaacaacttcgcctttgataaaacgcaaccatattctacaacggtaggcgagattgccgaacggttcggtttgtccaaaggttccgcgcaaaataaatcttatgaagttaatagcatcttaagatcacttcctctcatataa

SEQ ID NO: 63728 - protein, 110 aa, Unknown
  Obtained from environmental sample
  misc_feature (1)..(110): Xaa is any amino acid
MVKCNEIGGIIEKFFDEKFHADFRDSFKKSGLYALQNLYGKRPSQLEKGNANTWACGIVYAICSNNFAFDKTQPYSTTVGEIAERFGLSKGSAQNKSYEVNSILRSLPLI

SEQ ID NO: 63729 - DNA, 1140 bp, Unknown
  Obtained from environmental sample
  misc_feature (1)..(1140): n is a, c, g, or t
atggccgtcgtgattattgatgaatacgactgtccgctgaccgatacccttctcaaaccgaccatacacgtccaactgcgggatgtcctcaaagcgttctacggcgtcctcaaatcttgcgacgcccacctgcgcttcatattcctaactggtatcagtaagttctcccaagtaagcattttttcggccttgaatcaactatccgacctgactttcaacccgcgctacgccgacctctgcgggttgacccaagaggagttggaggcggtttttgggccggagatcaatggtgttttggaacgtaccaaatgtagccgcgaggagtacatggacaaactgcgccgtttctacaacggttaccgcttctccgaagatataattagagtttacaatccattcggcctactaaaccattttcaggaaggcggaaaattccggccgtactggtatcgaagcggtacacccactctcctaacagacctaattaatgaccggaatatcgacctcgcgaatttgaacaataagcaggtcgggtatgaggatttcgaacgatttcaggtagaaaacatggaaatggagccgctcttgtatcaaaccggctacctcactataaccgattacgatgaaaatcgaagacgttgtttcactctcgactacccgaatttagaggtgcgcagcgcctttgcggaatcgcttgcggcgcactgcctgaaaacctccatgaacgaatcgaccgcgttatgcgacaaactgacgatggcgctctgcggcggggacgtggacgccgcgatggtggctataaagctgtttatgacaaaaattccgtacgacctgttccaaaaacgggagaacttcttccaatcggtgatatacgtgatgttcgcaatgctcggcctcgactgccgaacagaggaaagaatcgccactgggcgtattgatatggtcgtcgagacgcggggttttgtttactgcttcgagttcaaattagacggcactgcggaggtagcgcttgctcagatcgacagcaaggagtacgccactccttggacaggtcacggaaagacggtttttaaggtcggggtgaactttgatttcgagaagaaaaacattggggagtgggtgtctgcggcaactgaataa

SEQ ID NO: 63730 - protein, 379 aa, Unknown
  Obtained from environmental sample
  DOMAIN (1)...(373): Protein of unknown function (DUF1703)
  misc_feature (1)..(379): Xaa is any amino acid
MAVVIIDEYDCPLTDTLLKPTIHVQLRDVLKAFYGVLKSCDAHLRFIFLTGISKFSQVSIFSALNQLSDLTFNPRYADLCGLTQEELEAVFGPEINGVLERTKCSREEYMDKLRRFYNGYRFSEDIIRVYNPFGLLNHFQEGGKFRPYWYRSGTPTLLTDLINDRNIDLANLNNKQVGYEDFERFQVENMEMEPLLYQTGYLTITDYDENRRRCFTLDYPNLEVRSAFAESLAAHCLKTSMNESTALCDKLTMALCGGDVDAAMVAIKLFMTKIPYDLFQKRENFFQSVIYVMFAMLGLDCRTEERIATGRIDMVVETRGFVYCFEFKLDGTAEVALAQIDSKEYATPWTGHGKTVFKVGVNFDFEKKNIGEWVSAATE

SEQ ID NO: 63731 - DNA, 456 bp, Unknown
  Obtained from environmental sample
  misc_feature (1)..(456): n is a, c, g, or t
atggccacgaccaaaagaatcctgcccgtaggcatccaagactttgccgacattcggacgcggggttttgtctatgtggacaagaccgcccgcgtttacgatcttattaccggttcggggaaggccttcttcctctcacgtccgaggcgcttcgggaagtctttgctctgttcgacgcttggggcgatctttgagggtcggcgggagcttttcggggagatcgcggggagaccggcgctggccataaacggcctcgactgggagtggaagaagcatccggtgatacacatcgacctgaacgccgagaactacaatgattacggggtcgaggctctccgctccattctatacgcagaaatgcgtagggaggctaaaaagtatggggttaaacttgaacgaacggctagtccggtaagtcaattaaggtacctaatagaggaagcctgtgaaaagtag

SEQ ID NO: 63732 - protein, 151 aa, Unknown
  Obtained from environmental sample
  misc_feature (1)..(151): Xaa is any amino acid
MATTKRILPVGIQDFADIRTRGFVYVDKTARVYDLITGSGKAFFLSRPRRFGKSLLCSTLGAIFEGRRELFGEIAGRPALAINGLDWEWKKHPVIHIDLNAENYNDYGVEALRSILYAEMRREAKKYGVKLERTASPVSQLRYLIEEACEK

SEQ ID NO: 63733 - DNA, 1437 bp, Unknown
  Obtained from environmental sample
  misc_feature (1)..(1437): n is a, c, g, or t
gtgcgagaaaagcagaaaacggggagagccggctggcctgcggaggatagggaggaacccaaagagccgcagggagtgcagagcgccgaagaacgcaaagccgcaaacggagacagtgcaaacgggggaaaccccgaacggggcctgcttgatgcgatactggacgtggataacatgttcaaggcgcaggagcgggtaatagcgaacagggggtcagcgggaatagacgggatgacggttgaggagttgaacgagtacctcatcaaacactatcgggagttatgcgaaagcatacgtggcggatggtacaaaccgaaaccggtgaaacgggtagagataccgaaaccggacggggggaaacggctgttaggagtgccgacggtaatagaccggatggtgcaacaagcgatggtacaagtcttgcaaccggtatttgagcggacgttttcggattcaagtttcggctttaggccgggacgaagcgcgcatcaggccatagggcgtgcgaagaaatactatgaggaagggcataaatatgttgtagacctggacttagaaaaattttttgacacggtgaaccatgacattctgatgcagatggtgggggaaacggtgaaggaaaagccggtcacaacattgatacgcaagttcctgaagagtgggattatggtcgatgggctggcaagccaacgggaacaggggacgccgcaagggggcaacctgtcgccgttattaagcaacatatacctgacgaagtttgaccggatgctcgaagagcgcgggcataagttcgtaaggtatgccgacgattgtaacatctatgtcaaaagcgccagagccgccgagcgggtaatggaagggtgcgtaaaatttcttgaagggaaactgaaactgaaagtgaaccggaagaaaagcgcaaccggaagcccgacggaattgaagtttcttgggtttaggttggaacaatggaaaggggaaattgtaatacgagtgcatgagaagccgcttcaacggctgaaagaccggctgaaagccctgacgggacggatgcgcggcgggacaatagaacagataatggcagaaataaccagactgatgaatggatggcttgggtactatcgtttggcggatatgaagaaatatttgcaaaggataagtgaatggatgagaagacggatacggcaactctattggaaacgctggaaacggatacggacgcggtacgaaaacctgattaaattgggcgcaacccgagaaaaggcatggcaatgggcgaacacccggaagggccactggtgtatagccagaagtgggatactgaccaccacactgacgaaccgttattttgaaacgcttggatttcccaatatcgttaagcgatatgaagaactgcgagagcgagccaagcggttaggaatgttgcatggaacctgttga

SEQ ID NO: 63734 - protein, 478 aa, Unknown
  Obtained from environmental sample
  DOMAIN (336)...(422): Group II intron, maturase-specific domain
  misc_feature (1)..(478): Xaa is any amino acid
MREKQKTGRAGWPAEDREEPKEPQGVQSAEERKAANGDSANGGNPERGLLDAILDVDNMFKAQERVIANRGSAGIDGMTVEELNEYLIKHYRELCESIRGGWYKPKPVKRVEIPKPDGGKRLLGVPTVIDRMVQQAMVQVLQPVFERTFSDSSFGFRPGRSAHQAIGRAKKYYEEGHKYVVDLDLEKFFDTVNHDILMQMVGETVKEKPVTTLIRKFLKSGIMVDGLASQREQGTPQGGNLSPLLSNIYLTKFDRMLEERGHKFVRYADDCNIYVKSARAAERVMEGCVKFLEGKLKLKVNRKKSATGSPTELKFLGFRLEQWKGEIVIRVHEKPLQRLKDRLKALTGRMRGGTIEQIMAEITRLMNGWLGYYRLADMKKYLQRISEWMRRRIRQLYWKRWKRIRTRYENLIKLGATREKAWQWANTRKGHWCIARSGILTTTLTNRYFETLGFPNIVKRYEELRERAKRLGMLHGTC

SEQ ID NO: 63735 - DNA, 714 bp, Unknown
  Obtained from environmental sample
  misc_feature (1)..(714): n is a, c, g, or t
ttgcacgcggcttttgaatacctgtcccttgagcctaaagagtatgaatttaccgtgaccttcggcgccgccacggacacgtttgacgcggagggcgaagttactgcgcgtagcggcgttatcccgacgcgagagcggttggtcaatgcgatgaaaggtttcgccggagagatagagcagacgccgccgcagtattcggcggtgaagatcggcggggtaccggcctacaagagggcgcgtagcggggtatccgtggacataaagccgcgaaccgtcagcatatactccttggagatgcgcggttacgacgccgatggaaaacgggcggatttcgccgtcagctgttcgggcggcacatacgtcaggtcgctggctgtggacatcgtcaaagcggcggacgcggaggcggagggccatataagcaggctgaggcggacgagggcggggcgtttcgatctgtcgaacgcggtaaaatttgaggaacttgccaacgccggaaattattttattaacgtgtcagtcgcctttgatcaggatataaatatcactattgacgatgagcaaaaaaccaatatatcaaagggcagagaaatagtaattaataaggatggattaaatgatatattgatagcctttgatgaacaaggaatgttagcggcggtattgaaaaggatagacggggatcgttatcatccaaataaagtatttgtgtaa

SEQ ID NO: 63736 - protein, 237 aa, Unknown
  Obtained from environmental sample
  DOMAIN (6)...(121): TruB family pseudouridylate synthase (N terminal domain)
  misc_feature (1)..(237): Xaa is any amino acid
MHAAFEYLSLEPKEYEFTVTFGAATDTFDAEGEVTARSGVIPTRERLVNAMKGFAGEIEQTPPQYSAVKIGGVPAYKRARSGVSVDIKPRTVSIYSLEMRGYDADGKRADFAVSCSGGTYVRSLAVDIVKAADAEAEGHISRLRRTRAGRFDLSNAVKFEELANAGNYFINVSVAFDQDINITIDDEQKTNISKGREIVINKDGLNDILIAFDEQGMLAAVLKRIDGDRYHPNKVFV

SEQ ID NO: 63737 - DNA, 951 bp, Unknown
  Obtained from environmental sample
  misc_feature (1)..(951): n is a, c, g, or t
atggactggactccgctttcggacgcgatagccaaaaacaacacatttttagtctccagccacttaagtcccgacggcgacaacgtggggtctcaactcgcgtttatatggtatctcaaaagtctcgggaaacaagtcgactgttactgcgccgacccgctcccgcagaagctctctttcttgcaagattccgcccttatcacccagaacaaacccagcggcggtttcgacgtattggttatattggactgttcgaacataacgcgggtgggttgggattgcggcgaggtgtccgtcggtatgatagtgaatatcgaccatcaccgcgacaacgcgaatttcggcgcgttgaactttgtcgacgcgtcggcggcggcgacgggagaggttatcttctcgttcttcaagcactgcggtgtcgccgtgccggcgcacgtggccgtcgatctctataccgcggtgatgaccgatacgggcggctttcgcttttccaacacttgcgggcgggtgctgcgcgtctgcgccgagttggcggagcttggggtgaattgctcggatgtatacgagcgggtattttcgtgccacactccgcaagcgttggcgcttcaagcaaggatatggtcaactttggaatttcacttaggcgggcgggtatgcagtttggacatgccgctttcgattttggacgaggtcggggcaatgtacagcgattcggagggaatggccgacaacacggtgacggcgctaggggtggaggtcggcgttatgacgaagcactcgccgcaggagacgcacttcagcctgcggtccaagggttcggtggacgtcggcaagctggccaaagggatatccggaggaggcggtcacagttgcgccgcggggtgcactataaagaagccttacgcggaggccatggcggagatgctcgaaatattggaaaaggtgctgtag

SEQ ID NO: 63738 - protein, 316 aa, Unknown
  Obtained from environmental sample
  DOMAIN (244)...(311): DHHA1 domain
  misc_feature (1)..(316): Xaa is any amino acid
MDWTPLSDAIAKNNTFLVSSHLSPDGDNVGSQLAFIWYLKSLGKQVDCYCADPLPQKLSFLQDSALITQNKPSGGFDVLVILDCSNITRVGWDCGEVSVGMIVNIDHHRDNANFGALNFVDASAAATGEVIFSFFKHCGVAVPAHVAVDLYTAVMTDTGGFRFSNTCGRVLRVCAELAELGVNCSDVYERVFSCHTPQALALQARIWSTLEFHLGGRVCSLDMPLSILDEVGAMYSDSEGMADNTVTALGVEVGVMTKHSPQETHFSLRSKGSVDVGKLAKGISGGGGHSCAAGCTIKKPYAEAMAEMLEILEKVL

SEQ ID NO: 63739 - DNA, 921 bp, Unknown
  Obtained from environmental sample
  misc_feature (1)..(921): n is a, c, g, or t
atgatattatactatatatttcgatggaggataattatggcggacgtagaaggaaccaaagtagagaaaaactaccatactgacgtaccctttaaaacaaacgggaattttcatgtaaaaggcgcggcgaatcttgactggggtatgaaaaaacatttaaccaatattttcaatcccaaaagcggcaatacagtgatgtttgcttttgatcacggttatttcatgggctccgtatccggtcttgaacggttggacatacttatcccgcaattaatcgatcatatcgacgtgctgatggcgacccgcggggctctgcgaacctgcgttaagccgaatttcagaaaaggaatcgccctgcgcgtgtccgcaggttcgtcaatgatcaacgacgaccttagccatgagcttgtctcggtggatattgaagacgctatccgcatgaacgcggattgtctggctgttcagacttttatcggcgcggacggtcagcttgaaagtattgataatctttccaatgtgataaacgcgggcgcgcgttacagcatacccactttgggcgttatcgctgtgggaaaaaacatggaacggacagaccagtactttaaactggcgacccgtattgtggcggagcttggcgcgaacatcgttaaaacttactattgcgacaagttcgaggaaattgtcgccgcgtgccctgttcccattgtggtagcgggcggtaaaaagctgcctgagaaggaagcgcttacaatggcatatcattcaatgcagggcggcgcgcgcggacttgatatgggcagaaatattttccaaagttaccaccccgcggaaatggctgacgctatcggaaaaattgtgcataacaaatataccgacaaagaagcgtgggagtattactgcgagaagactaagactaaataa

SEQ ID NO: 63740 - protein, 306 aa, Unknown
  Obtained from environmental sample
  DOMAIN (64)...(272): DeoC/LacD family aldolase
  misc_feature (1)..(306): Xaa is any amino acid
MILYYIFRWRIIMADVEGTKVEKNYHTDVPFKTNGNFHVKGAANLDWGMKKHLTNIFNPKSGNTVMFAFDHGYFMGSVSGLERLDILIPQLIDHIDVLMATRGALRTCVKPNFRKGIALRVSAGSSMINDDLSHELVSVDIEDAIRMNADCLAVQTFIGADGQLESIDNLSNVINAGARYSIPTLGVIAVGKNMERTDQYFKLATRIVAELGANIVKTYYCDKFEEIVAACPVPIVVAGGKKLPEKEALTMAYHSMQGGARGLDMGRNIFQSYHPAEMADAIGKIVHNKYTDKEAWEYYCEKTKTK

SEQ ID NO: 63741 - DNA, 444 bp, Unknown
  Obtained from environmental sample
  misc_feature (1)..(444): n is a, c, g, or t
atggaaaatatagaattggcgacaatattaagaacaggtagaaagaaattgttaaacgaaaccaatgagttaatacgctattttgaaatagataaatatctgcataaaaaattcagggactgttctaccggaatgaaaaagaaggttcaaattgtcgtaagcctgattggagaaattgataccattatttgggacgagccgaatgacgggcttgacataatttcaaatataaaaataaagaaccttcttaaacattacaaaagtaaaaataccacgatacttttttccagccatgtcatcgaatttttgaatgattttgtagacacttgcgttttattgcacgaaggaaatattattgaaaataaaaatatacaggatattaattcactggaaacattgtttcttaacaatttgcctcaaaatattttagagataaatttgtaa

SEQ ID NO: 63742 - protein, 147 aa, Unknown
  Obtained from environmental sample
  DOMAIN (6)...(116): ABC transporter
  misc_feature (1)..(147): Xaa is any amino acid
MENIELATILRTGRKKLLNETNELIRYFEIDKYLHKKFRDCSTGMKKKVQIVVSLIGEIDTIIWDEPNDGLDIISNIKIKNLLKHYKSKNTTILFSSHVIEFLNDFVDTCVLLHEGNIIENKNIQDINSLETLFLNNLPQNILEINL

SEQ ID NO: 63743 - DNA, 1368 bp, Unknown
  Obtained from environmental sample
  misc_feature (1)..(1368): n is a, c, g, or t
atgaatggcataaacagcaataaaacgatgatcgccatcttcaaaccgatcgacaacaacaccgccgccaagcgcacactcacggcggccgcatctccggacaacggaggcgccgtcactcgcaaaccaaacgcttcgacctacaacaacggagatacggtgactttaatcgcaacggcgaaatccggttacaagtttagcgggtgggcgggggcggatacgtccaaaaaagatacggtaaaactcataatgagcgaaagcaaatcactcgtcgccatgttcaccgccgtccacaagctaacggtcaacgcaaccccgccgggaagcggcaaggtactcgtcaacgacaccgcgctgggaattatgtcggtagaatccgggatggaaatcaaattgagggcggtggcggagaatgggtacgcttttacgaattggtcggagcgggcaggggcgacgatatctaagaattctatattgacgatattcgtgaataaggatacggtactgacggcgaactttaaacaagaaagcagcggggggacagcaccgtccgacactaccaaaaaacagtttaaggtgacagtttcaagcgccggtacgggcgcgacaaaggacagcatttacaaaacgggagataccgtcaaaataacggcggggaaagctccggacggtcagaaattcaagaattggacgtctacggacggcgtgacttttaaaaacgcggacagcgcgacgactacgtttataatgcccgcaaaggatgtgacggcgaaagcgaactttgaaccgcatagcataatgccgccggaagattccgatatgtttgtcgacagcagagacggtaagaaatacaagatagtggaaataggggggaaggtgtggatgggtgaaaatctgaattatgatacattgaacggatccggttcttggtgttatgaaaatagcgccggtaattgtgaaaaatatggcagactgtacaactgggcaacggcgaaatttgtttgcccgaccggttggcaccttcctaccggtgaggaatgggaaaatttggttaaatttgccggcggcagcaccgccgattccagtacggcatgcaggacgctaaaatcgacatccggttggaataataacggcgacggaacggacgaatacggattttcggctctgcccggcggtttacgcggataccctgatgtcgaattcgattttgtcggtagacgcggtatatggtggacggtcacggagtacgacagcgataacgacaaagcctactaccggtccatgtacccgcaaaactccaacggcgtatacaagtcccccgaccacaagggttacggatattcggtgcgttgcgttgaagacgactga

SEQ ID NO: 63744 - protein, 455 aa, Unknown
  Obtained from environmental sample
  misc_feature (1)..(455): Xaa is any amino acid
MNGINSNKTMIAIFKPIDNNTAAKRTLTAAASPDNGGAVTRKPNASTYNNGDTVTLIATAKSGYKFSGWAGADTSKKDTVKLIMSESKSLVAMFTAVHKLTVNATPPGSGKVLVNDTALGIMSVESGMEIKLRAVAENGYAFTNWSERAGATISKNSILTIFVNKDTVLTANFKQESSGGTAPSDTTKKQFKVTVSSAGTGATKDSIYKTGDTVKITAGKAPDGQKFKNWTSTDGVTFKNADSATTTFIMPAKDVTAKANFEPHSIMPPEDSDMFVDSRDGKKYKIVEIGGKVWMGENLNYDTLNGSGSWCYENSAGNCEKYGRLYNWATAKFVCPTGWHLPTGEEWENLVKFAGGSTADSSTACRTLKSTSGWNNNGDGTDEYGFSALPGGLRGYPDVEFDFVGRRGIWWTVTEYDSDNDKAYYRSMYPQNSNGVYKSPDHKGYGYSVRCVEDD

SEQ ID NO: 63745 - DNA, 591 bp, Unknown
  Obtained from environmental sample
  misc_feature (1)..(591): n is a, c, g, or t
ttggattacccccggtctcgactggtcgcccattgtccaatactcaaacgaccgctccgggaacaacgcgctcacgacggtcgacctcgggccgaccgccgcgttcaaaccttacggcgtgggcgccctcctgcgggccggcatatccggacgccgcgtagactcgctcgccggagcgttaagggtcggcgaacagcgaagcagcataggggcgtacggcgcgttcagcatagggtcggaggaggagcttctgcccttcgcgcccgtttatttttacgccgacggcatcggcagacagatcgaaaattcaagtatgacctccatctcaagcaacgcgctcggcgccgtgccggtcggagagcgcgacagcatgttcgtctacggcgcggtcaccttcttcaacggcagggagggatatctggtgggcagcgccgacagccgtgcggcgcagttcgccgaaacgccttggcgcgtggagcgcaacctgaccgccgccgccggctacaaagcggcgcagaggtatatgttcttcccctccctttactacagcgtttcggaaaacacgctcgaatttctgaacgacacccgtaa

SEQ ID NO: 63746 - protein, 196 aa, Unknown
  Obtained from environmental sample
  misc_feature (1)..(196): Xaa is any amino acid
MDYPRSRLVAHCPILKRPLREQRAHDGRPRADRRVQTLRRGRPPAGRHIRTPRRLARRSVKGRRTAKQHRGVRRVQHRVGGGASALRARLFLRRRHRQTDRKFKYDLHLKQRARRRAGRRARQHVRLRRGHLLQRQGGISGGQRRQPCGAVRRNALARGAQPDRRRRLQSGAEVYVLPLPLLQRFGKHARISERHP

SEQ ID NO: 63747 - DNA, 387 bp, Unknown
  Obtained from environmental sample
  misc_feature (1)..(387): n is a, c, g, or t
gtggaaagcaccgctggtgtcgccgctgggggcaggacaggtctcaccgccctgtctacgggggtactcttcctcctggcgctgttgttatcacccatattcctccttattcctggcgcagctaccgcccctgccctgatcttcgtaggtttcctcatgatggcgccggtagtggatataaatttcaaagatcccaccgaagggattcccgctttcatggctatcgtaatgatgccctttgcctacagcatcgccgatggtattgtatacggaatgctttcctacgtgatactcaaggttgcgacacgtaaattcagggatattaacattatgacctgggttttgtttgtagtatttgttctgaaggtcgtgctggaggggaagtaa

SEQ ID NO: 63748 - protein, 128 aa, Unknown
  Obtained from environmental sample
  misc_feature (1)..(128): Xaa is any amino acid
MESTAGVAAGGRTGLTALSTGVLFLLALLLSPIFLLIPGAATAPALIFVGFLMMAPVVDINFKDPTEGIPAFMAIVMMPFAYSIADGIVYGMLSYVILKVATRKFRDINIMTWVLFVVFVLKVVLEGK

SEQ ID NO: 63749 - DNA, 564 bp, Unknown
  Obtained from environmental sample
  misc_feature (1)..(564): n is a, c, g, or t
gtggacgaatttgaaaatcatcccatttttcaaatcccttggggacatcacagagaaatcatttctaaatgtaaatccgtaaaagaggcactattttacgttcaaaaaaccattgaaaatgggtggagtcgcgcggttttgatgaattttctggaagccgacttgttttccgctcagggaaaggcgctcactaatttttcccgccttttacgcctgttccgcgactttaagcctgcattcggcgtggcgcaggttttttttcgctttatcaatctcaaatcttatttgcgtatttttcagcgtttcttcggcttgctttttggtttcaagaacatgctcaacgttaatttcttccggccagtcagcgctttcaaccataagcacgttcttgtgctctttcacttccagaatgccgccgcagacaaacgcggagcgccaactgcccttgtcgtctttaatgcggagcgtgcctgtaacagtgtgcgcggtaaatggggaatggttggggtatatgccgatttcgccgtcctcaaggcttacgatgatcgcctgcaccctgcctga

SEQ ID NO: 63750 - protein, 187 aa, Unknown
  Obtained from environmental sample
  misc_feature (1)..(187): Xaa is any amino acid
MDEFENHPIFQIPWGHHREIISKCKSVKEALFYVQKTIENGWSRAVLMNFLEADLFSAQGKALTNFSRLLRLFRDFKPAFGVAQVFFRFINLKSYLRIFQRFFGLLFGFKNMLNVNFFRPVSAFNHKHVLVLFHFQNAAADKRGAPTALVVFNAERACNSVRGKWGMVGVYADFAVLKAYDDRLHPA

SEQ ID NO: 63751 - DNA, 408 bp, Unknown
  Obtained from environmental sample
  misc_feature (1)..(408): n is a, c, g, or t
atgtccgctttatttacctttgaggttcatacgcccaaacggcttttttattcaggcagggtgcaggcgatcatcgtaagccttgaggacggcgaaatcggcatataccccaaccattccccatttaccgcgcacactgttacaggcacgctccgcattaaagacgacaagggcagttggcgctccgcgtttgtctgcggcggcattctggaagtgaaagagcacaagaacgtgcttatggttgaaagcgctgactggccggaagaaattaacgttgagcatgttcttgaaaccaaaaagcaagccgaagaaacgctgaaaaatacgcaaataagatttgagattgataaagcgaaaaaaaacctgcgccacgccgaatgcaggcttaaagtcgcggaacaggcgtaa

SEQ ID NO: 63752 - protein, 135 aa, Unknown
  Obtained from environmental sample
  DOMAIN (4)...(89): ATP synthase, Delta/Epsilon chain, beta-sandwich domain
  misc_feature (1)..(135): Xaa is any amino acid
MSALFTFEVHTPKRLFYSGRVQAIIVSLEDGEIGIYPNHSPFTAHTVTGTLRIKDDKGSWRSAFVCGGILEVKEHKNVLMVESADWPEEINVEHVLETKKQAEETLKNTQIRFEIDKAKKNLRHAECRLKVAEQA

SEQ ID NO: 63753 - DNA, 1380 bp, Unknown
  Obtained from environmental sample
  misc_feature (1)..(1380): n is a, c, g, or t
atggcaaacaagggatatatcatccaagtaatcggtcccgttgtagatgttcgttttgaagcgggacaggttcctctgattttaaatgcgttgaaagtgaaagccgaccgcgtcgttactcttgaagtcttgcagcatatcggtgacaaccgtgtgcgctgtgtcgcgatgtccgccgccgagggattgtcccgcgggcttgaggttgaggacacaggcaagccgatcagcgtgccggtcggcaaggaagttctgggacgaatgttcagcgtaacaggagaacccattgacgacaagggaacattcagcgcgtcgcagtatgagtcgatacaccgtaatgcgcccgactttaacgaactgcgtccggcgaccgcgctgcttgaaacgggaataaaagtaatagatttaattgcgccctacgcgaagggcggaaagattggactgttcggcggcgcgggagtagggaagacagtcgttatcatggaacttatccgcaacatagcgacggaacattcaggctactcggtgttcgccggcgtcggcgagcgttcgcgcgaaggagccgacctttggaaagaaatgaccgagagcggcgttatcgaaaagacagcgcttgtttttggtcagatgaacgagccgcccggagcgagaatgagagttgcgcttgccggtcttaccatggcggaacattttcgcgatcaggacaggcaggacgttcttttgtttgtcgataatattttccgcttcatacaagcgggcgcggaagtttccgctcttcttgggcgcataccaagcgcggttggttatcagccgacgcttgctaacgagatgggcagtcttcaggagaggattgcaagcacatcaaaaggatcgattaccagtattcaggcggtttatgttcccgccgacgaccttaccgatcccgcgcccgcgacaaccttcgcccacctcgacgcgacaaccacactgtcgcgcaaaattgtagagttgggaatttacccctctgtcgatcctcttgcttcaagctcccgtattcttgatgcggcgatagtaggcgaggagcattacaacaccgcccgcagagctcagcagattttacagaggtacaaagagttacaggatataatcgccattttgggaatggacgagctttccgaggaagacaagctcacagtcgccagggcaagaaagatacagcgttttttcagccagccgtttttcgtcggggaaaaatttacaggtattcccggacgctatgtgcctgtcaaggaaacagtccgcggcttcaaaatgatactggacggcgaatgcgacacaatcccggagcagtctttttacatggcgggcagtattgatgacgttttggaaaaggcaaaataa

SEQ ID NO: 63754 - protein, 459 aa, Unknown
  Obtained from environmental sample
  DOMAIN (7)...(73): ATP synthase alpha/beta family, beta-barrel domain
  misc_feature (1)..(459): Xaa is any amino acid
MANKGYIIQVIGPVVDVRFEAGQVPLILNALKVKADRVVTLEVLQHIGDNRVRCVAMSAAEGLSRGLEVEDTGKPISVPVGKEVLGRMFSVTGEPIDDKGTFSASQYESIHRNAPDFNELRPATALLETGIKVIDLIAPYAKGGKIGLFGGAGVGKTVVIMELIRNIATEHSGYSVFAGVGERSREGADLWKEMTESGVIEKTALVFGQMNEPPGARMRVALAGLTMAEHFRDQDRQDVLLFVDNIFRFIQAGAEVSALLGRIPSAVGYQPTLANEMGSLQERIASTSKGSITSIQAVYVPADDLTDPAPATTFAHLDATTTLSRKIVELGIYPSVDPLASSSRILDAAIVGEEHYNTARRAQQILQRYKELQDIIAILGMDELSEEDKLTVARARKIQRFFSQPFFVGEKFTGIPGRYVPVKETVRGFKMILDGECDTIPEQSFYMAGSIDDVLEKAK

SEQ ID NO: 63755 - DNA, 897 bp, Unknown
  Obtained from environmental sample
  misc_feature (1)..(897): n is a, c, g, or t
atgtcaaacttacgcgatgtgcgcttgcgaatgcgggctattgaacagacattacaggtaaccaaggcgatgaaccttatctccaccgcaaaactgcgcaaagggcggaaaatgcttgcggataccgtaccgtatttcagcaggattcaaaaagcaatgtttgatattctttccagtgaaggaaatattgacagcaaattttttaaaaaaagagatccgtcaaaaaccaataaccgtactgcgataattgtcataaccagcgacaagggacttgccggcggctataacgctaatatttaccgccatgtaaatgaactttgcgcaaaggtgcagaatccggtgctgatactaatcggcggcgctgtcggctatcgctattttggtcattctcctcatgtaattttggaaaacttttcttttcacccgcagataccaacagtagaacacgccggagaagtttccgagtatgtggtttcgcagtttctttgggaagtttttgattcgatacatatcgtgtacaccaatatgttcagcatggtaaaacttttgccgactgaacatcagataattccgcttgtaaaagaaaaaattcaaaatgatatttttgaaatcggcggcgaaaaaagagtggatttaaaatttgaatttctgccgtccacgggggcggtttttgatatgctggttcctcagtatataaagggtgtaatttacggggcgatggtggaatcgtatgcaagcgaacaaagcgcccgcatgaaggcgatggacgaggcttccaagagcgccgaagatatgctcgcctctttgcggataagttacaaccgcgcgcgtcaggcgggcattacgcaggaaatggcggaaataacaggcggttcttcagcgctggctgataggtag

SEQ ID NO: 63756 - protein, 298 aa, Unknown
  Obtained from environmental sample
  DOMAIN (2)...(295): ATP synthase
  misc_feature (1)..(298): Xaa is any amino acid
MSNLRDVRLRMRAIEQTLQVTKAMNLISTAKLRKGRKMLADTVPYFSRIQKAMFDILSSEGNIDSKFFKKRDPSKTNNRTAIIVITSDKGLAGGYNANIYRHVNELCAKVQNPVLILIGGAVGYRYFGHSPHVILENFSFHPQIPTVEHAGEVSEYVVSQFLWEVFDSIHIVYTNMFSMVKLLPTEHQIIPLVKEKIQNDIFEIGGEKRVDLKFEFLPSTGAVFDMLVPQYIKGVIYGAMVESYASEQSARMKAMDEASKSAEDMLASLRISYNRARQAGITQEMAEITGGSSALADR

SEQ ID NO: 63757 - DNA, 1176 bp, Unknown
  Obtained from environmental sample
  misc_feature (1)..(1176): n is a, c, g, or t
ttggtaattttgcaattttccggcaagggaacctttaacataaccgcaaacacaatgataataaaaggccgctatcttcaaccgtttgaaaatgaaaatttctatattgaaaacgacgaacaagccgtacagcttctgacaggcggggtaaggatttttttcggcggtcttgaattcatcctgaaagaagaacgcggcggcggtttagttataaccaacgacggcggcgccttttttcccgttaatccggaatctttttcgataacggataataccgcgcgccttggactgcccggaggcagtacgcttattttcagttcattaggcccagaaaaggaaccggagcttcaaattaacgcgcagttcgcggcggatgtttccgaagtaagcataccaataataccgcaccgatcccttgtgcgtaataacgggcaaatcggaattatgtacaacggcaaccgttatatgtttacaggtaccgggcaggaatttgaaaacaacaggatagttctttcaaaggggaattcatctgtctcgtaccgctcaaaaggcaagcagagggcatttgatcctactaatttcacaatccctcaggcgcagaattactattttgccctgtcaaactggcaggatttaagttatacgcgctggtatcaaagcgcatcaacattgagaaacgaggatgatataacaggttatttgagcgaagcgttacgtcaaaacaattataacgcggcgttatcttccattccccgcgattttaccggcagcacgcagcacacctacagatcggcagcatatctgggcggaatgacaagcgcttaccgtacgtttgtatcggaagaaaacaaaaggttaaacgccattaatgcgttaatgaaggaaaattcgcttgatgttcttaaagaagaacatattattgattatcttcttacccgcggcgatacggttcttgcctatgatattatccgtttaattcaggatacaagttcagataaactgacatctgattactgcccaggccttttggaagcttactccgacatcaagcgctggaacacttcaatagacaatcccgttgagcatctgatagaacaaatacttttacttgtttcggaaaatctcagtaaggatacggtttcaatttggtgtacgcttccggttccaagaacgtga

SEQ ID NO: 63758 - protein, 391 aa, Unknown
  Obtained from environmental sample
  misc_feature (1)..(391): Xaa is any amino acid
MVILQFSGKGTFNITANTMIIKGRYLQPFENENFYIENDEQAVQLLTGGVRIFFGGLEFILKEERGGGLVITNDGGAFFPVNPESFSITDNTARLGLPGGSTLIFSSLGPEKEPELQINAQFAADVSEVSIPIIPHRSLVRNNGQIGIMYNGNRYMFTGTGQEFENNRIVLSKGNSSVSYRSKGKQRAFDPTNFTIPQAQNYYFALSNWQDLSYTRWYQSASTLRNEDDITGYLSEALRQNNYNAALSSIPRDFTGSTQHTYRSAAYLGGMTSAYRTFVSEENKRLNAINALMKENSLDVLKEEHIIDYLLTRGDTVLAYDIIRLIQDTSSDKLTSDYCPGLLEAYSDIKRWNTSIDNPVEHLIEQILLLVSENLSKDTVSIWCTLPVPRT

SEQ ID NO: 63759 - DNA, 609 bp, Unknown
  Obtained from environmental sample
  misc_feature (1)..(609): n is a, c, g, or t
ttgtttcggaaaatctcagtaaggatacggtttcaatttggtgtacgcttccggttccaagaacgtgatttgtattacagcgtaaggcttggaaacacgcttattaactgggcggaagacgtaaaaaacgccgattgggcggacataggccgttctcttgttctatcggcgctgacaaacgcgggacccggcgccgggaatttatacgctaatttaaaacctacggattattatccaagggcgttatggctgggagagcccggattctgggcatggactgtttcaccttccgtcaaaccttcatggcaggacggcaacctgaacatttcgttttctttccccgcaagcgcgactcatcatgtaataatccgcggagtaaaaccttttcttagcctgcgaatccacgacactaactggaggacggacagccagtatgaacgctatgactcgtcgggctgggtatattaccagcaggagcaaatactggttctaaaattacggcaccgcgaatctgtagaaaatatcaggatcgtttataaatacgcggcgcctccgccggttgtcgaagaaccaaaagaagacgctgacgccggagatgattttgattag

SEQ ID NO: 63760 - protein, 202 aa, Unknown
  Obtained from environmental sample
  misc_feature (1)..(202): Xaa is any amino acid
MFRKISVRIRFQFGVRFRFQERDLYYSVRLGNTLINWAEDVKNADWADIGRSLVLSALTNAGPGAGNLYANLKPTDYYPRALWLGEPGFWAWTVSPSVKPSWQDGNLNISFSFPASATHHVIIRGVKPFLSLRIHDTNWRTDSQYERYDSSGWVYYQQEQILVLKLRHRESVENIRIVYKYAAPPPVVEEPKEDADAGDDFD

SEQ ID NO: 63761 - DNA, 1137 bp, Unknown
  Obtained from environmental sample
  misc_feature (1)..(1137): n is a, c, g, or t
ttgtcgaagaaccaaaagaagacgctgacgccggagatgattttgattagtaaattacatggtaatttactgtgtaaattaccggtacggctgataattttactgttgatatttatattaatttcctgcaagaaaaaagaaacgccgccgcccgccgttgaagagacagccgcagttcaggaagaagaggttataccggaagaacctccgcccgaaacatcaggaagcgtggcggccgccaataccggcatcggagtttcgtactccgcacagcgtcccaaacagggactttcgtccgtcggcggcagggtaaatgtccgcgaaataaatccggttaactatgaaaacccggatattgacgtattaaaacagatgggtgtagagtcgtccgtaatttcatttttgacaggcgaacaattttacaaggcgggagattacgacaaggcccttgttgaatataacgcctcaatcagccgtaacggagaatttctggaagctctgatttccaggggaaacacattgttaaaaaggagagaatacaggcgcgcaattgatgattattcccgttcaattaaaattgacggcagcagggcggaattgtacaactaccgaggttacgccagagcggaattggcgacaagccaggctgtaagccaaacttcaagcgcatcggagttaaaacttgcgattgaagattatacaaaggcgattgccattaaaggcaattacaccgacgcttttatcaaccgctcgcaggcgttatttgaaattggcgagtacaacagggtaattgaggactgtacccgtattatcgccctagaacccaaaaacgcctatgcgtggaacaggcgaggcagcgcatggtacagtcttggagacgatgacaaggcaattaaagacttttcggaggcaattaaattaagggctaattacgcggtagcatggcacaaccgcgcaaacgcatggtacagcaaaggagagttggacaaagcgcttgcggatataaaccgctctctttcgattaatccgtcatttgcgggcgcgtacgccagcagggcaaacatactgcgtttacttggaaacaacgaaagcgccgccgcggacttcgcggaagccaagcgtttaaaacaacgctga

SEQ ID NO: 63762 - protein, 378 aa, Unknown
  Obtained from environmental sample
  DOMAIN (247)...(351): Protein of unknown function (DUF627)
  misc_feature (1)..(378): Xaa is any amino acid
MSKNQKKTLTPEMILISKLHGNLLCKLPVRLIILLLIFILISCKKKETPPPAVEETAAVQEEEVIPEEPPPETSGSVAAANTGIGVSYSAQRPKQGLSSVGGRVNVREINPVNYENPDIDVLKQMGVESSVISFLTGEQFYKAGDYDKALVEYNASISRNGEFLEALISRGNTLLKRREYRRAIDDYSRSIKIDGSRAELYNYRGYARAELATSQAVSQTSSASELKLAIEDYTKAIAIKGNYTDAFINRSQALFEIGEYNRVIEDCTRIIALEPKNAYAWNRRGSAWYSLGDDDKAIKDFSEAIKLRANYAVAWHNRANAWYSKGELDKALADINRSLSINPSFAGAYASRANILRLLGNNESAAADFAEAKRLKQR

SEQ ID NO: 63763 - DNA, 663 bp, Unknown
  Obtained from environmental sample
  misc_feature (1)..(663): n is a, c, g, or t
atgacagattggccgagagcgattatcggcgcgccccccggatatgtcggttatgagcagggaggccagttaacggaggcggtacggcggcggccttacagcgtgatcctctttgacgaaatagaaaaagcccatcaggaagttttcaatgttttcttacagatactcgacgacggccgcctgacagacggacaagggcgcgttgtcgattttaagaatgttatcatcattatgacaagcaacttaggctcggacttgattctaggcgcgaaaaacccggaaactttgcgtaactcgcttttggaattactgaaacaaagtttcaggccggagtttttaaaccggatagacgagacagtaattttcaacaggctggaaaaaaccgaaatcaacaaaatcgtggatattcagctaacgcgtctttcgcaaaggcttgccgagcgcaagattacgctgaaggtgactgacgcggcaaagtccctgcttgccgagaggtgctatgatcccatgttcggagcgcgtcctttgaagcgcacaatacagtccgatcttgaaaacccgctggcaaagcaggttattgcgggcgcaatccgcgacggggaaactgttacagcggatgtgtccggcggcgggattgtgtttaagaagcttaaagcttcttaa

SEQ ID NO: 63764 - protein, 220 aa, Unknown
  Obtained from environmental sample
  DOMAIN (6)...(119): ATPase family associated with various cellular activities (AAA)
  misc_feature (1)..(220): Xaa is any amino acid
MTDWPRAIIGAPPGYVGYEQGGQLTEAVRRRPYSVILFDEIEKAHQEVFNVFLQILDDGRLTDGQGRVVDFKNVIIIMTSNLGSDLILGAKNPETLRNSLLELLKQSFRPEFLNRIDETVIFNRLEKTEINKIVDIQLTRLSQRLAERKITLKVTDAAKSLLAERCYDPMFGARPLKRTIQSDLENPLAKQVIAGAIRDGETVTADVSGGGIVFKKLKAS

SEQ ID NO: 63765 - DNA, 360 bp, Unknown
  Obtained from environmental sample
  misc_feature (1)..(360): n is a, c, g, or t
gtgaatcgaatcgtactgagaggctttgaaatcgcccttgttgtcaatcgggtcgcctgttacgctgaacattcgtccaagaacttcaattccaaccggcacgctgataggacggccggtatcttcggcttcaaggccgcgggacaaaccttcggtggcggacatggcgacgcagcgcacttggttgtcgcccgtatgctgcaagacttccagagtgacggttctgctttccgttttcactttaagcgcggtcagaatagccggaacctgcccctgctcaaaacggacatccacaaccggtccgattatttgcgtaacatgacctatattcgccatctttctctcctatctgtcagctaa

SEQ ID NO: 63766 - protein, 119 aa, Unknown
  Obtained from environmental sample
  misc_feature (1)..(119): Xaa is any amino acid
MNRIVLRGFEIALVVNRVACYAEHSSKNFNSNRHADRTAGIFGFKAAGQTFGGGHGDAAHLVVARMLQDFQSDGSAFRFHFKRGQNSRNLPLLKTDIHNRSDYLRNMTYIRHLSLLSVS

SEQ ID NO: 63767 - DNA, 1386 bp, Unknown
  Obtained from environmental sample
  misc_feature (1)..(1386): n is a, c, g, or t
atggcgaatataggtcatgttacgcaaataatcggaccggttgtggatgtccgttttgagcaggggcaggttccggctattctgaccgcgcttaaagtgaaaacggaaagcagaaccgtcactctggaagtcttgcagcatacgggcgacaaccaagtgcgctgcgtcgccatgtccgccaccgaaggtttgtcccgcggccttgaagccgaagataccggccgtcctatcagcgtgccggttggaattgaagttcttggacgaatgttcagcgtaacaggcgacccgattgacaacaagggcgatttcaaagcctctcagtacgattcgattcaccgcgccgccccgaattttgaggaacagcgagccgcggtgcagatgcttgagacgggaataaaagtaatagatttaatcgcgccttacgcgaaaggcggaaaggtcggccttttcggcggcgcgggagtagggaaaaccgttatcattatggaactgatccgcaacatagcgacagaacattccggctactcggtgtttgccggcgtaggagagcgttcgcgcgagggcgccgatctctggaaagaaatgaacgagagcggcgttatagataaaacggcgcttgtcttcggacagatgaacgaacctcccggggcgcgcatgagggtcgccctcgcgggacttaccatggcggaacatttccgcgacaaagaaggtcaggacgttctcctttttattgataacattttccgttttattcaagccggcgccgaagtttccgctctgttgggcagaatccccagcgccgtcggttatcagccgacactggcaaacgaaatgggcggtctggaggaacggatcgccagcaccgcaaaaggctcgattaccagcatacaggcggtctatgttcccgcggacgatttgaccgatcccgcgccggcgaccacctttgcccatctggacgcgaccactaccctttcccgtaaaattgtcgagttgggaatttatccctcggtagatcctttagcttccagttcccgcattcttgacgccgccgtagtcggcgatgatcactacaacaccgcccgccgcacccagcagattctccagcgctacaaagaattgcaggacatcatcgccatactcggcatagacgagctttccgcggaagaccagcttaccgtagccagggcgcgcaaagtccagcgcttcttcagccagcctttctttgtcgcggaaaaatttaccggcattcccggccgttatgtgcaggttaaagaaacggtcaaaggcttcaagatgattcttgacggcgaatgtgattccataaatgaacacgctttctttatggccggtcccattgatgatgttctgcaaaagggcggagactag

SEQ ID NO: 63768 - protein, 461 aa, Unknown
  Obtained from environmental sample
  DOMAIN (7)...(74): ATP synthase alpha/beta family, beta-barrel domain
  misc_feature (1)..(461): Xaa is any amino acid
MANIGHVTQIIGPVVDVRFEQGQVPAILTALKVKTESRTVTLEVLQHTGDNQVRCVAMSATEGLSRGLEAEDTGRPISVPVGIEVLGRMFSVTGDPIDNKGDFKASQYDSIHRAAPNFEEQRAAVQMLETGIKVIDLIAPYAKGGKVGLFGGAGVGKTVIIMELIRNIATEHSGYSVFAGVGERSREGADLWKEMNESGVIDKTALVFGQMNEPPGARMRVALAGLTMAEHFRDKEGQDVLLFIDNIFRFIQAGAEVSALLGRIPSAVGYQPTLANEMGGLEERIASTAKGSITSIQAVYVPADDLTDPAPATTFAHLDATTTLSRKIVELGIYPSVDPLASSSRILDAAVVGDDHYNTARRTQQILQRYKELQDIIAILGIDELSAEDQLTVARARKVQRFFSQPFFVAEKFTGIPGRYVQVKETVKGFKMILDGECDSINEHAFFMAGPIDDVLQKGGD

SEQ ID NO: 63769 - DNA, 543 bp, Unknown
  Obtained from environmental sample
  misc_feature (1)..(543): n is a, c, g, or t
atgggcaaaggtggtcgccggcgcgggatcggtcaaatcgtccgcgggaacatagaccgcctgtatgctggtaatcgagccttttgcggtgctggcgatccgttcctccagaccgcccatttcgtttgccagtgtcggctgataaccgacggcgctggggattctgcccaacagagcggaaacttcggcgccggcttgaataaaacggaaaatgttatcaataaaaaggagaacgtcctgaccttctttgtcgcggaaatgttccgccatggtaagtcccgcgagggcgaccctcatgcgcgccccgggaggttcgttcatctgtccgaagacaagcgccgttttatctataacgccgctctcgttcatttctttccagagatcggcgccctcgcgcgaacgctctcctacgccggcaaacaccgagtagccggaatgttctgtcgctatgttgcggatcagttccataatgataacggttttccctactcccgcgccgccgaaaaggccgacctttccgcctttcgcgtaaggcgcgattaa

SEQ ID NO: 63770 - protein, 180 aa, Unknown
  Obtained from environmental sample
  misc_feature (1)..(180): Xaa is any amino acid
MGKGGRRRGIGQIVRGNIDRLYAGNRAFCGAGDPFLQTAHFVCQCRLITDGAGDSAQQSGNFGAGLNKTENVINKKENVLTFFVAEMFRHGKSREGDPHARPGRFVHLSEDKRRFIYNAALVHFFPEIGALARTLSYAGKHRVAGMFCRYVADQFHNDNGFPYSRAAEKADLSAFRVRRD

SEQ ID NO: 63771 - DNA, 354 bp, Unknown
  Obtained from environmental sample
  misc_feature (1)..(354): n is a, c, g, or t
ttgcagaacatcatcaatgggaccggccataaagaaagcgtgttcatttatggaatcacattcgccgtcaagaatcatcttgaagcctttgaccgtttctttaacctgcacataacggccgggaatgccggtaaatttttccgcgacaaagaaaggctggctgaagaagcgctggactttgcgcgccctggctacggtaagctggtcttccgcggaaagctcgtctatgccgagtatggcgatgatgtcctgcaattctttgtagcgctggagaatctgctgggtgcggcgggcggtgttgtagtgatcatcgccgactacggcggcgtcaagaatgcgggaactggaagctaa

SEQ ID NO: 63772 - protein, 117 aa, Unknown
  Obtained from environmental sample
  misc_feature (1)..(117): Xaa is any amino acid
MQNIINGTGHKESVFIYGITFAVKNHLEAFDRFFNLHITAGNAGKFFRDKERLAEEALDFARPGYGKLVFRGKLVYAEYGDDVLQFFVALENLLGAAGGVVVIIADYGGVKNAGTGS

SEQ ID NO: 63773 - DNA, 480 bp, Unknown
  Obtained from environmental sample
  misc_feature (1)..(480): n is a, c, g, or t
atgaacacgctttctttatggccggtcccattgatgatgttctgcaaaagggcggagactaggaaaatggcggccgattttctctttgaagtgtatactccccatcgtacttttttttctgagtcggtagaagcaatagtccttaccctgctcgatggggaagccgctgtttacgccaaccacgcgcattttacggcccctgttgttccctgccttttaaaaatcaaagacagaaaaggcgtctggaaaaccgcgtttacttcggaaggtctattggaggtaaccagccacaaaactgtcctgctttccgatgccgccgaatggcctgctgaaattgactatgagcgcgcaaaaggggcaaaaaaaagggcggaagaaacccttatgtcggcaacgctcaagtttgaaacagaagccgccgccaattcccttaaacgcgcaaatatgcggattatggccagggacgagggcgtaaagtaa

SEQ ID NO: 63774 - protein, 159 aa, Unknown
  Obtained from environmental sample
  DOMAIN (26)...(108): ATP synthase, Delta/Epsilon chain, beta-sandwich domain
  misc_feature (1)..(159): Xaa is any amino acid
MNTLSLWPVPLMMFCKRAETRKMAADFLFEVYTPHRTFFSESVEAIVLTLLDGEAAVYANHAHFTAPVVPCLLKIKDRKGVWKTAFTSEGLLEVTSHKTVLLSDAAEWPAEIDYERAKGAKKRAEETLMSATLKFETEAAANSLKRANMRIMARDEGVK

SEQ ID NO: 63775 - DNA, 702 bp, Unknown
  Obtained from environmental sample
  misc_feature (1)..(702): n is a, c, g, or t
atggacattgcttttggtcatagcaatatggactttgattgctttggctcgctcatactaataaaaagactgttccccgtttacaggctggttcggagcagtcggatacatccagcggcgcaggtcatgtatgatttttatgaagattactttaattttctttctttaaaagacatttcaggagaaaaaatcgacaatataattatcgtagatacctgcacaaccggcagggtaagcgaatattttagcaacataagtaattcatctccttctatacgtgtctttgatcatcatatggaagaatgtgatattgcaggcgccaaaattgagggagggcgatttggggcaaatacttccatgcttgggaaaatggcgatagaaaggggaattacgcttgaaagcgaggaagctactattgccctcacggcgatttatgcagataccgggcggtttatttacgagagtgtaacgcgggatgattatgaggtttcagcgtggcttttggatatgggagcttccttaagtctggtgaaatcgtttctggaaactgtcagagaggacaagcaaattgcggttcttaaccggctcaggccagaaacccattcgatacagggcaatgtgatcctccttttagtatctgagcttgaagaaatgtgtctggcctgcagcggttgtgaaaagatatggatgttcaaatcctga

SEQ ID NO: 63776 - protein, 233 aa, Unknown
  Obtained from environmental sample
  DOMAIN (4)...(145): DHH family
  misc_feature (1)..(233): Xaa is any amino acid
MDIAFGHSNMDFDCFGSLILIKRLFPVYRLVRSSRIHPAAQVMYDFYEDYFNFLSLKDISGEKIDNIIIVDTCTTGRVSEYFSNISNSSPSIRVFDHHMEECDIAGAKIEGGRFGANTSMLGKMAIERGITLESEEATIALTAIYADTGRFIYESVTRDDYEVSAWLLDMGASLSLVKSFLETVREDKQIAVLNRLRPETHSIQGNVILLLVSELEEMCLACSGCEKIWMFKS

SEQ ID NO: 63777 - DNA, 663 bp, Unknown
  Obtained from environmental sample
  misc_feature (1)..(663): n is a, c, g, or t
ttgaagaaatgtgtctggcctgcagcggttgtgaaaagatatggatgttcaaatcctgacgcgtattttgcgatttttttcatacctcgggataatacaatactgctcattgccagaagccaaaagaagactatcgatcttcacgccctgctttctgtttatggaggcggagggcaccaactggcggcttctgcaaaaattacaggtaaggacgggaaggagttttatcgggaattctgtaattatcttagttataacctggaacccgccgccgatgtcaaggatattatgactaagaatgtgtttacaatccatgaaaccaccagccttatggaagcgtcaatgtttttggaacgtgttgatcttacagcctgtccggttgttgataaagaaggcagcgtttccgggtttatcagccttcgggatataatgaaaggacgcaaacatgggaagatgcaggcgccggtaaaagcgtatatgtctacacctgtgatttcagccgggagtaaagtgacacttcgggaaatagaaaggatattccataaaaacaaaatcggccatcttcctatattggaagacggcaaacttctgggtattgtaacccgatgggactacctgcaattccataaacagactctgcatgatttgaccagtggggagtga

SEQ ID NO: 63778 - protein, 220 aa, Unknown
  Obtained from environmental sample
  DOMAIN (95)...(210): CBS domain pair
  misc_feature (1)..(220): Xaa is any amino acid
MKKCVWPAAVVKRYGCSNPDAYFAIFFIPRDNTILLIARSQKKTIDLHALLSVYGGGGHQLAASAKITGKDGKEFYREFCNYLSYNLEPAADVKDIMTKNVFTIHETTSLMEASMFLERVDLTACPVVDKEGSVSGFISLRDIMKGRKHGKMQAPVKAYMSTPVISAGSKVTLREIERIFHKNKIGHLPILEDGKLLGIVTRWDYLQFHKQTLHDLTSGE

SEQ ID NO: 63779 - DNA, 1377 bp, Unknown
  Obtained from environmental sample
  misc_feature (1)..(1377): n is a, c, g, or t
atgcaggaagaactaaccgaatacaagggaaaagccacaatggaaaaaatcacgtcgctggcaaagcggcggggttttgtgtttcaatcttcggagatttacggcggccaaaacggagcctgggactacgggcctttgggcattgaactaaaaaaccgcatcgccgcggcttggtggaaggaaatgacccagctccacgacgatattgtcggtctggacgcggcaattctgatgcacccgcgcacatgggaagcttcgggacatgtggagaattttaccgatccgcttgtggactgcaaaaagtgcaagtcccgcttcagagccgatcagataccgcctgagaaccttgcggcgaaaaagtgccccgaatgtgacggcgagcttaccgatacgcggaagtttaacctgatgtttaaaacccacatcggccccgccgaagactcagccagtatcatctacctgcgccctgaaacggcacaggggatctacgtcaactataagaacatcatccagtccaacagaatgaaaattcccttcggcatagcccaaatcggcaaagccttccgcaacgagattgttacgaagaactttatcttccgtacctgcgaatttgagcagatggagatgcaatattttgtgaagcccggcacagacgaggactggtttgccgaatggcggaagcgccgctggaattactaccaaaagcttggcgttaaaatggatcacctgcgctggcaccagcacggccccggcgaattggcccactacgcaaaagacgcctacgacattgagtacctcttcccaatgggctggcgggaactggaaggcgtccacaaccgcaccgactacgaccttggccgccatacacaattctctggcaaggacctccagtacatcgatcaggaagacagcaacgagcgctacattccgtatatcatcgaaacttcagccggcctaacccgcaatttgttgatgatcctctgtgacgcctacgacgaggagcaagtcgcttccgaaaaagacggggcgggagacgaatcgcggacagtgctgcgcttccacccaagccttgcgccaattaccgttgccgtcctgcccctgatgaagaaagacggcctcgcggagcttgcccaggacatccgaaaggagctgaaagaagacttctccaccgattacgatcaatccggagccatcggacgccgctaccgccgccaggacgaagctgggacgccattctgcgttaccatcgactacgaatccaaagacaacggcacagtaaccctgcgtttccgtgactcaatggaacaggttcgcgtgaacagggcggaactggctcagcgactgaggaaggaaattaaagagtacaagagggtatag

SEQ ID NO: 63780 - protein, 458 aa, Unknown
  Obtained from environmental sample
  DOMAIN (361)...(451): Anticodon binding domain
  misc_feature (1)..(458): Xaa is any amino acid
MQEELTEYKGKATMEKITSLAKRRGFVFQSSEIYGGQNGAWDYGPLGIELKNRIAAAWWKEMTQLHDDIVGLDAAILMHPRTWEASGHVENFTDPLVDCKKCKSRFRADQIPPENLAAKKCPECDGELTDTRKFNLMFKTHIGPAEDSASIIYLRPETAQGIYVNYKNIIQSNRMKIPFGIAQIGKAFRNEIVTKNFIFRTCEFEQMEMQYFVKPGTDEDWFAEWRKRRWNYYQKLGVKMDHLRWHQHGPGELAHYAKDAYDIEYLFPMGWRELEGVHNRTDYDLGRHTQFSGKDLQYIDQEDSNERYIPYIIETSAGLTRNLLMILCDAYDEEQVASEKDGAGDESRTVLRFHPSLAPITVAVLPLMKKDGLAELAQDIRKELKEDFSTDYDQSGAIGRRYRRQDEAGTPFCVTIDYESKDNGTVTLRFRDSMEQVRVNRAELAQRLRKEIKEYKRV

SEQ ID NO: 63781 - DNA, 1080 bp, Unknown
  Obtained from environmental sample
  misc_feature (1)..(1080): n is a, c, g, or t
atggcggcacagacagcggtaattggggcaggggcctggggaacgacggttgccaaggtaattgcagaaaaggggaaagacgttgtcatctggagttttgaaaaagacaccagggacaatattaacttgcgttccgagaacaagcgttacctgcccgggataagcctgccaaaaaacctgagagctacttcggatattgtagaagcagcctccgagcggaagcagcttatactggcagtgccttccctgtttttgcttcaaactgtaaaacagtttctctcagtcccctctatcagggaaggagaaaccgccatcgcggtcattacaaaaggttttatttcaaccgataaagggccccggctcattgttgaaaccctggaagattaccttcccgggttttaccggcagacacttgtttacatagcgggcccaagccacgccgaagaagtttcacgaggaaaaattaccggcctgatagccgcaagcgagaacgccaaaaattccatctattttcgcgacttgttaaaaagcaaaaaccttcttgtcttttcatcgtttgacgtgcgcggcgttcaggtggcggcagcggcaaaaaacgttatcgccatcgctttcggcctgcttgacgccttaaagacccagggtgaagcaagcggctttgaaggcgcgaacctcctgggcgacggaaccgaatccctgctgctggccgccggcctgaacgagatccagaccctcggcgtggccatgggcgccacccaccccgagacctttacttccatttccggcatcggagaccttgacgttacctgccgctcagtctttggaagaaaccgccgcttcggcaaagaaattatcgaaaaaaaaatccttgcgccgttcaaggacatcgatgaccttatcgcccgcattaacgagcttgattacctgccggaaggggtcgctgcggcaaagtacgtcaaagcgctggcggaaaagcaccgccttaaaatgcccatttcaatcggcctttacagaatcctaaaccgagagatagaaccgcatatatttctaaagcaattcttaaacgaacttaggcgttag

SEQ ID NO: 63782 - protein, 359 aa, Unknown
  Obtained from environmental sample
  DOMAIN (186)...(353): NAD-dependent glycerol-3-phosphate dehydrogenase C-terminus
  misc_feature (1)..(359): Xaa is any amino acid
MAAQTAVIGAGAWGTTVAKVIAEKGKDVVIWSFEKDTRDNINLRSENKRYLPGISLPKNLRATSDIVEAASERKQLILAVPSLFLLQTVKQFLSVPSIREGETAIAVITKGFISTDKGPRLIVETLEDYLPGFYRQTLVYIAGPSHAEEVSRGKITGLIAASENAKNSIYFRDLLKSKNLLVFSSFDVRGVQVAAAAKNVIAIAFGLLDALKTQGEASGFEGANLLGDGTESLLLAAGLNEIQTLGVAMGATHPETFTSISGIGDLDVTCRSVFGRNRRFGKEIIEKKILAPFKDIDDLIARINELDYLPEGVAAAKYVKALAEKHRLKMPISIGLYRILNREIEPHIFLKQFLNELRR

SEQ ID NO: 63783 - DNA, 573 bp, Unknown
  Obtained from environmental sample
  misc_feature (1)..(573): n is a, c, g, or t
ttggtcattctggtaaatcacgccctctcctccctgccggtatatataatctttgcctcaaccatgatctttatgttttccgcctcggcgacctatcacgccgtaatttccggaaagataaaacagtttttccgcatcatcgatcatcagtccatttatatatttattgcgggaacctatacgcctttttgccttttggcgctcaagggccccctgggcatatttttgttcttttttgagtgggttatggctttgactggggttatactttccgccgttcagttccgcttcataagaaaaattgaaatggtcatttttatccttatgggatgggcaattatcggcggatgcgtacccctcgcgcgctcgctttcaccgcggagcgtttttcttttatttgccggaggcgtgctatacaccgccgggacattctggtatcgcgccggaaaaccaaagcccggcctccgcaagagccgcttgttctgcggccacgttatctggcatctttttgtccttgccggagcggcctgccactggttttcggtatggtttctcttacttgagaaacattaa

SEQ ID NO: 63784 - protein, 190 aa, Unknown
  Obtained from environmental sample
  DOMAIN (1)...(179): Haemolysin-III related
  misc_feature (1)..(190): Xaa is any amino acid
MVILVNHALSSLPVYIIFASTMIFMFSASATYHAVISGKIKQFFRIIDHQSIYIFIAGTYTPFCLLALKGPLGIFLFFFEWVMALTGVILSAVQFRFIRKIEMVIFILMGWAIIGGCVPLARSLSPRSVFLLFAGGVLYTAGTFWYRAGKPKPGLRKSRLFCGHVIWHLFVLAGAACHWFSVWFLLLEKH

SEQ ID NO: 63785 - DNA, 1806 bp, Unknown
  Obtained from environmental sample
  misc_feature (1)..(1806): n is a, c, g, or t
atgaaaagatcccctgttgtttttttctggctgcgcctctttttatacctcagcggtcccgcgctgatactccttcatccgggcattgccgttactttcgaccgtatcagttttgctcagtggttcatcattatccctgttatggcctttttcgcgtttgtttcgcccccgaaattatcttttaaggacagaagccttattgcgggcgttattctgctcctcttcgccgcgtgggtaggctggtttggcttcggtactttacagcttcttctcgcgggcgtgataagttttatcctcacttatttactttttaactatccgctttgggccaaacccgcggcgttagaaccgttttttgccgcatgggtgtgcctgcgcctgctttcgctgtcccgttccggcgaagatgtcgcgtggcagagcggggctcttacccaatttatttttgtgtggacagcggttgtctttctgttatacagttttgtgatctacctttgcctctttccgaaaagtcaaggcggagcggctaaagagggagcgctctttgcccttgccgcggcaggcttattggttttggttatggttatcctgcctgccgattttgtccgtaactccgtgatagacaatctgctccccgaaaaaatacctgaaaaaataaaggaaggctccgaaaaaggcttgccgcaggatgcggaaggaaggcggaaagggcgcaaaacacttccgcagagcggggaaaaaaatggacagggattgcgcggtatttccgaatacagttggcagaacaaatcaagcaggggcaggaaaggagacggaagcaagagcgataaccgtcaatacatggtgatgatagtcgcggcggacagagaacccgtgtacatgggcgacgttttccgcggacagcttgatcccacagacggttttcttcctagccctcaggagcctttgaataaacttgtgaaacagcgcttctttactacatggttcgataatgagccggaagtcgataaagaaagggaaaagcaggaagtttcttccatatcaactattccgcagaagtatctgccgtaccgccctgtntcagtcgatcncacgatattaagcgagaatacgggcccgcttcggtatattcatcaggttgtttcaaacacgcatttaggcgatcccctggcgcttatcttttggacttcccgtcccttaagttcttttgaaaaaaatcttcttgcgccttacatggaaatttccctgtacgaaaaagacgctgaggctttcagaacatatttgaacaaggcgcagaaaaaatggaaagaagaccgctatgaatttttatcaaaacttacaaaacaggatgaaatccccaagccttgcaacgaacatctggaaacaatcttcgctttgctgacaggcttttcaacataccaatacaacttgagttatacggataaccttaacgtagaaatgataaaagatttccttttaaccaacgcggaaggcgattgcgttgaattttccaattcactcgctttactcgggcggctggcgggtattccgtcgcgtgttgttacgggttatctcgcggcggaggaactgcaaacgcaggcgcaccttcgaggccttgccaacctgcggaccaggattccgtatttacagcagttcccccttaataatttatttttggtaaccaatcttcacgcccattcatggacgcagttctacattcccgagttcggctggcttgacttcgaggcgaccatgttcgctatgccgccggaaggcgagggcgatttcagcacatgggacgtgtga

SEQ ID NO: 63786 - protein, 601 aa, Unknown
  Obtained from environmental sample
  DOMAIN (495)...(584): Transglutaminase-like superfamily
  misc_feature (1)..(601): Xaa is any amino acid
MKRSPVVFFWLRLFLYLSGPALILLHPGIAVTFDRISFAQWFIIIPVMAFFAFVSPPKLSFKDRSLIAGVILLLFAAWVGWFGFGTLQLLLAGVISFILTYLLFNYPLWAKPAALEPFFAAWVCLRLLSLSRSGEDVAWQSGALTQFIFVWTAVVFLLYSFVIYLCLFPKSQGGAAKEGALFALAAAGLLVLVMVILPADFVRNSVIDNLLPEKIPEKIKEGSEKGLPQDAEGRRKGRKTLPQSGEKNGQGLRGISEYSWQNKSSRGRKGDGSKSDNRQYMVMIVAADREPVYMGDVFRGQLDPTDGFLPSPQEPLNKLVKQRFFTTWFDNEPEVDKEREKQEVSSISTIPQKYLPYRPVSVDXTILSENTGPLRYIHQVVSNTHLGDPLALIFWTSRPLSSFEKNLLAPYMEISLYEKDAEAFRTYLNKAQKKWKEDRYEFLSKLTKQDEIPKPCNEHLETIFALLTGFSTYQYNLSYTDNLNVEMIKDFLLTNAEGDCVEFSNSLALLGRLAGIPSRVVTGYLAAEELQTQAHLRGLANLRTRIPYLQQFPLNNLFLVTNLHAHSWTQFYIPEFGWLDFEATMFAMPPEGEGDFSTWDV

SEQ ID NO: 63787 - DNA, 807 bp, Unknown
  Obtained from environmental sample
  misc_feature (1)..(807): n is a, c, g, or t
ttggcggctaaaagtagcgcgaaaaaaagcggcgcgaatgatgacgatgtcaaaatggaagggtttagccgtatccagtgtaccgtcgatcttcttccgcaggatattcttgggtttaaccgatttatcggtcattcgggagagatgatttttaacaaggggccggtgttcgcgcattttgtgttatgtgacgagattaacctgcttacgcctaaaacgcagggaagtttttttcaggtgatggaagaacagagcgtaactatcgaggggaaattatacaaattgacggatccgttttttatcatcgctacgatgaatttaaaaggcgttcatttgttcccactgcccgcgcctcagcttgaccgttttatgatccgtctctcacttggctacccaagcgaagaagatgaaactgaaattataaaccggcacggcaaaattgacgcgtgggacagttttacaagcgtgatagacagcgcggatttaatccgctggaaaaaaatggtggacaccgtgcagatgcatcccgacgttacttcctaccttgtaaattgcgtccgtcaaacaagggttcatcccgatattgagagccccgcaagtccgagggcgggcgtgcgtatctcgcggttggcgcgttctctcgccctctgccgaggtatggactatgttcccgtcgatataataaaagaaatatttatacattcaatggcgcacagaataataacccgcgatccttccataccgccggaagcgccgttgcaaaatattttaaactcgtcccctgtcgaaccgaagcgggaacagtaa

SEQ ID NO: 63788 - protein, 268 aa, Unknown
  Obtained from environmental sample
  DOMAIN (2)...(125): ATPase family associated with various cellular activities (AAA)
  misc_feature (1)..(268): Xaa is any amino acid
MAAKSSAKKSGANDDDVKMEGFSRIQCTVDLLPQDILGFNRFIGHSGEMIFNKGPVFAHFVLCDEINLLTPKTQGSFFQVMEEQSVTIEGKLYKLTDPFFIIATMNLKGVHLFPLPAPQLDRFMIRLSLGYPSEEDETEIINRHGKIDAWDSFTSVIDSADLIRWKKMVDTVQMHPDVTSYLVNCVRQTRVHPDIESPASPRAGVRISRLARSLALCRGMDYVPVDIIKEIFIHSMAHRIITRDPSIPPEAPLQNILNSSPVEPKREQ

SEQ ID NO: 63789 - DNA, 702 bp, Unknown
  Obtained from environmental sample
  misc_feature (1)..(702): n is a, c, g, or t
atgggaactgcggtagtttttaagccaactttaattcaacgcaaggcgttagcgcttttgaaaagcggcgcaaaacatattttgctttatggcggctctcgttccggcaaaactactgttcttgttatggcgattatttttagggctttgatgtatgcaggtagtcgtcatcttatttgccgttatcgtgctaaagacgctcgttcttctgttttgcgtgagactttaattccgtggcttgataatactgtcgggaaaaatggttataactttttggctcatgaaagtatgattacgctttttaatggctctgagatttggattggcggcttgggagacagggagcaagcggacaagattttagggcatgaatactgcacgatttattttaatgagattagccaattatcttatatcgcagtaacaacggcttattcaagattggctatgcgtgtgcaaggttgtaaaaacttatttttttatgactgtaatccgggcagccctttacattgggcatataaaatatttgtgcttaaaagaattttcctgactggcgaacctttagaaaaacctgaactatacgaagcaatgttacttaatcccgaagataacagggagaatttacctgatgattatatttccgacattttggacgtgttacctgaaaaacaaaaggcaaggtttagggacgggcttgggtaa

SEQ ID NO: 63790 - protein, 233 aa, Unknown
  Obtained from environmental sample
  misc_feature (1)..(233): Xaa is any amino acid
MGTAVVFKPTLIQRKALALLKSGAKHILLYGGSRSGKTTVLVMAIIFRALMYAGSRHLICRYRAKDARSSVLRETLIPWLDNTVGKNGYNFLAHESMITLFNGSEIWIGGLGDREQADKILGHEYCTIYFNEISQLSYIAVTTAYSRLAMRVQGCKNLFFYDCNPGSPLHWAYKIFVLKRIFLTGEPLEKPELYEAMLLNPEDNRENLPDDYISDILDVLPEKQKARFRDGLG

SEQ ID NO: 63791 - DNA, 1278 bp, Unknown
  Obtained from environmental sample
  misc_feature (1)..(1278): n is a, c, g, or t
ttgcgtgttatcaggtatgacatcaattttcaaaattacaggagtggtgctatgcacaacgattttactttgttttctagggtggttccttcgggaaaaaaggtggtctattactacgcttatgacagtgaggggaaacgcttggggtcgtggactacgggacagactaccaggacggcggcaagaaattattgcaacttgctgaaccggaaggggaaattgttaccggaattgaaaggtatgccgacttttgccgaatttgcagctttgttttgggattgggataaaagcgaatacttgaaagaacggcggaaacgccggaagctgacgcaatcctatgctgacaaaaataaaaagacggtcgagaatattttagttccttactttgggaatatgaaacttgacgctataacgggaaaggaaattgatacttggcttgattacctgatttcaaaaaagtataagaattccaccgctaacggattttacggttctttgcaaactatgttgaaatgggcggttaaaaaacacattatcgagcgtgatccgttcaatgacgtggaaaaactgctgcaagagcaaaaaaagaaaaagattattacccctaaagaattttgggctttgttttctgacgattggaaaaaggtgtgggataataatttcctgatgtgtacggctcataagttggcggggctgaccggaattcggtgttgtgagattttggggctaaagggggaatatgtgtttgatgaccatatctatatttgcgcacaatacgatgagatatacggctatcgggaaacgaaaactaaaacggaacacaatatccctttgacagaggaagttatagcggatttgaaaaaactgatgaatgtaaacggacagggttttgtgttttcggagactggcggcgataagcctgtgaaccgcaactatctttataacggcttgcggaaggcgttgcaaaatatcggcataagcgaaaaggaaattgacgagagggggcttaatgttcatgcgtggcggcatttctgcaatacggtactgcaagacgggggattgaacgttaagcaagtacaggctgttatagggcataagacggaaaaaatgaccgaacattatacccattttgaccctatggaatttggagatgtaccgaaaatacaggcggcgttgctgacgggtaacccgaaggaaaggaatacagaacgccctgccttgtctttggttaaaacgccgaatgatgaaaaaacagaaaagcgtaaaaaggcttcctag

SEQ ID NO: 63792 - protein, 425 aa, Unknown
  Obtained from environmental sample
  DOMAIN (212)...(384): Phage integrase family
  misc_feature (1)..(425): Xaa is any amino acid
MRVIRYDINFQNYRSGAMHNDFTLFSRVVPSGKKVVYYYAYDSEGKRLGSWTTGQTTRTAARNYCNLLNRKGKLLPELKGMPTFAEFAALFWDWDKSEYLKERRKRRKLTQSYADKNKKTVENILVPYFGNMKLDAITGKEIDTWLDYLISKKYKNSTANGFYGSLQTMLKWAVKKHIIERDPFNDVEKLLQEQKKKKIITPKEFWALFSDDWKKVWDNNFLMCTAHKLAGLTGIRCCEILGLKGEYVFDDHIYICAQYDEIYGYRETKTKTEHNIPLTEEVIADLKKLMNVNGQGFVFSETGGDKPVNRNYLYNGLRKALQNIGISEKEIDERGLNVHAWRHFCNTVLQDGGLNVKQVQAVIGHKTEKMTEHYTHFDPMEFGDVPKIQAALLTGNPKERNTERPALSLVKTPNDEKTEKRKKAS

SEQ ID NO: 63793 - DNA, 969 bp, Unknown
  Obtained from environmental sample
  misc_feature (1)..(969): n is a, c, g, or t
ttgagttcaccaaagcgctggaggctgccactgatattgagcttgttaatgaggaagccgaaaaaaacgataaaggtacaaaccagggaagataaaatgaaaaaaaataaaaataatttagagaaagtttgcctgttttttcttatcgccgttataatcggcattcatccggcgcttgcccaggattccatgacattggatttggggttggcttccgacgacgagctaacagaggcgctggaaaaagccgatgatatcgagctgattaataaggaagataacttgactacgacggctgtcccagccggggctgcctctgtcgaaaaagcgcntgcggggcaggcagcgtccgatggaatccgcgacaatgaatacctcctggaaagccggcgcctcgctaaacttgcggaagaggcattcaccgaaggcgactacgacaggtctaccaggctcgccaatgaagccgcctggtatgccaggcagtccgatgtatatgtcgctattaccgcggcaaagcgctgccttgaccaggctgtcgcctcaggtgtttccacaaggttttccaaagaatacaaggaagcggaaaattggtataaggaaagcataaaagccagagacagcgaagaattggatatcgccattgatgccgccggcatggtagcgcaagtgcttgatggtcttggaaaatccatcagccgcagtcccacacctgccgctttaccggccacatacaccgtgcggccctggtctgtctcaaaggattgtttttggaatattgcgggcctgagctgggtatacgggaatccgcgtcaatggagaacgctttacaatgccaacaaatcaaaactgcccaatccgaataatccaaacatcctggagccgggcactgttttggacatccccagcataaagggtgaactgcgccagggcgcgtgggaaatcggcaagacctacgaacctatccggtaa

SEQ ID NO: 63794 - protein, 322 aa, Unknown
  Obtained from environmental sample
  misc_feature (1)..(322): Xaa is any amino acid
MSSPKRWRLPLILSLLMRKPKKTIKVQTREDKMKKNKNNLEKVCLFFLIAVIIGIHPALAQDSMTLDLGLASDDELTEALEKADDIELINKEDNLTTTAVPAGAASVEKAXAGQAASDGIRDNEYLLESRRLAKLAEEAFTEGDYDRSTRLANEAAWYARQSDVYVAITAAKRCLDQAVASGVSTRFSKEYKEAENWYKESIKARDSEELDIAIDAAGMVAQVLDGLGKSISRSPTPAALPATYTVRPWSVSKDCFWNIAGLSWVYGNPRQWRTLYNANKSKLPNPNNPNILEPGTVLDIPSIKGELRQGAWEIGKTYEPIR

SEQ ID NO: 63795 - DNA, 1176 bp, Unknown
  Obtained from environmental sample
  misc_feature (1)..(1176): n is a, c, g, or t
ttgggtttttaccttgaaaaatatgttaaaaacgggtaccctatacaagagaaaagagaagagggaaaaaagaaaaaagtaaaagaagacctcacgcggaggcgcggaggcgcagaggaagaaataaagattatgagagaagaaaaaatagcgaaaaaagggagaattcacgagaaaaggacaattttcttggtttttttcttttttatttcttcttttttcttttgtatggcacaaaccatcggcgacctcggttctgccgctaccaaggcggaagaagcccgcaaaagagccggcgattttgaagccgatgcatatttccccggagaatgggaggctgctgaaagccagtatgccgaaaccgggcttttaccaaaaaataacagtgacaatatcgacaaagctgttgctgcttataatgaagccactaccgcttttaaccgggtgtttgagcttacgattcccctgtacgctcaggccagagaagatgagataatggcgctaaggggctatctgattaccttgggagcaagggactctttccctgagtacctgatggacgcggatataactgctctgctggcctatacacaatacgaagcgaaagactactactcggccagggattccgccgcccaagcgctgcaaaagttcaatgttttggaaacggcctttaatgcctggttattaagggtggaaatacgagaaagaggttttgcgggttatgatccgggaaactttgagcttggaggagagataatcaacggcgctatggacgcatacatggcgggtgattttgcgagagcgcgggaaaaagccgaagaagctttatcaatattcaatctggtacttttaacctcatgggcaagttatgcggaactgcgttcttcgctggccgaaggcgagcgtttggccgcgcttgacatgagaaccaacatagcggcgaaggaattttttacaatagccgattctgacaacacgacggcactggctctgctggaatcgaagaaatttgaggatgccgcaaggttatttattgacgctgaggcaatgtttgtaattgccggcattacggctctggaaaaaaggcgggccgcggccgccgcaatcagaaacgcgaatgaaaaaatccggcaaagcgatagaatcgtaagaaatgcgggaagaaaccgttaa

SEQ ID NO: 63796 - protein, 391 aa, Unknown
  Obtained from environmental sample
  misc_feature (1)..(391): Xaa is any amino acid
MGFYLEKYVKNGYPIQEKREEGKKKKVKEDLTRRRGGAEEEIKIMREEKIAKKGRIHEKRTIFLVFFFFISSFFFCMAQTIGDLGSAATKAEEARKRAGDFEADAYFPGEWEAAESQYAETGLLPKNNSDNIDKAVAAYNEATTAFNRVFELTIPLYAQAREDEIMALRGYLITLGARDSFPEYLMDADITALLAYTQYEAKDYYSARDSAAQALQKFNVLETAFNAWLLRVEIRERGFAGYDPGNFELGGEIINGAMDAYMAGDFARAREKAEEALSIFNLVLLTSWASYAELRSSLAEGERLAALDMRTNIAAKEFFTIADSDNTTALALLESKKFEDAARLFIDAEAMFVIAGITALEKRRAAAAAIRNANEKIRQSDRIVRNAGRNR

SEQ ID NO: 63797 - DNA, 1524 bp, Unknown
  Obtained from environmental sample
  misc_feature (1)..(1524): n is a, c, g, or t
atgatttggtatattatcctccctcttgccgggttgactctaggctggactataagatggctgtacgccagatttctacttacggcatcggagcagcgcgcggagcgcaaaatccaggatgcgataaaggaagctgaagccaaaaggaaagaaatactccttgaggcaaaagaaaaggttatccaggaaaggaaccagcaggaaaaggagacccgggaacgcagggctgagttacagcggcttgaacgccgcgttgtacaaaaagaagacgctctggacaagaaagttgcccagattgaacgaacggaacagttgctggctgacaaggacaagcagtgccaggaacgggaaaacgcgttatccagggaggaagaacgctaccgggcggaacttgaacggatttccgggttaagcgccgaagacgcgaagactttaatcatcaaggatttggaaaacgaggccaggcatgacgcccaggctctgatcaacaagatcgagcaggaagcgaatcttgccggcgagaaaaaagccagggacatactggtagccaccatacnagcgcttgcctcagaggtaaccggcgacgtcacggtgacgaccgtcaacctgcccaatgacgagatgaaaggccgcataatcgggcgggaaggccggaacatccgcaccctggaaacgcttaccggggtggacatcatcattgacgatacgccggaagcggtggttatctcgtgctttgacccggtcaggcgggaaatcgccaaagtggcccttgaacggcttatccttgacggccgtatccatccggcgcgaatcgaagaaatcgttaccaaggtcagcaaggacacctcccagaagatatttgaggaaggggaaaaagtcctctttgacctgggcatacacaatatcaagcaggacgccatccgcgccctgggacgcctgtacttccgtaccagctacggacagaacgtgctgaaccattccagggaagtcgccgttatcgcgggaatgctcgccgccgaaatcggctgcaaccgggacctgaccaagcgggccgcccttctgcacgacataggcaagggcattgactcggattccgaccttaaccacgccgagatcggcatggacatggcccggaaaatgggagaggatccgcggataatcaacgccataggcagccaccacaatgacattgagccgacctgcatagaggccgtgctggtgcagatcgccgacgccatttccgctgcaaggccgggcgcccgcaaggaaaccctggacaactacatcaagcggctggagaaccttgagaacatcgccaaggaattcggcggcgtcctgaacgcgttcgcgatacaggccgggcgggaacttcgtatcatcgtcaacaacgagactgtcagcgacgaccagtcacgggaactcgccaaaggaattgccaaaaagatcgagaacgatctgcattatcccggcaggatcaagctgactatcatcagggagacaaggataaccgaatacgcaaggtaa

SEQ ID NO: 63798 - protein, 507 aa, Unknown
  Obtained from environmental sample
  DOMAIN (198)...(257): KH domain
  misc_feature (1)..(507): Xaa is any amino acid
MIWYIILPLAGLTLGWTIRWLYARFLLTASEQRAERKIQDAIKEAEAKRKEILLEAKEKVIQERNQQEKETRERRAELQRLERRVVQKEDALDKKVAQIERTEQLLADKDKQCQERENALSREEERYRAELERISGLSAEDAKTLIIKDLENEARHDAQALINKIEQEANLAGEKKARDILVATIXALASEVTGDVTVTTVNLPNDEMKGRIIGREGRNIRTLETLTGVDIIIDDTPEAVVISCFDPVRREIAKVALERLILDGRIHPARIEEIVTKVSKDTSQKIFEEGEKVLFDLGIHNIKQDAIRALGRLYFRTSYGQNVLNHSREVAVIAGMLAAEIGCNRDLTKRAALLHDIGKGIDSDSDLNHAEIGMDMARKMGEDPRIINAIGSHHNDIEPTCIEAVLVQIADAISAARPGARKETLDNYIKRLENLENIAKEFGGVLNAFAIQAGRELRIIVNNETVSDDQSRELAKGIAKKIENDLHYPGRIKLTIIRETRITEYAR

SEQ ID NO: 63799 - DNA, 561 bp, Unknown
  Obtained from environmental sample
  misc_feature (1)..(561): n is a, c, g, or t
atgacagaaaatatcatgtatttcaaaacagaagccgagaaaatatacattgacccgctgacggatatttacaacagacgctatttggacgaaaacctgaagcgcgtcatatccactctgtcccgctcaggcgccgcgctctgtttaatgatgatcgacatcgattatttcaaaaaatacaacgatgtttacggtcacgccaaaggcgatgactgccttaaaatggtcgcggcagcgctgaaaaaaagcgttacgagaatcgatgattttgtcgtgcgatacggcggcgaggaatttactgttgtcctgcctaataccggcgagaagggcgctcatttaattgcggacagaatgctcaataatatacggaaccttgaaatatcgcatgatataagcgatgcggcggattatgtcaccatttctattggagtggtcagcggcattgtgaaacacacgtatagcgcggattactggctaagtcaggcagacaaaatgctgtacaagtccaagcaggaagggcgcaatagatatacctttaagactgtggatgataattcgtaa

SEQ ID NO: 63800 - protein, 186 aa, Unknown
  Obtained from environmental sample
  DOMAIN (11)...(176): GGDEF domain
  misc_feature (1)..(186): Xaa is any amino acid
MTENIMYFKTEAEKIYIDPLTDIYNRRYLDENLKRVISTLSRSGAALCLMMIDIDYFKKYNDVYGHAKGDDCLKMVAAALKKSVTRIDDFVVRYGGEEFTVVLPNTGEKGAHLIADRMLNNIRNLEISHDISDAADYVTISIGVVSGIVKHTYSADYWLSQADKMLYKSKQEGRNRYTFKTVDDNS

SEQ ID NO: 63801 - DNA, 774 bp, Unknown
  Obtained from environmental sample
  misc_feature (1)..(774): n is a, c, g, or t
atgagaaacccaaggaatatgaaaccggaaaggacgcatacgaatttattaaatcccagcaaaaataagtacattctcagcaccgagagaaagaaaaaactggcggtttttcaaaaagccgccggttttaaatttaaaaaccttgatttattaaacctttcttttattcaccgttccgtttccaacgagacgggtaacaaattcaacaacgagcgcctcgaatttttaggcgattccattttaggcgccgtctgcgttacgcttctgtataaaaattttcccgaaaaaaacgaaggcgagcttgcgaagataaaagccgtcgtagtctccgaaaaaattctttccgagattgccaggagtttaaagatcgatgaaatgcttcttcttggcaagggcgaagatctttccggcggcagaaacaaaaaggcgattcttgccgacgctatggaagcggtaatcggcgcgcttttccttgattcaggttacgagaaagcgtttaaatttgtaagccgctgtatttctccggaaatcctgcgtgtagcgggggcgaattaccataaagattataagtcgcttttacaggaatattgtcagaggctttttcataattatcccgaataccggatgatcaagcgttccgggccggagcatgagcgcactttctggatagaagtgtgcgtgaacgagatggtttacgggccggggataggacagaataaaaaaactgcggagcaggaagcggcgaagatagcttgcgaggcgttgttgaattga

SEQ ID NO: 63802 - protein, 257 aa, Unknown
  Obtained from environmental sample
  DOMAIN (189)...(255): Double-stranded RNA binding motif
  misc_feature (1)..(257): Xaa is any amino acid
MRNPRNMKPERTHTNLLNPSKNKYILSTERKKKLAVFQKAAGFKFKNLDLLNLSFIHRSVSNETGNKFNNERLEFLGDSILGAVCVTLLYKNFPEKNEGELAKIKAVVVSEKILSEIARSLKIDEMLLLGKGEDLSGGRNKKAILADAMEAVIGALFLDSGYEKAFKFVSRCISPEILRVAGANYHKDYKSLLQEYCQRLFHNYPEYRMIKRSGPEHERTFWIEVCVNEMVYGPGIGQNKKTAEQEAAKIACEALLN

SEQ ID NO: 63803 - DNA, 501 bp, Unknown
  Obtained from environmental sample
  misc_feature (1)..(501): n is a, c, g, or t
atgtttaccataccgaacagcgttaccaccattgggaattacgctttttacggttgcagcggtcttaccggcacgcttaccataccgaacagcgttaccagcattgggcaagagactttcagaggttgcaccggccttaccggcgtaaccatagggaacagcgttgccaccattggggattccgctttttacggttgcagcggccttaccggcacgcttaccatacctaacagcgttaccaccattaggaattccgctttttccggttgcaccggtcttaccggcgtaaccatacccgacagcgttaccttcattgggaattccgcttttgtaaattgtaccagccttaccagcgtaacttttcaaggcacgattagttcaagcgattttggtattaatccattcctcggcgacttgcgcgacaaatatcttgcaggcggcataggcacgtataccacaaccacgccagtgggtaatagttcagtgtggacgaaacagtaa

SEQ ID NO: 63804 - protein, 166 aa, Unknown
  Obtained from environmental sample
  misc_feature (1)..(166): Xaa is any amino acid
MFTIPNSVTTIGNYAFYGCSGLTGTLTIPNSVTSIGQETFRGCTGLTGVTIGNSVATIGDSAFYGCSGLTGTLTIPNSVTTIRNSAFSGCTGLTGVTIPDSVTFIGNSAFVNCTSLTSVTFQGTISSSDFGINPFLGDLRDKYLAGGIGTYTTTTPVGNSSVWTKQ

SEQ ID NO: 63805 - DNA, 849 bp, Unknown
  Obtained from environmental sample
  misc_feature (1)..(849): n is a, c, g, or t
atgacgcgcttattttataacacggatgatttcgcgatctggctcaataacgcccccgccaataccgcggccacgccctatgaaatcatcctgtacggtttgaatatagaaaccgattttgccaaaggtgatgattccctgtacctattatataactccctgaaaggaaaatatgtaaaccttgacctgagcgcctgtaaagggaggagaataccggatacatcttcctcttccgccaacagcaggcctgacagggacaaaattgccgccattacactgccgtctgaactaaccgccatcggagattatgcttttgacggctgcaccgggcttagcagcgtaacgtttcaggaaacgattaccgaagacaatttttctcctgattcttttcccggtgacttgcgcgacaagtatcttgcaaacagcatagggacgtataccattgaagtttccggggtgtggaatcagagcgaacaggcatcagatggagcttttaccagcattgccgcgtttggcgcatggttagccgcccaaccggaaaataccgcggacaccgcgtatagagttaagttgaacgtgggcagcctcggctatcttggtgatgcaaattttggtaacgtattttttaacaatgattccaaatacgtatatattgacctttcaggcagtacaataaccagcattgaatggcatttgtctcattccaccagccttactagtgtaatcatccccaacagcgttaccagcattggggattatgcttttcaccattgcaccagccttaccgatataaacgttgattccagtaatgaaatctatagttctgagcagggagtactctacaactag

SEQ ID NO: 63806 - protein, 282 aa, Unknown
  Obtained from environmental sample
  misc_feature (1)..(282): Xaa is any amino acid
MTRLFYNTDDFAIWLNNAPANTAATPYEIILYGLNIETDFAKGDDSLYLLYNSLKGKYVNLDLSACKGRRIPDTSSSSANSRPDRDKIAAITLPSELTAIGDYAFDGCTGLSSVTFQETITEDNFSPDSFPGDLRDKYLANSIGTYTIEVSGVWNQSEQASDGAFTSIAAFGAWLAAQPENTADTAYRVKLNVGSLGYLGDANFGNVFFNNDSKYVYIDLSGSTITSIEWHLSHSTSLTSVIIPNSVTSIGDYAFHHCTSLTDINVDSSNEIYSSEQGVLYN

SEQ ID NO: 63807 - DNA, 765 bp, Unknown
  Obtained from environmental sample
  misc_feature (1)..(765): n is a, c, g, or t
atgaaaagcgattccgtaaacaagggcattgcccgcgcgcctcatcgcgctctttttaaggcgttaggcttcattgacgaagaatttaaaaggcctctgattggcatcgcctgcgcgaaaagcgaaatagttcccggccacatgcaccttgacaacattgctaaagcggccgcggacggtgtccgcatggccggcggagctcccgttatctttcctgtaatcggagtgtgcgacggtatagcgatgggtcacgaggggatgaaatattccctgcccacaagagagcttatcgccgactcggttgagtgtatggctattgctcacgcctttgacgctcttgtctttattcccaactgtgacaagatagtaccgggtatgatgatggcgtcagcgcggcttaaccttccctctgtttttgtttcaggcgggcccatgctcgccgggcgcaaagacggaaaaccccttacccttaccaccatgtttgaggctgtcggcgccgtagccgccggaaagatcagcgaggctgagcttgaggaacttgaaaacctttcctgtccgggctgcggttcatgcgcgggaatgtttacggcaaactcaatgaactgcgtaacagaagcgttagggatggccttgccgggcaacggcactatccccgccgtaatggcggaacgcgcgcgcctggcgaaaaaaaccggaatattgatcatggacgcgcttaaaaaaatttgcgtcccaaaaacatactcactcaggcggcgtttatga

SEQ ID NO: 63808 - protein, 254 aa, Unknown
  Obtained from environmental sample
  DOMAIN (31)...(253): Dehydratase family
  misc_feature (1)..(254): Xaa is any amino acid
MKSDSVNKGIARAPHRALFKALGFIDEEFKRPLIGIACAKSEIVPGHMHLDNIAKAAADGVRMAGGAPVIFPVIGVCDGIAMGHEGMKYSLPTRELIADSVECMAIAHAFDALVFIPNCDKIVPGMMMASARLNLPSVFVSGGPMLAGRKDGKPLTLTTMFEAVGAVAAGKISEAELEELENLSCPGCGSCAGMFTANSMNCVTEALGMALPGNGTIPAVMAERARLAKKTGILIMDALKKICVPKTYSLRRRL

SEQ ID NO: 63809 - DNA, 960 bp, Unknown
  Obtained from environmental sample
  misc_feature (1)..(960): n is a, c, g, or t
ttgcgtcccaaaaacatactcactcaggcggcgtttatgaacgccctggccctggacatggctctgggttgttccacaaataccgcgcttcatctcccggcaatagccggggaagcgggcgtcaagctcgatctggaactccttaacaaagtaagcgcggttacgcctaacctctgccgcctcgcgccggcgggaaaggacgcgattgaggatttgcacgcggccggcggaattcccgcggtgttaaaagaactttccaaaaagaaccttgtcgatctgaaagccgcgaccgtatacggctgtcttggcgacgctttggaaaaggccgttaaccgcaaccccggcgttataaggccgctggaaaacccttattccgcgacaggcgggcttgccgcgttaaagggaaacatcgcggaggatggctgcgttgtcaagcgcagcgcggtagcggattccatgctgaaacacgaagggccggcgagggtttttgattccgaagaagcggccttcgacgcaatcatgggaaagaagataaacgtgggggacgtagtagttatacgttacgaagggcccaggggcggccccggcatgaaggagatgctggcgcccaccgccgccctcgccggcatgggccttgacgacaaagtggcccttatcacggacgggcgtttctcgggcgcttccaagggcgcctccataggccatgtttcgccggaagcggcgacaggcgggactatcggcatcataaacgaaggcgacatcatcgccatcgacattgacgggctttccataaacgtgaagataagcgaagaagagatcgcgcggcggcggaaagactggaagcctctttcaaagacccatacgggctatcttgcgcgttatgccgcgcaagtcggatcagccgcttccggcgcggtctttaattctgagcgatgtgaatgtgaaggaaaaggaaaataa

SEQ ID NO: 63810 - protein, 319 aa, Unknown
  Obtained from environmental sample
  SIGNAL (1)...(17)
  DOMAIN (1)...(308): Dehydratase family
  misc_feature (1)..(319): Xaa is any amino acid
MRPKNILTQAAFMNALALDMALGCSTNTALHLPAIAGEAGVKLDLELLNKVSAVTPNLCRLAPAGKDAIEDLHAAGGIPAVLKELSKKNLVDLKAATVYGCLGDALEKAVNRNPGVIRPLENPYSATGGLAALKGNIAEDGCVVKRSAVADSMLKHEGPARVFDSEEAAFDAIMGKKINVGDVVVIRYEGPRGGPGMKEMLAPTAALAGMGLDDKVALITDGRFSGASKGASIGHVSPEAATGGTIGIINEGDIIAIDIDGLSINVKISEEEIARRRKDWKPLSKTHTGYLARYAAQVGSAASGAVFNSERCECEGKGK

SEQ ID NO: 63811 - DNA, 1836 bp, Unknown
  Obtained from environmental sample
  misc_feature (1)..(1836): n is a, c, g, or t
ttgcgcgttatgccgcgcaagtcggatcagccgcttccggcgcggtctttaattctgagcgatgtgaatgtgaaggaaaaggaaaataatatgcagtacaccggagcgcaaatattggttgagtccctgattgagcagggagtggatacgatcttcggctatcccggcggatcggtattaaacatttacgacgaactcttcaaacacagcggcaagattcgccatattcttgtaagccacgaacagcacgccgcccacgccgcggacggttacgcgcgttccacagggaaaaccggagtatgtttggcgacttcgggaccgggcgcgacgaaccttataaccggaattgccacggcttatatggattcaattccgttagttgcaattactggcaacgttcccacgggaattctgggcaaggacagttttcaggaggtggacattacaggcatctccatgcccatagtaaagcacaactggattgtaaaaaatgttgacgatcttgcggaagttatccgcgaggcgtttgagcttgcctcatccggccgccagggccccgtgctgattgacatacccaaagatattaccgcgctgaccgccgaatggaacccgggcgcgggcgcttccagaaaaaagaaaggcgatttaaaagactcggctctttcagcgcgggcgaaacgtcttgacgagcgcacaacaagggtaaggtttaccagcgaggaaatagaaaccgccgccaaaatgatcaaagaggcaaagcgtccccttctctacgcgggaggcggggtcatcagcgcgggcgcggaagaagagcttatctctcttgccgaaaaacttaacgcccctgtggcgttgagcctcatgggaataggggcgatcccgaaagatcacaggctctgcaccggccttgtgggaatgcacggcacagtggcgagcaacaaggcgacgcagaaaacggatctgctgattgcgattggcgcgcgcttttccgaccgcgttataagcaaggcggatatgttcgcgaagaccgcgaaagtaattcactttgacattgatcccgctgaaatcagcaagaacattgaaacccacgcctgggtgataggaaacttaaaagacacccttaaatgcttgttgtcaaaactccccgcgcgccttaaaaccgaatgggcaggtgaaattgaaaaatggaaaactcatctgcctcaaacttacacccacgaagttacatttgcaaaaaacgcgctccaccctcgctttataatagaagaaaccgcaaagtctctcggccctgaaacaatcgccgtgaccgacgttggccaacatcagatgtggacagcgcaatttttccccacggagaagccaagaacattcatcagttccggtggacttggaacgatgggcttcggtcttggggcggcctgcggcacgaaagtagcgaaccccaaaaagcccgtggtactttttacaggggacggcagtttcagaatgaactgcgctgagatggctaccctaaccaacaataaaatcccacttttaataatagtctttaacaacggagtcctgggcatggtaaggcaatggcaaagtttcttttacgaaagccgctactcagaaacgattcttggcgcataccccgacttcctaaaactctgcgaagcttatggcatcacaggcttccgcgcaaaaaacagggactccttcaaaaaagccctccacaatgctacagaagaactgtccgccggaagagccacactaatcgaagccgccatagaccgagatgaaaacgttttaccgatggtcccgtctggcaaaccgattgacgagcaaatactataa

SEQ ID NO: 63812 - protein, 611 aa, Unknown
  Obtained from environmental sample
  DOMAIN (241)...(400): Thiamine pyrophosphate enzyme, central domain
  misc_feature (1)..(611): Xaa is any amino acid
MRVMPRKSDQPLPARSLILSDVNVKEKENNMQYTGAQILVESLIEQGVDTIFGYPGGSVLNIYDELFKHSGKIRHILVSHEQHAAHAADGYARSTGKTGVCLATSGPGATNLITGIATAYMDSIPLVAITGNVPTGILGKDSFQEVDITGISMPIVKHNWIVKNVDDLAEVIREAFELASSGRQGPVLIDIPKDITALTAEWNPGAGASRKKKGDLKDSALSARAKRLDERTTRVRFTSEEIETAAKMIKEAKRPLLYAGGGVISAGAEEELISLAEKLNAPVALSLMGIGAIPKDHRLCTGLVGMHGTVASNKATQKTDLLIAIGARFSDRVISKADMFAKTAKVIHFDIDPAEISKNIETHAWVIGNLKDTLKCLLSKLPARLKTEWAGEIEKWKTHLPQTYTHEVTFAKNALHPRFIIEETAKSLGPETIAVTDVGQHQMWTAQFFPTEKPRTFISSGGLGTMGFGLGAACGTKVANPKKPVVLFTGDGSFRMNCAEMATLTNNKIPLLIIVFNNGVLGMVRQWQSFFYESRYSETILGAYPDFLKLCEAYGITGFRAKNRDSFKKALHNATEELSAGRATLIEAAIDRDENVLPMVPSGKPIDEQIL

SEQ ID NO: 63813 - DNA, 783 bp, Unknown
  Obtained from environmental sample
  misc_feature (1)..(783): n is a, c, g, or t
atggatttgacacctgaccatccgtttagccgattagaactcttggtaggcgccgattgccgcaaagcgcttaacaaggccggcgtcgctctctttggggtgggcggcgtgggtagttggtgcgccgaggggttgatacgctccggggtcgggaaattgatgatagttgattccgatgtggtcaatccgtctaacattaatagacagcttccggcgacttcaattactgtgggtaggcctaaggtagaggtcttgggcgaacgtttgagggagataaatccggacgcggagattacggcgttgcagagggcttacggctgggaggttcgggatgagtttgatttgggcgggtacgattacgttatagacgccatagacagtttgtcaagtaaggtggagctgataatcaacgctcacgccgccggggctacgcttttttcggcactgggggcggcatgtaaggtggatgccacgcgggtgcgggttagttctatctggaagtcggataggtgcaagctggggaggtttgttcgcaaaaggctccggaagcgcggatttgagggggattttctttgcgtttggagcgatgaatggacttttattaatgatgattttgttaataatgatgatgacgataatgttgtcggcggtgttgatacggatgataatgtcggtaataataacgttgacgcaacggttaacatgccgactaacaggacgataaacggctctttggtgtgcgtgaccggcgtatttgggtttatattatccggcctgtcgtaa

SEQ ID NO: 63814 - protein, 260 aa, Unknown
  Obtained from environmental sample
  DOMAIN (25)...(160): ThiF family
  misc_feature (1)..(260): Xaa is any amino acid
MDLTPDHPFSRLELLVGADCRKALNKAGVALFGVGGVGSWCAEGLIRSGVGKLMIVDSDVVNPSNINRQLPATSITVGRPKVEVLGERLREINPDAEITALQRAYGWEVRDEFDLGGYDYVIDAIDSLSSKVELIINAHAAGATLFSALGAACKVDATRVRVSSIWKSDRCKLGRFVRKRLRKRGFEGDFLCVWSDEWTFINDDFVNNDDDDNVVGGVDTDDNVGNNNVDATVNMPTNRTINGSLVCVTGVFGFILSGLS

SEQ ID NO: 63815 - DNA, 711 bp, Unknown
  Obtained from environmental sample
  misc_feature (1)..(711): n is a, c, g, or t
atgggagcaaacatgaaaaaaatcgcattgtttgtagaaggtcagacggatcagatttttacggaaaaattgattcgagaaattatcggtaaacacaaattttcgataactaagtataaatttttgggtggaaagaatagtattagaaaaccattgttcctagccgcacaaaacgcggacgcggatactgaatattattttgtaatttatgattgttgcggagatgatagagtccaatctgatattagtgaaagacttgattcattacgggaggaatctttttcgattgtaataggaatacgcgatgtatatccagaaacggacattgcaaaacttagacgttacttgtactatgctatttatccaaattccgatgtttcggtaaaaattattcttgcggttaatgagatcgaggcttggtttttggcggatgaaacgcattatcaaagaatatctaacgatatatcgcttgagatagcaaacaaaattaccggtatagatgttagtactgatagcactgaaaacattccacatccatcagatgtacttaaacagatatatataaaaggtggaacaacatatgataaatcaaaagaaaaggtacaacgaactgtggatgccattagttatgaaaatttgtatataaatgtccgtaatcgcaacaatagtctaaacgagttactaacttgcttagatgggcttataccatga

SEQ ID NO: 63816 - protein, 236 aa, Unknown
  Obtained from environmental sample
  misc_feature (1)..(236): Xaa is any amino acid
MGANMKKIALFVEGQTDQIFTEKLIREIIGKHKFSITKYKFLGGKNSIRKPLFLAAQNADADTEYYFVIYDCCGDDRVQSDISERLDSLREESFSIVIGIRDVYPETDIAKLRRYLYYAIYPNSDVSVKIILAVNEIEAWFLADETHYQRISNDISLEIANKITGIDVSTDSTENIPHPSDVLKQIYIKGGTTYDKSKEKVQRTVDAISYENLYINVRNRNNSLNELLTCLDGLIP

SEQ ID NO: 63817 - DNA, 1164 bp, Unknown
  Obtained from environmental sample
  misc_feature (1)..(1164): n is a, c, g, or t
atgatactaaagaaattcaaatattctgaatttacggataagccaaacgcatggtttcttgacggtttagatctagagaacattaatctacttgtcggaaaaaacgcgaccggcaaaaccaacacgcttttgaggattctttggcttggcagtatgcttgccggtaaacaaccgcaattgtacgaatctggtaattatgatgttgaatttactcataacaataatatttatcagtataaacttaatttatcatcatacaaagttgaatacgaaaagttggtcatcaaaaatgagcaaaaaaaagatgaacaacaatttgaaagaataagcgatagaattggggaaatattcgctgatgatttaggtcatgaaattaaatttaaattatcaccaaatcaacttgttgttacttcaaaaagggacgcgctacagcatccatttttggaagagttggttaaatgggctgaaggattgagaatatattactttggttcagatatgcgtaaaaaggagttacgagttgtaaacgatataaataacataaaagttgatcctagtgatccgaattctgcaatgatattatattacaaaggtgaacaagagtttcctgagactttccccaaacttattattgatgctatggaaagtatcggttacgaattaaatagcataaaagttaatcctctttctagtcatttattgcctacagatgttgttggtggaacagggttcgtattgtgtgttcgtgagaaaaatagcagtactgatgtaccacaacattttatatctcaaggtatgtttagagccttgtctcttattattcaaatcacatacaacacattaaaaaaattatcaacaaccattcttattgatgacattggagagggacttgactttgatcgctctacaaaactcatatctctgctaattgacttagccgaaaaagataataatattcaactcatcatgtccactaatgatcgttacgttatgaacaatgtcccatttaaatattggcaactaattgaccgtaacggcggtaagtgcagtatctataattatcataactcaaaagagatatttgacgaattcaagtacacaggcttgaacaattttgatttccttgcaaccgattttattcatgcagaatgggagcaaacatga

SEQ ID NO: 63818 - protein, 387 aa, Unknown
  Obtained from environmental sample
  misc_feature (1)..(387): Xaa is any amino acid
MILKKFKYSEFTDKPNAWFLDGLDLENINLLVGKNATGKTNTLLRILWLGSMLAGKQPQLYESGNYDVEFTHNNNIYQYKLNLSSYKVEYEKLVIKNEQKKDEQQFERISDRIGEIFADDLGHEIKFKLSPNQLVVTSKRDALQHPFLEELVKWAEGLRIYYFGSDMRKKELRVVNDINNIKVDPSDPNSAMILYYKGEQEFPETFPKLIIDAMESIGYELNSIKVNPLSSHLLPTDVVGGTGFVLCVREKNSSTDVPQHFISQGMFRALSLIIQITYNTLKKLSTTILIDDIGEGLDFDRSTKLISLLIDLAEKDNNIQLIMSTNDRYVMNNVPFKYWQLIDRNGGKCSIYNYHNSKEIFDEFKYTGLNNFDFLATDFIHAEWEQT

SEQ ID NO: 63819 - DNA, 447 bp, Unknown
  Obtained from environmental sample
  misc_feature (1)..(447): n is a, c, g, or t
gtgataaagggcaggttaatatcggtcgtttgcatggcggaaagctggatttttgcatcttccgaggcttgcctcaaccgctgcagggccatcctgtctttgctcaggtcgatgcccgtatcgtttttgaattcgccgataagccagtcaaggattttgaggtcaaaatcgtcgccgcccaggtgggtgtcgccgttagttgattttacctcgaaaacgccgtcgccaagttccagaatggatatgtcgaaagtgccgccgcccaaatcatacacggcgatagttttgtcttttttctggtctttgttgaagccgaaagcgagggatgccgctgtcggctcgttgatgatcctctccacctcaagccccgcgatcttgcccgcgtcttttgtggcctggcgctgggcgtcgttgaagtatgccggcacggtgattaccgccttgtga

SEQ ID NO: 63820 - protein, 148 aa, Unknown
  Obtained from environmental sample
  misc_feature (1)..(148): Xaa is any amino acid
MIKGRLISVVCMAESWIFASSEACLNRCRAILSLLRSMPVSFLNSPISQSRILRSKSSPPRWVSPLVDFTSKTPSPSSRMDMSKVPPPKSYTAIVLSFFWSLLKPKARDAAVGSLMILSTSSPAILPASFVAWRWASLKYAGTVITAL

SEQ ID NO: 63821 - DNA, 1530 bp, Unknown
  Obtained from environmental sample
  misc_feature (1)..(1530): n is a, c, g, or t
gtgccggcatacttcaacgacgcccagcgccaggccacaaaagacgcgggcaagatcgcggggcttgaggtggagaggatcatcaacgagccgacagcggcatccctcgctttcggcttcaacaaagaccagaaaaaagacaaaactatcgccgtgtatgatttgggcggcggcactttcgacatatccattctggaacttggcgacggcgttttcgaggtaaaatcaactaacggcgacacccacctgggcggcgacgattttgacctcaaaatccttgactggcttatcggcgaattcaaaaacgatacgggcatcgacctgagcaaagacaggatggccctgcagcggttgaggcaagcctcggaagatgcaaaaatccagctttccgccatgcaaacgaccgatattaacctgccctttatcaccgcggatcagagcggccccaaacatttgcaaaaatcccttacaagggcgaaattcgagcagatggtttccgacctgcttgagcgatccaaagaaccctgcatcaaggcgctgagggatgcaaacttaaccgccgaacagatcgacgaagtgatccttgtcggcggttctacccgcatccccgcggtacagcagcttgtcaaagacctgttcaaaaaagaacccaacaaaggcgtaaaccccgacgaggcggtcgcggtcggcgcggcaatccagggcggcatcctgggcggtgatgtcaaagacgtgcttctgttagacgtcacgccgctttcgctcggcatagaaaccctgggcggcgttatgacaaaactcataccgcgcaacacgactattcccacccgcaagagccagattttctccaccgccgcagacggacaaactgccgtctccattcaagtcctgcagggcgagcgcgaaatggcgaatcaaaaccgcgtgcttggccgcttcgatcttgtgggcatacctcccgccccgcgcggagttccgcaaatcgaagtaactttcgacattgatgcaaatggtattgttcatgtcagcgcgaaagatttgggaacaggcaaagagcaaaaaatccgcatcgaaagttcaagcggtttaagcgactcggatattgaccgcatggtaaaagaagcggaactccacgccgaggaagataaaaaagaacgcgaaaaagccgaagtgcgcaacgaagctgactcgatgatctacgccactgagaaaaacataaaagacctgggcgacaaagtgagcgccgcggataaatccaaaaccgaagaagccatcgctgatttacgtaaagctcttgatagcggcaatattcagtcaatcaaagacaaaactgaagcgcttaaacaggcgtcttacaaaatcgccgaggaaatttataaacagcaaggcgcctcaggacagcagggcggcggtcagggtgcaggacccggcggttttgatcccaacatgggcggaggcggcggaagccagagcggcgataataccaaaggcgccgaagacgcggattatgaagtggtagacgataaatag

SEQ ID NO: 63822 - protein, 509 aa, Unknown
  Obtained from environmental sample
  DOMAIN (2)...(460): Hsp70 protein
  misc_feature (1)..(509): Xaa is any amino acid
MPAYFNDAQRQATKDAGKIAGLEVERIINEPTAASLAFGFNKDQKKDKTIAVYDLGGGTFDISILELGDGVFEVKSTNGDTHLGGDDFDLKILDWLIGEFKNDTGIDLSKDRMALQRLRQASEDAKIQLSAMQTTDINLPFITADQSGPKHLQKSLTRAKFEQMVSDLLERSKEPCIKALRDANLTAEQIDEVILVGGSTRIPAVQQLVKDLFKKEPNKGVNPDEAVAVGAAIQGGILGGDVKDVLLLDVTPLSLGIETLGGVMTKLIPRNTTIPTRKSQIFSTAADGQTAVSIQVLQGEREMANQNRVLGRFDLVGIPPAPRGVPQIEVTFDIDANGIVHVSAKDLGTGKEQKIRIESSSGLSDSDIDRMVKEAELHAEEDKKEREKAEVRNEADSMIYATEKNIKDLGDKVSAADKSKTEEAIADLRKALDSGNIQSIKDKTEALKQASYKIAEEIYKQQGASGQQGGGQGAGPGGFDPNMGGGGGSQSGDNTKGAEDADYEVVDDK

SEQ ID NO: 63823 - DNA, 447 bp, Unknown
  Obtained from environmental sample
  misc_feature (1)..(447): n is a, c, g, or t
atggagacggcagtttgtccgtctgcggcggtggagaaaatctggctcttgcgggtgggaatagtcgtgttgcgcggtatgagttttgtcataacgccgcccagggtttctatgccgagcgaaagcggcgtgacgtctaacagaagcacgtctttgacatcaccgcccaggatgccgccctggattgccgcgccgaccgcgaccgcctcgtcggggtttacgcctttgttgggttcttttttgaacaggtctttgacaagctgctgtaccgcggggatgcgggtagaaccgccgacaaggatcacttcgtcgatctgttcggcggttaagtttgcatccctcagcgccttgatgcagggttctttggatcgctcaagcaggtcggaaaccatctgctcgaatttcgcccttgtaagggatttttgcaaatgtttggggccgctctga

SEQ ID NO: 63824 - protein, 148 aa, Unknown
  Obtained from environmental sample
  misc_feature (1)..(148): Xaa is any amino acid
METAVCPSAAVEKIWLLRVGIVVLRGMSFVITPPRVSMPSESGVTSNRSTSLTSPPRMPPWIAAPTATASSGFTPLLGSFLNRSLTSCCTAGMRVEPPTRITSSICSAVKFASLSALMQGSLDRSSRSETICSNFALVRDFCKCLGPL

SEQ ID NO: 63825 - DNA, 318 bp, Unknown
  Obtained from environmental sample
  misc_feature (1)..(318): n is a, c, g, or t
ttgctctttgcctgttcccaaatctttcgcgctgacatgaacaataccatttgcatcaatgtcgaaagttacttcgatttgcggaactccgcgcggggcgggaggtatgcccacaagatcgaagcggccaagcacgcggttttgattcgccatttcgcgctcgccctgcaggacttgaatggagacggcagtttgtccgtctgcggcggtggagaaaatctggctcttgcgggtgggaatagtcgtgttgcgcggtatgagttttgtcataacgccgcccagggtttctatgccgagcgaaagcggcgtgacgtctaa

SEQ ID NO: 63826 - protein, 105 aa, Unknown
  Obtained from environmental sample
  misc_feature (1)..(105): Xaa is any amino acid
MLFACSQIFRADMNNTICINVESYFDLRNSARGGRYAHKIEAAKHAVLIRHFALALQDLNGDGSLSVCGGGENLALAGGNSRVARYEFCHNAAQGFYAERKRRDV

SEQ ID NO: 63827 - DNA, 1116 bp, Unknown
  Obtained from environmental sample
  misc_feature (1)..(1116): n is a, c, g, or t
atggctaagcgggattattacgaagttcttgggatacagaaaaacgccactaaagatgaaataaagaaggcgtatcgtaaactcgctgttcagtaccatcctgataaaaatcccggcgacaaacaggctgaggaaaaatttaaagaagcgaccgaagcttacgagattcttgccgatgatcaaaaaaaagccgcttatgatcagtatggatttgcgggcatcgagggcatgggtcaaagccacgactggagtaatttccgcggctttgaagatattttcggcgacggcggctttggcagcatattcgaaagttttttcggcggcgggtttcgcaggggcggctcggcgggcgtaaggcagggagcaaacctccgctacgatatcgaaatcccgtttaaggacgcggtttacggcacaaaagttgaaattcagtattcacataacgaaccttgcgaaacctgcaaaggttccggttcggcggacggggcaagcaagaaaacctgcccaacctgccgcggctctggacagatacggcacagtcagggatttttctcagtagccgccacctgccatacctgtcacggcgaaggatacataattgaaacgccgtgcaaagactgcggaggatcgggaacgcagaaaaagcggcaaaagataatggttaccattccttccggcgtagaaaacggcaagcgggtagtaattcccaaacagggagacgcaggtcccaacggaggtcagccgggcgacttgtatgtgttcataagagttaagcgccatgaatactttgagcggcagggatacgatctttactgcgccgttccgatttctgtcagtcaggccgctcttggcgcggaaattcacgtaacgtctcttgataacaagaatataaaagtaaaagtgcccgccggtattcaaagcgggaaactgctccgtattcgcggcgagggagtcccctcaggcggaacgcacggcgacttgtacatcaaagttattgtgcaaataccggaaagactttcccgccgcggaaaagaactgctggaagaacttgcaaaagccgaagggcagaatgacagcccgcatccgattccgctttctcaacttgccgagaattaa

SEQ ID NO: 63828 - protein, 371 aa, Unknown
  Obtained from environmental sample
  DOMAIN (138)...(218): DnaJ central domain (4 repeats)
  misc_feature (1)..(371): Xaa is any amino acid
MAKRDYYEVLGIQKNATKDEIKKAYRKLAVQYHPDKNPGDKQAEEKFKEATEAYEILADDQKKAAYDQYGFAGIEGMGQSHDWSNFRGFEDIFGDGGFGSIFESFFGGGFRRGGSAGVRQGANLRYDIEIPFKDAVYGTKVEIQYSHNEPCETCKGSGSADGASKKTCPTCRGSGQIRHSQGFFSVAATCHTCHGEGYIIETPCKDCGGSGTQKKRQKIMVTIPSGVENGKRVVIPKQGDAGPNGGQPGDLYVFIRVKRHEYFERQGYDLYCAVPISVSQAALGAEIHVTSLDNKNIKVKVPAGIQSGKLLRIRGEGVPSGGTHGDLYIKVIVQIPERLSRRGKELLEELAKAEGQNDSPHPIPLSQLAEN

SEQ ID NO: 63829 - DNA, 801 bp, Unknown
  Obtained from environmental sample
  misc_feature (1)..(801): n is a, c, g, or t
ttgaagtacggtttcatggggcccaactacggcacggtgagcgcctgcgcttcgtcgtcacacgcgcttatcgacgccatgaacctcatcagattgggcaaggccgacgtggcgatagccggcggttcggaggcgccgataaacgtcacgggactcggcgggttcggcgcgatgcgggcgctgtcaaccagaaacgacgatccggccgcggcttcgcgtccgtttgacaaagaccgcgacggtttcgtcctcggggaggggtcggcggcgctggtagtggagtcgctgagccacgctaaggcgaggggggcgaggatatacgcggagttggccggcgggggaatgaccgccgacgctttccactcgaccctgcctcatccggagggaatcgccgttgaaaaggcaatggccttcgcgatggaggacgccggagtgaatccggaggagatcggctatatcaatctccacgccacatcaacgccggcgggggacgggccggagattacggccgtcggccggctgtttaagaattcgctaaaatcactgcacgtaagcgggacaaagtcaatgaccggacacttgctgggcggcgtgggggcgctggaggcggcgattaccgtcctgtcaatacacgagggggtgataccgcccacaatcaatacggtgaatgtcgatccggacttggatatcggcgttaacctaacattaggtaacgccgttaataagaaaatcgatgcggcgatgacgaataattttgggtttggggggcaaaacgcgagcttagtgttcaggcgggtttga

SEQ ID NO: 63830 - protein, 266 aa, Unknown
  Obtained from environmental sample
  SIGNAL (1)...(22)
  DOMAIN (1)...(99): Beta-ketoacyl synthase, N-terminal domain
  misc_feature (1)..(266): Xaa is any amino acid
MKYGFMGPNYGTVSACASSSHALIDAMNLIRLGKADVAIAGGSEAPINVTGLGGFGAMRALSTRNDDPAAASRPFDKDRDGFVLGEGSAALVVESLSHAKARGARIYAELAGGGMTADAFHSTLPHPEGIAVEKAMAFAMEDAGVNPEEIGYINLHATSTPAGDGPEITAVGRLFKNSLKSLHVSGTKSMTGHLLGGVGALEAAITVLSIHEGVIPPTINTVNVDPDLDIGVNLTLGNAVNKKIDAAMTNNFGFGGQNASLVFRRV

SEQ ID NO: 63831 - DNA, 1107 bp, Unknown
  Obtained from environmental sample
  misc_feature (1)..(1107): n is a, c, g, or t
atgaaaaaaatattactgacaggcggcggcacagccggccacgtcacgccgaatctggctcttatcccaagccttaaatcagccggctttgacatccgctacgtaggcacccgcgccggtatggaacgcggattggtcgaaaaggccggcttgccctatcactgcattagcgccggaaagctgcggcgttatttcgattttaagaatttcacggacgctttcaggatagcgatcggattcatccagtcaatcatcctgctgataaaactccgtcccgccatcgttttcagcaagggcggtttcgtctcctgtcccttggtttgggcggcgtggctgtgccgtgtgcccgccgtcattcatgagtcggacattacgcccgggctggccaacaaactatcaatgccgtttgtcaagaaaatctgtttcagctttccggagacggaggcgcgcctgcccgcctcaaagcgggttatgactggtttgccggtgcgctccgagctgttcggcggcgacgcggcgactgggcgggagctttgcgggtttgaggaaaaggacggcaagccggttataatggtaataggcgggagtttgggggcaagcgcggtaaacgacgccgtcaggggggggctcgacaagctgctcgcagatttcaacgtctgccacatctgcggcaaaggccacaaagcgcccggggggaggccggggtactgccagtttgagtacgtcggggaggaactgccggatctgttcgcgatggcggacgtcgtaatatcccgggcgggcgccacgaccttgtttgaactgctggcgttatgcaagcccgccctgctgataccgcttggaacggcggccagcagaggggaccagatactgaacgcggagtcgtttgagaagctggggtactgcaaggtactaccgcaggacgggctaaccggcgcaattctcgccgctcaggtcaagcggttcttcgatgaggataaggatgcgtgcatcgacgccatgaagcgggcggagtcggtcaaagcggttgataaggtcatggatgttattaagcagacaatatctcgccctcttcctcctgactccacgggatcaactcgctcttaa

SEQ ID NO: 63832 - protein, 368 aa, Unknown
  Obtained from environmental sample
  SIGNAL (1)...(20)
  DOMAIN (189)...(346): Glycosyltransferase family 28 C-terminal domain
  misc_feature (1)..(368): Xaa is any amino acid
MKKILLTGGGTAGHVTPNLALIPSLKSAGFDIRYVGTRAGMERGLVEKAGLPYHCISAGKLRRYFDFKNFTDAFRIAIGFIQSIILLIKLRPAIVFSKGGFVSCPLVWAAWLCRVPAVIHESDITPGLANKLSMPFVKKICFSFPETEARLPASKRVMTGLPVRSELFGGDAATGRELCGFEEKDGKPVIMVIGGSLGASAVNDAVRGGLDKLLADFNVCHICGKGHKAPGGRPGYCQFEYVGEELPDLFAMADVVISRAGATTLFELLALCKPALLIPLGTAASRGDQILNAESFEKLGYCKVLPQDGLTGAILAAQVKRFFDEDKDACIDAMKRAESVKAVDKVMDVIKQTISRPLPPDSTGSTRS

SEQ ID NO: 63833 - DNA, 750 bp, Unknown
  Obtained from environmental sample
  misc_feature (1)..(750): n is a, c, g, or t
atgaagccgtttccgttggtaaaaatatttctatttttcctcggactttttttctccgtacccgccgtcttacaggcctcagggccgcgttatgcgctggtaataggcaacggcggctaccgccatgtggacagccttccgaatacggtaaacgacgcgtccgacattgcaaaaaaactttcggaactgggttattcggttgaagtcctgttcgacagcgaccttgccggaatgagcagggcggtgagcgcgtggatacggcagctctccacggatcgggcaagcgaaggtttcttctggtacgccggccacggaatacaggccgccggggaaaattaccttttgcccgttgatataaacgcggaagacgaggtgggcattgtctacggctcctatccgctgggacggattctcctctcgctggaacagaccgccaggaacaaactcaatgtagtggtgctggacgcgtgccgggacaaccctttcaaaaatcttccgggcggaagccgcgggctttcccgcggtttcactaccgttgagcacccgccccaggatattttcgtcatgttttccacttctccgggcacaaccgccgcggacggcggcagcggtcgaaacagcccctttgccgaggcttttctcaaatacatggactccgacgagatccttccggtaatggccggactcgtaacccgcgaaactatgcggctaacggacggcaagcagcggccttatcaaacggcagcatag

SEQ ID NO: 63834 - protein, 249 aa, Unknown
  Obtained from environmental sample
  SIGNAL (1)...(26)
  DOMAIN (30)...(249): Caspase domain
  misc_feature (1)..(249): Xaa is any amino acid
MKPFPLVKIFLFFLGLFFSVPAVLQASGPRYALVIGNGGYRHVDSLPNTVNDASDIAKKLSELGYSVEVLFDSDLAGMSRAVSAWIRQLSTDRASEGFFWYAGHGIQAAGENYLLPVDINAEDEVGIVYGSYPLGRILLSLEQTARNKLNVVVLDACRDNPFKNLPGGSRGLSRGFTTVEHPPQDIFVMFSTSPGTTAADGGSGRNSPFAEAFLKYMDSDEILPVMAGLVTRETMRLTDGKQRPYQTAA

SEQ ID NO: 63835 - DNA, 945 bp, Unknown
  Obtained from environmental sample
  misc_feature (1)..(945): n is a, c, g, or t
gtgagcgaactctactattcgctctcctcaggaactcctgtgcgcgagccgcccgcgggagccggcgcgtcttcgggacgcaacccgccttccgttaccgtagcttctccggctatggcgctcatccccgccggaacttttactatgggcagctccgaattggagcttgaccgggaatcgtttcgggaagtcagacaccaggtacagataagcgcgttttatcttgccccaaaagaattgactgtcggcgagttccgccgctttgtcgaagacacaaactatatcaccaccgccgaatccgacggcggagcctttgcttatgatgaagcgaagggcgaatcggttttccgcgccgacgtcaactggcataaccccggcttcaggcagggggatgatcacccggtgatttgcgtaagctggttcgacgctgtgcagtactgcaactggctttccgtcaaagaaagactcaaacccgcgtataccatttccggccagaccgtaaactgggacagaaacgcgaacggttaccgcctgcccaccgacgctgaatgggagtacgcctgccgcgccggaacctcaacgcctttttctacaggcgagcgtatttccacgagtcaggcaaattacaacggcaacttcccttatagcattggcaacaagggcctgtttcgcaaaattaccgtaagctcaggctcattctctcccaacgcctggggcatttacgatatgcacggtaatgtctgggagtggtgctgggattattacagtctcccaaacgcaagtccggtaacagatccaaccgggcctgcttccggcgcgcacaggataaaccgcgggggaggctggacatcccccgccaaatcaatgcgttctgccctgcgcggaagcgatctccccgaaaccgcgggaaataatttgggttttagactggcgaggaacaaatag

SEQ ID NO: 63836 - protein, 314 aa, Unknown
  Obtained from environmental sample
  DOMAIN (35)...(312): Domain of unknown function (DUF323)
  misc_feature (1)..(314): Xaa is any amino acid
MSELYYSLSSGTPVREPPAGAGASSGRNPPSVTVASPAMALIPAGTFTMGSSELELDRESFREVRHQVQISAFYLAPKELTVGEFRRFVEDTNYITTAESDGGAFAYDEAKGESVFRADVNWHNPGFRQGDDHPVICVSWFDAVQYCNWLSVKERLKPAYTISGQTVNWDRNANGYRLPTDAEWEYACRAGTSTPFSTGERISTSQANYNGNFPYSIGNKGLFRKITVSSGSFSPNAWGIYDMHGNVWEWCWDYYSLPNASPVTDPTGPASGAHRINRGGGWTSPAKSMRSALRGSDLPETAGNNLGFRLARNK

SEQ ID NO: 63837 - DNA, 327 bp, Unknown
  Obtained from environmental sample
  misc_feature (1)..(327): n is a, c, g, or t
atggatattaatataccatatatagataaaatagtttctataattgtctctttggcttcacctgatcagattatactatttggttcttatgcgcggggagataatactgaaaaaagtgatattgatttgcttattataaaaaaaagtctgaaaaaggggcgtgaaatcagtggtttgatttataaagcttttttagaaaatggaatcggggttcctgttgatttacttactattgattataacaggtatatcgaattaaataatgaaataggatatatatataaaactataaaagaagaaggaaaggttatctatggctcgttatga

SEQ ID NO: 63838 - protein, 108 aa, Unknown
  Obtained from environmental sample
  DOMAIN (4)...(104): Nucleotidyltransferase domain
  misc_feature (1)..(108): Xaa is any amino acid
MDINIPYIDKIVSIIVSLASPDQIILFGSYARGDNTEKSDIDLLIIKKSLKKGREISGLIYKAFLENGIGVPVDLLTIDYNRYIELNNEIGYIYKTIKEEGKVIYGSL

SEQ ID NO: 63839 - DNA, 387 bp, Unknown
  Obtained from environmental sample
  misc_feature (1)..(387): n is a, c, g, or t
atggctcgttatgaagaatggattaaacgggcaaaaagcagtcttgaactggcacaggcagaaattatccactatatttattatgaagatttatgttatcaatctcaacaagctgttgaaaaagcattgaaagggcttttaatatattatggtattgaaccagagtttactcataatattgaagtattattaaatgaaattaaaaagtttacagatattccggaaaatattaaggaagcatcattgctaactagttatgctgtccaaacaagatatcccggtgaatatgatgaaattacaaaaaaggaatataaaaaaagtataaaaatagctaaagattgcttacattggattgaagataaaattaaagaaaaaaagaaatcataa

SEQ ID NO: 63840 - protein, 128 aa, Unknown
  Obtained from environmental sample
  DOMAIN (4)...(121): HEPN domain
  misc_feature (1)..(128): Xaa is any amino acid
MARYEEWIKRAKSSLELAQAEIIHYIYYEDLCYQSQQAVEKALKGLLIYYGIEPEFTHNIEVLLNEIKKFTDIPENIKEASLLTSYAVQTRYPGEYDEITKKEYKKSIKIAKDCLHWIEDKIKEKKKS

SEQ ID NO: 63841 - DNA, 594 bp, Unknown
  Obtained from environmental sample
  misc_feature (1)..(594): n is a, c, g, or t
ttgttaaacggatttatgccgtgcggtcctctgcaatctatgcaaatatacgcgctttatacggggagcgccgtcgccggagcgttttctatgtttctgttcgcgctgggaacgttgccgcttatgtttgcgttgggcgctgcatcgtcgatgttaagcaaaacgtttagggaaaccgccataaaaatcggtgcgtgtctaattgtaattttgggactgattatgctttccaacggattaagtttgtcgggtataacgttcgatttcggctttaaggcaaacgtagcaaacgacggcagttatgcagtcgaagacggcgtacaagtcgttcgttcgcatcttgaaggcggcgcgtatccggctatagtggtaaaagaaaatatgcctgtcaggtggataattcaagcggaaaagaaaaatataaacggctgcaacgaccggatatttattaacgaatacggcatagaacacacttttgaagcgggcgagaatatcatcgaatttacgcctgtacggcgcggcaggtttgtatattcctgctggatgggaatgattaaaaacacgattaccgtagtcgccgaanaagaaggttaa

SEQ ID NO: 63842 - protein, 197 aa, Unknown
  Obtained from environmental sample
  misc_feature (1)..(197): Xaa is any amino acid
MLNGFMPCGPLQSMQIYALYTGSAVAGAFSMFLFALGTLPLMFALGAASSMLSKTFRETAIKIGACLIVILGLIMLSNGLSLSGITFDFGFKANVANDGSYAVEDGVQVVRSHLEGGAYPAIVVKENMPVRWIIQAEKKNINGCNDRIFINEYGIEHTFEAGENIIEFTPVRRGRFVYSCWMGMIKNTITVVAEXEG

SEQ ID NO: 63843 - DNA, 2187 bp, Unknown
  Obtained from environmental sample
  misc_feature (1)..(2187): n is a, c, g, or t
atgaataaagaaaccataaccgtaggcggaatgcattgcgcggcctgttccgcgcgggtggaaaaggcgctgcgaaaactggagggtattgaaagcgcgacggtgaaccttgccacggaaaaggcaacggtagtttacaatgccagagccctgcgcctttcggcaataaaggaagccatcaccaaagcgggctacgaagcccgggaagtttccgccgatagggtggatgaggacaaactccgcaaggaaaaggaaatcaaaatcctttggacaaagtttatcgtggccgcttctctgggacttcccctgctctatatcgccatggcccccatgattacatgggtcacccttcctttccccagagccctggccccgatgcgttttcctcttacgtacgccctggtgcaactggcgctggttattcctattttaatcgcgggcaaccggttttatacccttggtttcaagaatcttctgcgccgcagtccgaacatggattcgcttatcgccatcgggaccacggcggcggtagtttacagcgtgtataatatgtggcgtatcacccaaggggatcacatggccgtggatgccctttactttgaaaccgccggggtgattatcgccctgattctactgggtaagacccttgaggcggtgtccaaaggccgcacaagcgaggcgataaaaaagctcatgggtcttgcgccaaagacggccattattatcgaaaatggggaagaaaaggaaatcccgattgacgaggtacttgtcggggacattgtggtggtaaagccgggggcgaaaatcccggtggacggccttgtgaccgagggccacagcgcggttgacgagtctatgctcaccggcgagagtatgccggttgacaagaaatccggggatcgggtttaccgggcaaccatcaacagtaacggtcttattcgtgttaaggcggaaaaggttgggaaccagaccgcgctggtccagatcatcaaactggttgaggacccccagggttcaaaggagcccatctcgcaaatggtggatatcgtgtcaggttactttgtaccggttgtctgcgtcattgcgcttgttgccggcctcttgtggttcatcgcggcgtcttcgggctttgtctgcttacccatgggaaaatccgcctcggaatttgccctaaccatttttatttccctgctggtccccacatgcccctgcgctctgggactttcgactcctactgccattatggtggcaacccgcaagggagcggaaaacggcatcctgatcaagagcggcgaagctctggaaacagcccacaagctggacgccatcgttctggacaaaaccggaacccttaccgagggcaagccggaagtcgccgatgtggcgacagccaaaggggtgggagaggagtatcttttgcggatgatcgcttccgctgaaaaaggctcggaacatccgttgggacaggccattgtgcgggcggcgcacagccggggactggagcttttcagcccggaagacttcagggccataaccggccagggcatcgcggcgcgcatcaacggcatcgctgtgctggcgggcaacaaaaagctcatggacgagcggggcatttccctgggagagcttgaagccgatgcggatcgtctggctgaagaaggcaagactccgatgtatgtggcccttgacggaaaaatcgccgggatcgcggctgtggcggatgtcctgaaaccgagcagccgggcggctgtcgccagactgcgcggcatgggcctggaagtggccatgatcaccggcgacaaccaaaaaaccgccgccgccatcgccaaaagcgtggggattgaccgggtgctggcggaagtgctgccgggggacaaggccgccgcagtgaagcagttgcaggacgaaggccgcacggtggccatggtgggggacggcatcaacgatgctcccgccctggcgcaggcggacatcggcattgccgtcggcagcggcgcggacatcgccatggaaagcgcggacatcgtgctcatgcgctccgacttgacggaggcggccacgaccattgacctgagcaagcggacgattcgcaatatcaaacaaaacctgttctgggcttttggctacacgtgttgggcattcccgttgccgccggcgttttgtatctatttggagggccgctattaa

SEQ ID NO: 63844 - protein, 728 aa, Unknown
  Obtained from environmental sample
  DOMAIN (5)...(69): Heavy-metal-associated domain
  misc_feature (1)..(728): Xaa is any amino acid
MNKETITVGGMHCAACSARVEKALRKLEGIESATVNLATEKATVVYNARALRLSAIKEAITKAGYEAREVSADRVDEDKLRKEKEIKILWTKFIVAASLGLPLLYIAMAPMITWVTLPFPRALAPMRFPLTYALVQLALVIPILIAGNRFYTLGFKNLLRRSPNMDSLIAIGTTAAVVYSVYNMWRITQGDHMAVDALYFETAGVIIALILLGKTLEAVSKGRTSEAIKKLMGLAPKTAIIIENGEEKEIPIDEVLVGDIVVVKPGAKIPVDGLVTEGHSAVDESMLTGESMPVDKKSGDRVYRATINSNGLIRVKAEKVGNQTALVQIIKLVEDPQGSKEPISQMVDIVSGYFVPVVCVIALVAGLLWFIAASSGFVCLPMGKSASEFALTIFISLLVPTCPCALGLSTPTAIMVATRKGAENGILIKSGEALETAHKLDAIVLDKTGTLTEGKPEVADVATAKGVGEEYLLRMIASAEKGSEHPLGQAIVRAAHSRGLELFSPEDFRAITGQGIAARINGIAVLAGNKKLMDERGISLGELEADADRLAEEGKTPMYVALDGKIAGIAAVADVLKPSSRAAVARLRGMGLEVAMITGDNQKTAAAIAKSVGIDRVLAEVLPGDKAAAVKQLQDEGRTVAMVGDGINDAPALAQADIGIAVGSGADIAMESADIVLMRSDLTEAATTIDLSKRTIRNIKQNLFWAFGYTCWAFPLPPAFCIYLEGRY

SEQ ID NO: 63845 - DNA, 1044 bp, Unknown
  Obtained from environmental sample
  misc_feature (1)..(1044): n is a, c, g, or t
ttgatattgcgaatcgtccgcttgctcaggtcaatggtcgtggccgcctccgtcaagtcggagcgcatgagcacgatgtccgcgctttccatggcgatgtccgcgccgctgccgacggcaatgccgatgtccgcctgcgccagggcgggagcatcgttgatgccgtcccccaccatggccaccgtgcggccttcgtcctgcaactgcttcactgcggcggccttgtcccccggcagcacttccgccagcacccggtcaatccccacgcttttggcgatggcggcggcggttttttggttgtcgccggtgatcatggccacttccaggcccatgccgcgcagtctggcgacagccgcccggctgctcggtttcaggacatccgccacagccgcgatcccggcgatttttccgtcaagggccacatacatcggagtcttgccttcttcagccagacgatccgcatcggcttcaagctctcccagggaaatgccccgctcgtccatgagctttttgttgcccgccagcacagcgatgccgttgatgcgcgccgcgatgccctggccggttatggccctgaagtcttccgggctgaaaagctccagtccccggctgtgcgccgcccgcacaatggcctgtcccaacggatgttccgagcctttttcagcggaagcgatcatccgcaaaagatactcctctcccacccctttggctgtcgccacatcggcgacttccggcttgccctcggtaagggttccggttttgtccagaacgatggcgtccagcttgtgggctgtttccagagcttcgccgctcttgatcaggatgccgttttccgctcccttgcgggttgccaccataatggcagtaggagtcgaaagtcccagagcgcaggggcatgtggggaccagcagggaaataaaaatggttagggcaaattccgaggcggattttcccatgggtaagcagacaaagcccgaagacgccgcgatgaaccacaagaggccggcaacaagcgcaatgacgcagacaaccggtacaaagtaa

SEQ ID NO: 63846 - protein, 347 aa, Unknown
  Obtained from environmental sample
  misc_feature (1)..(347): Xaa is any amino acid
MILRIVRLLRSMVVAASVKSERMSTMSALSMAMSAPLPTAMPMSACARAGASLMPSPTMATVRPSSCNCFTAAALSPGSTSASTRSIPTLLAMAAAVFWLSPVIMATSRPMPRSLATAARLLGFRTSATAAIPAIFPSRATYIGVLPSSARRSASASSSPREMPRSSMSFLLPASTAMPLMRAAMPWPVMALKSSGLKSSSPRLCAARTMACPNGCSEPFSAEAIIRKRYSSPTPLAVATSATSGLPSVRVPVLSRTMASSLWAVSRASPLLIRMPFSAPLRVATIMAVGVESPRAQGHVGTSREIKMVRANSEADFPMGKQTKPEDAAMNHKRPATSAMTQTTGTK

SEQ ID NO: 63847 - DNA, 1041 bp, Unknown
  Obtained from environmental sample
  misc_feature (1)..(1041): n is a, c, g, or t
ttgcggcggcggcgaaaatcgggcttaatagcggccctccaaatagatacaaaacgccggcggcaacgggaatgcccaacacgtgtagccaaaagcccagaacaggttttgtttgatattgcgaatcgtccgcttgctcaggtcaatggtcgtggccgcctccgtcaagtcggagcgcatgagcacgatgtccgcgctttccatggcgatgtccgcgccgctgccgacggcaatgccgatgtccgcctgcgccagggcgggagcatcgttgatgccgtcccccaccatggccaccgtgcggccttcgtcctgcaactgcttcactgcggcggccttgtcccccggcagcacttccgccagcacccggtcaatccccacgcttttggcgatggcggcggcggttttttggttgtcgccggtgatcatggccacttccaggcccatgccgcgcagtctggcgacagccgcccggctgctcggtttcaggacatccgccacagccgcgatcccggcgatttttccgtcaagggccacatacatcggagtcttgccttcttcagccagacgatccgcatcggcttcaagctctcccagggaaatgccccgctcgtccatgagctttttgttgcccgccagcacagcgatgccgttgatgcgcgccgcgatgccctggccggttatggccctgaagtcttccgggctgaaaagctccagtccccggctgtgcgccgcccgcacaatggcctgtcccaacggatgttccgagcctttttcagcggaagcgatcatccgcaaaagatactcctctcccacccctttggctgtcgccacatcggcgacttccggcttgccctcggtaagggttccggttttgtccagaacgatggcgtccagcttgtgggctgtttccagagcttcgccgctcttgatcaggatgccgttttccgctcccttgcgggttgccaccataatggcagtaggagtcgaaagtcccagagcgcaggggcatgtggggaccagcagggaaataaaaatggttag

SEQ ID NO: 63848 - protein, 346 aa, Unknown
  Obtained from environmental sample
  misc_feature (1)..(346): Xaa is any amino acid
MRRRRKSGLIAALQIDTKRRRQRECPTRVAKSPEQVLFDIANRPLAQVNGRGRLRQVGAHEHDVRAFHGDVRAAADGNADVRLRQGGSIVDAVPHHGHRAAFVLQLLHCGGLVPRQHFRQHPVNPHAFGDGGGGFLVVAGDHGHFQAHAAQSGDSRPAARFQDIRHSRDPGDFSVKGHIHRSLAFFSQTIRIGFKLSQGNAPLVHELFVARQHSDAVDARRDALAGYGPEVFRAEKLQSPAVRRPHNGLSQRMFRAFFSGSDHPQKILLSHPFGCRHIGDFRLALGKGSGFVQNDGVQLVGCFQSFAALDQDAVFRSLAGCHHNGSRSRKSQSAGACGDQQGNKNG

SEQ ID NO: 63849 - DNA, 810 bp, Unknown
  Obtained from environmental sample
  misc_feature (1)..(810): n is a, c, g, or t
atgnccatggttttcgcaagccgcagcgctgaagtcaggtggaacattttttttatgcgtactttcaacatgactttttttgcttgggcagggtacatgatattccttgcgatgattgcggatatgatggacggaagggtcgcaaggcttaccaggactacctccagtttcggagggcagctggatagtctttcggacgccattagttttggcgcggcccctgcgtttttaatgatgaagctcgttgagtaccatattgataatctgagttttgaccgttttaggttctcgctgcttatctggaggggcattttcttttcggcaattttttacgccatgtgcgcggtagtccgtctggccaggttcaatgttgaaaacgaagaaaatgaatcggcccacatgaattttgccggcctcccttcgccggctgcggcaggggttattgtaagccttgtgatcatacatcagcagattctgccgaggataatatccagggctccggatagcatgaagatttttgaaattattacaattttcacacttccgcttgttacttttttctccggtattcttatggtttcaaggatccggtatccccatttggccaatcaactgttcagggggaaaaaatcccttgccatgcttttactgctgttcgcctgcgggattttaataatttggaatcttcaactggtaatggtaatcggtttctgcggtttcgcgctttttggagttttccgctggattgtattaagcattttcagaaagccgcgacggcctgaaccttttcaacctcagcgcgttggttaa

SEQ ID NO: 63850 - protein, 269 aa, Unknown
  Obtained from environmental sample
  DOMAIN (31)...(195): CDP-alcohol phosphatidyltransferase
  misc_feature (1)..(269): Xaa is any amino acid
MXMVFASRSAEVRWNIFFMRTFNMTFFAWAGYMIFLAMIADMMDGRVARLTRTTSSFGGQLDSLSDAISFGAAPAFLMMKLVEYHIDNLSFDRFRFSLLIWRGIFFSAIFYAMCAVVRLARFNVENEENESAHMNFAGLPSPAAAGVIVSLVIIHQQILPRIISRAPDSMKIFEIITIFTLPLVTFFSGILMVSRIRYPHLANQLFRGKKSLAMLLLLFACGILIIWNLQLVMVIGFCGFALFGVFRWIVLSIFRKPRRPEPFQPQRVG

SEQ ID NO: 63851 - DNA, 570 bp, Unknown
  Obtained from environmental sample
  misc_feature (1)..(570): n is a, c, g, or t
gtggctctggcgaaggagtatcctgtagaagccgacgttgtatgcggcgttcccgactccggcctgaacgcggcttatggctacagcgctcaaagcaacattcccttgattacgggttttgtaaaaaacagatacattggcaggagtttcatttaccctactcaaacccagcgcgacagcgcggtaaggctaaaacttaatccgcttacggccggtatccgtggaaaaaaaatcgtccttgttgatgattccatagtgcgcggcacaacgagcgaaaaaattgtaaagagcctaaaaaacgccggagcgaaggaggtccacatgagaatttcttcccccccgttccgatattcctgccactacggaaccgacattgacagcgaagaaaacctgattgcgaacaaaatgagtttggatgaaatctgccataaaatcggcgcggacagtttgggatacatcaacatagacggcttaaaaaaagcctgcgggggctgctctttggatttttgcacagcttgctttacggggaatgggaatgttgaacgcgcgaagaaaaatgtttttgagtga

SEQ ID NO: 63852 - protein, 189 aa, Unknown
  Obtained from environmental sample
  DOMAIN (1)...(126): Phosphoribosyl transferase domain
  misc_feature (1)..(189): Xaa is any amino acid
MALAKEYPVEADVVCGVPDSGLNAAYGYSAQSNIPLITGFVKNRYIGRSFIYPTQTQRDSAVRLKLNPLTAGIRGKKIVLVDDSIVRGTTSEKIVKSLKNAGAKEVHMRISSPPFRYSCHYGTDIDSEENLIANKMSLDEICHKIGADSLGYINIDGLKKACGGCSLDFCTACFTGNGNVERAKKNVFE

SEQ ID NO: 63853 - DNA, 810 bp, Unknown
  Obtained from environmental sample
  misc_feature (1)..(810): n is a, c, g, or t
atgagaacttttagaaagctgaatgaagagtgcgctgttttcggggtcagtttaaaaactgacgaagccgccggtattacatataacggcttactttcgcttcaacaccggggacaggaaggcgcagggattgccgtgtcgtttaaccgcagtatcgtatgccataaagacgtaggtttagtaaacgaagttttttcgggcgaagaatttaaaaaactgcccaatgggaatgtcgccgtagggcatacgcgttattcaacaacaggacataacacaaaagaaaacgtaggtccgtttattacggaatatttaacgggcagaattgcgacggcgcataacggaaatattacaaatgcttccgagattcgcaaagagctgacaaacctcgggcttcatttcggcgcgacaagcgacagcgaagttgtctcttccttaatcgcgtattacataacaaaggaaaaaagctctgttgcgggagttaccgccgccgcaggtcatctaaagggcgctttttccctcatcatagcgacaagcaaaaataaattgatagctgtccgcgatccaaacggcttccgtcccctttgcatcgggaaaaactcaacaggctgcgttgtcgcctccgagtcctgcgctattgacgcctgcggctttgaatttgtgcgcgatgttctgccgggcgaagttgtagttcttgaaaggggcgagataacgcaggaaggcgtaaaactggaaaaaaaagaaagcgatcacgggctttgtatttttgaatatgtctatttcgcgcgtcccgattctgtaatgacggtttaa

SEQ ID NO: 63854 - protein, 269 aa, Unknown
  Obtained from environmental sample
  DOMAIN (11)...(209): Glutamine amidotransferases class-II
  misc_feature (1)..(269): Xaa is any amino acid
MRTFRKLNEECAVFGVSLKTDEAAGITYNGLLSLQHRGQEGAGIAVSFNRSIVCHKDVGLVNEVFSGEEFKKLPNGNVAVGHTRYSTTGHNTKENVGPFITEYLTGRIATAHNGNITNASEIRKELTNLGLHFGATSDSEVVSSLIAYYITKEKSSVAGVTAAAGHLKGAFSLIIATSKNKLIAVRDPNGFRPLCIGKNSTGCVVASESCAIDACGFEFVRDVLPGEVVVLERGEITQEGVKLEKKESDHGLCIFEYVYFARPDSVMTV

SEQ ID NO: 63855 - DNA, 573 bp, Unknown
  Obtained from environmental sample
  misc_feature (1)..(573): n is a, c, g, or t
atggaaagcgctttaatagtatcaacctcggacaaagacacttctcttttttccgcgttgttaagtgaagctgaaatttccgcaattaaattcgtacaatcatgcgagagcgccaataaactgcttttaaaacaaaatttcgatttagtaattattgatcctcctctttcggatgaatcgggagaaagtttttctaggtatattgccggtaagggaatatctcaggttatcctgattgtaaaggaagaatctttagattatgttttcgcggaatatgagaaagacggcattttgacaatttccaaaccaattgataaaataggttttagagcggcgttgtctatcataaaagccgttcaaagcagagtaaggcggatacaggaagaaaacgcgcagttaaagcaaaagatagaagacatccgcgtaattgatcgcgcaaaatgtttgttaatttcctgcatgaaaatgagcgagcaggaatctcacaggtatattgaaaaacaggctatggatatgcgatcatctaaaaggagcgtcgcggaggggatattaaaaagatatgagaacttttag

SEQ ID NO: 63856 - protein, 190 aa, Unknown
  Obtained from environmental sample
  DOMAIN (2)...(114): Response regulator receiver domain
  misc_feature (1)..(190): Xaa is any amino acid
MESALIVSTSDKDTSLFSALLSEAEISAIKFVQSCESANKLLLKQNFDLVIIDPPLSDESGESFSRYIAGKGISQVILIVKEESLDYVFAEYEKDGILTISKPIDKIGFRAALSIIKAVQSRVRRIQEENAQLKQKIEDIRVIDRAKCLLISCMKMSEQESHRYIEKQAMDMRSSKRSVAEGILKRYENF

SEQ ID NO: 63857 - DNA, 1827 bp, Unknown
  Obtained from environmental sample
  misc_feature (1)..(1827): n is a, c, g, or t
atgtgcggcatttttggttatgttggagatcaggacgctgttcccattatagtcgagggattaaagaaacttgaataccggggctatgactcagccggaatcgcggtttacgggaaggacgggcttggcgttgtaaagcagaagggacgccttgcagcgctggaggcgcgtctttcggaacagccgcttgcggggcgcatagggatcggccatacccgctgggcaacgcacggagagccgtcggatataaattctcatcctcatgttgggagtaaaaacaaaatcgccgttgttcataacggtataatagaaaattataaacatttaaaggaacgccttgaacactggggagtaaatttcgcctcacaaaccgacagtgaagttatcgcgcagcttgccgaacattatcacagcagtgatttgatggatacggtcatccataccgcaaacgctttggaaggctcttacgctttaggtgtcatgagcgctgacgatcctgatattcttgtcgccattaaaaaagacaatcccctgattatcggcgtctctgatcacgggaatttcattgcctctgatgtccctgccgttttaaaacatacgaataaaatctactaccttaacgataaagaaattgcagtactaagaaataacagcgtacagttttttaatatcgacaaagaaccgcttgaaaaaacattggaaacaataacgtggaatcttgacagcgcggaaaaaggcggttacccgcatttcatgcttaaagagataatggaacagccgaaaattatacgcgaaacaattaattccgcagtaaataactataaaaacgtaatagacgctcttgatgtcgctgatttttccaagatcgttattaccgcctgcggttcggcgtacaatgcgggagttgtcgccaaatatgtgtttgaacgtttgtgcagatttccttctgtagaaacggaacttgcaagcgagttccggtacagagacgcggtaattaacgataaaacccttgttattttaataagtcagtcaggcgaaaccgcagatacaatcgccgctatgagggaagctaaaagcaaaggagccgttacgctttcaatcgtcaatgtggtcggcagtactattgccaaagaagcggactattgcctgcttacggctgcaggtcccgaaattgccgtagcgacaacgaaagcattttcagcgcagcttgtgctgttatacattctggctgtgcggtttgccgttaaactgggaaaattgccgcaggagacggagcgggagttgttatcacaaatcaccgctctgccggaaaaggcggcagacttacttaaccagattgatgctatccaaaaatatgcttttacctgtataggttataaaagtattttttttatcggcaggaatattgattatgcaattgcgcttgaaggctcgctcaaacttaaagagatttcttacattcactcggaagcatacgcaggcggtgaattgaaacacggcactatttctctggtcgaggaggacacgcttgttgtcgctatctcaaactgcgcctcgcttttcggtaaaatcatgagcaatgtggagcaggtaatcagccgcggcgctaaggtactgcttgtcggcaattgcccggctgacaatttaaaggcggacaaaagtttagaggataaactttatatcatcaatcttcccaaatgttccgatttattctctccttcactatcggttattgttttacaacttttcgcgtattatgtcgcggcaaacaaagggcttgatatcgacaagccgcgcaaccttgcaaaaagcgttactgtcgaataa

SEQ ID NO: 63858 - protein, 608 aa, Unknown
  Obtained from environmental sample
  DOMAIN (2)...(193): Glutamine amidotransferases class-II
  misc_feature (1)..(608): Xaa is any amino acid
MCGIFGYVGDQDAVPIIVEGLKKLEYRGYDSAGIAVYGKDGLGVVKQKGRLAALEARLSEQPLAGRIGIGHTRWATHGEPSDINSHPHVGSKNKIAVVHNGIIENYKHLKERLEHWGVNFASQTDSEVIAQLAEHYHSSDLMDTVIHTANALEGSYALGVMSADDPDILVAIKKDNPLIIGVSDHGNFIASDVPAVLKHTNKIYYLNDKEIAVLRNNSVQFFNIDKEPLEKTLETITWNLDSAEKGGYPHFMLKEIMEQPKIIRETINSAVNNYKNVIDALDVADFSKIVITACGSAYNAGVVAKYVFERLCRFPSVETELASEFRYRDAVINDKTLVILISQSGETADTIAAMREAKSKGAVTLSIVNVVGSTIAKEADYCLLTAAGPEIAVATTKAFSAQLVLLYILAVRFAVKLGKLPQETERELLSQITALPEKAADLLNQIDAIQKYAFTCIGYKSIFFIGRNIDYAIALEGSLKLKEISYIHSEAYAGGELKHGTISLVEEDTLVVAISNCASLFGKIMSNVEQVISRGAKVLLVGNCPADNLKADKSLEDKLYIINLPKCSDLFSPSLSVIVLQLFAYYVAANKGLDIDKPRNLAKSVTVE

SEQ ID NO: 63859 - DNA, 492 bp, Unknown
  Obtained from environmental sample
  misc_feature (1)..(492): n is a, c, g, or t
atgaatgacggcgagattatcattcacggcagcgctggcgacgcgctgggctacgccatgcggggcgggaaaatatacgtccgcgacaatgccggatacagggttggcatccacatgaaagaatacaaggaaaaaaaaccggtaatcgtcattggcggcagggcgggaagtttcctgggtgaataccttgccggcggactcattgtggttctgggcataggctgccataatgagatccccgtatggtattttaccggaaccggaatgcacggcggaaaaatattcatcagaaccgacaaagaactttcttcgcttcccgcgcaggtcattgaggatgtagcaaaagatgatgatttgcgagagattgcgccctatgtcagcgagtttgcgggttattttggtatggacgcccaacagcttatgaaagacagatattatgtgttaaaacccaacgcgaagaacccgtataaacagctgtatactgcgaattag

SEQ ID NO: 63860 - protein, 163 aa, Unknown
  Obtained from environmental sample
  DOMAIN (1)...(132): GXGXG motif
  misc_feature (1)..(163): Xaa is any amino acid
MNDGEIIIHGSAGDALGYAMRGGKIYVRDNAGYRVGIHMKEYKEKKPVIVIGGRAGSFLGEYLAGGLIVVLGIGCHNEIPVWYFTGTGMHGGKIFIRTDKELSSLPAQVIEDVAKDDDLREIAPYVSEFAGYFGMDAQQLMKDRYYVLKPNAKNPYKQLYTAN

SEQ ID NO: 63861 - DNA, 1905 bp, Unknown
  Obtained from environmental sample
  misc_feature (1)..(1905): n is a, c, g, or t
atgaaaagaaatgttaatatatttatgataaattnaagaaagagaattattcctttctttcaatatttccgctcaggccccgttcttttcagctttgtgcttttcattatcgctgcctttgttataataataagcgaaaacaacgattcaataatcgacataagcgatttcgaggcgggcaaagttgccgacagggacattacctcagggtttaccatatcttttattgacgaggaagcgacaaggacgcggacggaagccgccgcaaaacatgtaaacgccgtattccgcacgtcaacggaaatcaacaaacaaatactcgattcatggaacactttctgcgaatttaccgaaaaacacgccggcagcagcaaagcccaggctatacaggcgatagaaacggaatatccgggcaattttacaaatgaaacgcttaacacctatttatccgccgccgggcgctcatccttcagggggtacggcatagaaactttgaacactctccttaacaggggtatcttttcatttaacagggatgacataaggtttttcaaccccgatatcgcggaactgcagcactcgtcatccgctttggaaaaagaatatatttcgtataacaatataatcacgccctcaaacgtccgcggcgttctgggcgatattatcaattccatggacgctccggatttattcaagtctgtcgcccctgacctgttggagccttttatcagggaaaacacttttttttcattcagcgaaacccaaaagcgaattgaagaggcaaaagacacgataacgcccgtgtacagaacaattgaaaaaggcaacagaattataagaaagggctttattatcaccgaagaagaaatggaagaccttacggttcttcatacgtccatgccgaaaagggatccgcgcagcatcatcggggttgttctggtgatgctcatgctttatatgctgtttaacattttatgcgggcgaatcgtcatagggagaaaagtaaacaacagcgaacgctacctgctggcttctttttccggtttttaccttattggggcggtattgctgtttaatttcctgccgagccacagtaatttccctttatcgcttttaatgcccaccgccctctttgtgatgctgcttgctgttttaatgggaacgcgccccgccatgattatggcgcttgcgcttccgttaggcgcctattttaccggggcttttgacaattattcatatatcttcgcgcttatatccggcatagcggcttccaccgtccttcacaacgcgaaagacagaatgagcctgattaaggcaggtctggttatagcggcggtaaatacggccgcagtcatcattattctgctgttaaaacaagccgtcctttacgattatcccgcgcttgttttcggggctgtcctgaacgggattgtctccggaatgttaaccctcggcttcctgccgcctctcgagcacgcgttaaacgccgtaacgcctttcaggctgatggaactgtccgaccttaacgctccgatcttaaaaaaactttttacggcggcgccgggaacttacagccactcgcttatggtagcgaatctcgcggaacaggcttgtcaggacattggggctaacgccatgcttgcccgcgtaggcgcgtattaccatgacatangaaaaatggaaaatccctcatattttatagaaaatcagaccgaaacatacaagcacgatgaaatagccccccggttatcggcgacggtaatccgcagtcatgtaaaactcggcgttgaaaaagcgattagtcttggattgccccaggatgtcattaacatnatcgccgaacaccacggaaattcggttatatcgtgttttacaacaaggctgcggacaggaagtttgacgtaa

SEQ ID NO: 63862 - protein, 634 aa, Unknown
  Obtained from environmental sample
  DOMAIN (57)...(304): 7TM-HD extracellular
  misc_feature (1)..(634): Xaa is any amino acid
MKRNVNIFMINXRKRIIPFFQYFRSGPVLFSFVLFIIAAFVIIISENNDSIIDISDFEAGKVADRDITSGFTISFIDEEATRTRTEAAAKHVNAVFRTSTEINKQILDSWNTFCEFTEKHAGSSKAQAIQAIETEYPGNFTNETLNTYLSAAGRSSFRGYGIETLNTLLNRGIFSFNRDDIRFFNPDIAELQHSSSALEKEYISYNNIITPSNVRGVLGDIINSMDAPDLFKSVAPDLLEPFIRENTFFSFSETQKRIEEAKDTITPVYRTIEKGNRIIRKGFIITEEEMEDLTVLHTSMPKRDPRSIIGVVLVMLMLYMLFNILCGRIVIGRKVNNSERYLLASFSGFYLIGAVLLFNFLPSHSNFPLSLLMPTALFVMLLAVLMGTRPAMIMALALPLGAYFTGAFDNYSYIFALISGIAASTVLHNAKDRMSLIKAGLVIAAVNTAAVIIILLLKQAVLYDYPALVFGAVLNGIVSGMLTLGFLPPLEHALNAVTPFRLMELSDLNAPILKKLFTAAPGTYSHSLMVANLAEQACQDIGANAMLARVGAYYHDIXKMENPSYFIENQTETYKHDEIAPRLSATVIRSHVKLGVEKAISLGLPQDVINXIAEHHGNSVISCFTTRLRTGSLT

SEQ ID NO: 63863 - DNA, 975 bp, Unknown
  Obtained from environmental sample
  misc_feature (1)..(975): n is a, c, g, or t
ttggaggacggaataactattgcccttgacaacagggaacttctctccgaaatttgcggcgcanatgacggaaatctcaagataatagaaggttctctgggcgggagcattactgccagaggcaatgaaatccactttgaaagccgcggcgaagacggggtcaggcgtttcaggacaatgatggacagccttgtttccgcagtaaaaaagggggaaaatccctctcccgaatatatccgcgcccttgccggagaatttatccaaagcgaaaatgaggacgagaaacttattgaacccgatgaaaaaggagaagcctttttccgggattcaatgatacagattcctcacggctttcggcatgtatatccgcgcaccaaaaatcaggcccattacatacgcggcatgagggaaaatgaaatatgtttctgtataggacctgccggaaccggcaaaacgtatctggctatcgcccatgcgcttgcaacggtgctctcaaaaaaaatgcgcaaaattgtccttacccggcccgtagttgaagccggcgaaaatttgggctttttgccgggagaccttagccaaaaaattgatccatacctacgcccgctttacgacgctatggacgctcttgtcccttacgatataatccacaagatggaagaaacaaggtctattgaaatagctcctcttgcctacatgaggggacgcagtctgaacgactgcatggtaattcttgacgaggcacaaaacaccacaaaagaacagatgaaaatgtttcttacaagaataggagccggggcaagggcgataataacgggagataccactcaaattgatcttccccgcanaacggattcagggctgttacatgccattgaaattttaaaagatattgacggactgcatttttcatttttacatacttcagatgttgcgcgtaatccgctggtaaaaaaaaataatacaggcatacgatga

SEQ ID NO: 63864 - protein, 324 aa, Unknown
  Obtained from environmental sample
  DOMAIN (120)...(324): PhoH-like protein
  misc_feature (1)..(324): Xaa is any amino acid
MEDGITIALDNRELLSEICGAXDGNLKIIEGSLGGSITARGNEIHFESRGEDGVRRFRTMMDSLVSAVKKGENPSPEYIRALAGEFIQSENEDEKLIEPDEKGEAFFRDSMIQIPHGFRHVYPRTKNQAHYIRGMRENEICFCIGPAGTGKTYLAIAHALATVLSKKMRKIVLTRPVVEAGENLGFLPGDLSQKIDPYLRPLYDAMDALVPYDIIHKMEETRSIEIAPLAYMRGRSLNDCMVILDEAQNTTKEQMKMFLTRIGAGARAIITGDTTQIDLPRXTDSGLLHAIEILKDIDGLHFSFLHTSDVARNPLVKKNNTGIR

SEQ ID NO: 63865 - DNA, 504 bp, Unknown
  Obtained from environmental sample
  misc_feature (1)..(504): n is a, c, g, or t
ttgggtttttcgatgaatttaaatacaaggctgttctttgaccttcaacggtatacaaattcaaactttcaattaacggcgggtttttccctaaaagttaacaaatttatggacttatcgctgtcgttaacatccgaaaacgcggttattttcagatacttcaaaggcttttcaggaatggaagaatatacaaaaatgtatattgacggaccgcagaacaatctgtttacggatattattgactcgtttaatttctttgatgattcaaaaagacaaagatcgggctttaaaatgaaaaggtttaattttaaggcaattcaccatttgggagactgggacgctactttggatgtttcaatgtctccgtatctggattcccaatcatttcccccaaaatatgatgttaacgcggaaatatctttccttgtacaatggtctgccatttcagaaataaaaacagacctgaaatatgaaaaaagaaccgaaaaatggacaaaaaactaa

SEQ ID NO: 63866 - protein, 167 aa, Unknown
  Obtained from environmental sample
  misc_feature (1)..(167): Xaa is any amino acid
MGFSMNLNTRLFFDLQRYTNSNFQLTAGFSLKVNKFMDLSLSLTSENAVIFRYFKGFSGMEEYTKMYIDGPQNNLFTDIIDSFNFFDDSKRQRSGFKMKRFNFKAIHHLGDWDATLDVSMSPYLDSQSFPPKYDVNAEISFLVQWSAISEIKTDLKYEKRTEKWTKN

SEQ ID NO: 63867 - DNA, 1356 bp, Unknown
  Obtained from environmental sample
  misc_feature (1)..(1356): n is a, c, g, or t
atgcaggcgcttctggcacggaaggattggctcgaaagatccgagcttgtcaagctcaaagaagaactgcgtatctttcaaatatcgtattcggttctctacaacatgttcctcaaaaagaagctgataaacgaggatccttacaagcaggaatctaagattagcgagctcgcagttcctgaaaccggacccttaaatgaggcaaaacggctggagcagatttcacttagactcgccaactatgacagccaacttgacttcctggtcaatttttaccaattcgggattgattttttgaatcttgaacggatacgcaaaatagtgggtctggtgcgttatatagactggataaatttttcgccggattcaaaatcacccaataccaaagtagcctctgaacttaccaacaacgccaaatctggaggggattctttaaccctgagtatcatcggcgaatccttgaccaggcttcccaaatgcacttccaccattatggggattttacggaacctgagcgggtactacaaggaaagctacaagctcaatgtccgcaacgcaattggcggtatgcaggcttcggaagcaacccccgtcaatatcaagaagaaaataagctccgcaatgcccggtacgccgttttatcaggaatttgtcgaagaactcatcagagaggattattccaaagacggcccggcgatgagagaagcggttcttgcttcgctgaaagtagcggaggacaaaccaaagtctaccaaaccaaaagtatcgtacaaggatattttgttgagcgggattcaggctattggggccgctgcgtccgtgacaactgaagtcgctcaaaaaattgacgcaaaccaggcaattttggaaaaccgcaaaaaaggattttgggaaaaaataaagctgttactcaagtcgatgaccaattccgatcctgatgaggtaatatacgaactgcaattcattgaccagacaaaaggaaccgagacaagggaacaactcaattttggacagtttcgtactgatctggacagaaaaatcaaaatttatacggggatgagcgggcaagggccctttataaacaaactaaaaaacatggccgaggaacaggtattggaatatcttgaacaggccattaagaatttgcaggctcttcaccggacactgacatctcttgatgaatattttaaatgcagcgtaccgagagaagaacgtgatcagataaaaggaattaaacccgaattggcttctatcaaaaattgttttgtcaaggcaaaccagatccggcatgaatacagcgctcgaaaagaagaagaagaacagatgagaaaattgggtattaatcccgattcttaa

SEQ ID NO: 63868 - protein, 451 aa, Unknown
  Obtained from environmental sample
  misc_feature (1)..(451): Xaa is any amino acid
MQALLARKDWLERSELVKLKEELRIFQISYSVLYNMFLKKKLINEDPYKQESKISELAVPETGPLNEAKRLEQISLRLANYDSQLDFLVNFYQFGIDFLNLERIRKIVGLVRYIDWINFSPDSKSPNTKVASELTNNAKSGGDSLTLSIIGESLTRLPKCTSTIMGILRNLSGYYKESYKLNVRNAIGGMQASEATPVNIKKKISSAMPGTPFYQEFVEELIREDYSKDGPAMREAVLASLKVAEDKPKSTKPKVSYKDILLSGIQAIGAAASVTTEVAQKIDANQAILENRKKGFWEKIKLLLKSMTNSDPDEVIYELQFIDQTKGTETREQLNFGQFRTDLDRKIKIYTGMSGQGPFINKLKNMAEEQVLEYLEQAIKNLQALHRTLTSLDEYFKCSVPREERDQIKGIKPELASIKNCFVKANQIRHEYSARKEEEEQMRKLGINPDS

SEQ ID NO: 63869 - DNA, 753 bp, Unknown
  Obtained from environmental sample
  misc_feature (1)..(753): n is a, c, g, or t
atggaacctattcccgccgcagcggaaaaatgggagctttcggaagataaaaagcagtggacttttaccataagacaggaagcaaaattctggaacggagatccggtcacggcggaagattttcgcgccgcatggctttcgatattgtcgccgcagagtgacgctccctattcaagcctgtttgatgtcattgaaggggcgaaagaataccgtaccggaatgacgcataacactgaaaaagtaggcatcgttgcgtcagggacaaagacgctggtagtcaaactgaatgcccccgcgttttttttcccgtctatgctctgtcatcattcgttcagccccattcatccatccatgctcaacaatgaagattggtcaaaaaaacctccgctttccaatgggccgttctacattaccgagatgaacggagacaaaattgtcctggttaaaaccaacgcctattgggacgcttccgcggtttctctgaacaaaattacccttaaatacaccgaaagcggcgatgaggcaagcagcctttggaactcaggcgaagcccgctggatttccggcgaggtgaattttgacacgctgaccgaccggagcggcattcaggtcaacgccatgtttgccactcattattattttatccgttccggagaaaagccctggaacgattaccgcatccgccgcgccccttgtctggcgctgccctgggacgaaattcgcgcaggacattttcttcccgccaaaccttga

SEQ ID NO: 63870 - protein, 250 aa, Unknown
  Obtained from environmental sample
  DOMAIN (2)...(250): Bacterial extracellular solute-binding proteins, family 5 Middle
  misc_feature (1)..(250): Xaa is any amino acid
MEPIPAAAEKWELSEDKKQWTFTIRQEAKFWNGDPVTAEDFRAAWLSILSPQSDAPYSSLFDVIEGAKEYRTGMTHNTEKVGIVASGTKTLVVKLNAPAFFFPSMLCHHSFSPIHPSMLNNEDWSKKPPLSNGPFYITEMNGDKIVLVKTNAYWDASAVSLNKITLKYTESGDEASSLWNSGEARWISGEVNFDTLTDRSGIQVNAMFATHYYFIRSGEKPWNDYRIRRAPCLALPWDEIRAGHFLPAKP

SEQ ID NO: 63871 - DNA, 675 bp, Unknown
  Obtained from environmental sample
  misc_feature (1)..(675): n is a, c, g, or t
ttgtctggcgctgccctgggacgaaattcgcgcaggacattttcttcccgccaaaccttgatctaccccctgcccggctatcccagaatagaagggctttccgataccgatactgaagaagcggctgatctgcttgtccaggccggttttcctcaaggggccggtttgcccgatctggtgatacgcattaccccatcgccggaagctgcccgtatcggcggccttatggcaagcgcgtggaaagaaaaactgggagttccggtacgggtagaagtggttccctacaatcgttattttcaaatgctcaagaacaacgactacaccgtcggtttttctacatggatcggcgactttgccgatccctataccttcctgcaaatgtggcgccgggattccaatctcaacgacgcccattatgatgatgatgattacgaaacattaatagaaaaatccatgcttgaagaaggcgaaacccgttgggcaactctcgccgacgctgaaaagctgctccttgaacgcggctcagtacttcccatttcctacagcccggccgttaacatagtggacatcggcgaactgggcggctggttccccaacgctctggatattcacccttttaagcatttgaccttcaaagccttccgccccctgcccggggtggttatggcgaagtag

SEQ ID NO: 63872 - protein, 224 aa, Unknown
  Obtained from environmental sample
  misc_feature (1)..(224): Xaa is any amino acid
MSGAALGRNSRRTFSSRQTLIYPLPGYPRIEGLSDTDTEEAADLLVQAGFPQGAGLPDLVIRITPSPEAARIGGLMASAWKEKLGVPVRVEVVPYNRYFQMLKNNDYTVGFSTWIGDFADPYTFLQMWRRDSNLNDAHYDDDDYETLIEKSMLEEGETRWATLADAEKLLLERGSVLPISYSPAVNIVDIGELGGWFPNALDIHPFKHLTFKAFRPLPGVVMAK

SEQ ID NO: 63873 - DNA, 2937 bp, Unknown
  Obtained from environmental sample
  misc_feature (1)..(2937): n is a, c, g, or t
gtgagattactcactggaaataggggaggaacacaaggtcgcctctatggttacggctcccttatattgaagaagcatattgacggaattaaaaaggcgctgacaggtttccgcggcccggaagaagataaattcaacgccgagaaaaaccatgagctggcggcggttctgcgcggcgcgttaggcgataaaatccccgcgtcgtatctttaccagcagctccgccgtcttgagcagggcgacgaggaagttgatgtctcccaatattccaccgcgtgggaagatgaggcgtacaatacggtttccgggcaaagttccaataacagcctgcgcgttaccgatgagtttatgcgcgcggtgttaaacgataccgattgggatcttaaaagccgcacctcgggcgacgcggtaaaaaccgtcaaagccagaaaactttggacggacatagcgagaacaagctggcagtgcgcggatcccggccttcaataccacactacaattaatgattggcatacatgtcccgcaggcggggagatacgcgcttccaacccttgttcggaatatatgtttttagacgataccgcgtgcaacctggcttccataaaccttgtcgcgttatatgacaaaagaagaaaagcgtttaacgtcgaaggttatctgcacgcgataagcatttggactacaattttggaaatttccgtcgtaatggcgcagtttccgtcttcacgcatcgccgagctttcgtacaagtaccgcacgctggggcttggttacgccaatttgggaacccttcttatgatcatggggctcgcttatgattcggagcaggggcgcgcggtagcgggggcgctttcggcgctgcttacaggcgaagcgtacgcgcaatccgcccgcatggcgggagagcacggtccttntgcgcattacggcgaaaattcgctgaatatgctccgtgttatacgcaaccacaggcgggcggtgaataacgcgcccgatattgaatatgaggggctccataccgtaccaaagggaatagatcccgtttattgccctgcttatcttctggatgcggcaaaggacgcgtgggacagggcgcttgagttcggtaaaatacacggtttccgcaacgctcaagttacggccatcgcccccaccgggacaataggcttattgatggactgcgacaccacggggattgagcctgatttcgctctcgttaaatttaaaaatcttgccggaggcggacagttcaaaattattaatcagtctgttcctatcgcccttgagacgcttggttattcacccgccactattgaagaaattgtcgcgtacgcgatgggcagaaaaaccttgaacggcgctccggctatcaatgtagaaagccttaaagcaaaaggttttactccagaggcaattgccgctgcggaagacgcggtaaagacggcgaccagtctggaaagcgtttttactccgtgggtgctcggcaagtcgtttgtggagaaggtgctgaaggttcccgaatcgacatgggcgctcgccggtttttctctccttaaacatcttgaatttgtaaaagaagatattgatgaggcggagttgttcgcctgcggcactatggctttagaaggcgcgcccggacttaaaaaagaacattatgtcatttttgataccgccaatccttccggcaaaaagagcaaacgctcgattccgtggacggcgcatataggcatgatggcggcggttcagccttttatttccggcgcgatttccaaaacaatcaatatgccgaacggcgcgagttacgacgacgttaagggcgcgtacatgctctcatggaagaacgctcttaaggcggtggctttgtaccgcgacggctccaagctttcacagccgcttaacagcgtagaccccggcgcggatccgttagccgacactattataaaggttgagagggggttggatattccggcttcctcgcccgaccgcaagaaaataaacgcgcgcggtttgcgaagggcattgcctaaccgcaggatgggttacactcagaaggcgaaaataggcgggcactcgatttttatcaggacgggcgaatatgaagacggcaatctgggagaaatatttcttgacatgcacaaggaaggagctgctttccgaagcttgttaaacagttttgccattactgtttcgcttggattgcagtacggcgtgccgctggaagaatatgttgacgctttcactttcagccgctttgaaccgaacggaccggtgcagggtcatgattatgtaaagatgacaaccagcgtaatagattatatcttccgcgaccttgcgataagttatcttaaacgctacgatcttggccaggttaaaccagaagacctcgtccccaccgctaccaagagcgatataggggatccaggcgaagcaagacagcgcatcagcgacaaacagagttccgggttcaggccttatgttccctcagttgcgcctcccccggcagctgcagcaggcggggctgccggcgcgggcggcggaacgtccggggctttaccagccggatccataggatccgccggatccgcagtatccgccggttcgttacctgagcaaaaaacaactcccccggcttcgcccggattgtccggccgcggtgaaagcatcaaggaagttacaaaagggttggcggtagatacgggatcgtatcgcccggccgcaaagccggcggatggtgtaatttccactcagactgtccagccgcccgttcaggtgcttgcccagccccacccggagcagagcgaattggctaaaatcgcccaggcccggattaagggttacgaaggggatccctgcccgtcctgcggttccttcactttgatacgaaacggaacctgtatgaagtgccatacctgcggcggaaccacaggctgctcataa

SEQ ID NO: 63874 - protein, 978 aa, Unknown
  Obtained from environmental sample
  DOMAIN (3)...(455): Ribonucleotide reductase, barrel domain
  misc_feature (1)..(978): Xaa is any amino acid
MRLLTGNRGGTQGRLYGYGSLILKKHIDGIKKALTGFRGPEEDKFNAEKNHELAAVLRGALGDKIPASYLYQQLRRLEQGDEEVDVSQYSTAWEDEAYNTVSGQSSNNSLRVTDEFMRAVLNDTDWDLKSRTSGDAVKTVKARKLWTDIARTSWQCADPGLQYHTTINDWHTCPAGGEIRASNPCSEYMFLDDTACNLASINLVALYDKRRKAFNVEGYLHAISIWTTILEISVVMAQFPSSRIAELSYKYRTLGLGYANLGTLLMIMGLAYDSEQGRAVAGALSALLTGEAYAQSARMAGEHGPXAHYGENSLNMLRVIRNHRRAVNNAPDIEYEGLHTVPKGIDPVYCPAYLLDAAKDAWDRALEFGKIHGFRNAQVTAIAPTGTIGLLMDCDTTGIEPDFALVKFKNLAGGGQFKIINQSVPIALETLGYSPATIEEIVAYAMGRKTLNGAPAINVESLKAKGFTPEAIAAAEDAVKTATSLESVFTPWVLGKSFVEKVLKVPESTWALAGFSLLKHLEFVKEDIDEAELFACGTMALEGAPGLKKEHYVIFDTANPSGKKSKRSIPWTAHIGMMAAVQPFISGAISKTINMPNGASYDDVKGAYMLSWKNALKAVALYRDGSKLSQPLNSVDPGADPLADTIIKVERGLDIPASSPDRKKINARGLRRALPNRRMGYTQKAKIGGHSIFIRTGEYEDGNLGEIFLDMHKEGAAFRSLLNSFAITVSLGLQYGVPLEEYVDAFTFSRFEPNGPVQGHDYVKMTTSVIDYIFRDLAISYLKRYDLGQVKPEDLVPTATKSDIGDPGEARQRISDKQSSGFRPYVPSVAPPPAAAAGGAAGAGGGTSGALPAGSIGSAGSAVSAGSLPEQKTTPPASPGLSGRGESIKEVTKGLAVDTGSYRPAAKPADGVISTQTVQPPVQVLAQPHPEQSELAKIAQARIKGYEGDPCPSCGSFTLIRNGTCMKCHTCGGTTGCS

SEQ ID NO: 63875 - DNA, 570 bp, Unknown
  Obtained from environmental sample
  misc_feature (1)..(570): n is a, c, g, or t
ttggcgcgggtgaccgcgggcgtagcgcatacgataaggcttaaaattccccttggcgaaaccacccgcttcaacgattaccttttgggcgacattgaatggaaaaacgacgacgcggaccccgatccggtattactcaaatccgacggctttcccacctatcatctcgcgaatgtcgttgatgatcatctgatggagataagccatgtcacgcgcgcccaggagtggctcgcgtccaccccggtacatgtaatcatgtacaagagcttcggctggaatccacccgagtactgccaccttcccatggtaatgggacaggacgggaaaaaactcagcaaaaggcacggcgcgaccagcattgacgaattcaggaagcagggctaccttcctgaagcgctgatcaactacgtcgccctgctgggcgcgtcctacgaggaaggaagagacctattcagccttcaagagcttgagcagttgttcagcataaataagctcaacaaggcacctgcgattttcgattacacaaaaactcgaatgggtcaacggccaatacatcaggatgaaaagtga

SEQ ID NO: 63876 - protein, 189 aa, Unknown
  Obtained from environmental sample
  DOMAIN (1)...(179): tRNA synthetases class I (E and Q), catalytic domain
  misc_feature (1)..(189): Xaa is any amino acid
MARVTAGVAHTIRLKIPLGETTRFNDYLLGDIEWKNDDADPDPVLLKSDGFPTYHLANVVDDHLMEISHVTRAQEWLASTPVHVIMYKSFGWNPPEYCHLPMVMGQDGKKLSKRHGATSIDEFRKQGYLPEALINYVALLGASYEEGRDLFSLQELEQLFSINKLNKAPAIFDYTKTRMGQRPIHQDEK

SEQ ID NO: 63877 - DNA, 504 bp, Unknown
  Obtained from environmental sample
  misc_feature (1)..(504): n is a, c, g, or t
atgaaaagtgacgaagagcttgccgccctttgcctgccctccgcggttgaggcgggtctttttggaactgccggaacccaacccacaactgagcagaaaaaaatattcaccgccgcaatgccccttatccgcgagcgccttgcctttacccatgaggccgcgggaaaaatcgcctatttgttcgcgcctcccccattgcccgcgcctgaagaatttatccccaaaaaagctgaccttgccgaaacgatcaggcttttacggcttgcgcgggacatggttaaccatctcgccaacgcggttaacgatgaggcggcggaagcctacatcaaggaacaggccgaaaaagcctcggtcaagttaggcgatctgatgatgcccctgcgcgtcgccattacaggaagccgcgtcagccctccccttttcggctcgttgcggatattaggaggccaagagtcgctgcaaagggtggaaaaggctttggaacatttagtaaaaagcaattag

SEQ ID NO: 63878 - protein, 167 aa, Unknown
  Obtained from environmental sample
  misc_feature (1)..(167): Xaa is any amino acid
MKSDEELAALCLPSAVEAGLFGTAGTQPTTEQKKIFTAAMPLIRERLAFTHEAAGKIAYLFAPPPLPAPEEFIPKKADLAETIRLLRLARDMVNHLANAVNDEAAEAYIKEQAEKASVKLGDLMMPLRVAITGSRVSPPLFGSLRILGGQESLQRVEKALEHLVKSN

SEQ ID NO: 63879 - DNA, 384 bp, Unknown
  Obtained from environmental sample
  misc_feature (1)..(384): n is a, c, g, or t
atgtttcaattaaccgatattgaatggaaaaatctaaggtcacaaattgtgacctttagcaaagacaccagaaaatataagccttacgctttcaccgaacatggaatactaatgctttcaagcgttttgaactctgacaaagcaattaaaataaatattcaagtaatgagaatatttgtaaaaatgcgccattatacgctttctcacaatgcggcaaatgagcaaattagcgaattacggaagctgctcatggtctatattgaaaatactgactataaacttttaaaacacgacaagacaattggacaaatcatcatcgctttgaacaatcttattgacaaaccgccaaaaaccaaaaggatagggttcaacgccggaaattaa

SEQ ID NO: 63880 - protein, 127 aa, Unknown
  Obtained from environmental sample
  misc_feature (1)..(127): Xaa is any amino acid
MFQLTDIEWKNLRSQIVTFSKDTRKYKPYAFTEHGILMLSSVLNSDKAIKINIQVMRIFVKMRHYTLSHNAANEQISELRKLLMVYIENTDYKLLKHDKTIGQIIIALNNLIDKPPKTKRIGFNAGN

SEQ ID NO: 63881 - DNA, 1875 bp, Unknown
  Obtained from environmental sample
  misc_feature (1)..(1875): n is a, c, g, or t
ttgaccgcatggcccttatggcgctgggccttaatgatctgcgggatctgttcagcactaacattgaagacgtgcgtctgcgccggcttactgaaacaaacaaaatcaaggaaaaagcaaatgcctaaaatagaagtaaacgaagaagttttttacgaactcatcggcaagcgctggtcaaatagagacgaattcgaagaggccttgacctgcgccaaggctgagttagatgaagacagcgacaaaagcctgcctatagatgaacgggttcttaaaatcgagcttaacgacaccaaccgccccgacctctggggaacagcgggctgcgccagacagcttaggatatatcaggacggtaagattcctgaatacccgtttttttcccggcccggcgttccaaaacaagcggggtacgaggtgcatgttgaaaaaagcgttcaacaggtacggccttacctgacggggtttgtcgcgcacggcaagacaatttccgatcctgcgttacgcgatatgatacagacccaggaaaaactcgcctggaatttcggacgtaaacggcgctctatttcgatgggcgtgtacagaatcgcaagaatcaactggcccatcatttacaagggcgttgatcccgacagcgtttcttttgtgccgttgcagtgggactcgcccttgaccctgcgagaaattctaaaacagcatcccaagggaaaagagtacgcctttatccttgagaaggagccgattcaccccctgttaactgattcgcagggcagtgtgttatcctatccgcccattatcaattccaacgatttgggcgcggtgcaggttggcgacacggacatctttgtggaattgaccggctctgacatcgcccaggtaacgctggcggcttctatcgtcgcctgtgaccttgcggataacggtttttccattgagcctgtggaagttgaatatgaatatgacactccctttggcaaaaatgtcgtttacccctggtatttccaggagcctgttttctgctctcttgccagaatagaaaaattcctcggcgataaactctcgggcgatgaatgtgtaaaagcgcttaaccgcatgggcgtaagggccgaaaagacaaacggaacggaacgggggcagtctgccgaacgcggcgttgaaggcgttctcgcgtatccgcccgaataccgcaacgattttctccacgccgccgatgtcgctgaggacgtgatgataggccggggtcttggctcgttcaaacctgaacgcccgggcgatcccacagtaggcaggcttagccccatcactttgttcagccgccaggtaaaggaaatttttatcggcatgggctatcaggagatgatatacaactacctcggctcccgcaaagaccttgtcgaaaaaatgcgcggcgggggggatcgcattatccgcattgccaaccccatgaccgagaattacgagtatgtccgcgattctgtaatcgcgtctctcatggaaagcgagtctgtttcgggaaattcggtatacccgcacaaaattttcgaggtaggcaaagtcgcgtatcttgacagcgcggacaattccggcactgtaacccgccagtacgcgggtttccttcacgccgacaaagaagcgaacttcaacacagccgcaggccagatgcagaccctgttctactatctttctcttgattacgaggtcgaggaatccgatgacccgcgctttattcccgggcgcgccgccgcaatcctgtacaagggccgcaaaataggcatattcggcgagatacatcccgaagttctggaaaactggggcataaccgtgccttgcactgcgggggaaattgatttggatcaggtaacagataacagataa

SEQ ID NO: 63882 - protein, 624 aa, Unknown
  Obtained from environmental sample
  DOMAIN (406)...(623): tRNA synthetases class II core domain (F)
  misc_feature (1)..(624): Xaa is any amino acid
MTAWPLWRWALMICGICSALTLKTCVCAGLLKQTKSRKKQMPKIEVNEEVFYELIGKRWSNRDEFEEALTCAKAELDEDSDKSLPIDERVLKIELNDTNRPDLWGTAGCARQLRIYQDGKIPEYPFFSRPGVPKQAGYEVHVEKSVQQVRPYLTGFVAHGKTISDPALRDMIQTQEKLAWNFGRKRRSISMGVYRIARINWPIIYKGVDPDSVSFVPLQWDSPLTLREILKQHPKGKEYAFILEKEPIHPLLTDSQGSVLSYPPIINSNDLGAVQVGDTDIFVELTGSDIAQVTLAASIVACDLADNGFSIEPVEVEYEYDTPFGKNVVYPWYFQEPVFCSLARIEKFLGDKLSGDECVKALNRMGVRAEKTNGTERGQSAERGVEGVLAYPPEYRNDFLHAADVAEDVMIGRGLGSFKPERPGDPTVGRLSPITLFSRQVKEIFIGMGYQEMIYNYLGSRKDLVEKMRGGGDRIIRIANPMTENYEYVRDSVIASLMESESVSGNSVYPHKIFEVGKVAYLDSADNSGTVTRQYAGFLHADKEANFNTAAGQMQTLFYYLSLDYEVEESDDPRFIPGRAAAILYKGRKIGIFGEIHPEVLENWGITVPCTAGEIDLDQVTDNR

SEQ ID NO: 63883 - DNA, 540 bp, Unknown
  Obtained from environmental sample
  misc_feature (1)..(540): n is a, c, g, or t
atgattaaccttgagcaagttaaactgctggaatcaaaggtcgcaaaagccattgactttgttgagaaggtctctaaggaaaacacggctttgcttcggcgggaagcggaacttcaggaaaagctggaaacgtatcaaaaacggatcgacgagcttgaggttctgattaggggtttcaaagaagaacagggccgcatagaagacggaattcttgccgctctggacaggttaagccagttcgaggaagcgatagaaaaaagcctgaaagacaaaccccacagcaagccggttaaagacgcgatcaaatcccccgctcataatttgccgcaaaagagaccggctaaagaagaattaattcctcagccgggtgaggagcagggtgaacaggctgatctcggggctttcaacgaaaaaatctgttttgaaatacctgatgacaagccagtcgacgatattcttgaccctctcaatgaaacactggatgaagacgccggtgaaagctattcgccggccgagggcggagagctggatatattttaa

SEQ ID NO: 63884 - protein, 179 aa, Unknown
  Obtained from environmental sample
  misc_feature (1)..(179): Xaa is any amino acid
MINLEQVKLLESKVAKAIDFVEKVSKENTALLRREAELQEKLETYQKRIDELEVLIRGFKEEQGRIEDGILAALDRLSQFEEAIEKSLKDKPHSKPVKDAIKSPAHNLPQKRPAKEELIPQPGEEQGEQADLGAFNEKICFEIPDDKPVDDILDPLNETLDEDAGESYSPAEGGELDIF

SEQ ID NO: 63885 - DNA, 1215 bp, Unknown
  Obtained from environmental sample
  misc_feature (1)..(1215): n is a, c, g, or t
atgagtgagttttacaagctaagtaacaaggccaggcattacgactggggttcccgtgatgacattccccgcttgttgggtattgaggccgacggtgcgccatgggcggagctttggatcggcagccattccggctctccttcgatcctggagtcctcagacggaacaacccttggagatttaattgcccgcgatccgcgccgctatcttggagaagaaaccgcgcggcgttatggagcacttcctttccttttgaaattattgtcggccgaaaaaccgctttccattcaggcccaccctaacctggcccaggcccgcgaaggttttgaaagggagaaccgcgccggtttggccattgattcgcctgagcgcaattataaggactcgaaccacaagcctgaaatcatagcggcccttaccccgtttacaggcttatgcggcttccggggcgttgatgaaatcctcaggcaccttggggtttttcttgagtctgcgccgtctgttctgcgcgaaggattcgctcccctgacgcgggcgcttttaagccgcgatccaactgtcgctttgcgtgattttttggcaggaattttcggcctttcacaaccggtacgggaagcgcttaccggatatgttctttcacttcgggagtatgtctgtgaattggagctaatgcgggatctggcgcggctgtatcccggcgatccggcgatcatcgcgcccatttatcttaatgttttccggctcgagccgggcgaagctgtttttctggaagctggggtactgcatgcatacattcatggctttggtgtggagcttatggcaaactccgacaacgtgctgcggggcggtctgactcccaagcatgtcgacgtgccggagctaatcaagatactggactttaagccctataaacctctggtaattacgcctaaagcaggttttttcaactatccgatgccatgcggggaatttcttctcacaaggatttgcggtgctggcggcgcctcctgtggaggcgtggaatcatggccgattgccactaacagtcctgcgctntgcgttgtcaccgagggggaacttataatagccaacggcgacagggaaacagttgttaagcaaggggaatcgctgtttataccccctgttaaagaaaatcctctttcgctaaaggggaaatttaccatgtttgtcgcgtcctgcggcagcgcggactga

SEQ ID NO: 63886 - protein, 404 aa, Unknown
  Obtained from environmental sample
  DOMAIN (4)...(367): Phosphomannose isomerase type I
  misc_feature (1)..(404): Xaa is any amino acid
MSEFYKLSNKARHYDWGSRDDIPRLLGIEADGAPWAELWIGSHSGSPSILESSDGTTLGDLIARDPRRYLGEETARRYGALPFLLKLLSAEKPLSIQAHPNLAQAREGFERENRAGLAIDSPERNYKDSNHKPEIIAALTPFTGLCGFRGVDEILRHLGVFLESAPSVLREGFAPLTRALLSRDPTVALRDFLAGIFGLSQPVREALTGYVLSLREYVCELELMRDLARLYPGDPAIIAPIYLNVFRLEPGEAVFLEAGVLHAYIHGFGVELMANSDNVLRGGLTPKHVDVPELIKILDFKPYKPLVITPKAGFFNYPMPCGEFLLTRICGAGGASCGGVESWPIATNSPALCVVTEGELIIANGDRETVVKQGESLFIPPVKENPLSLKGKFTMFVASCGSAD

SEQ ID NO: 63887 - DNA, 402 bp, Unknown
  Obtained from environmental sample
  misc_feature (1)..(402): n is a, c, g, or t
ttggtgcttcgctgttcagggcggcggggaattaaagcggtattcgcggctaatcgtctcatgccggggataagcggagagaacgtcgtaatggaggtttgcccgcccggtgaaaattctgccgatgaccggcttgtggaacttgccgcgcccggagaccttgccgtgagccgtgaccttgccctggcaaaaagactgttggagaaaaacgtcattgttatcgacgaccgcggccggctttttactttggacaacatcaacgaactgctttctctgcgaaattttaccgtaggccttgccgaaaacggccttggcattgaacgcaccgcaaactacggcagaaaggaactcaaagcgtttgctgatagtttagacaggcagataacaaagagaaaactgtaa

SEQ ID NO: 63888 - protein, 133 aa, Unknown
  Obtained from environmental sample
  DOMAIN (1)...(130): Uncharacterized BCR, YaiI/YqxD family COG1671
  misc_feature (1)..(133): Xaa is any amino acid
MVLRCSGRRGIKAVFAANRLMPGISGENVVMEVCPPGENSADDRLVELAAPGDLAVSRDLALAKRLLEKNVIVIDDRGRLFTLDNINELLSLRNFTVGLAENGLGIERTANYGRKELKAFADSLDRQITKRKL

SEQ ID NO: 63889 - DNA, 597 bp, Unknown
  Obtained from environmental sample
  misc_feature (1)..(597): n is a, c, g, or t
gtggccggttacgccgttgatatttacgacagatgggcgcatgatcatgacattccccatgcggaaagcgaaacctttccggatattcttaaaataggctcaatgctccatgatgtggggaaggtcgctatctccgacatgatccttaaaaaaccggcgcgttttacgccggaggaatttcaggtaatgcagaaccataccctggacggggccagcctttttgacgatatacattctaatattgacagaatggcaagggacatagccctaacccaccacgaaaactggaacggaacaggctaccccggctggatccatccggtcagccgcgtgaacataaaaaccgatgacaccgggcatcctttgggcccaaaggaagaggagataccgcttgccggaaggattgtcgccatacccgatgtggatgacgcgctttgttccaagagggtttacaaggaaccctgggacgaggtaaaggttttggatgaaatacacctactggccggaagcaagttcgatccagaattggtaagcatatttttcgaaatactccccaatatcaaacagacgcacaacctgtatcctgaaaaaaattaa

SEQ ID NO: 63890 - protein, 198 aa, Unknown
  Obtained from environmental sample
  DOMAIN (8)...(145): HD domain
  misc_feature (1)..(198): Xaa is any amino acid
MAGYAVDIYDRWAHDHDIPHAESETFPDILKIGSMLHDVGKVAISDMILKKPARFTPEEFQVMQNHTLDGASLFDDIHSNIDRMARDIALTHHENWNGTGYPGWIHPVSRVNIKTDDTGHPLGPKEEEIPLAGRIVAIPDVDDALCSKRVYKEPWDEVKVLDEIHLLAGSKFDPELVSIFFEILPNIKQTHNLYPEKN

SEQ ID NO: 63891 - DNA, 741 bp, Unknown
  Obtained from environmental sample
  misc_feature (1)..(741): n is a, c, g, or t
atgcttaacgaaaacactttaacaaaattacatgaaatccgtctaggcgttatggctgaccgtttccgccagcaaacgcttgatcccgctatgaacgccctggcttttgaggaacggttcggcctgttagttgacgccgagtggtccgcccgtaagtcaaaccgtctgaaacggatcattaagaacgccaattacgctatttctggcgcctgtattgaagatattgcctaccattctgaccggaagctggataaatccctgatagcaaggcttgcttgttgttcctatattcatgaaaatcacaacgtcattattatgggagccaccggtgttggaaaaacctatcttgcatgtgcattaggcatagcagccaaccgtaatttctttgcaaccaggtatacgagactcccggatcttttcagcgacttggcaatcgcccgggcagacggaacataccgaaaagtgataaagcaatatacccaagcaaaacttctcattctggatgaatggctcttgtttcctcttacggaaatagaaagccgtgaccttctggaaattatcgaagcaaggaataaccagggttccactgtcttctgttcccagtttgatgttggtgagtggtatccaaaaataggggaacctatattggccgaagcggtctgtgaccgcattgttcacaactcgtatacgatcgtactttccggggattctatgcgaaagagaaatggcatagctgagtaa

SEQ ID NO: 63892 - protein, 246 aa, Unknown
  Obtained from environmental sample
  DOMAIN (23)...(52): IstB-like ATP binding N-terminal
  misc_feature (1)..(246): Xaa is any amino acid
MLNENTLTKLHEIRLGVMADRFRQQTLDPAMNALAFEERFGLLVDAEWSARKSNRLKRIIKNANYAISGACIEDIAYHSDRKLDKSLIARLACCSYIHENHNVIIMGATGVGKTYLACALGIAANRNFFATRYTRLPDLFSDLAIARADGTYRKVIKQYTQAKLLILDEWLLFPLTEIESRDLLEIIEARNNQGSTVFCSQFDVGEWYPKIGEPILAEAVCDRIVHNSYTIVLSGDSMRKRNGIAE

SEQ ID NO: 63893 - DNA, 1062 bp, Unknown
  Obtained from environmental sample
  misc_feature (1)..(1062): n is a, c, g, or t
gtggcggtattgccgtactcaggatatacctacgtcgaagcgtttttgtctcaaaatgagcaggcatggatacaagcccatgttaatgcctttgggtattttggcggagtagcgcggattctggtaccggacaatctgaagaccggcattgccaaacatacccgccacgaaacagtgataaacaagacctaccagcaattggcagaacattaccgcaccgctgtattgccggcacgagtccattcccccaaagacaaggcaaccgttgaagggaacgtcggcgtcatctctacctggattaccgccgccttgcgaagccagcagttcctttccctgcgggagcttaatgaggctatccgctgcaagctctctgagtttaattccaagccctttcagaaaaaagagggctcaagggaaagcgctttccaggaagagaaaccgtttctcctgcctttgcctgagcatccttatgaattggcggtttggaaaatagccactgtccagtttaattaccacatcgccgtggaaggatgtaattactcggttccatacgagtatatcaaacaaaaggtcaatgtacgcctcactaaacgggttgtggaggtcttttatgccgaaagcaggattgcaagccacccccgcctttcaggaaagcccggccaatacagcacctatgaggaacatatgcctaaggagcacagggaatacctcgcctggaacggcgaacgctttctttcttgggcaggaaaaataggggaacatacaaaaactgttgttcagttcctgctctcccgaaaccagatagaacagcagggctataaagcctgcatacccctgctgaaactatccgattctgatcccccctgtgcttggaacaagcctgtaaaagggcgctctcgttcaccgagcgtcccagtcttaaaagcgttcagattatcctcaaatcagggcaggataatctgccccgcagcgagcccgctccaaggcttccggaaacatccgagcgcgccttcacacgcggcaaggattattttaaacggagggaggaagaataatgcttaa

SEQ ID NO: 63894 - protein, 353 aa, Unknown
  Obtained from environmental sample
  DOMAIN (2)...(143): Integrase core domain
  misc_feature (1)..(353): Xaa is any amino acid
MAVLPYSGYTYVEAFLSQNEQAWIQAHVNAFGYFGGVARILVPDNLKTGIAKHTRHETVINKTYQQLAEHYRTAVLPARVHSPKDKATVEGNVGVISTWITAALRSQQFLSLRELNEAIRCKLSEFNSKPFQKKEGSRESAFQEEKPFLLPLPEHPYELAVWKIATVQFNYHIAVEGCNYSVPYEYIKQKVNVRLTKRVVEVFYAESRIASHPRLSGKPGQYSTYEEHMPKEHREYLAWNGERFLSWAGKIGEHTKTVVQFLLSRNQIEQQGYKACIPLLKLSDSDPPCAWNKPVKGRSRSPSVPVLKAFRLSSNQGRIICPAASPLQGFRKHPSAPSHAARIILNGGRKNNA

SEQ ID NO: 63895 - DNA, 474 bp, Unknown
  Obtained from environmental sample
  misc_feature (1)..(474): n is a, c, g, or t
atgaccaattatcgggagattctcagactaaatcagcttgggattcttaagcaagacattgccaaatcctgcgggtgttcaaggaataccgtggcaagcgtcattaaaaatgcacaggaaaaaggactgggatgggaaacagctacagggcttaataacaacgaactggccgggtgtctgtttccgggtaatcagaaaaagccggtttacaaaataccggactgggaatatatccatcgggaaatggctaanagcggagttacgctcagtctgttatggacagaatactgcgagcaatgccggcagaacaatgaaataccctacaagacaactcagttctaccagtattacagcgactatgttaagaaaacaaaggcaaccatgcacatcggccataaaccgggtgaaatcatggaagttgactgggctggaaaagcagcgttatccgcaataccgattcaggagaacctataa

SEQ ID NO: 63896 - protein, 157 aa, Unknown
  Obtained from environmental sample
  misc_feature (1)..(157): Xaa is any amino acid
MTNYREILRLNQLGILKQDIAKSCGCSRNTVASVIKNAQEKGLGWETATGLNNNELAGCLFPGNQKKPVYKIPDWEYIHREMAXSGVTLSLLWTEYCEQCRQNNEIPYKTTQFYQYYSDYVKKTKATMHIGHKPGEIMEVDWAGKAALSAIPIQENL

SEQ ID NO: 63897 - DNA, 750 bp, Unknown
  Obtained from environmental sample
  misc_feature (1)..(750): n is a, c, g, or t
atgcgttccgggggagatgcgaggccgctagacgtatgttacaacgttcaaacggtggtagacagcaagaatcacttgattgttgactttgacatagcggaacgctctgacgacaaggggaaccttcttggcatgtcagagaaggcgaaagaaatactgggagttgaaacaataaccaatcttgcggacaaagggtattacgacggggaagacatcgcggcttgtgaagcggctggtgtaacctgccttgtagcgaaaccgaagcccggcggggcaaagaaagaagaaggcttcacccgcagggattttgagtatgacaaggaacaagactgctatgagtgtccgtgtaaaaacaagatgaggtatatgtgcaatcagaaacacagtgacggcaaggagtaccgggtatacgccaattatggggcgtgcggcaaatgccctgagaaagacaaatgcacggaaggtgaataccgccagatactcaggctgccgtatcaggacacgcttgacgttgtggatgagcggacacggaataacaaagacctgtaccggaggaggcaggaaatagtggaacatgtatttggcacggtcaaggcagtgtggggatacaagcaatttttatgccgcatcaagcctaaggtgagtgccgaggtatcattggcatatttggcatataatatgaggcgtgttatcaatatattcacggggaaacgggaaaatccggcggcagtattggggcagatggcataa

SEQ ID NO: 63898 - protein, 249 aa, Unknown
  Obtained from environmental sample
  DOMAIN (6)...(227): Transposase DDE domain
  misc_feature (1)..(249): Xaa is any amino acid
MRSGGDARPLDVCYNVQTVVDSKNHLIVDFDIAERSDDKGNLLGMSEKAKEILGVETITNLADKGYYDGEDIAACEAAGVTCLVAKPKPGGAKKEEGFTRRDFEYDKEQDCYECPCKNKMRYMCNQKHSDGKEYRVYANYGACGKCPEKDKCTEGEYRQILRLPYQDTLDVVDERTRNNKDLYRRRQEIVEHVFGTVKAVWGYKQFLCRIKPKVSAEVSLAYLAYNMRRVINIFTGKRENPAAVLGQMA

SEQ ID NO: 63899 - DNA, 351 bp, Unknown
  Obtained from environmental sample
  misc_feature (1)..(351): n is a, c, g, or t
gtggtagatcatgattttccaatcaaagaactgggaaaagtaacgccgtacggggtatatgacataggtagaaatgaagggtttgtcaatctgggaatttcctcagacacatcggaatttgcggtagaaagcatatcaaggtggtggttgacattagggaaaaacacttatccgaaagcaaaaaaaatctatatcaattgtgatggtggtggcagcaatgggagcagaaacaaacttttcaagttccaattgcagcaattagcgaaccagagcggccttgaaatccatatatcacattttggactttaccccaataggcgcacacagtttaagcggggttacctaagctaa

SEQ ID NO: 63900 - protein, 116 aa, Unknown
  Obtained from environmental sample
  DOMAIN (1)...(113): Rhodopirellula transposase
  misc_feature (1)..(116): Xaa is any amino acid
MVDHDFPIKELGKVTPYGVYDIGRNEGFVNLGISSDTSEFAVESISRWWLTLGKNTYPKAKKIYINCDGGGSNGSRNKLFKFQLQQLANQSGLEIHISHFGLYPNRRTQFKRGYLS

SEQ ID NO: 63901 - DNA, 852 bp, Unknown
  Obtained from environmental sample
  misc_feature (1)..(852): n is a, c, g, or t
atgcagagcttgcccgcctgcggaaagagaacaaagcgctcagggaggcaaatgaaatttaaaaaaagcggcggtcatcttcgcgcanacagacccccagtgacggcatatcaattcatgaaagcgaatcaaaacgagtacgccgttaaggagatggccaagctttttggggtaagccgtagtgcctattaccgatgggccaggaacggggcttcgcagcggcgtaaagcagacgatgcggagctggtgcgccttattcttgaaatagcggcgaatcatcaccgccggtatggcagcccgcgggtacgccgggaacttcgcgatacctacggaaaacgggttagccttaagaaagtagcccgcctgatgcgggaaaacggccttaacgcccgaagaagcaggaagcatatcccgacgaccgactccaaccatgcccttgcagtctttgagaacgtactgtcccgggagtttcatgccgaatccggcggcgtaaagtgggtttcggacattacctatctgcgtacgataaatggctgggtatacctgaccatagtgcttgacctgtttgaccggaaaatcattggctgggcgcttagccttggcatggaggcttccgagacagtcattgccgcttttgaaatggcagtcaaaaacaggagccctcaaggcggcctgatattccattcggacaggggcgtccagtattgcgcccaatccttccaggatgttttgagggaaagatctcctacagttaggcagagcatgagcaggaagggcaattgctgggacaacgacgtgtgccgaatcgtttttcaagccactgaagagggaactggaaacattggacggtaa

SEQ ID NO: 63902 - protein, 283 aa, Unknown
  Obtained from environmental sample
  DOMAIN (158)...(283): Integrase core domain
  misc_feature (1)..(283): Xaa is any amino acid
MQSLPACGKRTKRSGRQMKFKKSGGHLRAXRPPVTAYQFMKANQNEYAVKEMAKLFGVSRSAYYRWARNGASQRRKADDAELVRLILEIAANHHRRYGSPRVRRELRDTYGKRVSLKKVARLMRENGLNARRSRKHIPTTDSNHALAVFENVLSREFHAESGGVKWVSDITYLRTINGWVYLTIVLDLFDRKIIGWALSLGMEASETVIAAFEMAVKNRSPQGGLIFHSDRGVQYCAQSFQDVLRERSPTVRQSMSRKGNCWDNDVCRIVFQATEEGTGNIGR

SEQ ID NO: 63903 - DNA, 1107 bp, Unknown
  Obtained from environmental sample
  misc_feature (1)..(1107): n is a, c, g, or t
ttggagacgaagaccccgcaagccgcgnctttaaaattaaaaggtcccgatgttatatcgacaattttaatgcttggtttgcaaggttccggaaaaaccacaagttcggcgaaacttgccctgcgtcttaaaaaagaggggcgcaaaccgctgcttgtagcgtgcgacttaatccgtcccgccgctatggaacagcttgctgttctcggcggacaaataggaatccccgttcacaaagaagacggcgcaaaggacagcgtaaaagtttataagaatgccttgtcgtgggcaaaacaaaatttgatcgatactctcatcatcgacacaacgggacgcatgcaaattgacgaaccgatgatgcaggagctttccaatcttaaaaacgccgcggctccagatgaaatgcttttagtagccgactcgatgacgggacaagccgccgcggacattgcaaaaacatttgacgaaaaaatcgggcttaccggagtaatcctaagcaagttcgattccgacacacgcggcggcgcggcgctctcgctgaaaacagtaacaggaaaaccattaaagtttacaggtactggagaaaagccggaagactttgaacctttccaccccgaaagaatcgccggacgaatactcggcatgggcgatgttgtaagtcttgtagaaaaagctcaggaagttatagatcataaagaagcgttggaactccagaaaaaaatggagaaagaaaattttactcttgacgactggctgaaccaaatccgctctcttaaaaaaatgggttctctgcaaaaaatgttagagatgattcccggtatgcagggacagataagcgaagacgatattgataaagccgaattaaaacagcaggaagcgattttaagttccatgacgattaaagagcgcaacaatcacttgattatcggaccgccgcgaagaagcagaatcgcgcgtggatcgggaacgtccgtcgctgaggtggcgaggctgttaaaaaagtttgagaaaatgcgcggcatgatgaaaaaaatggcaaagggcgcaagaggcggggggatgcctgggatgcctgggatgcctgggatgccgggaatgtttcagtaa

SEQ ID NO: 63904 - protein, 368 aa, Unknown
  Obtained from environmental sample
  DOMAIN (245)...(342): Signal peptide binding domain
  misc_feature (1)..(368): Xaa is any amino acid
METKTPQAAXLKLKGPDVISTILMLGLQGSGKTTSSAKLALRLKKEGRKPLLVACDLIRPAAMEQLAVLGGQIGIPVHKEDGAKDSVKVYKNALSWAKQNLIDTLIIDTTGRMQIDEPMMQELSNLKNAAAPDEMLLVADSMTGQAAADIAKTFDEKIGLTGVILSKFDSDTRGGAALSLKTVTGKPLKFTGTGEKPEDFEPFHPERIAGRILGMGDVVSLVEKAQEVIDHKEALELQKKMEKENFTLDDWLNQIRSLKKMGSLQKMLEMIPGMQGQISEDDIDKAELKQQEAILSSMTIKERNNHLIIGPPRRSRIARGSGTSVAEVARLLKKFEKMRGMMKKMAKGARGGGMPGMPGMPGMPGMFQ

SEQ ID NO: 63905 - DNA, 378 bp, Unknown
  Obtained from environmental sample
  misc_feature (1)..(378): n is a, c, g, or t
atgccgagtattcgtccggcgattctttcggggtggaaaggttcaaagtcttccggcttttctccagtacctgtaaactttaatggttttcctgttactgttttcagcgagagcgccgcgccgccgcgtgtgtcggaatcgaacttgcttaggattactccggtaagcccgattttttcgtcaaatgtttttgcaatgtccgcggcggcttgtcccgtcatcgagtcggctactaaaagcatttcatctggagccgcggcgtttttaagattggaaagctcctgcatcatcggttcgtcaatttgcatgcgtcccgttgtgtcgatgatgagagtatcgatcaaattttgttttgcccacgacaaggcattcttataa

SEQ ID NO: 63906 - protein, 125 aa, Unknown
  Obtained from environmental sample
  misc_feature (1)..(125): Xaa is any amino acid
MPSIRPAILSGWKGSKSSGFSPVPVNFNGFPVTVFSESAAPPRVSESNLLRITPVSPIFSSNVFAMSAAACPVIESATKSISSGAAAFLRLESSCIIGSSICMRPVVSMMRVSIKFCFAHDKAFL

SEQ ID NO: 63907 - DNA, 990 bp, Unknown
  Obtained from environmental sample
  misc_feature (1)..(990): n is a, c, g, or t
gtgagtatcatcgtaaacggatacagtctgccgaacattccctgggaagacagaccgtcagacagcgaccccaaaaaggagctgatgtggcggttttcaaaaaacccgattattcccagggatttaactttaaggtccaacagcatttttaacagcgctgttgttccttttaagggagagtttgcgggcgttttccgctgcgatgatacttcgcgtcaaatggagattcacgcggggcgcagtaaagacggaatcaactgggttattgaagatgaaccgattaagtttatcaagacaagcccggacatacctgattccgattataaatacgacccacgcgttatttttatagaagaccgttattacataatgtggtgtaacggttatcacggtccatgcctcggcttgggctatactgaagattttgaaaaattttatcaaatggaaaatgtggtgatgcccttcaacaggaacggagcccttttcccccgcaagattggaaaaaattacgcaatgtacagccgccccagcgattcagggcatacccccttcggcgatattatttattccgaaagccccgatctcatttactggggcaaacatcgtcatgttatgtctccgacaagcggatggcaaagcacaaagataggcgcgggtccctgccccattgaaacatctgaaggctggctggttttttatcacggggtactgacaagctgcaacggctttgtgtactcgttcagcgcggcattaatggatcttgaaaagccgtggaaagttatagcgcgcccaaaaccgtacatcatcaacccacgcgaactttacgaattagccggcgatgtgcccaatgttacattccctgtagccgcgcttgtagacaaagacacaggcaaggtggcaatttattacggctgcgcggatacggtaacaggacttgtctttgggaagatagatgagatagtcgcttggataaaagcaaataaaatttaa

SEQ ID NO: 63908 - protein, 329 aa, Unknown
  Obtained from environmental sample
  DOMAIN (10)...(326): Domain of unknown function (DUF377)
  misc_feature (1)..(329): Xaa is any amino acid
MSIIVNGYSLPNIPWEDRPSDSDPKKELMWRFSKNPIIPRDLTLRSNSIFNSAVVPFKGEFAGVFRCDDTSRQMEIHAGRSKDGINWVIEDEPIKFIKTSPDIPDSDYKYDPRVIFIEDRYYIMWCNGYHGPCLGLGYTEDFEKFYQMENVVMPFNRNGALFPRKIGKNYAMYSRPSDSGHTPFGDIIYSESPDLIYWGKHRHVMSPTSGWQSTKIGAGPCPIETSEGWLVFYHGVLTSCNGFVYSFSAALMDLEKPWKVIARPKPYIINPRELYELAGDVPNVTFPVAALVDKDTGKVAIYYGCADTVTGLVFGKIDEIVAWIKANKI

SEQ ID NO: 63909 - DNA, 1023 bp, Unknown
  Obtained from environmental sample
  misc_feature (1)..(1023): n is a, c, g, or t
ttgtatcgccagaaccttatctatcctgtagggaaaagtaaagcggttgactggaaagctactactcccgttgaatggaacagatccgtaacatcagcttttacatttaggaatggacgcactcaagacgcttatgcttttgccgaaggttacggcggaagctatcacgccgcttgtgtgttctttaataaaagattattcaaagaagccggatttccagataactatctttatgaccttcagaaatccggacaatggacatgggataaattcatggaagttgcaaagaagcttactatagataaaaacaacgacggtattcccgatacatacgctatgcctgcggacctttccacggaaattctggacgcttttgtttccagtaacggcgcaatgtatgttaataaagatccaagaaccggaatgctttttaatgcttcaaacagacctgaatttatcgaagctgttaggttttatatgcagttaagagacgcaaaagttatgaaaccgaaaccgcccggagacaataccccctggaactggcatattcccgaatttaacgacggcaaagtcgctatgcgaattgaccagcaatatttggcgacaaacgatcttcgtaacatgaaagatgactggggcatggtgcttccgccgaaaggacccagatcaaagaactatgtagtatttaacgatgaaaacgtaagagtaattcccgccaagggatggacagacgctcaggttgacgcaattatttgggcttatcagtcttgggtaacacctcctgatgataactggagactttcggaatatcctaactatagggatagaagagccgttgatgaaacagttgctttaatccgcgaccagaaactttggcagtggaaatatcaccttcatgttcccggactccaacgcggcggtatcgcttgggaaatctggtatcatgacggcgaaccggcgcagttagttgaaaaagtttcaaataactggaacgccttgattgccgacgcgaacggactgtaa

SEQ ID NO: 63910 - protein, 340 aa, Unknown
  Obtained from environmental sample
  misc_feature (1)..(340): Xaa is any amino acid
MYRQNLIYPVGKSKAVDWKATTPVEWNRSVTSAFTFRNGRTQDAYAFAEGYGGSYHAACVFFNKRLFKEAGFPDNYLYDLQKSGQWTWDKFMEVAKKLTIDKNNDGIPDTYAMPADLSTEILDAFVSSNGAMYVNKDPRTGMLFNASNRPEFIEAVRFYMQLRDAKVMKPKPPGDNTPWNWHIPEFNDGKVAMRIDQQYLATNDLRNMKDDWGMVLPPKGPRSKNYVVFNDENVRVIPAKGWTDAQVDAIIWAYQSWVTPPDDNWRLSEYPNYRDRRAVDETVALIRDQKLWQWKYHLHVPGLQRGGIAWEIWYHDGEPAQLVEKVSNNWNALIADANGL

SEQ ID NO: 63911 - DNA, 864 bp, Unknown
  Obtained from environmental sample
  misc_feature (1)..(864): n is a, c, g, or t
gtggaaagagccgacgaatttgaaagcggagacatatccgaactcctgcaagacgaagactcgccggaattcgaggagttggccgtcgaccaaaagaaaaaaataccgatgaaagatataaaggatataaacaagtacgaaaaagacattatagaggacatcaacaatcttaaaaatctgctggatgagttggaaaaattttcattggcgaaggatttcaagcttaaacggctgatcgaggcggtagaagagcatatcctagacgctgacggcagccaaaaggcgttgatattcacggcgtacggcgacaccgccgagtacctgtttagttgcctgagggtctatttcggcaaccgcgccaatgtggaatgcgtcaccgccgacacaaaaaacacggacgatatcctcaaaagattttcgccgaaaactcaaaaagcaagcgaagagcaactcaaaaatccagtcaatattctaatcgctacggatgttttgggcgaggatcggaatctgcaggattgcgatttcgtaataaactacgatatccattggaatccaatgcgcatcgttcaacgccttggttgcgtaaaccgtatcggcggcaaagacaaggtcgtccgttgcgtgaacttttggtcaagcaataacatagacgagtacttagagcaaccggagcgcatagagacgcgattggccgcgatgacgatagccggctccgaaatatccgtcggcgtcattgataacaacggcaagaaggaccgcgccgtcgcgctcgaaagagagcggataaaaaagaatttaaggatgatgcatgataacatagaagatattgaaccggaaaacttcggcctaagccacctttcttag

SEQ ID NO: 63912 - protein, 287 aa, Unknown
  Obtained from environmental sample
  DOMAIN (116)...(199): Helicase conserved C-terminal domain
  misc_feature (1)..(287): Xaa is any amino acid
MERADEFESGDISELLQDEDSPEFEELAVDQKKKIPMKDIKDINKYEKDIIEDINNLKNLLDELEKFSLAKDFKLKRLIEAVEEHILDADGSQKALIFTAYGDTAEYLFSCLRVYFGNRANVECVTADTKNTDDILKRFSPKTQKASEEQLKNPVNILIATDVLGEDRNLQDCDFVINYDIHWNPMRIVQRLGCVNRIGGKDKVVRCVNFWSSNNIDEYLEQPERIETRLAAMTIAGSEISVGVIDNNGKKDRAVALERERIKKNLRMMHDNIEDIEPENFGLSHLS

SEQ ID NO: 63913 - DNA, 1056 bp, Unknown
  Obtained from environmental sample
  misc_feature (1)..(1056): n is a, c, g, or t
gtgagcctagtcaagatgttggaaaaaaagaacggcgcaattttggcggacgccgtcggcttgggcaaaacgttcaccgcgctggcggttatcaaatactaccgtatgcaaaacagggaagttatcgtaattgcccctaagcggctcaaacagtattgggaacaatatacttggcacgacggcactgttccggagggcgataattttgactatgaaataatactctatccggaattaaccgcaggcaggcttagcgaacggcttgaatatttaacgaatgaaaagcccaaactctttgtcatagacgatagccacaatctgcaaaacgacgaggacagcaggtatcagtttttactggagataatattacggaataacagcgatgccaaggtgcttatgctgtcggccgcgccgttgaataattcgttttggggcatccgcaaccggattaagttgataagcgggtttgaaagcatagacgccgtcttcaggcgggcgcaggagaggctaaacgagtgggcgaaagcggagcgtccggccatcggcgcgcttataggggacttgcgcggaatcgacggcggcagccttttgaatttgacggatacccttattttagccagaacaagaaagatggtgacgaccgcggagatctcctttccgaaactcgaaaagccggcgaacatctttgagaccccaaacggtgaggatgatcccaagaccatcgccgaaataatagagatattgccggtgcgtttttccgcgtatatgccggcggtctactcgggtctttcaagcaagcgcgtcgccccgaaagagagtaagaaatcatctttcctcgtaaaaatgatacacctactgctcgtaaaacgcctcgaaagctcgtgggtgtcgttcaaggccacgctggaaaaggtattggcataccataagtccgtgctgcagatgtggaaagagccgacgaatttgaaagcggagacatatccgaactcctgcaagacgaagactcgccggaattcgaggagttggccgtcgaccaaaagaaaaaaataccgatga

SEQ ID NO: 63914 - protein, 351 aa, Unknown
  Obtained from environmental sample
  DOMAIN (3)...(288): SNF2 family N-terminal domain
  misc_feature (1)..(351): Xaa is any amino acid
MSLVKMLEKKNGAILADAVGLGKTFTALAVIKYYRMQNREVIVIAPKRLKQYWEQYTWHDGTVPEGDNFDYEIILYPELTAGRLSERLEYLTNEKPKLFVIDDSHNLQNDEDSRYQFLLEIILRNNSDAKVLMLSAAPLNNSFWGIRNRIKLISGFESIDAVFRRAQERLNEWAKAERPAIGALIGDLRGIDGGSLLNLTDTLILARTRKMVTTAEISFPKLEKPANIFETPNGEDDPKTIAEIIEILPVRFSAYMPAVYSGLSSKRVAPKESKKSSFLVKMIHLLLVKRLESSWVSFKATLEKVLAYHKSVLQMWKEPTNLKAETYPNSCKTKTRRNSRSWPSTKRKKYR

SEQ ID NO: 63915 - DNA, 561 bp, Unknown
  Obtained from environmental sample
  misc_feature (1)..(561): n is a, c, g, or t
atgctgttggacaataccaaagacggaactacggataagaccgtcgccggatggctttcgaagtataccgaggccggcgatatggacgtcgtgacaggctattttactattggagccatatcgtggctaaacgagcacgtaaacagtaaaatcgagcgatttcgcctcatttggggcggaatcgccggcaatgccgcaaaatttgacctactgaaccaagagattgatatatgtaacgccctcaggttaaagaaactcgccgagaacgcaatcaagtttttagagcaggataaggtggaggtcaagaccatagagtcggacttctgccacgcgaagctgtttctgctgaacgccaaggacgacagccgtaagttcttccttaccgganactccaacctgaccgaagccggacttggggtggggcctatgagccacatagagctgaacaccgcggttacgggcggcggcgtcgagcataatgagttcgcggcgtggttcgacgggctgtgggacatacgcagaagcttaaggaggctaagcaggagttcttggacgaaatag

SEQ ID NO: 63916 - protein, 186 aa, Unknown
  Obtained from environmental sample
  misc_feature (1)..(186): Xaa is any amino acid
MLLDNTKDGTTDKTVAGWLSKYTEAGDMDVVTGYFTIGAISWLNEHVNSKIERFRLIWGGIAGNAAKFDLLNQEIDICNALRLKKLAENAIKFLEQDKVEVKTIESDFCHAKLFLLNAKDDSRKFFLTGXSNLTEAGLGVGPMSHIELNTAVTGGGVEHNEFAAWFDGLWDIRRSLRRLSRSSWTK

SEQ ID NO: 63917 - DNA, 1080 bp, Unknown
  Obtained from environmental sample
  misc_feature (1)..(1080): n is a, c, g, or t
atgtcttcacagtatggtaaaaaactaagaatatcgatcttcggacaatcgcattctccggcgattggcgtgagcattgacggtttaccgagtggaatcaaaattgatattgaagaactgcggatattcctcaaacgcagggcccctgggcaaaacgacatttccacggcgcgcgcggaagatgacgcgccggagattttatcagggctggtggaaaccgtcacctgcggcgcgccgcttgccataattatccgcaacaaagacgcccgttcagccgattaccgtgaactgcgggatattccccgcccgtcacatgccgattttgccgcgcacataaagtacggcggatttcaggatgtggcaggcggcgggcatttttccggcaggctgacagcgccgttgtgcgccgccggcgggatatgtttacagatattgcgcggtctgggaatcagcattggggcgcatatattgcggattggcaacgcagaagacgatcggtttgaccctgtgggcgtatcaaacgcggaattcgagacaattctcgaaaacccgctgcccgtactgaatcgtgaagcgggcgaggcaatgaaaaaacaaattctggaagcgaaggaaaaaggcgattcggtcgggggcattgtcgagtgcgcggctatcggactgcctgtcgggttaggcgatccgatattcgacggcattgagaaccgtatcgccgggatcatcttcggcataccgggcgcgaagggtattgaattcggaagcggtttcgccgtcgcaggacgcaggggatctgagaacaacgacagtttttttatggatggggaaaaggtaagaacacgcacaaacaactcaggcggcatattgggcgggataacaaacggtatgcccgtcctgttccgcgcagcgttcaagcccacgccgtctatcggcatggaacaggacagcgtcagcctgtcacaggcgaaagatgccgttttgcgggtaaagggccggcatgatccctgtatagttccccgggccctgccctgcgtggaagcggcggcggccatcgcgttatacgacgcttttttggatcaataa

SEQ ID NO: 63918 - protein, 359 aa, Unknown
  Obtained from environmental sample
  DOMAIN (9)...(359): Chorismate synthase
  misc_feature (1)..(359): Xaa is any amino acid
MSSQYGKKLRISIFGQSHSPAIGVSIDGLPSGIKIDIEELRIFLKRRAPGQNDISTARAEDDAPEILSGLVETVTCGAPLAIIIRNKDARSADYRELRDIPRPSHADFAAHIKYGGFQDVAGGGHFSGRLTAPLCAAGGICLQILRGLGISIGAHILRIGNAEDDRFDPVGVSNAEFETILENPLPVLNREAGEAMKKQILEAKEKGDSVGGIVECAAIGLPVGLGDPIFDGIENRIAGIIFGIPGAKGIEFGSGFAVAGRRGSENNDSFFMDGEKVRTRTNNSGGILGGITNGMPVLFRAAFKPTPSIGMEQDSVSLSQAKDAVLRVKGRHDPCIVPRALPCVEAAAAIALYDAFLDQ

SEQ ID NO: 63919 - DNA, 699 bp, Unknown
  Obtained from environmental sample
  misc_feature (1)..(699): n is a, c, g, or t
atggccgccgccgcttccacgcagggcagggcccggggaactatacagggatcatgccggccctttacccgcaaaacggcatctttcgcctgtgacaggctgacgctgtcctgttccatgccgatagacggcgtgggcttgaacgctgcgcggaacaggacgggcataccgtttgttatcccgcccaatatgccgcctgagttgtttgtgcgtgttcttaccttttccccatccataaaaaaactgtcgttgttctcagatcccctgcgtcctgcgacggcgaaaccgcttccgaattcaatacccttcgcgcccggtatgccgaagatgatcccggcgatacggttctcaatgccgtcgaatatcggatcgcctaacccgacaggcagtccgatagccgcgcactcgacaatgcccccgaccgaatcgcctttttccttcgcttccagaatttgttttttcattgcctcgcccgcttcacgattcagtacgggcagcgggttttcgagaattgtctcgaattccgcgtttgatacgcccacagggtcaaaccgatcgtcttctgcgttgccaatccgcaatatatgcgccccaatgctgattcccagaccgcgcaatatctgtaaacatatcccgccggcggcgcacaacggcgctgtcagcctgccggaaaaatgcccgccgcctgccacatcctga

SEQ ID NO: 63920 - protein, 232 aa, Unknown
  Obtained from environmental sample
  misc_feature (1)..(232): Xaa is any amino acid
MAAAASTQGRARGTIQGSCRPFTRKTASFACDRLTLSCSMPIDGVGLNAARNRTGIPFVIPPNMPPELFVRVLTFSPSIKKLSLFSDPLRPATAKPLPNSIPFAPGMPKMIPAIRFSMPSNIGSPNPTGSPIAAHSTMPPTESPFSFASRICFFIASPASRFSTGSGFSRIVSNSAFDTPTGSNRSSSALPIRNICAPMLIPRPRNICKHIPPAAHNGAVSLPEKCPPPATS

SEQ ID NO: 63921 - DNA, 1323 bp, Unknown
  Obtained from environmental sample
  misc_feature (1)..(1323): n is a, c, g, or t
ttgaacttcaccgaccggaacgaaagtacaggggaggttcccctcttgaacaacaatgtgaaaatttcaccatgcaggttaaacggcgttgtccgcgcgatcccttccaagtcgcaggcgcacagggcgctcatctgcgccgccttagctgataaaccaacaactatagaatgcgaaggcggttccgatgacatagcggcaactgcggactgcctgtccgcgctgggagctaaaattgagcgcgaaacaggcttttatgttgtacaccccctgaaacgggagacaaacgacattgctgctctgggctgcggtgaaagcggaagcacgttccggtttatgctgcccatcgtcggcgcgctgggacgtaaagcttcgtttatcctgaaagggcggcttcccgagcgccccctctccccgttatacgaagagcttgtccgccacggatgcgaactgtcgccccagggtactgtcccgtttctttccacgggtcagcttgcgccggggtcttattcccttgacgccggcgtatcgtcgcaatttatcagcggcctgttattcgccctgcccctgctcgacggagacagcgaattgcggctaacagggcaggcggagtcgtttccctatattgaattaacgcttgggatgctggaaatatttaatataaaaacggaatttaagaacaatattttttttataccgggtggacaaacgtattgctctccgggcaaggctcatgtagagggcgattggtctaacgccgcgttctggctgagcgcgggggctgtcggaaaaggcagcgttacctgtacaggtttgaattttaaatcacggcagggcgaccgcgcgattctggacattctgtcaaagttcggcgcgagtattgaaattattgaaagcgactccagggtaacagtatccggcgggaaactgcggggcattgagatcgacgcgcgggatattcccgatctcgttccgattttagcggttgtcggctcgagggccgtgggaacaaccgttattcgcaacgcggctcggcttcgcgccaaggaaagcgacagacttgccgccgtaaacgacatattacgcagtcttggcgcggacgcggacgagacggcggacggacttgtcatacacggcggaaaggctttcaaaggcggacaggtatcatcctgcggggatcaccggatcgccatgtccgcggcaatcgcggcgacagtatgcgcggagccggttgttattcagggcgcgcaggcggtcaataaatcataccccggattttttgacgatctgcgctcgcttggcccattggtcgaagcgatatag

SEQ ID NO: 63922 - protein, 440 aa, Unknown
  Obtained from environmental sample
  DOMAIN (22)...(430): EPSP synthase (3-phosphoshikimate 1-carboxyvinyltransferase)
  misc_feature (1)..(440): Xaa is any amino acid
MNFTDRNESTGEVPLLNNNVKISPCRLNGVVRAIPSKSQAHRALICAALADKPTTIECEGGSDDIAATADCLSALGAKIERETGFYVVHPLKRETNDIAALGCGESGSTFRFMLPIVGALGRKASFILKGRLPERPLSPLYEELVRHGCELSPQGTVPFLSTGQLAPGSYSLDAGVSSQFISGLLFALPLLDGDSELRLTGQAESFPYIELTLGMLEIFNIKTEFKNNIFFIPGGQTYCSPGKAHVEGDWSNAAFWLSAGAVGKGSVTCTGLNFKSRQGDRAILDILSKFGASIEIIESDSRVTVSGGKLRGIEIDARDIPDLVPILAVVGSRAVGTTVIRNAARLRAKESDRLAAVNDILRSLGADADETADGLVIHGGKAFKGGQVSSCGDHRIAMSAAIAATVCAEPVVIQGAQAVNKSYPGFFDDLRSLGPLVEAI

SEQ ID NO: 63923 - DNA, 909 bp, Unknown
  Obtained from environmental sample
  misc_feature (1)..(909): n is a, c, g, or t
atgcctttattaagtgagcttagggaatttaaagcctcttttgccaatataggcgatcaaaaagccaatcttgcggcaaagaaaattcccattaacgatttgaagcttcccgaaaccgaagcggagccggcgtctcctgaggagccggcgtctcctgaggagccggcgtctcctgcggatctgatgcctgaaacaaccgaggcagacacatccgggggtgtttccgggggaggcattgatgatttaaatttcgccgatcttttaaacgctgtgccgggcgacctttctgtgccggatgatattgaagttcagagcgcagccgccgacgaagccggcgatagcagtgagcagccagtggatagcgcggatagcgcggaaaaaaccgaggatttgtacttccctgatgagcttttatccaatctttccgaagaaattgaacctgttcccgccgctgccgactctttggatagcgatagcggctctaacctggataatcttgataacctggagaaatttagtttccctgacctccccgccgagcctgctcctgcagacgcgtctgcccagacagacacgcctgtaccggcagatgagcctgtgccgacagacatagagggagcgttggatttaagtgtttttgatgatcttggcgatttcggagacttgggcgcttccagtagtgaaggtgagacatccgatgtaagcgattctggcctgcccgaacctcaaccgagcccgcagggcgaaggttcccctcttgaacttcaccgaccggaacgaaagtacaggggaggttcccctcttgaacaacaatgtgaaaatttcaccatgcaggttaaacggcgttgtccgcgcgatcccttccaagtcgcaggcgcacagggcgctcatctgcgccgccttagctga

SEQ ID NO: 63924 - protein, 302 aa, Unknown
  Obtained from environmental sample
  misc_feature (1)..(302): Xaa is any amino acid
MPLLSELREFKASFANIGDQKANLAAKKIPINDLKLPETEAEPASPEEPASPEEPASPADLMPETTEADTSGGVSGGGIDDLNFADLLNAVPGDLSVPDDIEVQSAAADEAGDSSEQPVDSADSAEKTEDLYFPDELLSNLSEEIEPVPAAADSLDSDSGSNLDNLDNLEKFSFPDLPAEPAPADASAQTDTPVPADEPVPTDIEGALDLSVFDDLGDFGDLGASSSEGETSDVSDSGLPEPQPSPQGEGSPLELHRPERKYRGGSPLEQQCENFTMQVKRRCPRDPFQVAGAQGAHLRRLS

SEQ ID NO: 63925 - DNA, 2193 bp, Unknown
  Obtained from environmental sample
  misc_feature (1)..(2193): n is a, c, g, or t
gtgcccccgccagcaggctacgtctgggatgccccgacaaccgacctttacgcaggcaacgggcaatccttcgcggcaatctacaccgaccccagcggcaactacgaatcagccagaggagacatcacggtgaatgtggcaaaagccggcggcttccacaacaccgcaccccccagccgccaaatatcagcatcaaacaccgaaacgcacaccattgacctgggcatattagcgttcaacgaaaatgaccacggcgcaataacctactcgctgggagcattcacaggcgacaccgacatcctatccgccccgccctcgctcggcgaagacaaactcaccctatcctacacgggcaaccgcaaaacaagcggcagggcaacgcaggtcatcaacatcgtaagcggcaactaccgagacaccaccaccaccatcaccttcacggcaaccgcaaaagaggaagtaaaaatcaccggaatagcagcccaaaactccgtatatgacagcaaccccaaaagcggctacacaggcaccctaagcagcggaatatacacaggagcattgctaatccgatacacaggctcaggcatagacggcatcagcacaaccgcccccacagacgcaggcacatacacaataaaaatatccctgccggataccgccaaatacgtaggcgaatggagcgatgacttcaccattgaaaaagcaaaccctgcctacacagcaccaaccaacctaaccgccacctacggtcaaacgctggcagatgtcacattccccacagacaactgggcttggcaggaagcctcgacaaccgaagtaggcgatgccggacagcaaaagcacaaggcaacatacactcccgacgacacccacaactacaatgagaaaaaagacatagacgtgaccataaccgttgcaagagccaacccggatgtcacattccccacgtccgccaccataatctacggacaaaccctagccgatgccgtgttcgcaggtcagtccagcacaacggcaggcaaattcgcattcgctgagagcaccacgagcctgtccgtgacgcaaagcggcgcaaagcatgaggttgcattcacccccgcagacaccgccaaccacaacaccctcacgaaagacattgcagtcacggtgaagaaggcatcaggcttgagcgcagaaaaccgcaccatcctgatttcaacctcgaacaccagccctgacaaattcgagctgtccgacatcaccgtgagcagcgagctagaccacggcgcaatatcctacgcacttggagactacaacgccggcgacaacgtcctagccgccaaaccctcgctaagcaccagcggcgacaccctgaaatacacaggcacgggcaagacgagcggcacggcaacgcaggaaatcatagtcagaagcgacaactacgacaacgccaccgtcatcatcaccttccgggcaacccccaaaaccgaagttgccataggcggcttgacagtagtggaaaacatcatctacgacggcactgcaaaacgcggcgtaagcggcaccgcaaccagcggtgcatacaaaggtgtgctcacttacacctacacaggcgatggcatagcaaccccaaccaccgaacagcccaagaacgcgggcagctactggctcaccgtgtccgtgccgagcaccgaccccggctacttcggcgaggaaacatacccgttcaccatagcgaagaagcagatagccaagcccgaagtcacagccgcgaacctcgttcacaacggcaaggagcaatcggcaggcatagcggcgaatgacgcatacaccgtcacggacgacagaggcacagccgcgaagagctacaccgcaaaagttgtcctgaaagacaaagcaaaccacgaatgggcaggcggcggaaccgatgaccttctactgacttgggctatagcagaagcagggaccccaatcttctccagtcgtgaaaatcctatagtcgggcgaatcggggttcagacaatanacaacacaatcatgctctccaacctaccgagcaacgcgaaggtggaagtttacaacctgcaaggcaagcgtatatattcaaccactagccactccccactagccactagcctaaaaataaaggttcagacaaaaggaacatacatactaaaaatcaacaaccaaataatacgaatgcccgtaatgtaa

SEQ ID NO: 63926 - protein, 730 aa, Unknown
  Obtained from environmental sample
  misc_feature (1)..(730): Xaa is any amino acid
MPPPAGYVWDAPTTDLYAGNGQSFAAIYTDPSGNYESARGDITVNVAKAGGFHNTAPPSRQISASNTETHTIDLGILAFNENDHGAITYSLGAFTGDTDILSAPPSLGEDKLTLSYTGNRKTSGRATQVINIVSGNYRDTTTTITFTATAKEEVKITGIAAQNSVYDSNPKSGYTGTLSSGIYTGALLIRYTGSGIDGISTTAPTDAGTYTIKISLPDTAKYVGEWSDDFTIEKANPAYTAPTNLTATYGQTLADVTFPTDNWAWQEASTTEVGDAGQQKHKATYTPDDTHNYNEKKDIDVTITVARANPDVTFPTSATIIYGQTLADAVFAGQSSTTAGKFAFAESTTSLSVTQSGAKHEVAFTPADTANHNTLTKDIAVTVKKASGLSAENRTILISTSNTSPDKFELSDITVSSELDHGAISYALGDYNAGDNVLAAKPSLSTSGDTLKYTGTGKTSGTATQEIIVRSDNYDNATVIITFRATPKTEVAIGGLTVVENIIYDGTAKRGVSGTATSGAYKGVLTYTYTGDGIATPTTEQPKNAGSYWLTVSVPSTDPGYFGEETYPFTIAKKQIAKPEVTAANLVHNGKEQSAGIAANDAYTVTDDRGTAAKSYTAKVVLKDKANHEWAGGGTDDLLLTWAIAEAGTPIFSSRENPIVGRIGVQTIXNTIMLSNLPSNAKVEVYNLQGKRIYSTTSHSPLATSLKIKVQTKGTYILKINNQIIRMPVM

SEQ ID NO: 63927 - DNA, 813 bp, Unknown
  Obtained from environmental sample
  misc_feature (1)..(813): n is a, c, g, or t
atgaaaaatctctctctggtcgattccgcaattttcaatctcataaataaggaagctatgcgccaagaagatggcattgagcttatagcctctgaaaattacgtatccaaagccgttatggaagctatgggcagttgcttaaccaacaaatacagcgaaggctacattggcaagcgttactacggcggcaacgaggtgatagacgaagttgagcttctggctgtggagaggtgcaaaaagctctttggctgcgagcacgtaaatgttcagccgctttccggtagccctgcaaatgcggcggtttattttgcaaccataaaaccaggcgacaaagttctcggtttgcagctagaccacggcgggcatttatcccacgggcatcctgtgaatttttctggaatgctctataatttcacgcaatatcaggtggaaaaagaaacaggcagaatagatatggaaaaggtgcgggaaatagctctgcgcgaaaaaccaaaaatgattttggcaggtttttcggcatacagcagaaatttagactggaaaaaattcaaggaaatagcagacgaggttggcgcaatcacgtttgccgatattgctcatatagcaggcttaatagcaggcaaggcaatagatagccccgttccttattttgatattgtgagcaccacaacccacaaaactttgagaggtcctcgtggcgcaataataatgtgcaaagaggcttttgcaaaagccatagacaaatctgtgttcccaggtatgcagggcgggtcctcacgaccatttcactgcggcaaaagcagtgacttttga

SEQ ID NO: 63928 - protein, 270 aa, Unknown
  Obtained from environmental sample
  DOMAIN (4)...(270): Serine hydroxymethyltransferase
  misc_feature (1)..(270): Xaa is any amino acid
MKNLSLVDSAIFNLINKEAMRQEDGIELIASENYVSKAVMEAMGSCLTNKYSEGYIGKRYYGGNEVIDEVELLAVERCKKLFGCEHVNVQPLSGSPANAAVYFATIKPGDKVLGLQLDHGGHLSHGHPVNFSGMLYNFTQYQVEKETGRIDMEKVREIALREKPKMILAGFSAYSRNLDWKKFKEIADEVGAITFADIAHIAGLIAGKAIDSPVPYFDIVSTTTHKTLRGPRGAIIMCKEAFAKAIDKSVFPGMQGGSSRPFHCGKSSDF

SEQ ID NO: 63929 - DNA, 438 bp, Unknown
  Obtained from environmental sample
  misc_feature (1)..(438): n is a, c, g, or t
gtgacttttgaagaggcgttgcatcctgaatttcaaacttatgcaaagaatgttatagaaaatgcacgtgcaatggcggcagagcttatggcatctggttttaaaataatttccgatggcacagataatcaccttatggttgttgacgtaaccagcaagggaatttctggcaaagaagccgaacaggttttggatttggttggtatttcttcaagtcgttcaaccattccttttgaccctcgcaaacctatggatccgtctggggttcgcttgggaacagcggctatcacaactaggggctttgatacccaagacaccaaagcagttgcgaaagctattgcgcaggctattgaaaatcccaaagacgaagcaaagctgaaaagcataagggaaagcattctggagctgtgcagaaaaaggcctttgtatagagcttag

SEQ ID NO: 63930 - protein, 145 aa, Unknown
  Obtained from environmental sample
  DOMAIN (1)...(113): Serine hydroxymethyltransferase
  misc_feature (1)..(145): Xaa is any amino acid
MTFEEALHPEFQTYAKNVIENARAMAAELMASGFKIISDGTDNHLMVVDVTSKGISGKEAEQVLDLVGISSSRSTIPFDPRKPMDPSGVRLGTAAITTRGFDTQDTKAVAKAIAQAIENPKDEAKLKSIRESILELCRKRPLYRA

SEQ ID NO: 63931 - DNA, 1305 bp, Unknown
  Obtained from environmental sample
  misc_feature (1)..(1305): n is a, c, g, or t
atgggaaaaacactgactcaaaaaatttttgatactcatacggcggatcagccctttgaaggcatctttgtactgcggcttgacagggtattctgccatgaaattacaactcccatggcgatagacgatcttgtttcaaaaaaattggacaaggtttttgatccgtcaaaaattaaggcggtgatagatcatgtaacccctgcaaaggattcgcagacagcgctgcagggaaaaaccttgcgggactggactaggcggcacaatatcaaggacttttttgacatcggcagaaacggcgtttgccacgccattttcccggaaaaaggatttgtccgccccggctttacgattatcatgggcgacagccacacctgtacccacggggcgttcggcgcttttgccgccggagttggaaccactgatcttgaggtgggtatattgaagggcgtctgcgccttccgcaaacctgaaactttgcgtgtcaatttgcttggagaactgcctaagggcgtctctcctaaagacgtaattctcgctgtcatagccaaaataagcgtttcgggcgcgtcgggaaaagttatggaactgcgaggacctgtaatttcctctatgagcatggaaggcagaatgacaatctgcaacatggcaatcgaggcgggggcgacttgcggcgtatgtatgcctgacatgacaactgtaaattatttgtggcaatttatcggtcccgaaggcgataaaacctattcaagcaaagaagaagcgttaaaagatttttcaaaatggacaagcgatgacgacgctgaatattcaggcgttgtcgatattgactgttcaaaactggagccgcttgcaaccgttggctataaacccgatgaagtaaaacctgtgcgggaatttgccggaacaaaaatagatcaggtgtatatcggctcttgcaccaacggcagaatagaagaccttcgcgccgccgccgacgtgctgcgcggcaagaaaattgccgactctgtacgcgcaatcattgcgcccgctaccacagagatttacgcacaggctatcaaagagggacttattcaagttttccttgacgcgaattgctgtgtaacaaacgccacttgcggagcgtgccttggaatgtccaacggcgtgcttgccgaaggtgaagtttgcgcttccaccacaaatcgcaatttttacggacgcatgggtaagggcggcatggttcaccttgtcagccccgctgtcgcggcggcttccgccattgcgggcgcgattgccgcgccgatcagtattggggggcagtcatga

SEQ ID NO: 63932 - protein, 434 aa, Unknown
  Obtained from environmental sample
  DOMAIN (4)...(422): Aconitase family (aconitate hydratase)
  misc_feature (1)..(434): Xaa is any amino acid
MGKTLTQKIFDTHTADQPFEGIFVLRLDRVFCHEITTPMAIDDLVSKKLDKVFDPSKIKAVIDHVTPAKDSQTALQGKTLRDWTRRHNIKDFFDIGRNGVCHAIFPEKGFVRPGFTIIMGDSHTCTHGAFGAFAAGVGTTDLEVGILKGVCAFRKPETLRVNLLGELPKGVSPKDVILAVIAKISVSGASGKVMELRGPVISSMSMEGRMTICNMAIEAGATCGVCMPDMTTVNYLWQFIGPEGDKTYSSKEEALKDFSKWTSDDDAEYSGVVDIDCSKLEPLATVGYKPDEVKPVREFAGTKIDQVYIGSCTNGRIEDLRAAADVLRGKKIADSVRAIIAPATTEIYAQAIKEGLIQVFLDANCCVTNATCGACLGMSNGVLAEGEVCASTTNRNFYGRMGKGGMVHLVSPAVAAASAIAGAIAAPISIGGQS

SEQ ID NO: 63933 - DNA, 525 bp, Unknown
  Obtained from environmental sample
  misc_feature (1)..(525): n is a, c, g, or t
atgaaaatgtttggcggagaagttttatttcttgatcgcggcgacattaacaccgatgaaattatcccggcaaaatatttaaccgaggacacaagaatagcgttaaagcctcatcttttggaagacttaaaaataaaaggctttgatcccgcgaaagacattactggaaaaggagcggtactgacgagggcaaacttcggctgcggctcctcgcgtgaacacgctccgtgggcgcttgaggtaaacggtatcaatattgttatagcggaaagttttgcccgtatcttcaggcaaaatatgtacaactgcggcatgatcgcctgcgaagttccagccgcaaccttggaagaactgtttaaggaattcgcaaatgagaaaacaacattgacggttgatacagacaagggcagtttaagttttaaagcgggcgggaaagaaaaaacaatttctttcactcttaaaaattttgaaaaagctttagtagaagccggcggctgggttgaatacgcggcaaaacattactga

SEQ ID NO: 63934 - protein, 174 aa, Unknown
  Obtained from environmental sample
  DOMAIN (1)...(113): Aconitase C-terminal domain
  misc_feature (1)..(174): Xaa is any amino acid
MKMFGGEVLFLDRGDINTDEIIPAKYLTEDTRIALKPHLLEDLKIKGFDPAKDITGKGAVLTRANFGCGSSREHAPWALEVNGINIVIAESFARIFRQNMYNCGMIACEVPAATLEELFKEFANEKTTLTVDTDKGSLSFKAGGKEKTISFTLKNFEKALVEAGGWVEYAAKHY

SEQ ID NO: 63935 - DNA, 849 bp, Unknown
  Obtained from environmental sample
  misc_feature (1)..(849): n is a, c, g, or t
atggcagacaaagaaaaacggcaaattaaaattttcgacaccacattaagggacggcgagcaggctccgggctgcagcatgaacctgacggaaaagatcgaggtcgcgaagcggctggaaaagcttggggtagatattatcgaagcgggcttccccatctcaagcccgggcgatcttgaatcggtaaaggcaatcgcgggcatcatcaccaactgctccgtggcaggactttgccgcagccgcgaaagcgacattgacgctgcgaaagaagcgcttgcgaaagcggcaaatccgcgcgtacacattttcctggcgacctcgcccgtacacatggagttcaaactcaagatgacgccggagcaggtgctggaacaggccgtctccgcagtgaagtacgcgaaaaagttctgcaacgacgtagagttttccgcggaagacgctttccgcagcgatcccgattttgtctgcaaagttttcggcgcggtaattgaagccggcgctcttacggtaaatttccccgacactgtcggctacgcgatgcccgccgaattcggcgagcgcgtccgctatattaaagaacatactccgcgcatggaaaaggcggccctgtccgtgcattgccacaacgatttggggctggcggtagcgaacagcattgccgccatcgctaacggcgcggatcaggttgagtgtacgattaacggaataggcgaaagggcgggaaacgcgtctcttgaagaactggtcatgggcctgcgcgtccgccacgattgtttcagccgacacaagaatagacagtacgcaaatatactcggcaagccgccttgtgtctcaggtgaccggcgttaa

SEQ ID NO: 63936 - protein, 282 aa, Unknown
  Obtained from environmental sample
  DOMAIN (17)...(265): HMGL-like
  misc_feature (1)..(282): Xaa is any amino acid
MADKEKRQIKIFDTTLRDGEQAPGCSMNLTEKIEVAKRLEKLGVDIIEAGFPISSPGDLESVKAIAGIITNCSVAGLCRSRESDIDAAKEALAKAANPRVHIFLATSPVHMEFKLKMTPEQVLEQAVSAVKYAKKFCNDVEFSAEDAFRSDPDFVCKVFGAVIEAGALTVNFPDTVGYAMPAEFGERVRYIKEHTPRMEKAALSVHCHNDLGLAVANSIAAIANGADQVECTINGIGERAGNASLEELVMGLRVRHDCFSRHKNRQYANILGKPPCVSGDRR

SEQ ID NO: 63937 - DNA, 807 bp, Unknown
  Obtained from environmental sample
  misc_feature (1)..(807): n is a, c, g, or t
ttgaagaactggtcatgggcctgcgcgtccgccacgattgtttcagccgacacaagaatagacagtacgcaaatatactcggcaagccgccttgtgtctcaggtgaccggcgttaaggtacagccgaacaaagctatagtgggcgacaacgcgtttgcgcatgaagcgggaatacatcagcatggagtattggcgaaaagggaaacctacgaaatcatgactccgcaatcaatcggtattccgcagaaccgcatggttttaggcaaacattcgggacgccacgcgtttgaagaccgtcttaaagacttaggtttgagcgtaagcgctgaagcgttagaaaaaatatttgccgactttaaagaccttgccgacaaaaagaaagttgtcagcgaccgcgacattgaagctcttgtaatggacagggcagtctctgttcccgaaacatggaagctggatcattgggcggtgaacacaggttcggctttgggcgcggctggcgttatccgcttacagcacaaagacggcaggtttgaaaaattggtatgccttggcgacggtcccattgactcgatttttaaagcgattaatcaaattataggcaaggagcctgaacttgagctttatgaaatcggcgctattacgggcggttcttcttcgcagggcgagacaatggtaaaaatagcgatggacggacggcgttggaacggacgcggcgtttccaccgatgtaattgagtcttcgataatggcttatctttctgcggttaacgcgatggagtgggatttttcgcagagtaaggaagattag

SEQ ID NO: 63938 - protein, 268 aa, Unknown
  Obtained from environmental sample
  SIGNAL (1)...(16)
  DOMAIN (128)...(259): LeuA allosteric (dimerisation) domain
  misc_feature (1)..(268): Xaa is any amino acid
MKNWSWACASATIVSADTRIDSTQIYSASRLVSQVTGVKVQPNKAIVGDNAFAHEAGIHQHGVLAKRETYEIMTPQSIGIPQNRMVLGKHSGRHAFEDRLKDLGLSVSAEALEKIFADFKDLADKKKVVSDRDIEALVMDRAVSVPETWKLDHWAVNTGSALGAAGVIRLQHKDGRFEKLVCLGDGPIDSIFKAINQIIGKEPELELYEIGAITGGSSSQGETMVKIAMDGRRWNGRGVSTDVIESSIMAYLSAVNAMEWDFSQSKED

SEQ ID NO: 63939 - DNA, 687 bp, Unknown
  Obtained from environmental sample
  misc_feature (1)..(687): n is a, c, g, or t
atgagaatttgcgataagatcgatatgatccccgcgatccacggcgcggagatgttcgcccgcgaagcgcggcgcgtttgctcggacgggaagtacgattgcatagccgtcgatataccggaactctttcaagacgatttggcggaggcggtggacgaattgccgctgatctcggcgcttatcgcgtacacgccgaatatatacggcggcggccgcgcctacgggtctgtcggtatagacgtcgatatcgataacgataatgacgatgatgatttgccgttctgctattacattcccatcgacccgtgcgacgcgatgatcgagggcgtgcggcaggcgcggcagaggcgcgtgccgttccgctgcgtcggatcgtatacgttgcgcccgccgataccgatggcggctatgccggacgagtattccgttgagaaaatcgggtttgacgcctactcgctattgtgccgtaaagccgtaaaagatatgtttcaagggggcgaggtcggggtagtcaataatgataacggtgatcaattgcgttcccaactcaaatctattttcactctgtgcggcgaaacaattaatgccgatatgaatattgtcgccgataatttacacaaactatgcggaagcggtacgataatattctcgccattgtccatatatcgcgctttgacgcggttatga

SEQ ID NO: 63940 - protein, 228 aa, Unknown
  Obtained from environmental sample
  misc_feature (1)..(228): Xaa is any amino acid
MRICDKIDMIPAIHGAEMFAREARRVCSDGKYDCIAVDIPELFQDDLAEAVDELPLISALIAYTPNIYGGGRAYGSVGIDVDIDNDNDDDDLPFCYYIPIDPCDAMIEGVRQARQRRVPFRCVGSYTLRPPIPMAAMPDEYSVEKIGFDAYSLLCRKAVKDMFQGGEVGVVNNDNGDQLRSQLKSIFTLCGETINADMNIVADNLHKLCGSGTIIFSPLSIYRALTRL

SEQ ID NO: 63941 - DNA, 933 bp, Unknown
  Obtained from environmental sample
  misc_feature (1)..(933): n is a, c, g, or t
atggataaaatcgttgtggacaatgtggagctggccctagcccaccctatagcaacctccgtggagtggatagggcagaccgagccgctacggcagttgctcgcctgctggatcaccgttgacaaacgcgacttgccgctcacgccgcgcatcatcggctacccaggaatcggcaagaccacgctagccatagccgccgctcgggcgcgggggcaagacgtttatataatgcagtgcacagcggacacgcgcccggaagacctcttggtcacgccggtactctccgaacaaggcaagatatcctaccacgcctcgccgctccttaccgccgccgtcaggggcgcggtggccattctcgacgaaggcaataggatggcggagaaatcgtgggcgtcgctcgccggactcttcgacaaccgcagaatggcggagtcggtcgtcgccggaataaccgtatgcgcccaccccgatttcagggcggctataacgatgaacgaggactcatccacattcgagataccggactacatcatgtcccgcctgcagcccggaataaagataccgtttccggagagggaggacgaaatgaagatactgtcttacagcctccccttttcgagcggcgagattctcgatatgtgcgtagactatttacagaaagcgcacgggcttgacttgtccttttctgtgcgcgacgggataaacatcatacgctacgcgctcaaacttaaagagagcgataagggcgcggacacgagcgaactctttaagagggcggtgagccagatactcggcgaggacgctttagatatagacaagttggcgcagacacgtaaaaggcagggcgacattccgtctatgaacctcggcgactttttcttctccgacgacgaagacctgaaccccgacgccgacaataaggggtggggctga

SEQ ID NO: 63942 - protein, 310 aa, Unknown
  Obtained from environmental sample
  DOMAIN (51)...(183): ATPase family associated with various cellular activities (AAA)
  misc_feature (1)..(310): Xaa is any amino acid
MDKIVVDNVELALAHPIATSVEWIGQTEPLRQLLACWITVDKRDLPLTPRIIGYPGIGKTTLAIAAARARGQDVYIMQCTADTRPEDLLVTPVLSEQGKISYHASPLLTAAVRGAVAILDEGNRMAEKSWASLAGLFDNRRMAESVVAGITVCAHPDFRAAITMNEDSSTFEIPDYIMSRLQPGIKIPFPEREDEMKILSYSLPFSSGEILDMCVDYLQKAHGLDLSFSVRDGINIIRYALKLKESDKGADTSELFKRAVSQILGEDALDIDKLAQTRKRQGDIPSMNLGDFFFSDDEDLNPDADNKGWG

SEQ ID NO: 63943 - DNA, 708 bp, Unknown
  Obtained from environmental sample
  misc_feature (1)..(708): n is a, c, g, or t
atgagcatacaaaacccgggttgcctagtcaacctctcgcagaagttcggcgtaacgccggagaagacctacgagttcataagaaaggcgcacgggatggggttgcacgtattgggaatatccttccacgccggatcgcaaaacgagaacccgctcaaatacatagaagcgcttgaatactgtaaggatatctgcggaaaggctgccctcgccggtataaatatagaggtaatagacataggcggcggcttccctatatcgtacctaactcaagtactgccgatggccgcgttctgtaggccgattgtcgactatctgtcgcggtactttacaaattataggataatagccgaaccggggcgtgtgctgagcggaccggcaatgacgcttgctactaaggtgataggccgttcatatcgcaacggggcttggtggtactacttggacgaaggcctatacgggagtttctccggcaagatgttcgaccacgccgactacccgatgttcttggcgcgcccgggagagagatacaactcggtattagccggtcctacgtgcgattctattgatgtactgtacgagaacatcagtttaccgatgcttgaaataggagatacgctggtttttgagtcgatgggggcttacactgtcgcgagcgctagtaactttaacgggtttcccaaagcgaagttggtagttgttgaatga

SEQ ID NO: 63944 - protein, 235 aa, Unknown
  Obtained from environmental sample
  DOMAIN (129)...(234): Pyridoxal-dependent decarboxylase, C-terminal sheet domain
  misc_feature (1)..(235): Xaa is any amino acid
MSIQNPGCLVNLSQKFGVTPEKTYEFIRKAHGMGLHVLGISFHAGSQNENPLKYIEALEYCKDICGKAALAGINIEVIDIGGGFPISYLTQVLPMAAFCRPIVDYLSRYFTNYRIIAEPGRVLSGPAMTLATKVIGRSYRNGAWWYYLDEGLYGSFSGKMFDHADYPMFLARPGERYNSVLAGPTCDSIDVLYENISLPMLEIGDTLVFESMGAYTVASASNFNGFPKAKLVVVE

SEQ ID NO: 63945 - DNA, 1185 bp, Unknown
  Obtained from environmental sample
  misc_feature (1)..(1185): n is a, c, g, or t
gtgaatgaccgcccctatgtctcttcgtcttttttgagcacggcgatttcaaatgtctttggaaccgcgatgtcaggccgggcggacgagcgccaggcgctgtccgactctcctctggagctgacggcgaggatcgccatgctgccctgcaggggcgatactgccatgctgaacagggtttttgaacccctgggatacgaggtaagccatgaggaatttgtcaatgacgagcgttttcccgcctggacaagaattaaatatgtgaacctgtgcatcaggggcaaagtgcgcctgcgcgacctgctcaggcacatctatgtccttgtcccggtattcgacaggcaaaagcactattgggtcggcgaggacgaggtagacaagctgttaaagcacggggaagaatggctggcgaatcatcccgaaaaaggatatattaccagccgttatttgaggcatttaaagcccctggtcaacatggcgttcgcccggctcgttgccgcggatacggaagcggccactgacgcggatgatgaaacgccgaaagaaacgccggaaaggaaaattacacttaacgcgcagaggcttggcggcgtaatcgcggcgcttaagagctgcggggcaaacagcgtgattgatatgggatgcggagaggggaatcttttatccttgctcgtcagggaggggcagttcgcgcggatcgcgggcatggatgtctcccatacggcgcttgaacgcgcgggcggaaaactgaaactggaccgtgtcagcgacagtacgaaggaacgcataacgctgtttcaaagctcgctcatgtataaagacgcccgttttaagggttatgacgccgcctgcgtcgtagaagttatcgaacatctggacctgccccgcctcgccgcttttgaacgggtcttgtttgaatataccaaagcgcccgtcgtggttctgaccacgccgaaccgcgagtacaacgcgaaatacgagaacctcgacggcgcgttgcagagcaacgcgaacgccctgcggcacagcgatcatcgttttgaatggacacgggcgcagttccgcgaatgggcggcaaagaccgccgctcagtacggttatgcggttcgaatctccgaaataggggattctgacgaagccctcggcgcgccgacccagatgggggtgtttactatatgcggatag

SEQ ID NO: 63946 - protein, 394 aa, Unknown
  Obtained from environmental sample
  SIGNAL (1)...(21)
  DOMAIN (211)...(314): Methyltransferase domain
  misc_feature (1)..(394): Xaa is any amino acid
MNDRPYVSSSFLSTAISNVFGTAMSGRADERQALSDSPLELTARIAMLPCRGDTAMLNRVFEPLGYEVSHEEFVNDERFPAWTRIKYVNLCIRGKVRLRDLLRHIYVLVPVFDRQKHYWVGEDEVDKLLKHGEEWLANHPEKGYITSRYLRHLKPLVNMAFARLVAADTEAATDADDETPKETPERKITLNAQRLGGVIAALKSCGANSVIDMGCGEGNLLSLLVREGQFARIAGMDVSHTALERAGGKLKLDRVSDSTKERITLFQSSLMYKDARFKGYDAACVVEVIEHLDLPRLAAFERVLFEYTKAPVVVLTTPNREYNAKYENLDGALQSNANALRHSDHRFEWTRAQFREWAAKTAAQYGYAVRISEIGDSDEALGAPTQMGVFTICG

SEQ ID NO: 63947 - DNA, 1125 bp, Unknown
  Obtained from environmental sample
  misc_feature (1)..(1125): n is a, c, g, or t
atgagcgacttgcagactaatccgccttctccccacaggcccatccaaagctatgtctttggagttatttttattgtcctttttttggtcgtgtgcaggctttttaccccgtttttcaccgccctgctttggtctatccttttgtacatactattcagccccctgcaccgccgcctaatcaaaaacctgaactttgataccatgaaaggaaaaatactccgcagtttttgggcaatagtttttgccctgggaacaatggcggtaatttttatccccctttccctgatggcatctattttttttcggcagattatggatctcgcgcgttatgcccgcgatacgctgaatcagcggcccgagtccctgcgtgaactttttgaaaaaatatcggtgtttatccgcgatgtttccgccgggcagataattatttcttccgaggacattaataaccagcttaaagcccttataaccaacgaactgctcggtaacaagcaaatggtttttcttagcggcaatattgtcaggataatcggaactctcgctataaattcgctggtgatggtgttctcgctgttttttttctatgccgacgggccctatctttcacggctggtacttcgcgccattccgataagggcggaatacatcagcgccctcacgagaaaattcatggacattacgcggaatcttttttccggctatattatcgtggcattactgcaggcggtagtggcgtttgtcattttttcaatttttaatattaaaggatcgctggtgcttgccgtagtgacatttctctttgtatttattcccgtgctcggggcaacggtggtatatatacctcttggtatcctgaaaatcgcaagcgggaatatagcgggcggggtggttttctttattatatgcgcggtttttatttccggcatagacaatgttctaaggccgatgtttctgagggaccgtatacagcttcatccgttgataatattttttgccatccttggcggcctggccgtttttggctttaacgggtttattctcggcccggtgctggtaatactgtttctcaccgtcctggatctgtttttaaccgaacacaagatcggtgcccaggatcaggcataa

SEQ ID NO: 63948 - protein, 374 aa, Unknown
  Obtained from environmental sample
  DOMAIN (19)...(363): Domain of unknown function DUF20
  misc_feature (1)..(374): Xaa is any amino acid
MSDLQTNPPSPHRPIQSYVFGVIFIVLFLVVCRLFTPFFTALLWSILLYILFSPLHRRLIKNLNFDTMKGKILRSFWAIVFALGTMAVIFIPLSLMASIFFRQIMDLARYARDTLNQRPESLRELFEKISVFIRDVSAGQIIISSEDINNQLKALITNELLGNKQMVFLSGNIVRIIGTLAINSLVMVFSLFFFYADGPYLSRLVLRAIPIRAEYISALTRKFMDITRNLFSGYIIVALLQAVVAFVIFSIFNIKGSLVLAVVTFLFVFIPVLGATVVYIPLGILKIASGNIAGGVVFFIICAVFISGIDNVLRPMFLRDRIQLHPLIIFFAILGGLAVFGFNGFILGPVLVILFLTVLDLFLTEHKIGAQDQA

SEQ ID NO: 63949 - DNA, 1326 bp, Unknown
  Obtained from environmental sample
  misc_feature (1)..(1326): n is a, c, g, or t
atgccgccgggcgaagataaatttgaggcgcagaaactggctgagatggcggaggcctggtatgacgcatatgcccggaatcccaattccccctccgctccggaagctttaaacaaggcgtcggcattggcaagggaagccatccccaaagatccaagcctggccctgcctcattccacattgggaaaaatcagccgtgaccagcaggactgggataaggccattgccgaattcagggaagcggcccgactggatccttccaactatatatacttttatgaactgggccggagctatttttccgcacagcgctatgttgacgcaagggggggctttgaaaacacagtcaggctaaatccccggtttgaacccggctggtacaaccttggcggaaccctgcggattttaaatcgttatgacgacgcccttgccgcgtaccgcagggcaatagcgataaaaaacgattacgccgcggcgcaccgggagctggggcgaattctggttttaaagaaagattacaagggcgcgatagaatcctttagcaatgcccttaaatataaccccagcgatcttgcgtcactgcgggaactgggcgccgcgcagaatgaggcgggcaattataccgccgcggaggaatcttttgccagggctttacaggcggccccatcggacggccagacaaactacaatatgtctgtagtaaaactcgcccttaagaagaacaacgaggcgctttcctatgcccgtcatgccgttgaaagcaatccttccagcgccgtatatacctataccctggggcttgcccttgaagccacaggcaacaacgacgccgccattgccgcataccaaaaatccgcttcactcgacaaaaaatacctgcggccccgcataaacctggggaacctctatctttcccataataatgttaacgaggggatacgccatctttccgaggcttatgcaatagagccgtcaaattttgaagtgaataacaatcttggcgcggtatacgcaaaaatggagaactggccaaaaagcgttgagcattacgagcgggcgctttccgtggattcaaaaaaccccacagtgcatttgaatctggcaagagcctacaccagcgccggcgaacttgccaaggcgcagaattcataccaggccgtactgcggcttaacccggataactgggatgccctttatgaactgggaaaaacgtacgtcagcatgggaaggccggacgaggctaaaaaacaccttcgggacctgcttcagcgcaacgccgcgtacggcgcaagggcggacgccgaaaggatacttgcggggctatga

SEQ ID NO: 63950 - protein, 441 aa, Unknown
  Obtained from environmental sample
  DOMAIN (395)...(428): Tetratricopeptide repeat
  misc_feature (1)..(441): Xaa is any amino acid
MPPGEDKFEAQKLAEMAEAWYDAYARNPNSPSAPEALNKASALAREAIPKDPSLALPHSTLGKISRDQQDWDKAIAEFREAARLDPSNYIYFYELGRSYFSAQRYVDARGGFENTVRLNPRFEPGWYNLGGTLRILNRYDDALAAYRRAIAIKNDYAAAHRELGRILVLKKDYKGAIESFSNALKYNPSDLASLRELGAAQNEAGNYTAAEESFARALQAAPSDGQTNYNMSVVKLALKKNNEALSYARHAVESNPSSAVYTYTLGLALEATGNNDAAIAAYQKSASLDKKYLRPRINLGNLYLSHNNVNEGIRHLSEAYAIEPSNFEVNNNLGAVYAKMENWPKSVEHYERALSVDSKNPTVHLNLARAYTSAGELAKAQNSYQAVLRLNPDNWDALYELGKTYVSMGRPDEAKKHLRDLLQRNAAYGARADAERILAGL

SEQ ID NO: 63951 - DNA, 975 bp, Unknown
  Obtained from environmental sample
  misc_feature (1)..(975): n is a, c, g, or t
ttggcggctgatcccaataatcctgatttgttgaaactgagagaattgcttgcgggcgggggagaccgccgacaagccctggatatgttagatcgtcttttagcggctgatcccaacaatcctgaattgctgaaactgcgggaacaactgcttgccggaggatcgcttgcgggcggaggagaccgccggcaagccctggataccttagatcgtctgctggcatcggatcccaacaatcctgaattgttgaaactgagagaacaactgcttgcgggaggagaccgccgacaagccctggatacattagatcgcctgctggcggctgatcccaataatcctgaattgctgagactacgggaacagttactgagggaacagcagcttgcggatggacaacagtctcccgaatcggtcctggcggcggtttcggaggcaagcgctgggaccggggcgcaggcccaacagcgaaacggctccggtagtggatcaggctccggtagtggatcaggctccggtagtggatcaggctccggtagtggatcaggctccggtagtggatcaggctccggtagtggatcaggctccgggagtggaactcaaggctccgggacggggtctcaaaacgccgggacccaaagcgccgcggctcanagcgctgcccaacagcgagcggaaaacgagaggttacagcgtgaagccgaagccgcgatacgaaaggcggaagaggaagcgcttgccaaggctacgcgcgagttgcaggaacgaaggcaggcggtgaatgacctgatttcgcagggaaaggcattgcttgaaaaaatgattttaccggcgcggagaggggctttgcggaggcgcgttcccgcatgccgccgggcgaagataaatttgaggcgcagaaactggctgagatggcggaggcctggtatgacgcatatgcccggaatcccaattccccctccgctccggaagctttaa

SEQ ID NO: 63952 - protein, 324 aa, Unknown
  Obtained from environmental sample
  misc_feature (1)..(324): Xaa is any amino acid
MAADPNNPDLLKLRELLAGGGDRRQALDMLDRLLAADPNNPELLKLREQLLAGGSLAGGGDRRQALDTLDRLLASDPNNPELLKLREQLLAGGDRRQALDTLDRLLAADPNNPELLRLREQLLREQQLADGQQSPESVLAAVSEASAGTGAQAQQRNGSGSGSGSGSGSGSGSGSGSGSGSGSGSGSGSGSGSGSGSGTQGSGTGSQNAGTQSAAAXSAAQQRAENERLQREAEAAIRKAEEEALAKATRELQERRQAVNDLISQGKALLEKMILPARRGALRRRVPACRRAKINLRRRNWLRWRRPGMTHMPGIPIPPPLRKL

SEQ ID NO: 63953 - DNA, 792 bp, Unknown
  Obtained from environmental sample
  misc_feature (1)..(792): n is a, c, g, or t
ttggataaacgggcgttttttattcagggtgattctttgcttttaccggttaatactccggattctcaaattgagtcgggacttttatttgaattatcaaaatattttaagaatcccgatatttttgacgcgcctgaattggacaactcttccgacatgacttccgtagtgtccgttcccccaacaaccgttctgcctgaaaattggaaaactattcccgtccgcaatattctctccatgttcagcgtgtcgggctgcagccccaaccgtattatccgcgcctgccatctcgcccaatggagatggaattcacgcttctgcggaacctgcggcgcaaagaacgaagatgtcccaatgcagacgcagagaatctgccccaagtgtgggcggacagagttcccgagaatctgccccgccgttatcgtccttattaccgatgataaaaacagaattctgcttgcgcataacaaaagatttaaagcgaaggtttacagccacatttccggttttaacgaggcgggagaaacgctggaagaaaccgtagtcagagaaatacgcgaagaagtagatatcgaagtaaaagacattgtttatattaaatcccagccatggccgtttccaagttcattgatgcttggttttaaagcgcaatattcatcggggacgataaagcccgacggagacgaaatagaagacgcaaaatggtttacaaaagacgatctgcccgatttgcccggagaaggttctctttcgcgtcatcttatcaatagctggcttaatggaaatttatag

SEQ ID NO: 63954 - protein, 263 aa, Unknown
  Obtained from environmental sample
  DOMAIN (136)...(257): NUDIX domain
  misc_feature (1)..(263): Xaa is any amino acid
MDKRAFFIQGDSLLLPVNTPDSQIESGLLFELSKYFKNPDIFDAPELDNSSDMTSVVSVPPTTVLPENWKTIPVRNILSMFSVSGCSPNRIIRACHLAQWRWNSRFCGTCGAKNEDVPMQTQRICPKCGRTEFPRICPAVIVLITDDKNRILLAHNKRFKAKVYSHISGFNEAGETLEETVVREIREEVDIEVKDIVYIKSQPWPFPSSLMLGFKAQYSSGTIKPDGDEIEDAKWFTKDDLPDLPGEGSLSRHLINSWLNGNL

SEQ ID NO: 63955 - DNA, 2457 bp, Unknown
  Obtained from environmental sample
  misc_feature (1)..(2457): n is a, c, g, or t
gtgtttgaaggctaccgcgacgaaaccagcacggtctatgtgaacggccagtcggcggtgatgatgacggttcagaaacagagcggtaaaaactccgtgcaggcggcaaaagaactccgcgcccggctggaaaaactggtcaaggagattccgcctgatatcaaaataaccgaaatgttcaatacgaccgacataatcgagaattcgctcagccaggttacaagcgccgcgtttagcggggctctgcttgccgtattgattctgttcattttcctgcggtcactcaaaccgacgcttatcatcgggatcagcatcccggtttcgatcatcgtcaccatgatgttgatgtactttaccgggcttacgctgaatttgatgactatggcggggctggtgctgggtataggaatgttagtcgataactccatcgtcatactggaaaatatttaccactaccgtgaaaagggggcgaagctgagaaccgcctcgatcatcggtaccagcgagatggttgtcgccattaccgcgtcaacgctgacaaccctctgcgtattcctcccgctggttatgttcaagggccttctggaaatgccaggtgaactctttgccggccttgcgtttaccgttgtaatatcattggcaatttcgctgttcacggctattttcctggtgcctatattgtcaagccattatctcccgctggttacgcgaaagcagaaaccgcttacaggcaggctggcggaaattgacgcgaaattcgagcgctttttcgcgtggcttgacgaaaagtaccgccgggcggtgaacaaggttctcaggcacaagttaattgttattgtaattatgctggtaatatttgtcgtcagcgttggtctcatccccataatcggctgggaattcatgccccagcaggaagacgacaacgtgcggattacggcgacccttccggtgggaacccccctgcaggaaacagaggctgttctgaaacagtttcagttgatcattgaaagggaagtcaaaggatacgacaggctggttattaacgccggcggcggcggtatgatgggcatgggcggcaacagcagcaattccggttccatcaggatcaacctgcccaaatacaagtacaggattcaaagcgcaaaccagataaaggacattttacggccctttttaaacgatttccccggcgtcgccttcaatttcagcggcggctttcgcggcggcatgatgggcggcggcaacgcgatagacattaccctccgtaccgatgatctggtgaaaggcaaggccctgggtgaaaagatatccgaacttctaaaagataatatcaaagatgtcacagaaccgcaggttgatctgaaggacggcctgccccagattgacataaagctggatcgcgaaaaaatgtacgcgctgggcctgaacgcggctaccgtgggcaacgagatcaaggccgcggtagacggtatttccgtactgacgcggtataaaagcgccggtaaagattatgaaattattctaatccttgccgaagccgaccgcagcaccagacccgcgttggacaatatttttgtcaatagccagatggcgggcagaatacctctttccagttttgtcagctacgagcagggaaccggccccctcactatcagccgcgaaaaccaaagccgcatcatccatgtcaccgcgggagccagaccaggggcaaagatgaacacccttcacgcgcgggtggaggagcttatcaagcgggagattcccattgaagacgatgtaattattgagttcggcggcgacaacgcccagatgataaagatgttcacaagattcctttttatctgcattgtggcggtttttctggtattcggcgttatggcgtctctttntgaatcgttccgcgatccgttcatcatcatctttacgataccgctttcgctgataggtattgtgtcgatttatctggtcaccaacacgatcttcaatgtactgaccgcggtgggactgctggtattgttaggtgtaatcgtaaacaacggcattgtgctggtggactacaccaacctgctgcgcaagcggggttatggtctgcacgaagcctgtgtcgaggccgccggcaaccgcctgcgcccgattttgatgaccacccttaccacggtcttcggacttattccgatggcgttcttccccggcgaaggctcggaactggttgcgcccatcggtaaaacggtgctcggcggccttaccataggcacgctgatgactctgtttttaatgccgaccgtgtacgccgtattgaacaaacattcagacgaacgggccgcccgcgccgaagcgcggcgtgaaggcatagcgtcgggagaaggcggccgcgccaggaaaaaagcccaaatagccgcagccgcatcggccattgtcggcgagaccggaatatatgatttggaggacggaaaatga

SEQ ID NO: 63956 - protein, 818 aa, Unknown
  Obtained from environmental sample
  DOMAIN (1)...(767): AcrB/AcrD/AcrF family
  misc_feature (1)..(818): Xaa is any amino acid
MFEGYRDETSTVYVNGQSAVMMTVQKQSGKNSVQAAKELRARLEKLVKEIPPDIKITEMFNTTDIIENSLSQVTSAAFSGALLAVLILFIFLRSLKPTLIIGISIPVSIIVTMMLMYFTGLTLNLMTMAGLVLGIGMLVDNSIVILENIYHYREKGAKLRTASIIGTSEMVVAITASTLTTLCVFLPLVMFKGLLEMPGELFAGLAFTVVISLAISLFTAIFLVPILSSHYLPLVTRKQKPLTGRLAEIDAKFERFFAWLDEKYRRAVNKVLRHKLIVIVIMLVIFVVSVGLIPIIGWEFMPQQEDDNVRITATLPVGTPLQETEAVLKQFQLIIEREVKGYDRLVINAGGGGMMGMGGNSSNSGSIRINLPKYKYRIQSANQIKDILRPFLNDFPGVAFNFSGGFRGGMMGGGNAIDITLRTDDLVKGKALGEKISELLKDNIKDVTEPQVDLKDGLPQIDIKLDREKMYALGLNAATVGNEIKAAVDGISVLTRYKSAGKDYEIILILAEADRSTRPALDNIFVNSQMAGRIPLSSFVSYEQGTGPLTISRENQSRIIHVTAGARPGAKMNTLHARVEELIKREIPIEDDVIIEFGGDNAQMIKMFTRFLFICIVAVFLVFGVMASLXESFRDPFIIIFTIPLSLIGIVSIYLVTNTIFNVLTAVGLLVLLGVIVNNGIVLVDYTNLLRKRGYGLHEACVEAAGNRLRPILMTTLTTVFGLIPMAFFPGEGSELVAPIGKTVLGGLTIGTLMTLFLMPTVYAVLNKHSDERAARAEARREGIASGEGGRARKKAQIAAAASAIVGETGIYDLEDGK

SEQ ID NO: 63957 - DNA, 783 bp, Unknown
  Obtained from environmental sample
  misc_feature (1)..(783): n is a, c, g, or t
ttgatcgcggagctcggcgtccgatctcccgtacggacggccgctccggtcccgttcgactgccatatagtccttggggcaaaccaggattcgctgtcggttgtattttcttttttgtccttcctgcccaggagcaaacgggaaaaactgggtataagcgacaatgacgcgtcacaggcttttatcacattgcaccgctataactcgcgtctgccagccgcttttttctgttctgaacagactttttccggttattccatcccacacaacgcgttgaaagcggaattaaaacccaggcagcgctaccgagatgaccctgagtttggcgtaaaattcgctccggacctttaccatgaagaaagcagactctacacatccctgtattttcccgaacgggaaaagactaaactatcaagctcttcaagaatgtattcaaaccagaaacagggctttagcgaatggctgctaagaagaaaatacgttaataccgaaggtaatactgccagtgacaacggaaccaaccatccgttagttgagcatattcgtaatcaattcttatataaagggaatgacaaggatctggaagataaatacggcgtctcatcctcatcgcttgaattgtattttaaatgtccgcttaaatttattttttcacgggtactaaagataaagaatgtcgagatagaaacaagccttatggccaatgaaacagccggaatagtttatcacaaaataataaatttatttttgcaggaattgatggaaaaaaaaagaggtaattga

SEQ ID NO: 63958 - protein, 260 aa, Unknown
  Obtained from environmental sample
  misc_feature (1)..(260): Xaa is any amino acid
MIAELGVRSPVRTAAPVPFDCHIVLGANQDSLSVVFSFLSFLPRSKREKLGISDNDASQAFITLHRYNSRLPAAFFCSEQTFSGYSIPHNALKAELKPRQRYRDDPEFGVKFAPDLYHEESRLYTSLYFPEREKTKLSSSSRMYSNQKQGFSEWLLRRKYVNTEGNTASDNGTNHPLVEHIRNQFLYKGNDKDLEDKYGVSSSSLELYFKCPLKFIFSRVLKIKNVEIETSLMANETAGIVYHKIINLFLQELMEKKRGN

SEQ ID NO: 63959 - DNA, 726 bp, Unknown
  Obtained from environmental sample
  misc_feature (1)..(726): n is a, c, g, or t
ttgataaaaaaaacggatattgtttttaattctttcccgtatttgtccgatgaggcgggcgataaaccggcaatgagtatgctgacagcccgcctgctgctggcggaaaaagaattattttttacccaacttgaaaattttcttattaaatttatttctttcttcgcgggtttttctgttgtcgccagcgaaggaaaatatacgcttaacaaaaaattctattatcttaacgggtatattgactgtgtgcttgagaaaagctcggagggccatggttctttggttattgtggatttcaaaacaaaatatatgcccgatctttcagattgcgtcggaattgaagagcttgcggatttccagcttcccatgtacattcgtcttgcggaaaacgaattcgggaaacccgtcggcgccgcgctgttcttcagcatcctggacgcggctccacgggtattgttcggagtaattcaggacgggttaaacgatgagatcattcccggaaaagaacaagatcgtataatgcgcggcagcggtgaatatgaacgcatcatgggcgaatttgacaaaaaggcggagcaattcgcggaggaaattattaacggcacttttgctttttctccatctcattgggagttgtgccatgaatgcggctataacagggtttgccgcacgctttaccagatatttcaaggagaaaagcaatggaacaaaacaaagaaaaaataa

SEQ ID NO: 63960 - protein, 241 aa, Unknown
  Obtained from environmental sample
  misc_feature (1)..(241): Xaa is any amino acid
MIKKTDIVFNSFPYLSDEAGDKPAMSMLTARLLLAEKELFFTQLENFLIKFISFFAGFSVVASEGKYTLNKKFYYLNGYIDCVLEKSSEGHGSLVIVDFKTKYMPDLSDCVGIEELADFQLPMYIRLAENEFGKPVGAALFFSILDAAPRVLFGVIQDGLNDEIIPGKEQDRIMRGSGEYERIMGEFDKKAEQFAEEIINGTFAFSPSHWELCHECGYNRVCRTLYQIFQGEKQWNKTKKK

SEQ ID NO: 63961 - DNA, 1365 bp, Unknown
  Obtained from environmental sample
  misc_feature (1)..(1365): n is a, c, g, or t
ttgcttgcgggatgcgaaaacagcgccagcccgaataacaacaggtcggtggacgggtttcttgtccgggtgaacggggatacgtcggacgtatacatagatacgagagacggtaagagatacaggacggtaaggatcggcggcgtcaaatggatggcggagaatatgaactacaagacctcaagcggttcgtggtgttatgataataaagaatccaactgcatgaaatacggcaggctgtacacctgggaagcggcgcggaaagcctgtccgccggtcggttggaggctggcggataagcaggattgggataatttgcagatgagcgttgaaaagtggaacaatgcggcaatggcgttcgattcatccgccggcaagaggttgaagtcaacgttcggttgggatgattataaaggcgaaagcggcaacggcacggacgagtacggtttctcggcgctgcccggcggcgagtgctgcgtcaacactccgcgcgacggcgttttactatacgaagacgggtttacggaactaccggacggcggctcatacggcgtcggttttgaaagcgtttggtggacggctacggaagagtacagcccaagcccatgctggtggttggaggctcaaggcgtggattgcaatgagcgtttcgcctacttccggagcatctcgatcaactacggccacggcgaccgtttgggcgagagcgcgggcagcgcaatcgtcaatagttggaagttctccgtgcgttgcgtagagggtaaggatactaccggtgttgttgaccctaaaacagtggttaaaggcacgttcatagatagcagagacggtcaaaagtacaacacggtaacgataggcaagcagacatggatggcgcaaaatttaaattacgcgactgaacgcggttcttggtgttatgacgataacggttccaactgcaatcaatacggcaggttgtacaattggaatacggcgatgggcggtaaggcgagttccaataacaatccaagcggggtacagggcgtttgccctaatatgtggcatttgccgtccgtcgcggaatggagagtattggttgattatagcgtgggcggttattcggcggcgggcaaggtgttgaaagcggcaagcggttggaatagcggcgggaacggtacgaacacgtacgggttttcggccatgccgggcggctactaccgctccggcgtttttttcaacgccggctaccacgcccattggtggacggccacgcagagcatcggcgtagacgcctactaccggggcatgtatgactacgacaccaaggtgtacgagaacggcgacggcaaaggcaacgggttttcggtgcgctgcgtcaaagattaa

SEQ ID NO: 63962 - protein, 454 aa, Unknown
  Obtained from environmental sample
  misc_feature (1)..(454): Xaa is any amino acid
MLAGCENSASPNNNRSVDGFLVRVNGDTSDVYIDTRDGKRYRTVRIGGVKWMAENMNYKTSSGSWCYDNKESNCMKYGRLYTWEAARKACPPVGWRLADKQDWDNLQMSVEKWNNAAMAFDSSAGKRLKSTFGWDDYKGESGNGTDEYGFSALPGGECCVNTPRDGVLLYEDGFTELPDGGSYGVGFESVWWTATEEYSPSPCWWLEAQGVDCNERFAYFRSISINYGHGDRLGESAGSAIVNSWKFSVRCVEGKDTTGVVDPKTVVKGTFIDSRDGQKYNTVTIGKQTWMAQNLNYATERGSWCYDDNGSNCNQYGRLYNWNTAMGGKASSNNNPSGVQGVCPNMWHLPSVAEWRVLVDYSVGGYSAAGKVLKAASGWNSGGNGTNTYGFSAMPGGYYRSGVFFNAGYHAHWWTATQSIGVDAYYRGMYDYDTKVYENGDGKGNGFSVRCVKD

SEQ ID NO: 63963 - DNA, 690 bp, Unknown
  Obtained from environmental sample
  misc_feature (1)..(690): n is a, c, g, or t
atgcaggtgaagaagaaagccgcgaaaaagacctataagtcgtcggccaagaaaaagaccgttccgagcctcaacatggttacgatggacgagttgaaagccattatcgccgaaacatccaagacaatggccgaaaaccacgccaaaaccgaggcctcgattgataggctgtccgccgtagtcagtgaaacctctgacgaggttcggaaaacctcggaggccgtccggcaactgaacgacacagtcggcgggatgggcggacacctcggcgaagtgatagagtttatcgtcatacccaagatacgccccgccataaacgcgttgggtaaccactcgtttaaagaaatcacggcaaggaaaatcgtcgagaccgttatcaacgatagaaagagaaaactaaccgaggtagacgtgctgctgtacggcgacaccgaggttatggccgtcgagataaagacttgtttgcagacaagcgacgtcgataaacatttggatcggctacaaaaactgcgcgaccacgaagcggacgccgaggtcaaaggcaagacgcttttcggcgcggtggtaggcgcaatcgtacacgagccaatcagagcctacgccctgaaaaacggcctatacgtcatagagattcgcgaggaagaggataaactcgacatagacaaacccgaaacctgccggacgtggtaa

SEQ ID NO: 63964 - protein, 229 aa, Unknown
  Obtained from environmental sample
  misc_feature (1)..(229): Xaa is any amino acid
MQVKKKAAKKTYKSSAKKKTVPSLNMVTMDELKAIIAETSKTMAENHAKTEASIDRLSAVVSETSDEVRKTSEAVRQLNDTVGGMGGHLGEVIEFIVIPKIRPAINALGNHSFKEITARKIVETVINDRKRKLTEVDVLLYGDTEVMAVEIKTCLQTSDVDKHLDRLQKLRDHEADAEVKGKTLFGAVVGAIVHEPIRAYALKNGLYVIEIREEEDKLDIDKPETCRTW

SEQ ID NO: 63965 - DNA, 321 bp, Unknown
  Obtained from environmental sample
  misc_feature (1)..(321): n is a, c, g, or t
atggccatggcgatagacaagatcgccatgcagatcaacatcatatcgctcaacgcctccatcgaggccgcccgcgcgggggaggcgggcgtggcgttcgcggtcgtggcggcggaggtgcgcaaactcgcgtattcgtcaaaggacactgtctcggcgactgaacagatagaggcggaagcgacgaagtccataaataagatcaactcgaagaccggcagcataagttccgcggtgaagaagacgcaccgagatatttccgacgtctcccaaaaaatgcaggaagcgctggagagggcggagcatactaacgaaagttga

SEQ ID NO: 63966 - protein, 106 aa, Unknown
  Obtained from environmental sample
  misc_feature (1)..(106): Xaa is any amino acid
MAMAIDKIAMQINIISLNASIEAARAGEAGVAFAVVAAEVRKLAYSSKDTVSATEQIEAEATKSINKINSKTGSISSAVKKTHRDISDVSQKMQEALERAEHTNES

SEQ ID NO: 63967 - DNA, 921 bp, Unknown
  Obtained from environmental sample
  misc_feature (1)..(921): n is a, c, g, or t
gtggcgtttttaaccgtttgtttaaatccgacattgcaaaagaccntgcgtttttcttcgatatttccgggaacggtgaatcgtaccggagttcaccgccttgacgcaagcggcaaggggattaacgttacccgcgttttgactcaactgggaaaaaaagccgtacatctggcgcagcttggcggcgtcatgaggccgctgtttctttcgctctgcgagcaggacggactttccgtgcggtgggtggaaagcgaaagtcccatccgtttttgttacaccttgctttctgacgaagacggcgctgttacggaattaatcgaagaatccgaacctgtccgtgccggaaccgaagaacggctgctggaaaagtttgatgagcttctcgcgcaaaccacggacttgaattggctcataatttccggcacaaaggcggcgggattttctgacgcggtgattccttccatgacgcacagggcgaaagagaaggggctgaaagttattcttgatataaagggaaaggatttaacggagagtttaaaatatcagccggacattgtgaagccgaacctttttgaatttgccgctgactttgcgcctgagttaatcagaaacaatgagttgataatgatagatgaccgtgcaaaagaacgaataaaatccgccatgttggacatggcgcgccaataccaatgccgcgttattcttaccaacggcagccggaacattatggcggctgatggggacaaagtgtccgggaatgatttttttgaagttgaagtccaatccgtgaaagcggttaattccaccggctgcggggacgcttttacggcggggcttgccgccgcgctgggagacaaagcggactttcgcgcagcaatcagcgaaggatgcagatgcggcgcgctgaacgccgctttttaa

SEQ ID NO: 63968 - protein, 306 aa, Unknown
  Obtained from environmental sample
  misc_feature (1)..(306): Xaa is any amino acid
MAFLTVCLNPTLQKTXRFSSIFPGTVNRTGVHRLDASGKGINVTRVLTQLGKKAVHLAQLGGVMRPLFLSLCEQDGLSVRWVESESPIRFCYTLLSDEDGAVTELIEESEPVRAGTEERLLEKFDELLAQTTDLNWLIISGTKAAGFSDAVIPSMTHRAKEKGLKVILDIKGKDLTESLKYQPDIVKPNLFEFAADFAPELIRNNELIMIDDRAKERIKSAMLDMARQYQCRVILTNGSRNIMAADGDKVSGNDFFEVEVQSVKAVNSTGCGDAFTAGLAAALGDKADFRAAISEGCRCGALNAAF

SEQ ID NO: 63969 - DNA, 1266 bp, Unknown
  Obtained from environmental sample
  misc_feature (1)..(1266): n is a, c, g, or t
atggtaggcacattagacaccatttttatttctctcaaacaggcgcagacgaagctggcggaacagagccgtgcgggcaaagacaaagctcttgccgccgccgccgccgcaatcgactgtaacagatctgccattttggaagcgaacgctcgtgatgtggaacaggcgagaaagggcggtatgaaagaaagccttgttgaccgcctgcttcttaatgacaaacggatagacggaattatcgaaggaatcgaaatcgtcatcaggcaggaagacccgattggtaaagtgcaggccggatggactctgcccaatggtctgcagatcgataaagttaccgtgcctcttggcgtcgccgccattatttacgaatcacgtcccaatgttactgctgactgcgccgcccttgcgtacaaagcgggctgttcaatactcttacgaggttcctcttctgcgctggaatccaacaaagcgctggttaaggctataaaggcgggacttgaaagcggcggcggaattgcgggcgctatcgctcttgcggagtcaggcaacagagacgaaattgacgagatactcaaagcccgtggttacattgatgtagttcttccccgcggagggcatgagttaatccgcagagttgtagaaaacgctcgtatccctgtcattgaaacgggagaaggtaactgccacatctacgttgagccgagcgcagacatgaacaacgcgatagaaattatcgccaacgcaaaactgcaaaagcccggcgtatgcaacgctgtggaaacaatacttgtacacaaagacgctcttgccgctcttatgccgaaaatggctacggcgcttgccggaaaatgtgaactgcgctgtgacagcgcttcaaaagccgctatcggcgcaataccctccgcccttgtcgttaaagacgctgttgaggaagattgggcgacagagtttcttgattacattcttgcggtaaagactgtttcctcatgcgatgaggcaatcgctcatatcaaccgatacgggactaaacattcggaagcaattctcaccaacgatttaaagtcggcgaatgagttccgctcaagagtggatgcggcgtgcgtatatgtcaacgcttccacacgcttcacagacggagggcaattcggcttcggtgcggagttgggaatcagcacgcagaaatttcatgcaaggggaccaatgggtcttgaagcgcttacaacgataaagtaccttatcaatggcagcgggcaaatacggagttaa

SEQ ID NO: 63970 - protein, 421 aa, Unknown
  Obtained from environmental sample
  DOMAIN (9)...(412): Aldehyde dehydrogenase family
  misc_feature (1)..(421): Xaa is any amino acid
MVGTLDTIFISLKQAQTKLAEQSRAGKDKALAAAAAAIDCNRSAILEANARDVEQARKGGMKESLVDRLLLNDKRIDGIIEGIEIVIRQEDPIGKVQAGWTLPNGLQIDKVTVPLGVAAIIYESRPNVTADCAALAYKAGCSILLRGSSSALESNKALVKAIKAGLESGGGIAGAIALAESGNRDEIDEILKARGYIDVVLPRGGHELIRRVVENARIPVIETGEGNCHIYVEPSADMNNAIEIIANAKLQKPGVCNAVETILVHKDALAALMPKMATALAGKCELRCDSASKAAIGAIPSALVVKDAVEEDWATEFLDYILAVKTVSSCDEAIAHINRYGTKHSEAILTNDLKSANEFRSRVDAACVYVNASTRFTDGGQFGFGAELGISTQKFHARGPMGLEALTTIKYLINGSGQIRS

SEQ ID NO: 63971 - DNA, 621 bp, Unknown
  Obtained from environmental sample
  misc_feature (1)..(621): n is a, c, g, or t
atggcagcgggcaaatacggagttaaaatgatttctaaacttatcgctgacgcgcgaaaaataattatcaagattggctcaaacacgcttgccggcagtgatgggaaaatcaattcgcagtttctctctgagtttgcagggcaggtttccatgctcatgaaaaagggcaagcagattgttgttgtttcctcgggtgcgcaggtggccgggctttccacgatggacaaatgggcgcgaaaaaaagacattcactacaggcaggcattatgcgcggttgggcaggttgagcttatgggggcgtggagccgcgcatttgagcaaaatggattgcacatcgcgcaaatacttttaacccgagaagattttaacgacccaatcacaacattgaatatgcgcaatacgctctttactctggtagacgaaggtattatccccatcatcaacgagaacgacaccgtctccgtggaagaaataaaaataggcgacaatgatacgcttgcggcgcaatcggcaattttatggagcgctgacctgttaattcttttcagcgatattgacggcgtatacgacaaaaaccccaaagagtataacgattgccgtactagtcgaagaagtgcatga

SEQ ID NO: 63972 - protein, 206 aa, Unknown
  Obtained from environmental sample
  DOMAIN (19)...(205): Amino acid kinase family
  misc_feature (1)..(206): Xaa is any amino acid
MAAGKYGVKMISKLIADARKIIIKIGSNTLAGSDGKINSQFLSEFAGQVSMLMKKGKQIVVVSSGAQVAGLSTMDKWARKKDIHYRQALCAVGQVELMGAWSRAFEQNGLHIAQILLTREDFNDPITTLNMRNTLFTLVDEGIIPIINENDTVSVEEIKIGDNDTLAAQSAILWSADLLILFSDIDGVYDKNPKEYNDCRTSRRSA

SEQ ID NO: 63973 - DNA, 759 bp, Unknown
  Obtained from environmental sample
  misc_feature (1)..(759): n is a, c, g, or t
atgatgggacgaaagaacaagcagttgtgtatggtcatgctagacatggaagacttgatacctgaaacacatcttctaagaaaaattaaaacaaagatagattttgattttatatatgaagaagccgaaagttattattccaatataggacgcccgtctgttgatcctgtttgtttaataaaaatgctgcttgttggttatttatacggggtaagatccgagaggcggctagaagaagaaattactttgaatatcgcctacagatggttttgcggctttgacctgatggatacgatacctgatcattcaatattcagccaaaacaggcggcgaagatttgcagacggttcaatattccgacaaatctttaaccggatagtaagagattgtatagaaaccggtttagtatcaggagaaacggcagtgagcgacgggtcattcattcccgcaaacgtgtcttggcagagcaaagtcgaagtaaccagactggtagaaaaaagtactgttgattaccttgaagtattagacgaagaactaaaaaagacagaaggatatgtccccgcttatccttcgataatagagaagaaggaactgaagagcagaacagacgttgattgtggttatatacatcaagacacgaaaaaggggttgggatatctggcggaaataactgttgacactaagaatggtataattaccggcatggattgttatccggcgaaccgcagagagagcgatattatttttaaggcatattga

SEQ ID NO: 63974 - protein, 252 aa, Unknown
  Obtained from environmental sample
  misc_feature (1)..(252): Xaa is any amino acid
MMGRKNKQLCMVMLDMEDLIPETHLLRKIKTKIDFDFIYEEAESYYSNIGRPSVDPVCLIKMLLVGYLYGVRSERRLEEEITLNIAYRWFCGFDLMDTIPDHSIFSQNRRRRFADGSIFRQIFNRIVRDCIETGLVSGETAVSDGSFIPANVSWQSKVEVTRLVEKSTVDYLEVLDEELKKTEGYVPAYPSIIEKKELKSRTDVDCGYIHQDTKKGLGYLAEITVDTKNGIITGMDCYPANRRESDIIFKAY

SEQ ID NO: 63975 - DNA, 570 bp, Unknown
  Obtained from environmental sample
  misc_feature (1)..(570): n is a, c, g, or t
ttgaacggcaaattaaggataaccaatagacattcaaaccttgggcttgacgctggatatgatgtaggagcagttcatcggggacttgaaattatgggaataaccggttatacaggtcttagatttgctcataataatcccatgaaagagcaatttacttatcagcccgaagaagatacgtttatatgtaaagaaggcaaggaacttccattcgcaaaattaatatttaaaaaaggaacagggtattatcggctgtatagaataaaacccagatcatgtggaagttgtaccaagcgaagtgaatgcaaaacaacaagcggatcaataaggataaacgccagtccatattatccggcatattatgcgaatcgggagagatatgagacaccagattatgttaaggtcaagagattgcgcggaatatgggctgagggaacttttgcggtattaaaaaattttcacaatctaaaaaagcatcgtaaacgcgggatttaccgtgcgactgaagaatgtcttctttccgcgacggcattaaatcttaagcggtttattaaggctgttaacgcataa

SEQ ID NO: 63976 - protein, 189 aa, Unknown
  Obtained from environmental sample
  misc_feature (1)..(189): Xaa is any amino acid
MNGKLRITNRHSNLGLDAGYDVGAVHRGLEIMGITGYTGLRFAHNNPMKEQFTYQPEEDTFICKEGKELPFAKLIFKKGTGYYRLYRIKPRSCGSCTKRSECKTTSGSIRINASPYYPAYYANRERYETPDYVKVKRLRGIWAEGTFAVLKNFHNLKKHRKRGIYRATEECLLSATALNLKRFIKAVNA

SEQ ID NO: 63977 - DNA, 768 bp, Unknown
  Obtained from environmental sample
  misc_feature (1)..(768): n is a, c, g, or t
atgagcgcgattaaaaacagcaaactaatcgctataacgggaaagggcggcgttggtaaaaccacagtcagcgcgcttttaattaaaaatttattggctgccgggaaaactcccgtgcttgcgatagacgccgacccgaatagctgtcttgacgcggcgttaggcgtatgcgttaccgatactgtaggcagggcgcgcgaagatgttcgcgagtcggctggagcggacatcaatgtttccaaacgggaacttttgcggttaaaactggaaagcgcccttgtggaagaaaagggttttgatcttatcgctatgggaagaccggaaggcgagggctgttactgttacgcgaataatgtgcttaaagagatcattgccgaaatttcatcgggatatccctatgtagtgctggataacgaagccggtcttgaaaacctttcacggcgtattgttcaaaaagttgaccttatggtacttgtttccgacgcttccaattcgggcttgcaaactttgcttcgcctttttgaacttgcgggcgaaatgaaaatgtcttacggcaaacttgcgcttgtaataaataaattgcgaagcggcaaattacctgacagaatgaaagagataagcgaaaaaaccaaagcggatatagtcatcggtcttcccgatgatgatgaagtttcagagtttgcgcaagagaacaagaattttttacagatatcggattcaaatgctgtttataagaaagtaatggaattagttagaaatgtgaactaa

SEQ ID NO: 63978 - protein, 255 aa, Unknown
  Obtained from environmental sample
  DOMAIN (9)...(226): CobQ/CobB/MinD/ParA nucleotide binding domain
  misc_feature (1)..(255): Xaa is any amino acid
MSAIKNSKLIAITGKGGVGKTTVSALLIKNLLAAGKTPVLAIDADPNSCLDAALGVCVTDTVGRAREDVRESAGADINVSKRELLRLKLESALVEEKGFDLIAMGRPEGEGCYCYANNVLKEIIAEISSGYPYVVLDNEAGLENLSRRIVQKVDLMVLVSDASNSGLQTLLRLFELAGEMKMSYGKLALVINKLRSGKLPDRMKEISEKTKADIVIGLPDDDEVSEFAQENKNFLQISDSNAVYKKVMELVRNVN

SEQ ID NO: 63979 - DNA, 786 bp, Unknown
  Obtained from environmental sample
  misc_feature (1)..(786): n is a, c, g, or t
atgaaaattgcagtttcgggaaagggcggagtaggcaagtctactgtcgccgcttctatcgcgttaattctggcgcaaagggggggcagggtgcttgcccttgacgccgatcctgacgctaaccttgccgcgtctttgggtattcctaaaactgttaaaattacccctatctcgcgggaaatcgcgctcattgaggagagaacgggggcgaagattgaccagtacgggcagatttttaaacttaacccgaatgtcagcgacgtggcggagaagtttgcggtttcacataacggagttgagcttttggttctgggagccattaaaaggggcggcggaggctgcgcgtgtcctgaaaatgtttttataaaagcgttggttaacgatcttgttctgtataagaatgaaactctcataatggatatggaagccggtattgaacatctgggacgcgctacctcaagcggcgtagacgtgatggtcattgtggttgagccgggccagcgctcgcttgattgcgcggatacggttatcaagatgtcaaaggaaatagggcttgccgattttgtaattgtgggtaacaagataacttgcgaagacgataaacgctttatcgaaaacggactttcaggttttaatgtgtccgcgtttcttccgtactcggaaaatattcgcaaggcggacagggacggagtttccgcgctggacggaatgaacggcgaagaacgcgccggtttggaaaatcttgtcgatcttattttaaaaatgccgaatcgaggtaatgtatga

SEQ ID NO: 63980 - protein, 261 aa, Unknown
  Obtained from environmental sample
  DOMAIN (1)...(257): Anion-transporting ATPase
  misc_feature (1)..(261): Xaa is any amino acid
MKIAVSGKGGVGKSTVAASIALILAQRGGRVLALDADPDANLAASLGIPKTVKITPISREIALIEERTGAKIDQYGQIFKLNPNVSDVAEKFAVSHNGVELLVLGAIKRGGGGCACPENVFIKALVNDLVLYKNETLIMDMEAGIEHLGRATSSGVDVMVIVVEPGQRSLDCADTVIKMSKEIGLADFVIVGNKITCEDDKRFIENGLSGFNVSAFLPYSENIRKADRDGVSALDGMNGEERAGLENLVDLILKMPNRGNV

SEQ ID NO: 63981 - DNA, 1059 bp, Unknown
  Obtained from environmental sample
  misc_feature (1)..(1059): n is a, c, g, or t
atggcagactcaagtaccgaaacggctatgactgacggcgaagctgccgccaaggaagaaggcgcggcttcacagaagcaaggttcccttcctgacagcggttcaatactctcccttgcggatgtccatgaaaataaaggcgcataccgcgtttatacatcgcttattcagaagatgaataaggtgttggtgggtatctccaataacgcctccataataggaaaagaacagataaccaatgaaatcagcgttcccctgcttcaggccgtgcggggcatgcgcaaacagttgataggctttattttgggcggcgaggtaaagggttttgaaatggcaaaaagttcggttaataccgcccttctttccgccctgtgcgcgttggagctcaaccttccccatcacagaatcctgaatattatcaatggcgcgctgcttcacgacgcgggaatgctaaggctgccaaaggaagtcacggaaaagaggggagggcttaccgacgcggaacaccagcttatacgcagccacccggtgcttgcccacaagatagtggttaaggaactgcactttttggatgatgtaggcagtattgtcttgcagcaccatgagcgctgggacggcgaaggctaccccaaccacatcgcgggggattatattgatatgggcgccaggatagtgtccattgccgacgcgtttgaagccatggtaagccccaagccgtaccgcaattccattacgggcaatcaggcggtgaaaaacctcctttccgacaattcgcgccgttttgaccctacgatcctgaaggcttttgtccttattatggggatttatcccattggctccatagtccgtttgaataacggcgcgattgcgcggatatcagaagttcgcgccatcgcgccattgcgccccaaagtccaggtaatagttgaccaaaccaataaagtatatcgtaatgaacagggcgcttttcttgatctgatgaccgaaaagagcctgtatattgccaaagcaatggatacgaaagagtttctggagcaatacgccgagaataatgtataa

SEQ ID NO: 63982 - protein, 352 aa, Unknown
  Obtained from environmental sample
  DOMAIN (111)...(234): HD domain
  misc_feature (1)..(352): Xaa is any amino acid
MADSSTETAMTDGEAAAKEEGAASQKQGSLPDSGSILSLADVHENKGAYRVYTSLIQKMNKVLVGISNNASIIGKEQITNEISVPLLQAVRGMRKQLIGFILGGEVKGFEMAKSSVNTALLSALCALELNLPHHRILNIINGALLHDAGMLRLPKEVTEKRGGLTDAEHQLIRSHPVLAHKIVVKELHFLDDVGSIVLQHHERWDGEGYPNHIAGDYIDMGARIVSIADAFEAMVSPKPYRNSITGNQAVKNLLSDNSRRFDPTILKAFVLIMGIYPIGSIVRLNNGAIARISEVRAIAPLRPKVQVIVDQTNKVYRNEQGAFLDLMTEKSLYIAKAMDTKEFLEQYAENNV

SEQ ID NO: 63983 - DNA, 1770 bp, Unknown
  Obtained from environmental sample
  misc_feature (1)..(1770): n is a, c, g, or t
ttgacttgtttgtctttcgagacccaggaagagaggctttccccgccgcgttccacggatgaaatcaggcttgatgatattaaaaaatttatcccgcaggaaccggtaagggcgattgaccttattggcatataccgcgaggcataccggattaccggcgaggacggcattgcggcggaaattctggagttagaaaaagaagcgactctggtgttaaagggttttcttgataaagcaatcgaggaaaaacgctgggatgacgccgcttcatacagccgttctctgtcatgtattgagcctcaaaaccaggcggccgagccggagcttatccttgccctggcaaagaagaaacttgaggaaaacgataatctcaacgcttttcttgccgctgtgcgttcccatgaactgcgtcccctgtcatttgaggacgcggcgctttttcttgacaaggcggtgcaggcaaaacaacgccgggcggcggcgtattttttaaccgccgcggagaaagccggatccgccgctaaaattcccgcgcctgcccttgaatatgccaggggttctgacagcgtcgccgcaatgatcaacggagttgccacggtaatggtcgacaggggcataaaaattgagcgcggcatgggttacgcggacaagattttgggatccgccttttttatcgattcatccggcctgttaataacaaattaccatgtaatcgcaagcgaggtagaccccaagtatgaagggtattcccgcgtgtatatcaggatgggtgacagctcaagcccccgttttccggcgcgggtaatcggttatgataaggcgctggacctcgcgctgattaaaacagaacataaaagcgaattcgtattttccatagtggacagggtcgttccccaggtgggtgatacggtcattgcgatagggtcgccggtagggcttgagaaaacagtcacatccggcatcgtgtcgtcgctcagccggcgcttcctgcaaatcggggacgtgtatcagatagacgccgcggttaaccccggcaattccggcggccccgtcgtggatacgtcgggccggcttgtgggcattgtcttcgccggcgcggatcagttccaggggcttaatttcgccatacccgcgcggcggctngccgccgcgctccccgccatgataaagggcggcaaggccgagcgtccctggcttggcataaccctcagcgaaagctccggcagcgcggaaataatctacaccgcgcccaataccccggcatccaggcaccgagtgaccgaaagcagcaaaatagttacgcttaacggcaggaaaatcacggctccacagagtatgctgatccccgccatgcaggacgcgatcttccaatcccgccccggcgagcttgtcgccctggaaacccaggattccgatggcacgatcagaaagcacctggtgatgaccgttccacgtcccgaatttccgcttgttgacgcggcaaaactggacagccgtgagcggcttgcggcgcctttctttggattgattctttcacccagccagggaaaatccagatcctccaattatctggtaaaaaaaatagtccggggctcaatcgccgatgaggcaagcatttcagatcatgactctgtttatatcaggggcttccgcatttatgagaaagagggttttgcgttaatggaaattgatataaagaaacgcagtatgggttatctggaaacccccatgcagcttccggcgcgtctggattctccggatactttgtaa

SEQ ID NO: 63984 - protein, 589 aa, Unknown
  Obtained from environmental sample
  DOMAIN (193)...(385): Trypsin
  misc_feature (1)..(589): Xaa is any amino acid
MTCLSFETQEERLSPPRSTDEIRLDDIKKFIPQEPVRAIDLIGIYREAYRITGEDGIAAEILELEKEATLVLKGFLDKAIEEKRWDDAASYSRSLSCIEPQNQAAEPELILALAKKKLEENDNLNAFLAAVRSHELRPLSFEDAALFLDKAVQAKQRRAAAYFLTAAEKAGSAAKIPAPALEYARGSDSVAAMINGVATVMVDRGIKIERGMGYADKILGSAFFIDSSGLLITNYHVIASEVDPKYEGYSRVYIRMGDSSSPRFPARVIGYDKALDLALIKTEHKSEFVFSIVDRVVPQVGDTVIAIGSPVGLEKTVTSGIVSSLSRRFLQIGDVYQIDAAVNPGNSGGPVVDTSGRLVGIVFAGADQFQGLNFAIPARRLAAALPAMIKGGKAERPWLGITLSESSGSAEIIYTAPNTPASRHRVTESSKIVTLNGRKITAPQSMLIPAMQDAIFQSRPGELVALETQDSDGTIRKHLVMTVPRPEFPLVDAAKLDSRERLAAPFFGLILSPSQGKSRSSNYLVKKIVRGSIADEASISDHDSVYIRGFRIYEKEGFALMEIDIKKRSMGYLETPMQLPARLDSPDTL

SEQ ID NO: 63985 - DNA, 1104 bp, Unknown
  Obtained from environmental sample
  misc_feature (1)..(1104): n is a, c, g, or t
atgcttttcagcgcgacattaaacgcatgggtaaaaaatcttgcgtgggaatacacaaagtctccttttgaaatcgagataaaacccgaagttgtaacggtcgaggaaatcacgcaagttctataccatgttccgtcaggcgataaaatgactctgctcctcggcattctaaaaaacgaacagcccgaaagcgcaataattttctgcaacacaaaaaaacacaccgagattgtagcgaagcgtcttaaattaaacggatactcgtgcgaatttatcatcggcgatttgccgcaggtaaaacgcttaaaaatcattaatgacgtaaaagcaggaaaaacaaaattccttgtcgccaccgacgttgcggcgcgcggtcttgatattgaaagccttgcgatggtaataaattacgatcttcccgttgaagcggaaaactatgttcaccgcatcggaagaacagcgcgggcgggaaaaacaggcaaggcgattactcttgcgagcgaacaggacgtatacgagttacccgccattgagcgttacatcgggaaaaaaatcccgtcggaaatagcgatgcaggaacattaccacgacgacgcaagcgcaggtaaatttatttctattgataattacgatggaactcgcacaggcggaacaagatcagcgggtgcaagacgggataatttcaaacatgatgacagaagaaaacccgcatcttctaaaactcacaataaaaattacagtaaaaaccaagcttcttccaatacggagcataaacacacagaacacaaaaagaaacctgttgaacatcaaggtaaaaatcgcgacctttcgcgccttactatggaagagcgaatggcaatgtataaaaagaaatacgcgggagaaacaagtaagcctcaacacgctgaacatacaaacaaaaaacaacatcaacaaacaaaacacaaacgtcaacaaacaggacacaaacaaattgccgataaatcggctgatattaaaacagctaacgcaaagccgatgaatgaaaaaacagccgcaactaaaccggcaggcactaaaaagggaataatatctaaacttataggaatatttaagaaaaaatga

SEQ ID NO: 63986 - protein, 367 aa, Unknown
  Obtained from environmental sample
  DOMAIN (81)...(157): Helicase conserved C-terminal domain
  misc_feature (1)..(367): Xaa is any amino acid
MLFSATLNAWVKNLAWEYTKSPFEIEIKPEVVTVEEITQVLYHVPSGDKMTLLLGILKNEQPESAIIFCNTKKHTEIVAKRLKLNGYSCEFIIGDLPQVKRLKIINDVKAGKTKFLVATDVAARGLDIESLAMVINYDLPVEAENYVHRIGRTARAGKTGKAITLASEQDVYELPAIERYIGKKIPSEIAMQEHYHDDASAGKFISIDNYDGTRTGGTRSAGARRDNFKHDDRRKPASSKTHNKNYSKNQASSNTEHKHTEHKKKPVEHQGKNRDLSRLTMEERMAMYKKKYAGETSKPQHAEHTNKKQHQQTKHKRQQTGHKQIADKSADIKTANAKPMNEKTAATKPAGTKKGIISKLIGIFKKK

SEQ ID NO: 63987 - DNA, 1719 bp, Unknown
  Obtained from environmental sample
  misc_feature (1)..(1719): n is a, c, g, or t
atgatagattcccacaaacactccgcgcaggcacgtgttgcggtatttggcgacccggattttgtggcggctatggtgcggctatgctgcgaaaacggagctcttccggttttggcggcaacaggctcaatttcccctaagctaaaagaaatgctcgcaaacgaggctgaagattgcagaaaatttcatttcgcagaagaaatacgagttcttgacgacagcgatttttccgcaattgaaaaagggtgtgttgagctaggcgcaaacctgctaatcggaagctcagacgggcggcgtatttcacgcaaactgaacattcctcttatacgctgcgcatttcccatacacgattatataggcggtcagaggactcgtattctaggctttgacggctcgctttgcatattagaccaagctgcaaatgcgatgatggaaaaaacagaaagcagttttcgcgaagaattgcacaaaaaattttacaaacctcaaacagcaaaaaaggtagcagacaaaaccgctacacacccttgctttggcgaacaggcttgccaaaacgcacgtgtgcatttacccgtcgctccaaaatgcaatatccaatgcaactactgcctgcgaaactacgactgcatgaatgagagccgccccgccgtcgcgtcaaaaattctcacgccgtccgaagcgtttgaccgttacgtgagctgnaagaaggcgtctcctaatctcaccgtggcggctatagcggggccgggcgacgcgctcgcgaacttcgatctcactcgcgagacgttcaggcttatccgcgagtacgacaaagatgtcatgttctgtattgcgaccaacgggcttttgctgccgcagtacgtatcgcagctgcgtgagctcggcgtcagccacgttactgtgaccatcaacgccgtagatccggcgataggcgctaagatttacgcccgcgtctcctacatgggaaaaacctacgagggcgcggagggcgcgtccatactgcttgccaaccagctcgccggaataaagatgcttgccgacgcgggaattgtctgcaaggtaaattgcgttacgctaaagggcataaacgacaagcacatccccgacgtcgtgaagacgacggcggaactcggcgtgttcatggcaaatatcatgccgcatataccggtgaagggctcggcgtttgaggggcttgatcgtgttacctataaggaaatcgaggtattacgcgcggattgcggcgcgtacgttaagcagatgacgcactgccgtcaatgccgctccgacgccgtcggaacgcttgacgaggatcactctgtggatttctacgacggcgaggaggctaaggcgccgccgtcgtccggcaagcggatgcgcttcgccgtcgccactaagagcggcgcgattgtggacatgcacttcggccacgccggcgaattctacatatacgagagcgacgcgtcggacacgcgctttgtggaaaagcgttatgtggagaagtattgcaacgggccggattgcggtggcaaagaggacaaatgggaacctattatccgggccgtcgaggactgcgtcgcggtacttgctatgcggataggccctacgcccgaaaaaagattgaaagaaaaaggcattgacgccattatgacttatgacagagtagaaaccgccgtcgctcgcgcggcaaaagaaaggagtactgtccatggtatcgcctaa

SEQ ID NO: 63988 - protein, 572 aa, Unknown
  Obtained from environmental sample
  DOMAIN (190)...(374): Radical SAM superfamily
  misc_feature (1)..(572): Xaa is any amino acid
MIDSHKHSAQARVAVFGDPDFVAAMVRLCCENGALPVLAATGSISPKLKEMLANEAEDCRKFHFAEEIRVLDDSDFSAIEKGCVELGANLLIGSSDGRRISRKLNIPLIRCAFPIHDYIGGQRTRILGFDGSLCILDQAANAMMEKTESSFREELHKKFYKPQTAKKVADKTATHPCFGEQACQNARVHLPVAPKCNIQCNYCLRNYDCMNESRPAVASKILTPSEAFDRYVSXKKASPNLTVAAIAGPGDALANFDLTRETFRLIREYDKDVMFCIATNGLLLPQYVSQLRELGVSHVTVTINAVDPAIGAKIYARVSYMGKTYEGAEGASILLANQLAGIKMLADAGIVCKVNCVTLKGINDKHIPDVVKTTAELGVFMANIMPHIPVKGSAFEGLDRVTYKEIEVLRADCGAYVKQMTHCRQCRSDAVGTLDEDHSVDFYDGEEAKAPPSSGKRMRFAVATKSGAIVDMHFGHAGEFYIYESDASDTRFVEKRYVEKYCNGPDCGGKEDKWEPIIRAVEDCVAVLAMRIGPTPEKRLKEKGIDAIMTYDRVETAVARAAKERSTVHGIA

SEQ ID NO: 63989 - DNA, 309 bp, Unknown
  Obtained from environmental sample
  misc_feature (1)..(309): n is a, c, g, or t
atggtatcgcctaagtatcacattttcgtctgcggcagcagccgtatcaacggaacgcaaaacgggacgtgccacaagaagggcgcggtcgcccttgtgcagaagttcatgcaggagatcgaggacagggacatcacgtccgactgcctcgtgaccaacaccggctgcttcggcatctgcgacaaaggccctatcgcggtagtatatcccgaaggaacttggtacgggaacctcaccgaagacgcggtggaggagatctgcgagcagcattttgagggcgggaaggtcgtggagaagtacaagatttga

SEQ ID NO: 63990 - protein, 102 aa, Unknown
  Obtained from environmental sample
  misc_feature (1)..(102): Xaa is any amino acid
MVSPKYHIFVCGSSRINGTQNGTCHKKGAVALVQKFMQEIEDRDITSDCLVTNTGCFGICDKGPIAVVYPEGTWYGNLTEDAVEEICEQHFEGGKVVEKYKI

SEQ ID NO: 63991 - DNA, 540 bp, Unknown
  Obtained from environmental sample
  misc_feature (1)..(540): n is a, c, g, or t
atgaataataaaatacggcatcttgtttttaccgcgttgctgctcctgattccatgttctttcctgcaggcacaaacgctcaaatattttctggaatggcaaaaagatcaaaaagcccgccgttatgaaatagtgattgaaaaggaagaaggtaaagaataccggcaaacgctgagggaatttaccgaaatgtcttccatcgaagtgtccctggaaccgggcaagtaccgttatatggttattccctataattttcttgaccggcccggtaaaatcccggactggaagaaatttgaagtcctcatcgttcttacaccggaactgtacgatttttctccatctgctttttatgcggatacggacacgatatatgaacttaccgttgccggaaaaaacctgaatcccaaaaccaaaatatatctgcgccatattggcggcgcaattgttgttccggacgataaaaaaatattgtccctgtcgaacaagaatttaatgaagacggcagccatgcccggcttttgtttgataataagcagttga

SEQ ID NO: 63992 - protein, 179 aa, Unknown
  Obtained from environmental sample
  SIGNAL (1)...(24)
  misc_feature (1)..(179): Xaa is any amino acid
MNNKIRHLVFTALLLLIPCSFLQAQTLKYFLEWQKDQKARRYEIVIEKEEGKEYRQTLREFTEMSSIEVSLEPGKYRYMVIPYNFLDRPGKIPDWKKFEVLIVLTPELYDFSPSAFYADTDTIYELTVAGKNLNPKTKIYLRHIGGAIVVPDDKKILSLSNKNLMKTAAMPGFCLIISS

SEQ ID NO: 63993 - DNA, 840 bp, Unknown
  Obtained from environmental sample
  misc_feature (1)..(840): n is a, c, g, or t
ttgcgggcgcgactggctcatctaccgcctcaatgtcttgacgagaaaaccgccccggcgctggatattgttcagcggctgatacatgaagccgatttttccgacatcaggcgaatcagggatttggttctggaaatgaaaaacgatctgcgttccggttttgcccccagcggtcacagttatgcctcatgccgggctggccgcttttcatcagcttccgcgcagacaggggaaatctggaatggcataagccagcttgaatttgcccaccgccttgccgaactcgacaccgctgaagccgccgccaaactgcactacttgcgtgaagcgatagcgtcaggcggtcttatcgccaacatgagcggttccgccggggcgcttaaatccggcggcgcgctgatcgcagagcgatttagccgcatcggtccgccaaaaacaaggaccagggagcagggatcagagatcaaggatcaatccccagtttccgtaaaagaagtttttgcttccccttcgctgcaaatcggttttgccgccatgacgttgcgggccgcgccttttgacactccggcgcagaccgccgaaacggtatttgcccaccagctttccaccggcgcgttatgggaagatatacgcatgaagggcggcgcttacggggcctacgcttccagcgacagcctggagcgctgtttttccctttcaacctaccgtgatcctaatccgctgcgttcactggattcattttccaccatactcaaaacaaacgatattaccgcacaagacgatggctctcaggaaacggttttcaagaaaacggttttcaagaaaacctggaaaaaatga

SEQ ID NO: 63994 - protein, 279 aa, Unknown
  Obtained from environmental sample
  misc_feature (1)..(279): Xaa is any amino acid
MRARLAHLPPQCLDEKTAPALDIVQRLIHEADFSDIRRIRDLVLEMKNDLRSGFAPSGHSYASCRAGRFSSASAQTGEIWNGISQLEFAHRLAELDTAEAAAKLHYLREAIASGGLIANMSGSAGALKSGGALIAERFSRIGPPKTRTREQGSEIKDQSPVSVKEVFASPSLQIGFAAMTLRAAPFDTPAQTAETVFAHQLSTGALWEDIRMKGGAYGAYASSDSLERCFSLSTYRDPNPLRSLDSFSTILKTNDITAQDDGSQETVFKKTVFKKTWKK

SEQ ID NO: 63995 - DNA, 1470 bp, Unknown
  Obtained from environmental sample
  misc_feature (1)..(1470): n is a, c, g, or t
ttgagaaaaaagatcatgggagtaatggtgcagccggttcttggcaggctgtaccctgaaaaaaaccttgcaagccagattatcggttttgtgggcgacagaaatcaggggcttgagggaattgaatatgcctttaacagtatccttgagggaacggaagcaggcggcaatgccggaggcaaaggctctcatgtaatgctgacaatagatacaaacgtgcagcatattctggaaaggattgcttccaaaacgttaaccgaaacccgcgcggaggcggttatgcttcttgctatggatccgcgcagcggggatattataggctccgcatcccttccgaattttgatctgaataacatccgcgcttcggatgagatcagccggatgaaccgccctgttatttgggcttacgaacccggttccgtcttcaaagttttcactatggcggcgctgatggattcaggcgctataacaggcaactctgtttttacctgcaacggcgtttatgttacaaaccgcggcagccaaattaaatgtcttggcgcacacggtaaggtaacagccagagaaataattattcactcttgtaatgccggcgccgcgtatgcttccgatcaattaagcggaggggcgttttatcagcttttaacggattatggttttggttcgcgcacaggcgcaggaagtcccggagagacaaccggctatcttttggggagcgaacagtggtcggatcgaacaaagcccactatagcgatgggtcaggagattgcggtttccgcttaccagatgttacaggcggcaagtgctgttgcaaacgacggcattttgatttctccaagaatagtgtctaacattgtgtcccatgacggcaatgttaaagaatggaaacctgtagaaaggcgacgtgttttaaaagcggaaaccgcgaaggctatgcgctcctacatggtagacaccgcctcgggtattgggacgggctggcgcgccgcggttgaagatttgtcgcttgccgtaaagaccggaaccgctcagataatagaccctgttacccgcagatattccgataccgactttatcgcaagttgtattgccctgcttcccgccgaatcgccttcgcttatcctgtaccttgcgattattaaaccaaggggtgaaattttaggcggcaggatcgcggctcccgcaatccgcgaagcggcggaatctcttatcgattacattggcattccgcgcggacgcaatccgcaggtttcccatccgtcttcggtagacattcccgccggtcgtcttcccgttattggcagccatttgcccgattttaccggcatttccaagagggtacttcttccccttctgttacgcgatgatgtcgatgtagaaattcgcggtgaaggctgggtacgtcgccaagatccgcctgccggaactccggttacagacggaatgaaaataatactggaactggaatag

SEQ ID NO: 63996 - protein, 489 aa, Unknown
  Obtained from environmental sample
  DOMAIN (435)...(489): PASTA domain
  misc_feature (1)..(489): Xaa is any amino acid
MRKKIMGVMVQPVLGRLYPEKNLASQIIGFVGDRNQGLEGIEYAFNSILEGTEAGGNAGGKGSHVMLTIDTNVQHILERIASKTLTETRAEAVMLLAMDPRSGDIIGSASLPNFDLNNIRASDEISRMNRPVIWAYEPGSVFKVFTMAALMDSGAITGNSVFTCNGVYVTNRGSQIKCLGAHGKVTAREIIIHSCNAGAAYASDQLSGGAFYQLLTDYGFGSRTGAGSPGETTGYLLGSEQWSDRTKPTIAMGQEIAVSAYQMLQAASAVANDGILISPRIVSNIVSHDGNVKEWKPVERRRVLKAETAKAMRSYMVDTASGIGTGWRAAVEDLSLAVKTGTAQIIDPVTRRYSDTDFIASCIALLPAESPSLILYLAIIKPRGEILGGRIAAPAIREAAESLIDYIGIPRGRNPQVSHPSSVDIPAGRLPVIGSHLPDFTGISKRVLLPLLLRDDVDVEIRGEGWVRRQDPPAGTPVTDGMKIILELE

SEQ ID NO: 63997 - DNA, 1101 bp, Unknown
  Obtained from environmental sample
  misc_feature (1)..(1101): n is a, c, g, or t
gtgtctttttgggagaagaacagcaaagtcctgatagatcattatccgggccttcttgaagatattacccgcgcagaagaagaatccggtatttcatctgacgatattcaaatagttaccgcgtccacaggcgacccttctctttgcgttaaaggcataaatatccactcaggccgcgatcccgcgcgcgaggggcttcgtctcgctcaagtaccggcgggcggcggccctgttgtcatacttggatttgggcttggttacgccgcagcggcggccgcacaaatcattgaaaaagggcgtccgatcataattgcggaaaagcacaggaaacttcttgtcaaagctcttgagacaagggatttaagcgattttctttcaaataacagaataatttttgtcgtaggcggaccgggagaaggaataacaaacgcgctcagtatcgcggacggatttatttccgccggcgaaagaacggagccggttgttatccgcagcagggcgctcatcgatcttgataaagaatggtacggtgttgttgaagaaaagctccgcacatggtcgatgagggacgatgttaattcagcgactctaaagcgtttcgggcggcgatgggtgcggaatttgtcgcgtaacataagcgcaatccgcgattacgccggtatttcgcgccttgcgggtttagccgcaaatatcgccgacggcgtcgccgacggcgcgccggttttccttgccgccgccggtcccagtcttgacaagtcgcgtccttttttacatgaaatacacaaaaggtgcgttacagtcgccgtagacacatctttccgtttctttacagataacggcattcagccggattttgttctggtagttgatccccaattctggaacagccgccaccttgacaggtgttcgtgcgggaacaccgcgctgatagcggaatccgccgtttaccctccagttctgcgcctgcctttcaaaaacatttttctttgcggctctctttttcccttggctcctttgttgaaaagcgtgttgatcccaaaggcgcgcttggggcgggaggctccgtctccactaccgcgtgggattttgcacgcatactag

SEQ ID NO: 63998 - protein, 366 aa, Unknown
  Obtained from environmental sample
  DOMAIN (222)...(357): Protein of unknown function DUF115
  misc_feature (1)..(366): Xaa is any amino acid
MSFWEKNSKVLIDHYPGLLEDITRAEEESGISSDDIQIVTASTGDPSLCVKGINIHSGRDPAREGLRLAQVPAGGGPVVILGFGLGYAAAAAAQIIEKGRPIIIAEKHRKLLVKALETRDLSDFLSNNRIIFVVGGPGEGITNALSIADGFISAGERTEPVVIRSRALIDLDKEWYGVVEEKLRTWSMRDDVNSATLKRFGRRWVRNLSRNISAIRDYAGISRLAGLAANIADGVADGAPVFLAAAGPSLDKSRPFLHEIHKRCVTVAVDTSFRFFTDNGIQPDFVLVVDPQFWNSRHLDRCSCGNTALIAESAVYPPVLRLPFKNIFLCGSLFPLAPLLKSVLIPKARLGREAPSPLPRGILHAY

SEQ ID NO: 63999 - DNA, 678 bp, Unknown
  Obtained from environmental sample
  misc_feature (1)..(678): n is a, c, g, or t
gtgatcaacaaaaaacccgcgaatgcgctgttgacgcaatacggaacctccgaagcggcggacaaggcttttgccgagcttaacgagtattggaaaaaccttcttggccgctttacagtcgatgccgaagacaaaaaaatggcgcgtatggcgggcgtttggaaccagtatcaatgtatggttacatttaacatgtcccgcagcgcgtcttattttgaatcgggaatcgggcgcggcatgggcttccgcgattccaatcaggacttgctgggctttgtccatcttgttcccgaacgcgcccgcgcccgtattttggacattgccgcgacgcagtttcccgatggcagcgcatatcatcagtaccagccgcttacaaagcgcggcaataacgaagtcggctccggctttaacgacgatcctttgtggctcatctgcggcgtcgcggcgtacatcaaggagacgggcgactatggcatccttaatgaaaaagtgccttttgacaacaacgaagcgttagctgacaccctatttgtccatttaaaacgttcctttgattacactgtaacgcatgtcgggccgcacgggctcccgcttattggccgcgccgactggaacgactgtttaaaccttaactgctttttccaaaacgcccggcgaatctttccagacaaccgctaa

SEQ ID NO: 64000 - protein, 225 aa, Unknown
  Obtained from environmental sample
  misc_feature (1)..(225): Xaa is any amino acid
MINKKPANALLTQYGTSEAADKAFAELNEYWKNLLGRFTVDAEDKKMARMAGVWNQYQCMVTFNMSRSASYFESGIGRGMGFRDSNQDLLGFVHLVPERARARILDIAATQFPDGSAYHQYQPLTKRGNNEVGSGFNDDPLWLICGVAAYIKETGDYGILNEKVPFDNNEALADTLFVHLKRSFDYTVTHVGPHGLPLIGRADWNDCLNLNCFFQNARRIFPDNR

SEQ ID NO: 64001 - DNA, 813 bp, Unknown
  Obtained from environmental sample
  misc_feature (1)..(813): n is a, c, g, or t
atgattgaggcggttaacaaccacggctgggacggcgactggttccttcgcgcctatgacgcgcacggcaaaaaaatcggcagccgcgaatgtgaagacggaaaaatatttattgaatccaacggcttcgccgtgatggcaggcattggtcttaatgacggacgcgcgcagaaagcgcttgattccgtaaaagatcatcttgacacaaagtacggcatagtgctgttgcagcccgcgtacaaggactaccatattgagttaggtgaagtttcttcgtatccgcccggatacaaggaaaacgccgggattttctgccacaacaacccgtgggttacgataggggagaccgtgctgggcaggggaaaccgcgcgtttgaaacctacacaaaaatctgtcccgcttaccgcgaagacgacagcacccttcgcagattggagccttatgtgtacgctcagatggtagcgggcaaagacgcggttaatcacggcgaggcgaaaaattcatggcttacggggacggcggcttggacatttgtcagtatttcgcagtacattctgggagtgcgccccgtctttgacggccttatgctcgacccgtgcattccggcagacatgaaaggctataccgttacccgacattttcggggcgcggattatcacatcacggtggataacaacgccggcgcggaaaagggaataaaatccattacggttgacggtaaaccaatggaaggcgaagcgttaaaaaatgcggtgataccggcgtttggcgataataaggcgcataaaattgttgtagtgatgggaaaataa

SEQ ID NO: 64002 - protein, 270 aa, Unknown
  Obtained from environmental sample
  misc_feature (1)..(270): Xaa is any amino acid
MIEAVNNHGWDGDWFLRAYDAHGKKIGSRECEDGKIFIESNGFAVMAGIGLNDGRAQKALDSVKDHLDTKYGIVLLQPAYKDYHIELGEVSSYPPGYKENAGIFCHNNPWVTIGETVLGRGNRAFETYTKICPAYREDDSTLRRLEPYVYAQMVAGKDAVNHGEAKNSWLTGTAAWTFVSISQYILGVRPVFDGLMLDPCIPADMKGYTVTRHFRGADYHITVDNNAGAEKGIKSITVDGKPMEGEALKNAVIPAFGDNKAHKIVVVMGK

SEQ ID NO: 64003 - DNA, 1689 bp, Unknown
  Obtained from environmental sample
  misc_feature (1)..(1689): n is a, c, g, or t
atgcattataataattttttaacagtaacttatgcgccggcaggatatttaaatgacaactcgcttgaacaaataaaagctgacattgaaaaagtgggcaagtatatcaaactggataaaatctatcttgaaacttaccgctcggaaatacttgttgagcggaaaaagatggaacaaattaaaacgctgttcattgaaaaaggctacgccgtatccggcggcataacaactacggtaaagcgcacattaatgggcagtatgtgttttacggacccggaaaaccgcaaaaggctcggagaaatcgccgcctacactgcggaagtttttgatgaattaatactggacgatttttattttacaaactgccgctgtgaatcctgtattaaagcgaagggcgaccgcgattgggcttctttccgccttgcgttgatgaacgatatttccgagaatgtgattataaaaaacgcaaaagcggcgaatccaaaagtaaattgtattattaaatatcccaactggtacgacagttttcaagctaacggctataatcttcaagacgagtcaaaaatgtttgatatgatctacaccggaaccgagacccgcgatccccattacacgcaccagaacctgccgcgatacctgagttttttccttcccctgttgatggaacgcgtcaagccgggaaaaaacggcggcggctggtacgacctttttgaatgttcgctggaagactatgtacagcaggcgtatttgacccttttttcaaaatgcagggaacagatgctgttctgcttccccttgctcgccaacaatccgctttacgccgccgcggccggcgcgttctacgacgaggccgatctgttcatcggacaaaccggaaagcccgtgggcgccgcctgttacaagccctatcactcctgcggggaaaggctgctccatgaatttatggggatgtgcggagtgcccctggatccctatccttattatccggcggacgcgaagacggtatttcttacggccgacgccgcctgggacaaggaaattgtaagcaaaatcaaacaaagcctgttaaaaggaagcaatgtttttattacaagcgggctgtatgaaaaactgtccggcaaaggaattgaggatatactgcctcttgaaattacaaacaggaaaataaccacggacgtttttaccaacagcgcttttggcagcggcaactgcggctacgcgaaagcggcggctcccataaccctgagccatgtctcttacaatgagaacgatatatggccgctttcggcggctcttaccccccattcaagccacgcgctgttgctatgcggcgcctacggcaagggcaggctctacgtactgacaatccccgacgcttttgccgatttgtacaacctgcccgccgaaacgctggcccttctgcgcggggagttaaaattgcccataacgcttgaatgtgcgggccgcgtgtcattgttcccatacaacaatgatacttttattttgcagtcgttccttgacaggccggagcgcgcgcgcgtccgcgttaacaggcctgatgcaaagcttacgccgttgatgaaacccagaatgcgccccttcgatatagccccccattcgggcgagaacgaaagcgtttttgacatttacataatgcctgggcattacatggcgtttaaggttgaatga

SEQ ID NO: 64004 - protein, 562 aa, Unknown
  Obtained from environmental sample
  misc_feature (1)..(562): Xaa is any amino acid
MHYNNFLTVTYAPAGYLNDNSLEQIKADIEKVGKYIKLDKIYLETYRSEILVERKKMEQIKTLFIEKGYAVSGGITTTVKRTLMGSMCFTDPENRKRLGEIAAYTAEVFDELILDDFYFTNCRCESCIKAKGDRDWASFRLALMNDISENVIIKNAKAANPKVNCIIKYPNWYDSFQANGYNLQDESKMFDMIYTGTETRDPHYTHQNLPRYLSFFLPLLMERVKPGKNGGGWYDLFECSLEDYVQQAYLTLFSKCREQMLFCFPLLANNPLYAAAAGAFYDEADLFIGQTGKPVGAACYKPYHSCGERLLHEFMGMCGVPLDPYPYYPADAKTVFLTADAAWDKEIVSKIKQSLLKGSNVFITSGLYEKLSGKGIEDILPLEITNRKITTDVFTNSAFGSGNCGYAKAAAPITLSHVSYNENDIWPLSAALTPHSSHALLLCGAYGKGRLYVLTIPDAFADLYNLPAETLALLRGELKLPITLECAGRVSLFPYNNDTFILQSFLDRPERARVRVNRPDAKLTPLMKPRMRPFDIAPHSGENESVFDIYIMPGHYMAFKVE

SEQ ID NO: 64005 - DNA, 1566 bp, Unknown
  Obtained from environmental sample
  misc_feature (1)..(1566): n is a, c, g, or t
gtggaacgccgtctctcggaattttttacgcctgaaaccgcaaaaaaagcggagcttatttcaagagagggagacaaagacccgctgattactggccttgaatacgactccagaaacgtaaaacagggaaatctttttttcgcgttaagcggtttgcacacaaacggcagtctttttattaaagacgcaatttccctcggagcgttatgcgtaatacatgaaaatgatggaataaaaaaaacacctggtatagtttatcttaaagtaaaaaacccgcgcttttccatgtccccgatttccgcttctttttataattttccttcgcggcgtatgtatgtaacaggcgttacagggacagagggaaaaagcacaaccgtttatcttatctggcagttacttgtgttgatggggaaaaaagcggggttcttttcgacagtacagcgcagttttggaggagaggctatttggaacagcgaacaccaaaccacgccggaagcgcctgttgtacagcggcttctttgggaaatgtcggacaagggctgtgagtacgcggttgtggaagcaagctcccacggcttatcgccgagaacaaaccgattgggagacgtaaacttttgctcggcggtttttacaaatgtaacccacgaacatcttgaatttcacggaacatgggaacagtacagggaagacaaggcaaatcttttccgcgcgcttgatatttattttccggttaattcttccggctttaatcctttcggcgtaattaacgccgatgacaaaagcgccgggtttttcgcgcaagcgacaaaatgtaaatcatttacatttagccgtaatggcaatgacgcggatattatagcggaaacaatcgaaaacagcgcgcagggtaacagttacagtgtattaataaagcaacttaacgagcatatagaaataaaagataatcttcccggctctttcaacatcggcaatgttctggcggcttgtcttacggtctcaaatttgttaaacgtaccgttacgcgaaattgcttcgtatgcaagcaaattaaaacccgtacgcggaaggatgaccaccataaacaaggggcagccctttgaacttgtcgtggattacgcgcacacaccttcgtcttttttggcgatattcccccccctaagagagcgtcttaacaaaacaaacggcagaataatcagcgttttcggctctcccggagagcgtgacacgcaaaaacgcgccgaacagggaaaaattgcggcgaagtactcggactttatcgttattacggacgaagatccccgtggagagaaaccaatggacattctggaagagatcgccaagggagttgaaacaggcgaaaacagcggaaaatttagccgcgaagaaaatttgttcctgatacccgaccgccccaacgcgattcgaaaagctctgagcatagcgcaaaaaggcgatcttgtcctgcttttggggaaagggcatgagaactcgattatttacgcggatcatgttatgccttacgatgaaattgtagaagcggaaaaggctttaagcgaaataaagtaa

SEQ ID NO: 64006 - protein, 521 aa, Unknown
  Obtained from environmental sample
  DOMAIN (29)...(104): Mur ligase family, catalytic domain
  misc_feature (1)..(521): Xaa is any amino acid
MERRLSEFFTPETAKKAELISREGDKDPLITGLEYDSRNVKQGNLFFALSGLHTNGSLFIKDAISLGALCVIHENDGIKKTPGIVYLKVKNPRFSMSPISASFYNFPSRRMYVTGVTGTEGKSTTVYLIWQLLVLMGKKAGFFSTVQRSFGGEAIWNSEHQTTPEAPVVQRLLWEMSDKGCEYAVVEASSHGLSPRTNRLGDVNFCSAVFTNVTHEHLEFHGTWEQYREDKANLFRALDIYFPVNSSGFNPFGVINADDKSAGFFAQATKCKSFTFSRNGNDADIIAETIENSAQGNSYSVLIKQLNEHIEIKDNLPGSFNIGNVLAACLTVSNLLNVPLREIASYASKLKPVRGRMTTINKGQPFELVVDYAHTPSSFLAIFPPLRERLNKTNGRIISVFGSPGERDTQKRAEQGKIAAKYSDFIVITDEDPRGEKPMDILEEIAKGVETGENSGKFSREENLFLIPDRPNAIRKALSIAQKGDLVLLLGKGHENSIIYADHVMPYDEIVEAEKALSEIK

SEQ ID NO: 64007 - DNA, 936 bp, Unknown
  Obtained from environmental sample
  misc_feature (1)..(936): n is a, c, g, or t
atgaataaaccgctgtttttcatatttataatcctcctctccctctcacaaacggcccgcgccgacgactacaaatggaacctaatcgacgccatgatgaaaaacgaccttgaaacaatagaaaacatattaaaagccaacgcgccttcaatgacattaactgataaaaaccttgtaatgaatttcgcgatgaactattcttccggggaaaacgccttanaagtttgtcaaatattattaaaatataacatccgcccaagctcttatgatttatataccgctataagcagaaaccggcagaataacgttattcaatttatgataacgagcggggcggttccgaatggggaaatactgttgttggctatggaaaaacaaaggtttgatctggcaaaacaatttattgaggcgggagtcgatgtaaattaccgctatactttgacgaaaaaatacgcggacggtatgacgccgcttttatacgcgtcaaaatggggtaactttgatatagtaaaattattaacggaaaaaggagcgaatgtaaatatacaggctgtcaacggcgatacggcgttatctttagcgcgaaaaaataacagtgataatatttataattatttaacagaacatggcgcagctgaatttggtaataatataccgatacaaaataatggtatttctggtaatcaaacaattaattttcaaattggttcgtaccggttgtccggagggaatagatactttaaattttcaggaaacacaaacgccggaaatataaattatgtggatggaataaataataagacaaataatggtttttatagaatagcgggtaataatataacaataataatggaaggaaattcgtatgtgtataagatagattccaatgagactttttccggaaatggagaaatatggataagaattggaaattaa

SEQ ID NO: 64008 - protein, 311 aa, Unknown
  Obtained from environmental sample
  SIGNAL (1)...(21)
  DOMAIN (153)...(185): Ankyrin repeat
  misc_feature (1)..(311): Xaa is any amino acid
MNKPLFFIFIILLSLSQTARADDYKWNLIDAMMKNDLETIENILKANAPSMTLTDKNLVMNFAMNYSSGENALXVCQILLKYNIRPSSYDLYTAISRNRQNNVIQFMITSGAVPNGEILLLAMEKQRFDLAKQFIEAGVDVNYRYTLTKKYADGMTPLLYASKWGNFDIVKLLTEKGANVNIQAVNGDTALSLARKNNSDNIYNYLTEHGAAEFGNNIPIQNNGISGNQTINFQIGSYRLSGGNRYFKFSGNTNAGNINYVDGINNKTNNGFYRIAGNNITIIMEGNSYVYKIDSNETFSGNGEIWIRIGN

SEQ ID NO: 64009 - DNA, 1392 bp, Unknown
  Obtained from environmental sample
  misc_feature (1)..(1392): n is a, c, g, or t
ttgaatgaagaatgcgctgttttcggagtcagcttaaacactgacgaagccgccggtattacatataatggtctgctttcgcttcaacatcgaggtcaggaaggagcgggaatagccgtcgcttttaaccgcagtattgtatgccacaaagatgtcggtctggtaagcgaagttttttcaggcgaagaatttaaaaaactgcctaggggaagcgtagctgtaggacatacacgttattcgacaacaggaaacaatacaaaagaaaacgtaggtccctttgttacggaatatttaaccggcagaattgcgacggcgcataacggaaatgttacaaacgcttctgaaatacgcaatgaacttacaaaccttggtcttcatttcggcgcaacaagcgacagtgaagttatctcctctttaatagcgtattacataacaaaagaaaaaagttccattgccggagttaccgccgccgcaggtttgctaaaaggcgctttttccctaatcatagcgacaagtaaaaataaattgatagctgtccgtgacccaaacggctttcgtcctctttgcatcggaaaaaatgcaacgggctgcgttgtcgcatcagagtcctgcgctcttgaagcctgcggctttgaatttgtgcgtgatattatgcctggcgaagttgtaagaatcgaaaggggcgagataacgcaggaaggcgtaaaactggaaaagaaagaaacagatcacgggctttgtatttttgaatatgtctatttcgcccgccccgattccgtaattgacggattaagcgtttacaatgcgcgctataacatggggatcactctggcgcaggaatatcccgtacaagccgatgttgtctgcggcgttcccgattcgggattggaagcagcatacggctacagcgccgcaagcggtattccgcttgtctcgggatttgtaaaaaacagatacataggacggagttttatttacccgacgcaaacccagcgtgacagcgcagtcaggctgaaactcaatccgttatccgctactattcgcggaaaaagaatcgttcttgtagacgactccattgtgcggggcacaacgagcgaaaaaatagtaaagagtctaaaaaacgcaggggcgcaggaagtgcatgtgcggatttcttcgccgcccttccgccacacctgccactacggcactgacattgacaacgaagaaaacttgatagcgaataaaatcagtcttgatgaaatatgccggaaattaggcgcagacagtctcggatacatcagcatagaggggctgaaaaaagcgtgcgataaatgcgcgttgccgttttgcacctcctgttttacaggcaacactgatacggaatttgccaagaaagatgtgtttgaatga

SEQ ID NO: 64010 - protein, 463 aa, Unknown
  Obtained from environmental sample
  DOMAIN (258)...(400): Phosphoribosyl transferase domain
  misc_feature (1)..(463): Xaa is any amino acid
MNEECAVFGVSLNTDEAAGITYNGLLSLQHRGQEGAGIAVAFNRSIVCHKDVGLVSEVFSGEEFKKLPRGSVAVGHTRYSTTGNNTKENVGPFVTEYLTGRIATAHNGNVTNASEIRNELTNLGLHFGATSDSEVISSLIAYYITKEKSSIAGVTAAAGLLKGAFSLIIATSKNKLIAVRDPNGFRPLCIGKNATGCVVASESCALEACGFEFVRDIMPGEVVRIERGEITQEGVKLEKKETDHGLCIFEYVYFARPDSVIDGLSVYNARYNMGITLAQEYPVQADVVCGVPDSGLEAAYGYSAASGIPLVSGFVKNRYIGRSFIYPTQTQRDSAVRLKLNPLSATIRGKRIVLVDDSIVRGTTSEKIVKSLKNAGAQEVHVRISSPPFRHTCHYGTDIDNEENLIANKISLDEICRKLGADSLGYISIEGLKKACDKCALPFCTSCFTGNTDTEFAKKDVFE

SEQ ID NO: 64011 - DNA, 1857 bp, Unknown
  Obtained from environmental sample
  misc_feature (1)..(1857): n is a, c, g, or t
atgtatttctctgcaaccaggaaaagaaagaccgtttattcaatcggcaaaaatttatgtaatatgggaaatatttcgacggacgattttataaaaataaaatcatggcttataaaccctgttgaaagccgcgaagcgtctttacaaaagcccgcaacacttacgcaaaatctgcaagctccttccgacgttgttaatattgacagatttatttctttaaatgattcagagcttgaacaactgctgaaaaaaatgaatcttgcgatggatttgcaggatataattttctgccgtaattatttccgcaataccgaaaaaagagaccctacggtaacggagataagagttcttgacacatattggtcggatcactgccgccacacgacatttttaacacagcttgatgagattcaaattgacaacaaagacattcttgaaagttataaaaattatcttgaattgcgtttatactgcggtcgcgctggcaaacccgtaactctaatggacatggcgacaatcggcgcgaaagttcttaaacaaaacgggcttcttcccgatttagacgaatccgaggaaataaacgcgtgttccgtgaaaataaaagttgacgttaacggcagtaataaaaactggctgttaatgtttaaaaatgaaacgcacaaccaccccaccgaaattgaacccttcggcggagccgccacctgtcttggcggagcgatacgcgacccgctttcaggacgcgcctttgtttatcaggcaatgcgtgtaactggtgcggcgaatccgcttgcgcacgcaaacgaaactcttgaaggcaaattaccccagcgtaaaatttgccgcacagcggcggcaggttacagttcttacggaaatcaaataggtcttgcgaccggtcacgttcatgaaatataccatccgggttacgccgctaaacgcatggagataggagcggttatcggcgccgcgcctttaaaaaatgttgttcgcattacaccgtctcccacggatgttgtaattcttttgggtggcagaacaggacgcgacggtataggcggcgctacaggctcttccaaatcgcacacgtcgtcttcgctggaaacttgcggcgctgatgtgcaaaaaggcaatgcgccggaggagcggaaaatacagcggcttttccgcgatccaaaagccgcgcgtcttattaaacgttgtaacgatttcggcgcgggaggggtaagcgtctccgttggggaaatcgcggacgggcttgtaatcgacttaaacaaaatattaaaaaaatacgaagggctggacggaacggaacttgcgataagcgaaagtcaggaaagaatgtccgtagttacttccaaaaaaaacgccgacaagtttatcgctcttgcgcggaaagaaaatcttgaagcggaaataatagcggaagttacaaaagtcccgcgtcttgtaatgaaatggaacggaaaaactatcgttgatatttccagagagtttttaaattccaacggagctaaaaaaacagcaaaggttcacataaaagatattcagctaacaacgcctgaaaacaaaactgtaaacgagcaagaactaaaatcattaatgggaaatcttaatatctgctcacagaaagggcttgttgatcgttttgactcatgtattggagccgcaactgttattgctccatttggcggcaaatacggtattactccggcgcaggtaatggcggcaaaaatacccgtattaaacggcgaaacaaaaacctgttcattatgtcatggggttttgatcctgaaatttcccaaaacagcccgtactacggagccgttttcgccgttgtttattcactggcaaaaataa

SEQ ID NO: 64012 - protein, 618 aa, Unknown
  Obtained from environmental sample
  DOMAIN (166)...(324): AIR synthase related protein, N-terminal domain
  misc_feature (1)..(618): Xaa is any amino acid
MYFSATRKRKTVYSIGKNLCNMGNISTDDFIKIKSWLINPVESREASLQKPATLTQNLQAPSDVVNIDRFISLNDSELEQLLKKMNLAMDLQDIIFCRNYFRNTEKRDPTVTEIRVLDTYWSDHCRHTTFLTQLDEIQIDNKDILESYKNYLELRLYCGRAGKPVTLMDMATIGAKVLKQNGLLPDLDESEEINACSVKIKVDVNGSNKNWLLMFKNETHNHPTEIEPFGGAATCLGGAIRDPLSGRAFVYQAMRVTGAANPLAHANETLEGKLPQRKICRTAAAGYSSYGNQIGLATGHVHEIYHPGYAAKRMEIGAVIGAAPLKNVVRITPSPTDVVILLGGRTGRDGIGGATGSSKSHTSSSLETCGADVQKGNAPEERKIQRLFRDPKAARLIKRCNDFGAGGVSVSVGEIADGLVIDLNKILKKYEGLDGTELAISESQERMSVVTSKKNADKFIALARKENLEAEIIAEVTKVPRLVMKWNGKTIVDISREFLNSNGAKKTAKVHIKDIQLTTPENKTVNEQELKSLMGNLNICSQKGLVDRFDSCIGAATVIAPFGGKYGITPAQVMAAKIPVLNGETKTCSLCHGVLILKFPKTARTTEPFSPLFIHWQK

SEQ ID NO: 64013 - DNA, 3222 bp, Unknown
  Obtained from environmental sample
  misc_feature (1)..(3222): n is a, c, g, or t
gtgcctcccgaagccgcgaaacagatcggcatggaattcaattaccctgtgcaggctgatgccatcaatcagtacctcgaaatatcaaacgggaaaaccccctttaaatttaccctcgcgcaggataacgaatataaaattaccgccagcctgatcgattcggtggaatttgaaacaacggtgaggattaccctcaagagaggggcaaggtctcagaacgggagccggggaaccgaaacggatcaggtatttacctttaaaactccgggccctttcaaggtagacagacaccgccggaacgcaggttatggcaaataccgtaacctggttgaaatagattttagttacgctttgaatgaaagcactgtgcgcgccgcgctcagtaccgaacccgccatgcccattggcaaagataatattgaagtatggggaagctcgctgcggctttacaatctgccggttggttacggcgcgaaattcaaggttttggtcgccgcaagtctggaagacgtgtacggcagaacattgggcaaagcctggtcgggcgacgttgaagttcccgaggaaccgcctccccagggcgaggcgcggtttctggattacggccacgccatgctggaagcccaattcccgccgcgcttcctctttgaatataaaaacatcgctgaaaattcttcgtacctgctgatgaaaaaagacaatccctggaatgaatcttttgccgagtccggccgcgtaaatttaactccgggtaaagtgaatgccaaatattttgaagaaattaatttatcgccgtacctgaatcaacagagaaaaggttttgttttttttcgggcgaatctacagcttttggccactgtacaacagaaggatggaacataccgtaccggtacttatgacagggaaaatgaactgaacatacaggttaccgatctggggctgacagtgcgttacggttttaataaaactacggtactggttaccagcctttccaccggcaaacccgtagaaggcgccacagtcagattacttcctccctcccaggtaacaaacgggatcgatgtttctcttataacgcattttggcgaagctcaaaccgataaaaacggtcttgcggtactgcgtaccggcgcttcggtgctgcgggataatacggaaaataccggcaggtggtggggattcgaaacgccgtttgttctggcggaaaaaggcggagaccgggccatattcacaccctcttcgcataacaactggcgttttggcatagaatccggtctgccccagcgcgccgaagaaataacgtcccttgcctttatgttttccgaccgggggctctacaagcccggcgagattctcactttccgcggcgttgaccgttccaaagtgctgggaatgtacaccatataccggggtgattattccgttacactggaagaagatgtttatgagtcccaaccggttgcaatcattcaaaacacaacctctgaatccggtggtttctacggcagtatcaacattcccgatgatctcaatccgggttcctaccggctggtatacaaacgcaatgacggcatcagcaaacaagctatagccaatatacctataacggtggcttactttgaacggctgaaatttcaggcgtccctttccgcgccggcggcggcaatcataagcggcgatgacattaacctgaaattgcaggcaacatacctttccggaggcagcctggcgggcgcttcatgggagggctcatggtacgatgaaatgacaggctttcaatcaagatcacctgaaaccaaaggctatgagttcgggccccgccgcgtctgggacagcaaacgttatattgcttctgaaagcggagttcttggcgggcagggaaccgcgactctcagccaaaaaaccggcggcggtaaaataaccggcgctccttatctttatcaggcggaagccagaataaccgacatcagcaatcagatgatcagcgcttaccgctcggtgatagtgcatcccgcgcgtttttacatcggcctgtaccagggggccggcggctttgcgcggaaagggcaggaattatcgtacgattacattatcgtcaataccgccggcgaaaaaacagcgggtaacgggcttttcctgcagaacggagaaaacgcggggcagcttaaagttgaacttattcgggaagaatggcggcgcgtccagcagcggggagtgaatggttatatttatgacgaatattcacgggaacaggtaatcgacagcgttcaaaaaataacgattaaaaacggcggcggttccatcaagataaaaccaagcagcgcggggtatcacaccctgcgggtttccgcgcaagatcgggaaggcagaacagctttgacggaattgaatttttatgtcactggttcgggcggctattggaacatgagcaaccccgatgaattaaagcttacgccggatcaggaaatgtataatcccggcgatacggcgaaagttttgctgcaaagtacgcttcccgaaggccggtatttaatcacggtagagcgggaaggcatattcaccgaagaagtccgtcattttaccgagccggtcacggtgatagatattcccattgcgcgtaactatgtgccggtggtctatgtggcggtttcatcctattcggtgcgctccggccctcccacccatgaatacggcagtcccgaccttgacaaacccaaaggttattttggcgtaacacgcatccaggtgaatccccgtgcgcgggctttctcggtgaaggtggaaagcaacaaaaaaacctaccgtcccggagaggaagttaccatgatcctgaccgcaagcaaggacggtaaacctctgtccaacgcggaacttaccctgatggcggtagaccggggcgtattggaccttatcaattaccatgtgccggacccgatacggtatttttatgatgaaggccgctttcccctcatggtagaaggcggcgattcccgcgcatggcttatggatccggtcacctacagcgtcaaaaatctcgcgggcggcgatgccgatgacggcggcaaaattgaggaacgcagggattttaatcctaccgcggtatttgagccgatgctgataaccgacgattcaggcaaggtgacgtgcaggttcaacttcccgataacttactacctatcgcgtaacggttttcggggtacggggggatattttttgccttaa

SEQ ID NO: 64014 - protein, 1073 aa, Unknown
  Obtained from environmental sample
  DOMAIN (306)...(609): Alpha-2-macroglobulin family N-terminal region
  misc_feature (1)..(1073): Xaa is any amino acid
MPPEAAKQIGMEFNYPVQADAINQYLEISNGKTPFKFTLAQDNEYKITASLIDSVEFETTVRITLKRGARSQNGSRGTETDQVFTFKTPGPFKVDRHRRNAGYGKYRNLVEIDFSYALNESTVRAALSTEPAMPIGKDNIEVWGSSLRLYNLPVGYGAKFKVLVAASLEDVYGRTLGKAWSGDVEVPEEPPPQGEARFLDYGHAMLEAQFPPRFLFEYKNIAENSSYLLMKKDNPWNESFAESGRVNLTPGKVNAKYFEEINLSPYLNQQRKGFVFFRANLQLLATVQQKDGTYRTGTYDRENELNIQVTDLGLTVRYGFNKTTVLVTSLSTGKPVEGATVRLLPPSQVTNGIDVSLITHFGEAQTDKNGLAVLRTGASVLRDNTENTGRWWGFETPFVLAEKGGDRAIFTPSSHNNWRFGIESGLPQRAEEITSLAFMFSDRGLYKPGEILTFRGVDRSKVLGMYTIYRGDYSVTLEEDVYESQPVAIIQNTTSESGGFYGSINIPDDLNPGSYRLVYKRNDGISKQAIANIPITVAYFERLKFQASLSAPAAAIISGDDINLKLQATYLSGGSLAGASWEGSWYDEMTGFQSRSPETKGYEFGPRRVWDSKRYIASESGVLGGQGTATLSQKTGGGKITGAPYLYQAEARITDISNQMISAYRSVIVHPARFYIGLYQGAGGFARKGQELSYDYIIVNTAGEKTAGNGLFLQNGENAGQLKVELIREEWRRVQQRGVNGYIYDEYSREQVIDSVQKITIKNGGGSIKIKPSSAGYHTLRVSAQDREGRTALTELNFYVTGSGGYWNMSNPDELKLTPDQEMYNPGDTAKVLLQSTLPEGRYLITVEREGIFTEEVRHFTEPVTVIDIPIARNYVPVVYVAVSSYSVRSGPPTHEYGSPDLDKPKGYFGVTRIQVNPRARAFSVKVESNKKTYRPGEEVTMILTASKDGKPLSNAELTLMAVDRGVLDLINYHVPDPIRYFYDEGRFPLMVEGGDSRAWLMDPVTYSVKNLAGGDADDGGKIEERRDFNPTAVFEPMLITDDSGKVTCRFNFPITYYLSRNGFRGTGGYFLP

SEQ ID NO: 64015 - DNA, 1368 bp, Unknown
  Obtained from environmental sample
  misc_feature (1)..(1368): n is a, c, g, or t
atggtatacaccgcgggaagcggaaaattaaaagatgaaatagcgaaaaggctttctttggaagacgattatctttatgaagctgacggcccgataaacccgtttgattttatggaactcgcgaacgtggcgggattggaagaacttaacgaaaaaccgtggaagatttatcaatctaccgatttcagcgaagacactcctgtttgggaccgtatcagccagggtgatgttatgctgcatatgccgtaccagtcttttgatcctgtcgtgcgattttttcaggaagcggccaacgatccgcaggtaatatcaataaagacagcgttatacagaacaggaggcgcgattccgggaagctcaatgcaggcaagctcctccgctttttctccggtggtaagagcgctggagcaggcggctttgaacggaaagcacgtaacggcgcttgtagagcttaaagcccgctttgacgaggaacgcaacatttcatgggcgaacaggcttgaaaaagccggcgttattgtcgtgtacggactttcgcgcttaaaagtacattccaagatatcaatggttatgcgccgggaaaacgaccgcattaaacgctatgttcatctttcaacgggcaactacaacgacaggacggctaaatattacgaggatatatgcctttttacctgccgcgaagaaatcgcctacgacgcggggatacttttcaatatgctgacaggctactctaccgtcagtcagatgatgaggctgacatcggccccttcaggccttaaacgccgttttttggaacttatcgaaagggaggcaaacagatcgcggcacaagtatccttcaaaaattaccgtaaaaatgaactctcttaccgacattgacataataaaagcgctgtacgcggcttcctgcgccggagtaaaaatttccctgtgcgtacgcggcatttgcaccttaataccgggtattcccggggtttccgaaaatatcagcgttatcagcattatcgaccactaccttgaacattccagaatttattactttgccaacggcggcgcggaagaactctatctttccagcgccgactggatgacgcgtaaccttgaacgccgcgtggaactgctcttccccgttcaggatgaaaaaatcagggcggaattacatgacattcttaacgattatttccgcgataactgtcaggttgccgtacttggcagcaacggaacatggtccaggcccggccgccctgaaaaagaaaatgttttccgcgtgcagaaagaaatgctttcacgcgccgccaaggcaagtgaaaaagcggaccctgtaaagcttgaatacaccgtccggagaagccctccggcggaaaaatag

SEQ ID NO: 64016 - protein, 455 aa, Unknown
  Obtained from environmental sample
  DOMAIN (1)...(429): Polyphosphate kinase
  misc_feature (1)..(455): Xaa is any amino acid
MVYTAGSGKLKDEIAKRLSLEDDYLYEADGPINPFDFMELANVAGLEELNEKPWKIYQSTDFSEDTPVWDRISQGDVMLHMPYQSFDPVVRFFQEAANDPQVISIKTALYRTGGAIPGSSMQASSSAFSPVVRALEQAALNGKHVTALVELKARFDEERNISWANRLEKAGVIVVYGLSRLKVHSKISMVMRRENDRIKRYVHLSTGNYNDRTAKYYEDICLFTCREEIAYDAGILFNMLTGYSTVSQMMRLTSAPSGLKRRFLELIEREANRSRHKYPSKITVKMNSLTDIDIIKALYAASCAGVKISLCVRGICTLIPGIPGVSENISVISIIDHYLEHSRIYYFANGGAEELYLSSADWMTRNLERRVELLFPVQDEKIRAELHDILNDYFRDNCQVAVLGSNGTWSRPGRPEKENVFRVQKEMLSRAAKASEKADPVKLEYTVRRSPPAEK

SEQ ID NO: 64017 - DNA, 687 bp, Unknown
  Obtained from environmental sample
  misc_feature (1)..(687): n is a, c, g, or t
atgccttttactcttgatccgtattacctgatgttggtagtacccacattaattctttccatgattgcgcagataaaagttaaatccactttcgcgaaatactcaaaagtaaaatgttcgcgcggaatcacggggatacaggcggccgctcttttattaaagagcaataatattaacgatgtaaagattgaaccgataggaggctctctttctgatcattattccccatccgataaaaaactacgcctttccgagcctgtatacaatgttccgtcaatcgcggcggtaggagtagcggctcatgagacagggcatgcgattcaacacgccgttcattgggggccccttgctttaagaagcacgcttgttccggccgcgaatttcggctcgacattgggcccgtggcttgcgatagccgggcttgccatttttccgccgctttttcttatagggataattctttattccgccgcagtgcttttctatattgttactttgcctgtggagtttaacgcatccgcccgcgcgatcgctattttgagggcgaataacgttctaagcgagagcgagcttaaaggcgtgaaaaaagttttaaccgccgccgctctaacttatgtcgcttcggctttgacttctattatgagtttgcttaggttgatattgttggcgaatagaagaagacgctga

SEQ ID NO: 64018 - protein, 228 aa, Unknown
  Obtained from environmental sample
  DOMAIN (6)...(227): Putative neutral zinc metallopeptidase
  misc_feature (1)..(228): Xaa is any amino acid
MPFTLDPYYLMLVVPTLILSMIAQIKVKSTFAKYSKVKCSRGITGIQAAALLLKSNNINDVKIEPIGGSLSDHYSPSDKKLRLSEPVYNVPSIAAVGVAAHETGHAIQHAVHWGPLALRSTLVPAANFGSTLGPWLAIAGLAIFPPLFLIGIILYSAAVLFYIVTLPVEFNASARAIAILRANNVLSESELKGVKKVLTAAALTYVASALTSIMSLLRLILLANRRRR

SEQ ID NO: 64019 - DNA, 588 bp, Unknown
  Obtained from environmental sample
  misc_feature (1)..(588): n is a, c, g, or t
ttggcagggtcttggaaacgtttagttgttcctgaaaagagccggtgcctggggtctccgaaaagccgcgcggccatgatgatctgggcaatcagaaacggttttgacgccctggtctttccttttggcggtccggaaagcgttacgcaagaagcaaaacgctatggcttggttgcggaagccggaggctggatcatctccgcttttttacccagaaaattcttttttttgcataaggatcttttccgaatggaaggaggaattcgtaaaaaaagggttcatttctgtcccaccaaccccgagactattgccatactacgatccgaagggaaaaaaaagttttccgctgtccgggggacaaaaatttttcatctttggcccgaacaaggcgaggaaaatacctggtgcgcctgtcccagctgtagggcctttacccactccgaacagtacataatcgccgtaaacaccgcggctgacgtgcttgcgaagctcgatcccaacgcgcggctttcgtttattgattacggcgaggagacggggaaggcggggattgccccaagaaaaaatatgtttaaagttaagaagtaa

SEQ ID NO: 64020 - protein, 195 aa, Unknown
  Obtained from environmental sample
  misc_feature (1)..(195): Xaa is any amino acid
MAGSWKRLVVPEKSRCLGSPKSRAAMMIWAIRNGFDALVFPFGGPESVTQEAKRYGLVAEAGGWIISAFLPRKFFFLHKDLFRMEGGIRKKRVHFCPTNPETIAILRSEGKKKFSAVRGTKIFHLWPEQGEENTWCACPSCRAFTHSEQYIIAVNTAADVLAKLDPNARLSFIDYGEETGKAGIAPRKNMFKVKK

SEQ ID NO: 64021 - DNA, 1254 bp, Unknown
  Obtained from environmental sample
  misc_feature (1)..(1254): n is a, c, g, or t
atgaacttcacgcttgacggaatccgagattcgtacaaattcaacgagacctgccaagacaccgtgccgcaagcaatcatggcgttcctagaatcaacgtctttcgaaggcgccgtccgcaacgccgtctccataggcggcgacagcgacaccctagccgcaatcaccggcggcatcgccgaggcctactacggggtcccggcatcgatacgcaaacacgcgctgacgtttttggatgagaggcttttgaaaatcctcacggcttttgaaaatgtctatcagccttcattagaaaaaaccgtgaaacaggcgacagttaaaatcgtccgtaagaataaaaagattaagataggcgaccgtgccgaaacgatgcaaatgtcttttgatatgattgacgaagacttcgccgagacattgaccgttcacgaggaaacctccagtgaacagttgttccggcatctatttgaggcctgtaatattctgagagggccgattaaccaagacgaatacaaaagttacgttacaccgttgttgttttttaaaagactttcagatgtctacgatgaagaaaccgccaaggcgcttgaagaatccggcggcgatgaagagtacgccgcttttcccgaaaaccaccgattcagcatcccaaacggctgtcactggaatgatgtgcgcgcttgccacgaaaatgtcggtacggcaatcacagacgcaatgaccggtatcgagcgagtaaaccccgacactctgttcggcgtcttctccagctttgacgacgcggtgtggacggataagggcaaattaaccgatacgcggctgaaagaccttgtggaacatatgtcgaaaatcaaagttggtaataaaaattatgatgccgatgttatgggtgatgcgtacgaataccttattaaaaagttcgcggacttgtcaaagaaaaacgccggagagttttatacaccgcgaaccattgtaaaactactgataatgctcctcgcaccgaaagcgggtgagacagtatacgatcccgcagtcggcaccggaggtatgcttatagaggctatacgctatatgaatgatgataggcaaacgtacggacgcatttatggacaggaaaagaatcttgctaacgccgcgattgcccgaatgaatctgttcttgcacggcgcgagagatttaaaatcacgcaaggcgatacactccgttcaccaaactttatctatcgtggacaattgcaaacgtttgactgcgttgtag

SEQ ID NO: 64022 - protein, 417 aa, Unknown
  Obtained from environmental sample
  DOMAIN (290)...(417): N-6 DNA Methylase
  misc_feature (1)..(417): Xaa is any amino acid
MNFTLDGIRDSYKFNETCQDTVPQAIMAFLESTSFEGAVRNAVSIGGDSDTLAAITGGIAEAYYGVPASIRKHALTFLDERLLKILTAFENVYQPSLEKTVKQATVKIVRKNKKIKIGDRAETMQMSFDMIDEDFAETLTVHEETSSEQLFRHLFEACNILRGPINQDEYKSYVTPLLFFKRLSDVYDEETAKALEESGGDEEYAAFPENHRFSIPNGCHWNDVRACHENVGTAITDAMTGIERVNPDTLFGVFSSFDDAVWTDKGKLTDTRLKDLVEHMSKIKVGNKNYDADVMGDAYEYLIKKFADLSKKNAGEFYTPRTIVKLLIMLLAPKAGETVYDPAVGTGGMLIEAIRYMNDDRQTYGRIYGQEKNLANAAIARMNLFLHGARDLKSRKAIHSVHQTLSIVDNCKRLTAL

SEQ ID NO: 64023 - DNA, 687 bp, Unknown
  Obtained from environmental sample
  misc_feature (1)..(687): n is a, c, g, or t
ttgcaaacgtttgactgcgttgtagccaatccgccattctcgcttaaagattggggcgcggagcaattttcaagcgatgtgtacggacgcaatctctggggaagtccaaccgacagcaacgcagattttgcgtggcttcagcacatggtaaaatctatggacgtgaaaaacggaaggctcgctgtcgttttaccgcaaggcgtattatttcgcggcggcaaagagggtgatatacgtaaacagatgatcgagtccgacaaattagaatatgtcatagcactcacgagcgggatattctactccactggcgtatccgcttgcgttctcatgttgaacaataacaaacccgccgcacatcgcggtaaagtatgccttgtggacgcttcgcagatttacacggcgcgacgtgcgcaaaacataatgacggaagacaatatcaacaccgtttatggcttgtgttcaaactataccgacgttaccgaaaaagccaaagtagtaacacttgacgatttgcgcggtaaggactactcgctttcggtcagcgtgtacattcaaaaaacggcaaaagaaaccgcaaatccggttgaagtacgccgtgagtttaagtcgacgcttgaagcggcaaaaaccgccgaagcgcggctacaagagttattagttaagggagggtacacgacaaatggataa

SEQ ID NO: 64024 - protein, 228 aa, Unknown
  Obtained from environmental sample
  DOMAIN (1)...(191): N-6 DNA Methylase
  misc_feature (1)..(228): Xaa is any amino acid
MQTFDCVVANPPFSLKDWGAEQFSSDVYGRNLWGSPTDSNADFAWLQHMVKSMDVKNGRLAVVLPQGVLFRGGKEGDIRKQMIESDKLEYVIALTSGIFYSTGVSACVLMLNNNKPAAHRGKVCLVDASQIYTARRAQNIMTEDNINTVYGLCSNYTDVTEKAKVVTLDDLRGKDYSLSVSVYIQKTAKETANPVEVRREFKSTLEAAKTAEARLQELLVKGGYTTNG

SEQ ID NO: 64025 - DNA, 1470 bp, Unknown
  Obtained from environmental sample
  misc_feature (1)..(1470): n is a, c, g, or t
atggataacaaaatctctcttgacgtgttaaaaaaatatctgtggggcgcggcggtattgcttcggacacacattgacgccggttcgtacaaacagtatatctttccgctcttgttcttcaagcgtatatgtgacgtttatgaagaggaatttaccgcctctatcaaagaatacggtgaagattttcccgaaaaccaccgttttgttatccccgccggttcacattggaaagacgtgcgtgaagtagccgaaaatgtcggggtagccatcgtgaacgcctttcgcgccattgaacgcgcaaataccgagaaattagccggcgtattcggcgacagcgcttggacgaataaaaaccgcttgccggacaaactactgaaaaacatgatagagcatttttccacgcaaacgctgtcaatcgccaattgcccggaggacgaactcggacaaggctatgaataccttatccgcaagttcgccgacgacagcggacacaccgcgcaagagttctacaccaatcgcacggtggttcatcttatgacggaaatccttaaaccgcaatccggcgaaaacatatatgacccgacctgcggtagcgccggaatgttaatatcggcgattgcttacctaaagtcacacggaaaagaatggcgcaatgtgaatatattcggacaagagattaacgcgttgacatcaactatcgcccgaatgaaccctatcctacatggcgtaaaagattttcaaatagttaataatgatactctcgtcaatccagcgtttattgtaaacggacaactcagaacattcgatattgtggttgccaatccgccatactcaataaagcagtggaatcaagaagcattttcggcggacaaatacggacgaaactttttaggaactcccccgcaaggtagagccgactacgcgttctttcaacatattttgaaaagcctcgatccgcaaacaggacgatgcgcaatcctatttccacacggcgtactattccgtacggaagaagtcgcgctccgcgaaaaactaattcgcgcagacttagttgattgcgtcatcggacttggggcgaatctcttctacaactcgccgatggaagcgtgcgttgtcatttgccgaacaaacaaacaacccaacacgcgcggcaaaatactactgattgacgccaaaaacgaggtaacccgaaaaaatgcgcagtcgtggcttgaggacggacatataaagaaaatcgcgactgcgtatgaagcatacgagaccgttgacggattcgcgagcgttataactatcgcggatacggagaaaaacaacttctcgctatctattccgttgtacgttcgcgaagtgatagctgaggaagctaaagataatcgtacatttgccgagtgccttgccgcttggaacgaacggcgggctgacgcggaaatggcttatgatgaattggagggattgatttatgagggttag

SEQ ID NO: 64026 - protein, 489 aa, Unknown
  Obtained from environmental sample
  DOMAIN (142)...(455): N-6 DNA Methylase
  misc_feature (1)..(489): Xaa is any amino acid
MDNKISLDVLKKYLWGAAVLLRTHIDAGSYKQYIFPLLFFKRICDVYEEEFTASIKEYGEDFPENHRFVIPAGSHWKDVREVAENVGVAIVNAFRAIERANTEKLAGVFGDSAWTNKNRLPDKLLKNMIEHFSTQTLSIANCPEDELGQGYEYLIRKFADDSGHTAQEFYTNRTVVHLMTEILKPQSGENIYDPTCGSAGMLISAIAYLKSHGKEWRNVNIFGQEINALTSTIARMNPILHGVKDFQIVNNDTLVNPAFIVNGQLRTFDIVVANPPYSIKQWNQEAFSADKYGRNFLGTPPQGRADYAFFQHILKSLDPQTGRCAILFPHGVLFRTEEVALREKLIRADLVDCVIGLGANLFYNSPMEACVVICRTNKQPNTRGKILLIDAKNEVTRKNAQSWLEDGHIKKIATAYEAYETVDGFASVITIADTEKNNFSLSIPLYVREVIAEEAKDNRTFAECLAAWNERRADAEMAYDELEGLIYEG

SEQ ID NO: 64027 - DNA, 540 bp, Unknown
  Obtained from environmental sample
  misc_feature (1)..(540): n is a, c, g, or t
ttgtttgacgcttttgaacagggaaaacttccttttgccaacggctatattgtttcttcatttttcagcgataaaaccgcttattcaatcttcgagattgtatcttatgcgggcgttaaggaaatcttcatgacagaaacagggcttcaatttgttacgggcgggaaaaaactctatgtattggtagagaacgacacatacgataaaaaatttatagagcctgtcagtagagcgcaggacgagtccattccaaaacgttttagcgaactggaaaccattatcgctcataaccaaacaagaataatggtagcgaaagaaccaaatgaactttatggttcgtttactattattaagcctaccagcattaacttctctatagtgttttaccaactgacggatgtttacagttcccttgccactttctttgaagaggtacttaacaggcagcgcaaagttccgcaatctgacgcaaaaaaagccgctcaattaatatcaaccacagttcaaaaaacgatgggacctcagggcgagttcaattga

SEQ ID NO: 64028 - protein, 179 aa, Unknown
  Obtained from environmental sample
  misc_feature (1)..(179): Xaa is any amino acid
MFDAFEQGKLPFANGYIVSSFFSDKTAYSIFEIVSYAGVKEIFMTETGLQFVTGGKKLYVLVENDTYDKKFIEPVSRAQDESIPKRFSELETIIAHNQTRIMVAKEPNELYGSFTIIKPTSINFSIVFYQLTDVYSSLATFFEEVLNRQRKVPQSDAKKAAQLISTTVQKTMGPQGEFN

SEQ ID NO: 64029 - DNA, 2727 bp, Unknown
  Obtained from environmental sample
  misc_feature (1)..(2727): n is a, c, g, or t
atggtaatgccgtgcttaattattttaacaaggaaaatatatggattcagaatacatttttttagtcaaaatacttctatttcttcaaaaatcgaagcggatttgctgggtatccgcggacggcaggcaaatgaatttgccgaattggcatttcccattctgccgggaataattcttgataccgaaattgcttcggagattgatgtcaagaaaattaaaaaagatattattgagcttttggataaatgctcaaaactggttgccaaaaaatacggagacccgcagaaccctatgctcttaaaagtggttatctcctccaacctcgctattacaaattacccgaccctgcataactttggccttgtaaaaccgactatcgacggttttacaaacaaggtaggagcggatttcgccgccagtgaagtattgtttttaatcaacggtatgatggcgattcaggaacgtatcaaagaactggaaggcaaaaccaaagagaaggatgaaattaccggtaagattaagctcctcaagctcatgcttggcattaaagggccgtcaaatgaactgcacggtaaggaagataagacccctgtcccgaagaaaaagtccgcgaaggaatacatggacgaatattgcaagtatttcccaaaaggcttttttgatgatgccgaaagccaactgcttattacacttggcgaaatatcaagaatgttaagtatggatgagcagaacgataatgatacggcaattgtgatacagcctatggtatacggcaattacggcaaagattcctgctcgggcggtttttacagccgtaatgtggttaccggagaaaagaaacttcagggtagtttcttcaggaataaatttaacgaacttggcgaagaagggtatgagatcaataaaatagacgctttgtatcttaaacagcttgaaaaaattgcttggactttggaagacaagtttaaggaaatccgttacgtccgctttaccgtagaaaacggaaaactttggctgatagagcagagactggtggatcaaaaatcgacccaggcggatctaaaacttttgctggatcttcaaaaacgcaagattgtagacgaagcttctgtaattaaggcgattgatcccataaggcttaatgaaattctccatcctgtaattaatatgtccagcgtaaaagggcaaaaatcatggaagggcggtattgcgggcgctcctggagcggctataggacaagtttactttagtaccgacgcgcttttggaagcaaaaaaacaagctgccaaaaaaggaaaagacggccgctttattttggtgctgaaatcttccttcgcggaggacgttaaggcaatgagggtaagcacgggcgtattaccagccgaaggcggctattccgcccacgcgtctgtagtagcccgtcagtacggaaaagtatcccttgtttcgccggaattaaaaataaagggcaataaagccagccttggaaattttactttttcagaaggtgactatattacgattaatgttccgttttacggcgagtctacggtgtacgaaggcgtaacagaactaatcgaacccaacccgaaagaatccgggctgttggattttatcgcccttacaaaaaaatttgttaaggaattccatgtccgttgtaatgccgacactccaagggatgcggctcttgctttaagttttggcgcggacggcttgggtctgtgccgcacagaacacatgttctttaaggaagaccggatcaacgtattcagggatatgcttctgtcagatgacaccaaggaacgccaaaaagctctggataaacttgaggtcatgcaaagggaagacttctacggtattatgaaagtgatggcaggcaaggaagtgacaatccgtctcttggattcgccgcttcatgaatttatgcctcacaacaacgatgaattaacggcttatgtagaccatgcttccaaaggtagcaaaacaaagctgtccagagcggaaattaccgcccgcatcgaagcgttgcatgaatttaacccgatgctcggtcatcgcggctgccgtatcgcggtctcctatcctgagatatatgcaatgcaggtaagggcaatattcaaagccgcttacaaactgcgttccgaaaaaattgacgcaaggcctgaaattatggttcccattgtaatgaatgtttcagagttaaaacttatcgcgtacggtaaaaaaatcgaaggttcaaactaccttggtattgttgatattgaggaagcgttaagaaaagaattaaaggcaaaagaggttgattataaaatcggcactatgatagaactgccggcggcggctcttggcgcgggagaaatcgcaaggtacgggcgtttcttcagtttcggaacaaacgatttaacgcagacaacgttgggcatttcaagggacgattttaccgcttttatgccggattataccctgtttgatcttatcgacggcaatccgtttagcacgctggacaagagggtaaaagaactgattacaatagcggcagatcgcggacgtattacgcggcctgatcttgtctgcggcttgtgcggcgaacatggcgcgaatcccgcaaacgtgcgcttctgcatggaggccggcttaaactacgtttcctgttccccgtattctgtaccgatagctctgcttgcggtagctcaagcgggaattgagaaactcggagctaaagcataa

SEQ ID NO: 64030 - protein, 908 aa, Unknown
  Obtained from environmental sample
  DOMAIN (409)...(509): PEP-utilising enzyme, mobile domain
  misc_feature (1)..(908): Xaa is any amino acid
MVMPCLIILTRKIYGFRIHFFSQNTSISSKIEADLLGIRGRQANEFAELAFPILPGIILDTEIASEIDVKKIKKDIIELLDKCSKLVAKKYGDPQNPMLLKVVISSNLAITNYPTLHNFGLVKPTIDGFTNKVGADFAASEVLFLINGMMAIQERIKELEGKTKEKDEITGKIKLLKLMLGIKGPSNELHGKEDKTPVPKKKSAKEYMDEYCKYFPKGFFDDAESQLLITLGEISRMLSMDEQNDNDTAIVIQPMVYGNYGKDSCSGGFYSRNVVTGEKKLQGSFFRNKFNELGEEGYEINKIDALYLKQLEKIAWTLEDKFKEIRYVRFTVENGKLWLIEQRLVDQKSTQADLKLLLDLQKRKIVDEASVIKAIDPIRLNEILHPVINMSSVKGQKSWKGGIAGAPGAAIGQVYFSTDALLEAKKQAAKKGKDGRFILVLKSSFAEDVKAMRVSTGVLPAEGGYSAHASVVARQYGKVSLVSPELKIKGNKASLGNFTFSEGDYITINVPFYGESTVYEGVTELIEPNPKESGLLDFIALTKKFVKEFHVRCNADTPRDAALALSFGADGLGLCRTEHMFFKEDRINVFRDMLLSDDTKERQKALDKLEVMQREDFYGIMKVMAGKEVTIRLLDSPLHEFMPHNNDELTAYVDHASKGSKTKLSRAEITARIEALHEFNPMLGHRGCRIAVSYPEIYAMQVRAIFKAAYKLRSEKIDARPEIMVPIVMNVSELKLIAYGKKIEGSNYLGIVDIEEALRKELKAKEVDYKIGTMIELPAAALGAGEIARYGRFFSFGTNDLTQTTLGISRDDFTAFMPDYTLFDLIDGNPFSTLDKRVKELITIAADRGRITRPDLVCGLCGEHGANPANVRFCMEAGLNYVSCSPYSVPIALLAVAQAGIEKLGAKA

SEQ ID NO: 64031 - DNA, 915 bp, Unknown
  Obtained from environmental sample
  misc_feature (1)..(915): n is a, c, g, or t
atgacagaatggcacgagtatgctatacgaaattgccgcccaaatccagcggtgggggctttgcttgtgaaaaatggggtggttgtgggagagggttgcactcaggagcctggcaatgcacacgcagaaatagtcgctttgaaaaacgctggcgaaaatgcaaagggtgcagatttatatgtaactctggaaccttgctgccactatgggcgcactccgccttgcacggataaaataatagatgctggcgtaaaaaaagtttgctacggttttttagacccaaatccagaagttgcgggaaaaggaattgagaaattgcaacaagctggaatagaagttgtgaaagaaaatttgaatagattggtggataatttttatgaatcttatttttggtttgtgaaaaacaaaactccttttgtaacgctaaaaatagcccaaacaatggatggttttattgcaaacagcgataaaagcccgcttaaaatcacgggcgaaaaatccaaggagcagcttcacaggttgcggagtttttgcgatgcggttgtaatcggcggaggaacttttcgctccgataatccgcaattgacggttagagatgtaaagggagcaaatccgcaaaaggttatttttagcaaaagcaatttcagcggaggaacttttgaagagaattggaattttatgatgcgaaatttcacagaaaaaggaatgcaccatattttggtagaagctggggcaactcttgcagaaaatctgttttcaattccaaactcttttcaaaaatttttgctatggatttcgcctatcaggcttggcaatggattgacatatcccgtttctcatttcccaaaaaattttgaattgaaaaaaacttatatgcagggtggggatttttgttgtgagtttatattctgttaa

SEQ ID NO: 64032 - protein, 304 aa, Unknown
  Obtained from environmental sample
  DOMAIN (138)...(299): RibD C-terminal domain
  misc_feature (1)..(304): Xaa is any amino acid
MTEWHEYAIRNCRPNPAVGALLVKNGVVVGEGCTQEPGNAHAEIVALKNAGENAKGADLYVTLEPCCHYGRTPPCTDKIIDAGVKKVCYGFLDPNPEVAGKGIEKLQQAGIEVVKENLNRLVDNFYESYFWFVKNKTPFVTLKIAQTMDGFIANSDKSPLKITGEKSKEQLHRLRSFCDAVVIGGGTFRSDNPQLTVRDVKGANPQKVIFSKSNFSGGTFEENWNFMMRNFTEKGMHHILVEAGATLAENLFSIPNSFQKFLLWISPIRLGNGLTYPVSHFPKNFELKKTYMQGGDFCCEFIFC

SEQ ID NO: 64033 - DNA, 369 bp, Unknown
  Obtained from environmental sample
  misc_feature (1)..(369): n is a, c, g, or t
atgcattcagcgcttctccgcagggcgcgcggctacccggccgtgccgctggcgcgacagccggtgcgccggaggcgcccccgtcccggtcctctcgtactaaggacggcgtccctcaaaccttccacgcccgcgccggatagggaccgaactgtctcacgacgttctgaacccagctcgcgtgccgctttaattggcgaacagccaaacccttgggaccttctccagccccaggatgcgacgagccgacatcgaggtgccaaacctccccgtcgctatggacgcttgggggagatcagcctgttatccccagagtaccttttatccattgagcaacggccgttccacgctgtgccgcgggatcactaa

SEQ ID NO: 64034 - protein, 122 aa, Unknown
  Obtained from environmental sample
  misc_feature (1)..(122): Xaa is any amino acid
MHSALLRRARGYPAVPLARQPVRRRRPRPGPLVLRTASLKPSTPAPDRDRTVSRRSEPSSRAALIGEQPNPWDLLQPQDATSRHRGAKPPRRYGRLGEISLLSPEYLLSIEQRPFHAVPRDH

SEQ ID NO: 64035 - DNA, 789 bp, Unknown
  Obtained from environmental sample
  misc_feature (1)..(789): n is a, c, g, or t
ttggcgaacagccaaacccttgggaccttctccagccccaggatgcgacgagccgacatcgaggtgccaaacctccccgtcgctatggacgcttgggggagatcagcctgttatccccagagtaccttttatccattgagcaacggccgttccacgctgtgccgcgggatcactaagccctgctttcgcatctgcccggcccgtcggcctcgcagtcaagccaccttttgcctttgcgctcgcggggccggttgccgaccggcccgaggtgacctttggatgcctccgttactttttgggaggcgaccgccccagtcaaactggccaccaggcactgtcccggcatccttctcggatgcgcggttaggcctcaggcgacgcaggggcggtatttcaaggacggctccccccggcccagaagccggggatcgtagcctcccgcctatcctacgcacgcggcgcctaaagccaacgccaagatgcagtgaaggttcatggggtctttccgtccaggcgcggggcgccggcatcttcaccggcactgcaatttcgctgagtctcgggaggagacagcgcaggagtcgttacacgattcgtgcaggtcggaacttacccgacaaggaatttcgctaccttaggaccgttatagttacggccgccgtttaccggggcttcggttcgccgcttcggggttgccccctgacgcctcccgttaaccttccggcaccgggcacgtgtcagaccatatacttcccattgctggttcgcatggccctgtgtttttggtaa

SEQ ID NO: 64036 - protein, 262 aa, Unknown
  Obtained from environmental sample
  misc_feature (1)..(262): Xaa is any amino acid
MANSQTLGTFSSPRMRRADIEVPNLPVAMDAWGRSACYPQSTFYPLSNGRSTLCRGITKPCFRICPARRPRSQATFCLCARGAGCRPARGDLWMPPLLFGRRPPQSNWPPGTVPASFSDARLGLRRRRGGISRTAPPGPEAGDRSLPPILRTRRLKPTPRCSEGSWGLSVQARGAGIFTGTAISLSLGRRQRRSRYTIRAGRNLPDKEFRYLRTVIVTAAVYRGFGSPLRGCPLTPPVNLPAPGTCQTIYFPLLVRMALCFW

SEQ ID NO: 64037 - DNA, 939 bp, Unknown
  Obtained from environmental sample
  misc_feature (1)..(939): n is a, c, g, or t
atggccgtgtcctgtccccgccttccgccgcttggctggatcacattaagggccacagagtttaccgcgagttcctgttttactttccgggggaataaccttaaaaccccgttttacgaagtgggctttaacgaggcaggcaggatcacaagcctttttgatattgaaggcgacagggaactggtcgcgcccggcggagttctcaacggttttgtcagcgctcaggacgtacctgtcctctgggaggcgtgggacattgaggccgattggaccaggtacctcactgaagaaacccgtctcctttcaacggagatcgccgcgtccggaccagtttgtttcagaatcaggcgcaagtataaaattggagaggcatccattctgagccaggacacggttttctatgcagaaaatccaaggatagattttgaaacccttgttgactggcgtgagaaacagcggcttctaaaaacgcaatttgatactgccataaacaccgcccagatacgctgtgaggttcagtttggccaccttttacggaacacgcacaagaaccttccgcaagaccgcgcccgttttgaattctgcgcccacaagtgggtcagccttgaggaagaaggtggcggcatagcccttcttaacgactgcaaatacggccacgatgccgaagggggccgagtacgcttgaccctgctccgttcgccaatagcgcccgatcccgacgcagatacgggggaacatcactttacttacgccttgctcccctttaccggcccctttggcgaatccgcccttgtccgttcaggctacgaactgaacggatccccgcccgtgtggaacctaccttcggttctttggtcgcttctggttctattgaatccgcagattctgtggagccgacagaatactcccttttcagaacggaaggaaagagtgtcataa

SEQ ID NO: 64038 - protein, 312 aa, Unknown
  Obtained from environmental sample
  DOMAIN (3)...(310): Glycosyl hydrolases family 38 C-terminal domain
  misc_feature (1)..(312): Xaa is any amino acid
MAVSCPRLPPLGWITLRATEFTASSCFTFRGNNLKTPFYEVGFNEAGRITSLFDIEGDRELVAPGGVLNGFVSAQDVPVLWEAWDIEADWTRYLTEETRLLSTEIAASGPVCFRIRRKYKIGEASILSQDTVFYAENPRIDFETLVDWREKQRLLKTQFDTAINTAQIRCEVQFGHLLRNTHKNLPQDRARFEFCAHKWVSLEEEGGGIALLNDCKYGHDAEGGRVRLTLLRSPIAPDPDADTGEHHFTYALLPFTGPFGESALVRSGYELNGSPPVWNLPSVLWSLLVLLNPQILWSRQNTPFSERKERVS

SEQ ID NO: 64039 - DNA, 2451 bp, Unknown
  Obtained from environmental sample
  misc_feature (1)..(2451): n is a, c, g, or t
gtggtggtttctgcgacgcttttacatgacataaaaacggaccacggcatgattatgccggaagacgatatcgtctccgaaattgattctttgagaggtcgtttgaaagatcggcggtcgccgcaacagaccgtcttggttgaggacgacgtatgggatatgcatgattacttcaatgaaaatttttctcaaaaggcgagcaacgtactcaacgcgcgtttttttgacgaagtagcgccgcttattttcacggcaaaaccgaaagaatggaaggatatattttccatattgtggaacaagaacgaaaaattcacaaatcttttcgcggcgttgatttccgagtacgaaaaattgaatttttccggcatagtttatttgccgatggaatccgttttatacaaacacggtacattgctggacgtaaaccggctcagggaaatcttcggcgtgtccgaaaaaatgggggcggaatacaagccgagtacaaaggtcttgttaccggataaaaatcaagagattgagtttccgaagtcatatttgtgcgcgttggccgccgagttgcaattcgggttggagaaaacgctgcgagacagcaaggagtttttgaataaaatagatttgcttgacttcccaggcgctagggcgcgtatgactttgcctcaaaatgagattaaggatgagaacattccggaattgttgaaaaggggcaaggtcgcgtatttgtttaacaaattttcagatacgaaaaaaatcagtattttgatgctttgcgccagaaacgagcagacggggcagcgctcaatgcctgaaatgctcaatagctgggtgagtaaatatgtgggtaaaactcccgagaaaagagaatcctttatacaaaaatccaaaatagcgccgttgtttatcatcggaacctttttcaattgcgatttggaatacaatcctctgcaggatagggaagataacgtagattccctgacatatcgctggaagaaaagatttgatacgatattcgcggttgagttgttgaacacggagacatacgattggtttaataactggacgacttcagacacggatttcaagaacttttttcttttgcgggattttaattactcggaatctaaaagccaattgtttaagggttttcgcgagcataaaaaagagatggaagaagtcggtacgccgagctacccgggctttcgcgagaaacttcgccaatcgttcattgagtatccctttgtacggcgtcattttgataatccggccgaatcgtgggacggcgcggcaaaaataaattgtgacggtacggagcgtattatcggtaaacttaaaatcgccgccgagcatatctacggtgcgcgattggaacaaaaccgcggcgagctcaatgatatatcgcaaacggttcttgcggagcttaaaaaatattttcattgcgatgacaaggacgagatgttgcagcgggctaaaaacacagtgggaaaaattcagctcaaaatggataaggctttcggcggcgacaacattaaacaattcgggttgatgatgaaagagttgatgatcgatgaaagttccgtgtatcggctttatcacgagatactcaacgatatcgagcatagcaatcaacgcaatacggacggctacagcattttaaagatgaaggtgcctccggaggaaaacgagagcgtcgacgcgtattttgagagggctcgcgcgcattacgaccaaacggaagaggagtttcgcgcataccttgaggcgaatcggatcgatttggccgatttgttgagcggcagttacatgatcaaggacgacgccagaatgttggcggaggcgttgcttaagtattggcttgactatgtgcaaaaaaccaagcttcctaacgtttggcggattttgtccgagagcaatctgccgaatcctcaagacccgccggcgttgctgttggaaatagcggttatgtataaacaattgttcgaaaaattagacgtcgccgagcgagtcgccgagaaaattctgcgttatacgaataggtcgggcagagccggtaaaccgtatcaaataatagccgatatcagcgcggagtatttgaacaagtttataaataccgtcggctttgaacatctcgacaagtcggcgatcgacgcgttgcgacgggcgaacgaaaacgcgaacaaggagagcaccctgggattgaatttcgatagggatgccgccgccgctgaacggacggttgaggaactgtttacaaaaattcataacttagcccaaatcgttaataggaatccaaaggaattggagacgttgccgagttatcgcaattatctcttgtggtccgatcgtttgaaaatcggatttgtgtacgcctgcgatattccgacgtatgatccgaccgtaaacaataaactgggtgatattataaaggcgtgcgaagccatagggaggtactga

SEQ ID NO: 64040 - protein, 816 aa, Unknown
  Obtained from environmental sample
  misc_feature (1)..(816): Xaa is any amino acid
MVVSATLLHDIKTDHGMIMPEDDIVSEIDSLRGRLKDRRSPQQTVLVEDDVWDMHDYFNENFSQKASNVLNARFFDEVAPLIFTAKPKEWKDIFSILWNKNEKFTNLFAALISEYEKLNFSGIVYLPMESVLYKHGTLLDVNRLREIFGVSEKMGAEYKPSTKVLLPDKNQEIEFPKSYLCALAAELQFGLEKTLRDSKEFLNKIDLLDFPGARARMTLPQNEIKDENIPELLKRGKVAYLFNKFSDTKKISILMLCARNEQTGQRSMPEMLNSWVSKYVGKTPEKRESFIQKSKIAPLFIIGTFFNCDLEYNPLQDREDNVDSLTYRWKKRFDTIFAVELLNTETYDWFNNWTTSDTDFKNFFLLRDFNYSESKSQLFKGFREHKKEMEEVGTPSYPGFREKLRQSFIEYPFVRRHFDNPAESWDGAAKINCDGTERIIGKLKIAAEHIYGARLEQNRGELNDISQTVLAELKKYFHCDDKDEMLQRAKNTVGKIQLKMDKAFGGDNIKQFGLMMKELMIDESSVYRLYHEILNDIEHSNQRNTDGYSILKMKVPPEENESVDAYFERARAHYDQTEEEFRAYLEANRIDLADLLSGSYMIKDDARMLAEALLKYWLDYVQKTKLPNVWRILSESNLPNPQDPPALLLEIAVMYKQLFEKLDVAERVAEKILRYTNRSGRAGKPYQIIADISAEYLNKFINTVGFEHLDKSAIDALRRANENANKESTLGLNFDRDAAAAERTVEELFTKIHNLAQIVNRNPKELETLPSYRNYLLWSDRLKIGFVYACDIPTYDPTVNNKLGDIIKACEAIGRY

SEQ ID NO: 64041 - DNA, 1509 bp, Unknown
  Obtained from environmental sample
  misc_feature (1)..(1509): n is a, c, g, or t
atgacgcgttccggaaaaggcgtttcaaccgtaatgacgaccttgcttgcttatgccggaagcgttatcgtccttgacttcaaaggagaaagttttaaatatacctcaggtttccgaaaaaaattcggaaaagtttatcgttgggatcctacgggagacaaaggccatcactttaaccccatgatggaaatacgttccggcgaagacgccttttcagacgcgaatcttatcgctgatattttgacaacaccgaaagaaggtggcggtaatgctacatcggaacattttcaaacaggcgctaaagactttcttactgccgttatccttcattgcttatgctcggactggaaagacaagagccttcccggatgccgcaaatttcttgcccaaggcgatcctgcagaccccaataacaataattatatctatgatcttatgattaattccgaccacggcgatgaaatgatacaccaatctatcgttgagggcgctatggctcaaagaaacagaccgaaagacgagggcggctccatgctgtcaaccgttaataacgcgcttgccgtttttgccgatcagaaaatagcgcgtaatacatggaactctgaattttatattgatgaatttcaagaaacaaaagcacctatctctctttatcttacaattcaatacgacagtgttcagcgtatcgctccattaatccgtttatttgtcacttttctttcaagaaaatttaccggaggcgaaaccgacgcaaacgccagaaaatttaaagtaccagtgcttattatacttgacgaatttgacaaactcggccgtatggatgaactggaaatgaacatgggtatccacaatggttttggtattcattacctgttaatttttcagtcattgaatcagcttaataaaatttatacaaaagaacattctttcctcgcacatgcgcgtaacactattatatacgctccaggtacgggtgaaatggaaacagccgaacttgtttcaaaaatatgcggaaaagaatcaatcagcagaactaatatttcctactccggagggaaagcgcaagtcgggtattcaaataaaaatatatcctctcaggatcaggaacgaaaccttatcaacgccgatgaagtgatgaaattgcccaatgatcagctcattctcttgagtcaggggcttccgccatacataggcaaaaaatgtgtttattacgaagacccggtctttaaagcacgtcttttcccaccggcatttacaacgcgcgaagaggcattgaaagccgttgccgctaccgttaagaaacttagcaaacgacgctggtttgaccgcggcgacaactaccgttccgttgatatgaccgatgacgatatagccgccatgtgggataaagtcggcgatctctttgacgaatcggacgaagcgtccgcagatgaagcgccggtatccgctccggcaggtaattattcggattattcagatgattcagatgaagaaaattttttgaaataa

SEQ ID NO: 64042 - protein, 502 aa, Unknown
  Obtained from environmental sample
  SIGNAL (1)...(19)
  DOMAIN (2)...(426): TraG/TraD family
  misc_feature (1)..(502): Xaa is any amino acid
MTRSGKGVSTVMTTLLAYAGSVIVLDFKGESFKYTSGFRKKFGKVYRWDPTGDKGHHFNPMMEIRSGEDAFSDANLIADILTTPKEGGGNATSEHFQTGAKDFLTAVILHCLCSDWKDKSLPGCRKFLAQGDPADPNNNNYIYDLMINSDHGDEMIHQSIVEGAMAQRNRPKDEGGSMLSTVNNALAVFADQKIARNTWNSEFYIDEFQETKAPISLYLTIQYDSVQRIAPLIRLFVTFLSRKFTGGETDANARKFKVPVLIILDEFDKLGRMDELEMNMGIHNGFGIHYLLIFQSLNQLNKIYTKEHSFLAHARNTIIYAPGTGEMETAELVSKICGKESISRTNISYSGGKAQVGYSNKNISSQDQERNLINADEVMKLPNDQLILLSQGLPPYIGKKCVYYEDPVFKARLFPPAFTTREEALKAVAATVKKLSKRRWFDRGDNYRSVDMTDDDIAAMWDKVGDLFDESDEASADEAPVSAPAGNYSDYSDDSDEENFLK

SEQ ID NO: 64043 - DNA, 993 bp, Unknown
  Obtained from environmental sample
  misc_feature (1)..(993): n is a, c, g, or t
ttgaacggcttttacataaatattactccgaagaaactaaagaaaaaaaagaagaaaacaatgggcagagctgaagacgaacaggaacggcttgaacgccacatgacaaacctcttgtccgatctcgaaaaacttattccgttttttgagacaaaaaccatcacggatatttatgtttacagtgatggtaaagtttacattgatgattttattgacggcacttctgatacaggcgttgttctctcgccgtcagaacgtcttaggattatttatagcctttcaaatgtcgttgaagctcccattgataaatggactcgcccaacacttgaaagtattattccaaaatataatattcgtactaccgccatcgttgatccctggctttctccttcgcaaattactttccgcagaccggctgaaaaaattcatacttttgataactaccttgcagataaaaggatatctcaagaattatacgacaaaatcctttcacatattgaaaaacgctcaaatattgtcatttcaggttcaacaggaagcggaaaaactacctttactaacgcttgtatagataaaatatacgaacttactcccaatgaacgtatatacattgtcgaagatacgccggaactgcaatgccgcaacccgaacaaaacccagttgtatatccgcaaggaacaggcggtattggctatccaaaccgccctccgctggactcccaaacgtatcatcttcggcgaattgagatcgggcgacgtcgccgccgaactgctgcaagcatggaataccggccatccggggaatgtcactaccattcacgcggacagcgcggcctcaaccattccccgcctcgaggggttgctgaggcaggtcatcctgggaaccttgcccgaccttgcggataccatccacctgattgtacatctcgccaaccgcagggtggttgaagccctgactgtccgggaaatacaggagggtaaaactatgggttaa

SEQ ID NO: 64044 - protein, 330 aa, Unknown
  Obtained from environmental sample
  DOMAIN (31)...(313): Type II/IV secretion system protein
  misc_feature (1)..(330): Xaa is any amino acid
MNGFYINITPKKLKKKKKKTMGRAEDEQERLERHMTNLLSDLEKLIPFFETKTITDIYVYSDGKVYIDDFIDGTSDTGVVLSPSERLRIIYSLSNVVEAPIDKWTRPTLESIIPKYNIRTTAIVDPWLSPSQITFRRPAEKIHTFDNYLADKRISQELYDKILSHIEKRSNIVISGSTGSGKTTFTNACIDKIYELTPNERIYIVEDTPELQCRNPNKTQLYIRKEQAVLAIQTALRWTPKRIIFGELRSGDVAAELLQAWNTGHPGNVTTIHADSAASTIPRLEGLLRQVILGTLPDLADTIHLIVHLANRRVVEALTVREIQEGKTMG

SEQ ID NO: 64045 - DNA, 357 bp, Unknown
  Obtained from environmental sample
  misc_feature (1)..(357): n is a, c, g, or t
atgatggcacgaggagccatgagctattgggaactggcgagccacatagaggcggccaaacacaggggcgagaaggcgcagaagttcatggcggaactgcaattcaagattgctctgccgttcatgaacttcatcgtcatcctcttcgggatatcgctcgcctcccgaaccggacgcaggggaggcacggcgctcttgggggtggggctgctgctctcgttcctctactggatactcagccgcttcgccctcgtcttcgcccaaaacggatatttgccgacacttgtgggagcatgggtcggtaatgtaattttctttatagtggggcttgtactctacagaaaagccgcgcactga

SEQ ID NO: 64046 - protein, 118 aa, Unknown
  Obtained from environmental sample
  misc_feature (1)..(118): Xaa is any amino acid
MMARGAMSYWELASHIEAAKHRGEKAQKFMAELQFKIALPFMNFIVILFGISLASRTGRRGGTALLGVGLLLSFLYWILSRFALVFAQNGYLPTLVGAWVGNVIFFIVGLVLYRKAAH

SEQ ID NO: 64047 - DNA, 384 bp, Unknown
  Obtained from environmental sample
  misc_feature (1)..(384): n is a, c, g, or t
atgccgaaaatattgattgtggacgacgaccacgccgctctcgacctcttggagctgtttttgtacagcaactacgtggtcgtcacggcgctaaacgggtttgacggcatgaccaaagccgagaaggaggagccggacctcatcatcaccgacatcactatgccggtaatggacgggatacgcttcttcaacctggcaatcaggaacgaagcggtgaagcgcgtacccataatagcggtcacctccttcgcggagggtataaccgcgaagagcctgatcaacatgggcttttcgggagtgatcccaaaaccgctcgaacgcgggcttgtcttaacggtaatagccgacacgctcaaagcggcggcggagaaaggatcttcctga

SEQ ID NO: 64048 - protein, 127 aa, Unknown
  Obtained from environmental sample
  DOMAIN (2)...(115): Response regulator receiver domain
  misc_feature (1)..(127): Xaa is any amino acid
MPKILIVDDDHAALDLLELFLYSNYVVVTALNGFDGMTKAEKEEPDLIITDITMPVMDGIRFFNLAIRNEAVKRVPIIAVTSFAEGITAKSLINMGFSGVIPKPLERGLVLTVIADTLKAAAEKGSS

SEQ ID NO: 64049 - DNA, 1836 bp, Unknown
  Obtained from environmental sample
  misc_feature (1)..(1836): n is a, c, g, or t
atgaacggaaacaacagaaaaaaaatcattccgacgattttcttgatcgccggcatagcaaccgccctcatagactccaacgccgcaaaggtgttcggcggcatgcttatagggagcgggctgacgtttttggcgcgcctgctctacaactccattcgcggcaagaacgggctcacgcaaatccgcaatgagccgcgcaaacccgacaaaccgccgcagacaaaaccggggcttgccgcgagcaaagacccggtggcaatgcacggccaaagactcggctccgaataccaaaggaaacagtggatggagacggagatcgccgtggacaaaatgctcgacatgttcataaatttagtcgcgacacacctcgccaatcacaataccgtcgccgtgttcttccccaccaacaacggcgaatacgccatcagacgctatatctcaaaaaccggattcgtcaacaaaaaagcgatgatcctcccaaaccgcggactcttgggcagcctgatcaccaaagaactgcaacccttctacgaacccggtttcacaaacagcaactccaccctcttctactacgacgagtaccacgagttcgagcccacggaaaacatccgctccatcctcctcagccccgtcatggcggagaacgacacgaaaggcatactgctcgccgactcgacaaaggcgaacgcctatacccaaagcgacttagactacttagcaaataccgccaagattctgggacaggccatctactacgcctacatgaacaccatgaacagcttggaccaccagcggctgacggccatgaccagcatagaaaaagacttttggaaagacttggatttcgacaccgtaatgaacaagatgtgcgaaaccatctccgacgcggtcccctgcgacaggctcaccataagcctgaaagaggaggacaatatgtacgcgaaggtggtaaggacatacggcgacagcgccgggtatttcaaggacttggaattcgcgataggcgacggcggccccaaaacgcttgtgcgcctcgcctactccaccgatataggcttcttcaggaactttaaagaggatcgctacgaattccgctacaccgaagacgagccgcaaaaccacgggttcggctcgttcatgatcatacccataggcatagacaagcgcatagggatgatactggtggaatcaaagatgaaaaacgcgttctccgaattcaaccgcaacctgctctcccgcctgagccaaagcgccggaatagcgctcgaaaagatattcatcatccgcaaaacgaacgacttggcctcccacgacgtcctgacaggattgtttaaccgccagcatttccaaaagatactgacgaccaagatcaccgtgagcaaacgctacaaacacccgatctcatttgtaatatgcgacatagacttcttcaaaaagatcaacgacaactacggccacgatttcggcgacgtggtgctgaaaggcgtggccgccaaacttaacacctccgtacgccaagacatagacgccgtcgcccgctggggcggcgaagagttcgtgatgatcatagacaaaagcgactgcgacaccgccaaagaaatggccgaccgcatacgcgccgagatcgcggccatgattttcaaaacagccgacggacgcgaagtaaaaacctccatgagcttcggcatagccgaattcccaaaacacgctagagacgacaaggaactcatagacatcgcggacaaagcgctctacgccgcgaaagccaaagggagaaaccgcgtagaaatctattgggcggagtcaagcgccaagttcattgaaaagagagactag

SEQ ID NO: 64050 - protein, 611 aa, Unknown
  Obtained from environmental sample
  SIGNAL (1)...(22)
  DOMAIN (281)...(422): GAF domain
  misc_feature (1)..(611): Xaa is any amino acid
MNGNNRKKIIPTIFLIAGIATALIDSNAAKVFGGMLIGSGLTFLARLLYNSIRGKNGLTQIRNEPRKPDKPPQTKPGLAASKDPVAMHGQRLGSEYQRKQWMETEIAVDKMLDMFINLVATHLANHNTVAVFFPTNNGEYAIRRYISKTGFVNKKAMILPNRGLLGSLITKELQPFYEPGFTNSNSTLFYYDEYHEFEPTENIRSILLSPVMAENDTKGILLADSTKANAYTQSDLDYLANTAKILGQAIYYAYMNTMNSLDHQRLTAMTSIEKDFWKDLDFDTVMNKMCETISDAVPCDRLTISLKEEDNMYAKVVRTYGDSAGYFKDLEFAIGDGGPKTLVRLAYSTDIGFFRNFKEDRYEFRYTEDEPQNHGFGSFMIIPIGIDKRIGMILVESKMKNAFSEFNRNLLSRLSQSAGIALEKIFIIRKTNDLASHDVLTGLFNRQHFQKILTTKITVSKRYKHPISFVICDIDFFKKINDNYGHDFGDVVLKGVAAKLNTSVRQDIDAVARWGGEEFVMIIDKSDCDTAKEMADRIRAEIAAMIFKTADGREVKTSMSFGIAEFPKHARDDKELIDIADKALYAAKAKGRNRVEIYWAESSAKFIEKRD

SEQ ID NO: 64051 - DNA, 774 bp, Unknown
  Obtained from environmental sample
  misc_feature (1)..(774): n is a, c, g, or t
gtggatggagacggagatcgccgtggacaaaatgctcgacatgttcataaatttagtcgcgacacacctcgccaatcacaataccgtcgccgtgttcttccccaccaacaacggcgaatacgccatcagacgctatatctcaaaaaccggattcgtcaacaaaaaagcgatgatcctcccaaaccgcggactcttgggcagcctgatcaccaaagaactgcaacccttctacgaacccggtttcacaaacagcaactccaccctcttctactacgacgagtaccacgagttcgagcccacggaaaacatccgctccatcctcctcagccccgtcatggcggagaacgacacgaaaggcatactgctcgccgactcgacaaaggcgaacgcctatacccaaagcgacttagactacttagcaaataccgccaagattctgggacaggccatctactacgcctacatgaacaccatgaacagcttggaccaccagcggctgacggccatgaccagcatagaaaaagacttttggaaagacttggatttcgacaccgtaatgaacaagatgtgcgaaaccatctccgacgcggtcccctgcgacaggctcaccataagcctgaaagaggaggacaatatgtacgcgaaggtggtaaggacatacggcgacagcgccgggtatttcaaggacttggaattcgcgataggcgacggcggccccaaaacgcttgtgcgcctcgcctactccaccgatataggcttcttcaggaactttaa

SEQ ID NO: 64052 - protein, 257 aa, Unknown
  Obtained from environmental sample
  misc_feature (1)..(257): Xaa is any amino acid
MDGDGDRRGQNARHVHKFSRDTPRQSQYRRRVLPHQQRRIRHQTLYLKNRIRQQKSDDPPKPRTLGQPDHQRTATLLRTRFHKQQLHPLLLRRVPRVRAHGKHPLHPPQPRHGGERHERHTARRLDKGERLYPKRLRLLSKYRQDSGTGHLLRLHEHHEQLGPPAADGHDQHRKRLLERLGFRHRNEQDVRNHLRRGPLRQAHHKPERGGQYVREGGKDIRRQRRVFQGLGIRDRRRRPQNACAPRLLHRYRLLQEL

SEQ ID NO: 64053 - DNA, 873 bp, Unknown
  Obtained from environmental sample
  misc_feature (1)..(873): n is a, c, g, or t
ttgaaaagagagactagaacaatgacggtcgtttcgacttcactcaacgacctaaagctccctgagcgaagtcgaagggagctgacattagagaacactatagatgacaggattgaaatgctccacattgtatcaacgcccatcggcaacctctccgacataaccgtgagagcgtctaagatattagccgaatgcaaccttattctggccgaggatacccgcacatcgaaacggctgcttgaccatttgggaataagcacgcacgtaagcgcctaccacgacttcaacaaggaaaaggtcacgccgggccttgtcgcctcccttaaggaaggcaaggagatcgccctgataacagacgccggtacaccgggggtggcggatccggccttttatttggtgagggcggcaatagccaacggcgtggacgtggcgccgataccgggggcgtcggcgtttttggcggcgcttgtggccagcgggctgcccacggacaggttcatatttgaaaactttttgcctaataaagggacgcagaggcggaagatttttgaggcgctgaaagatgagccgagaacgttaatcttttacgaaacgccgcaccgcatagtaaaggcgctggaggacattaaagaggtgctgggcgatgtgcgggtggttatcgcgagggagttgacaaagatacacgaagaatttttacgtggcagcgcggaggaactgctggcgcatttcgcggagcatccgccacgcggggagatggttgtgctatttaatacaagggtgagcaccacgcaacgccaccacaaaaacctcactccgattttgcgtcaggtcgtttcgactccgctcaacgacctttcgggtgctacagagtaa

SEQ ID NO: 64054 - protein, 290 aa, Unknown
  Obtained from environmental sample
  DOMAIN (40)...(240): Tetrapyrrole (Corrin/Porphyrin) Methylases
  misc_feature (1)..(290): Xaa is any amino acid
MKRETRTMTVVSTSLNDLKLPERSRRELTLENTIDDRIEMLHIVSTPIGNLSDITVRASKILAECNLILAEDTRTSKRLLDHLGISTHVSAYHDFNKEKVTPGLVASLKEGKEIALITDAGTPGVADPAFYLVRAAIANGVDVAPIPGASAFLAALVASGLPTDRFIFENFLPNKGTQRRKIFEALKDEPRTLIFYETPHRIVKALEDIKEVLGDVRVVIARELTKIHEEFLRGSAEELLAHFAEHPPRGEMVVLFNTRVSTTQRHHKNLTPILRQVVSTPLNDLSGATE

SEQ ID NO: 64055 - DNA, 405 bp, Unknown
  Obtained from environmental sample
  misc_feature (1)..(405): n is a, c, g, or t
ttgaagcacggctttgaggtaatcctctgcataggtgaaaccctggaggagcgggagaagggcaaggtggaagaggtgtgtcaaagacagacagagaagggtcttgccggtgtatcgccggaagagctttccaaagttaccattgcctatgagcccgtatgggccataggtacgggcaagaccgcaactccggatgatgcccaggcggttcacaaattcgtcaggggagtcgtggataaactctacggaagccaggccgccagacagatcgtaatccagtacggcggatcggttaaacccgagaacgcggcccagttaatggcaatggcggacatagacggcgccttggtgggcggcgcttccctcaaggcagaaacctttacgcctatcgcgaaattcagctaa

SEQ ID NO: 64056 - protein, 134 aa, Unknown
  Obtained from environmental sample
  DOMAIN (1)...(131): Triosephosphate isomerase
  misc_feature (1)..(134): Xaa is any amino acid
MKHGFEVILCIGETLEEREKGKVEEVCQRQTEKGLAGVSPEELSKVTIAYEPVWAIGTGKTATPDDAQAVHKFVRGVVDKLYGSQAARQIVIQYGGSVKPENAAQLMAMADIDGALVGGASLKAETFTPIAKFS

SEQ ID NO: 64057 - DNA, 786 bp, Unknown
  Obtained from environmental sample
  misc_feature (1)..(786): n is a, c, g, or t
atgctgacaaaaaggctcatagcctgcttcgacattattggcggcatggtaacaaaggcagtgcagtttcaggacaacattaacgtcgccccagccgaggaactcgctgaaaaaatgtacaacgagcaaatcgacgaactgattttttacgatattactgcgagcgcggaaaagcgcgggattgatattgaaaccgtaaaaaaagttgcgcgccgtttgtttatccccttcacagtcggcggcggcataaagagcctgcaagacatgtatgaggcgctaaaagcgggggcggaaaagatcagcgttgattcgatggccgtcagaaacccgcaaatcgttaccgagggttccaaagcctttggcgctcaatgtattgtgctttcaacccaggtaaagcgcacgggacttactccaagcggctacgaggtttttattgacggggcaaggctggcaacaggcatggacgccgtcgagtgggtgcggcgcggacaggaactgggcgccggggaaatatgcgtaaacagcattgaccgcgacggaaccctgtccggttacgacattgagctcatgaagctggcccaggccgccgtgtccgttccgcttatcgcttccggcggggcgggaaagcccgaacacctgaaagacctgtttaccgctacggaagcgcaggcggcgataatcagcagcatgctgtactcccccagactggaacgtaatttttcagtcagcgagctgaaggactatctgatacaaaacggcgtaggcgcgcgtcctgttctacggtaa

SEQ ID NO: 64058 - protein, 261 aa, Unknown
  Obtained from environmental sample
  DOMAIN (5)...(237): Histidine biosynthesis protein
  misc_feature (1)..(261): Xaa is any amino acid
MLTKRLIACFDIIGGMVTKAVQFQDNINVAPAEELAEKMYNEQIDELIFYDITASAEKRGIDIETVKKVARRLFIPFTVGGGIKSLQDMYEALKAGAEKISVDSMAVRNPQIVTEGSKAFGAQCIVLSTQVKRTGLTPSGYEVFIDGARLATGMDAVEWVRRGQELGAGEICVNSIDRDGTLSGYDIELMKLAQAAVSVPLIASGGAGKPEHLKDLFTATEAQAAIISSMLYSPRLERNFSVSELKDYLIQNGVGARPVLR

SEQ ID NO: 64059 - DNA, 570 bp, Unknown
  Obtained from environmental sample
  misc_feature (1)..(570): n is a, c, g, or t
atgcacgcaatcaccagccttgggtatgacgcagcattcgcacgtcagggagatgaacttgcggacgcgactcatatattgcttccgggagtaggcagcgcgggggcaactatggattccctgcgcgaattaaatatcattggagcgttggaggacgcggtcttcaagaaaaaaaagttatttcttggtatctgcgtcggtctgcagattctttttcagcacagccaagaagatgacgctgactgccttgggtggctaaaaggcaaggtaataaaattcgacgcttcaaaggtaagggttccccagatgggctggaacaaggtcagttttacagaaagtcctattgatattgcaaaagaaggatatttttactttgtaaactcttattacgcgaaacctgagaacaaggaagacttttggggaacctctgattataacggcagttttgcggcggctgttcacagggacaatatatacgccacccagtttcacgtcgagaaaagcggcaaagccgggctcgctattcttggcggctttctaaacctcggcaagggaggtgattcatgctga

SEQ ID NO: 64060 - protein, 189 aa, Unknown
  Obtained from environmental sample
  DOMAIN (3)...(182): Glutamine amidotransferase class-I
  misc_feature (1)..(189): Xaa is any amino acid
MHAITSLGYDAAFARQGDELADATHILLPGVGSAGATMDSLRELNIIGALEDAVFKKKKLFLGICVGLQILFQHSQEDDADCLGWLKGKVIKFDASKVRVPQMGWNKVSFTESPIDIAKEGYFYFVNSYYAKPENKEDFWGTSDYNGSFAAAVHRDNIYATQFHVEKSGKAGLAILGGFLNLGKGGDSC

SEQ ID NO: 64061 - DNA, 675 bp, Unknown
  Obtained from environmental sample
  misc_feature (1)..(675): n is a, c, g, or t
ttgaggggcgttacagagccagagaaaaagcgcaagatcatcggcgaagaatttatccgtgtgtttgaagaggaatccgcaaagttaggcgatattccctttctcgcgcagggaactatttacccggatgtcgttgaatcggggggcaaatacggcgcggttattaaaagccaccacaacgtaggcgggcttccggaaaggcttaagtttaccggaatcctggaacccctgtccgggctttttaaagacgaggtacgcgttctcggcagaaagttgaagcttcccgcctcgattgtaaaccgccagccgtttcctggccccggtcttgcaatccgcgtcatgggcgaagttacagaggaaaagctggaaacactacgcaaggcggacgcgattctccgcgaagagctggacgacctcaaaagcagaccggatcagtatttttgcgtccttaccggcacacgctccgtgggcgttaaaggggacgacagaacgtatgatttcgtaatagccgtcagggccgtaaagacagatgactttatgacctgtgaatacgccccgctgccgcacaagctcttaagccgcgtctcctcaaggataacggcggaaataccatcagctagccgcgttgtttacgatattacatcaaagccccctgctacagtagaatgggaataa

SEQ ID NO: 64062 - protein, 224 aa, Unknown
  Obtained from environmental sample
  DOMAIN (133)...(223): GMP synthase C terminal domain
  misc_feature (1)..(224): Xaa is any amino acid
MRGVTEPEKKRKIIGEEFIRVFEEESAKLGDIPFLAQGTIYPDVVESGGKYGAVIKSHHNVGGLPERLKFTGILEPLSGLFKDEVRVLGRKLKLPASIVNRQPFPGPGLAIRVMGEVTEEKLETLRKADAILREELDDLKSRPDQYFCVLTGTRSVGVKGDDRTYDFVIAVRAVKTDDFMTCEYAPLPHKLLSRVSSRITAEIPSASRVVYDITSKPPATVEWE

SEQ ID NO: 64063 - DNA, 852 bp, Unknown
  Obtained from environmental sample
  misc_feature (1)..(852): n is a, c, g, or t
atgagcgaaatggcgctggtgctggattttggcggtcagtataaggagcttatcgcggggacggtaaggaacttgtccgtatactcgcagataatgccgggcaataccccgcttgatgaaatcaaacggctgaaccccatcgggattatcctgacaggcgggccgaacagcgtatacctgccggactcacccaaatgcgacccggaaattttttcattgggtattcccatcctcggcatctgctacggaatgcatttaatgtgttatacgctgggcggcaaagtcgcgtccggcaaagcgggcgaatacgggcgcgtcaaggtaacacccgtaaaaacttcgtcaaaattattcaaaagtaaaaaagattcctttaccgcgctgatgagccacggagacgctgtaacaaacctgccggaagggtttcgcgtaacggcaaaaagcgcggtctgtatggcggcctgtgaggacaaggcgaaaaaactttacgccgtgcagttccaccctgagacaaaacacaccaagggcggacgcgaaataataaaacggtttttgtatgatatttgcggcgcatccggtgattataaactcggcgattatattgatacacaaatcaagaaaatacgggaaaaagtcggcgataaaaaagtcctgctcgccctgtcgggcggggttgattcctcggtatgcgcgggtcttttatcaaaggcgatacccggacagcttacctgcatatttgtcgatcacggccttatgcgcctaaacgaaggcgatgaaatagagaacgtgtttcaaaacgaaacctcaacttcatccgcgtcaacgcgcaaaagcgcttccttgctaaattga

SEQ ID NO: 64064 - protein, 283 aa, Unknown
  Obtained from environmental sample
  DOMAIN (17)...(170): Peptidase C26
  misc_feature (1)..(283): Xaa is any amino acid
MSEMALVLDFGGQYKELIAGTVRNLSVYSQIMPGNTPLDEIKRLNPIGIILTGGPNSVYLPDSPKCDPEIFSLGIPILGICYGMHLMCYTLGGKVASGKAGEYGRVKVTPVKTSSKLFKSKKDSFTALMSHGDAVTNLPEGFRVTAKSAVCMAACEDKAKKLYAVQFHPETKHTKGGREIIKRFLYDICGASGDYKLGDYIDTQIKKIREKVGDKKVLLALSGGVDSSVCAGLLSKAIPGQLTCIFVDHGLMRLNEGDEIENVFQNETSTSSASTRKSASLLN

SEQ ID NO: 64065 - DNA, 705 bp, Unknown
  Obtained from environmental sample
  misc_feature (1)..(705): n is a, c, g, or t
atgagtttagcgcaagagcggataatagcctacttccagcctatcctgtccgcagatacaaaagacgtatacgcttatgaggttttggggcgttacacggccgacgacggggtcgttaaatctttggggcctttttttgccgcccccgatatatcgcatcaggaagccctcaggttagataggatagtcagaagatacggcataaaaaaatacgccgaggaaaaacgcggcgaatatctgtttatcaatatcagattggcctggctcccggcctttgccgaacatcccgaagaaatgataacgctgcagttggtgaaagaattcggcatatctcccgaaaaacttgttatagaaataacggaagaagagtataacgccagcgaggaatatctgcgcgccatagttcactacaaaagagccggctgccgcatcgcgcttgacgattacggaaaaagcgccagcaatatcgaccggctggcaaaactgcagcccgatattattaaaatcaatatggattacatccataacagcgaaaaatctttccattaccgtgagtatttacgctctcttgcctcctttgcagacgccgtgggtatcgaagtgttgtacgaaagcgtggaaacgccaaggcaatttgaattctgcgagtccttaaagggaaattattatcagggattctttttgcgcttccacagccttcaatga

SEQ ID NO: 64066 - protein, 234 aa, Unknown
  Obtained from environmental sample
  DOMAIN (1)...(228): EAL domain
  misc_feature (1)..(234): Xaa is any amino acid
MSLAQERIIAYFQPILSADTKDVYAYEVLGRYTADDGVVKSLGPFFAAPDISHQEALRLDRIVRRYGIKKYAEEKRGEYLFINIRLAWLPAFAEHPEEMITLQLVKEFGISPEKLVIEITEEEYNASEEYLRAIVHYKRAGCRIALDDYGKSASNIDRLAKLQPDIIKINMDYIHNSEKSFHYREYLRSLASFADAVGIEVLYESVETPRQFEFCESLKGNYYQGFFLRFHSLQ

SEQ ID NO: 64067 - DNA, 729 bp, Unknown
  Obtained from environmental sample
  misc_feature (1)..(729): n is a, c, g, or t
gtggatcccgataaggtatattcggtatcagtcatgccatgcaccgcgaagaagtgggaaacaaaacgcaatgacgacatgaagagcgcgggacatggttacgacgtggacattgtaattaccacaagggaacttgcccgcatgattaaacaggccggaattgaagttcttaatcttgccgatgaagagccggacagtcctttagggccgtacaccggagccggaactatttttggcgcgacgggcggcgtaatggaagccgctgtgcgtagcgcatactatcttgttacaaaaaaagaacttcccgacgtagactttaaacccgcccgaggtcttgagggcgttaaggaaggggaagttgattttggcaacgggacaaagatacgaattgcggtcgctcatcaaatgggaaatattgccgcggttttggataaaattcgtgaggcaaaaaaagccggcaaggagacgccctatcactttatcgaagtaatggcgtgccgcggcggatgtatcgcaggcggaggacagccttacggctgtacggatgaaatccgcgaacggcgcgcaagcggtctttacatggatgatcaaaaatcgcagtatcgctgttcgcatcaaaatccttttatagatcaggtttacaaggaatttctcggcgaacccggcggtcacaaggcgcataaattattgcacactaaatatgtagaacggccgctttatgtgaagtaa

SEQ ID NO: 64068 - protein, 242 aa, Unknown
  Obtained from environmental sample
  DOMAIN (179)...(238): Iron hydrogenase small subunit
  misc_feature (1)..(242): Xaa is any amino acid
MDPDKVYSVSVMPCTAKKWETKRNDDMKSAGHGYDVDIVITTRELARMIKQAGIEVLNLADEEPDSPLGPYTGAGTIFGATGGVMEAAVRSAYYLVTKKELPDVDFKPARGLEGVKEGEVDFGNGTKIRIAVAHQMGNIAAVLDKIREAKKAGKETPYHFIEVMACRGGCIAGGGQPYGCTDEIRERRASGLYMDDQKSQYRCSHQNPFIDQVYKEFLGEPGGHKAHKLLHTKYVERPLYVK

SEQ ID NO: 64069 - DNA, 1038 bp, Unknown
  Obtained from environmental sample
  misc_feature (1)..(1038): n is a, c, g, or t
atgattaatttaacgataaacggtaaagcgcttgaagtagaaccggggacgacaatccttcaagccgcccaaaaggtgaatataaaaatcccgactctctgttataaccccgatcttacgccttgggcgtcgtgcggtatttgtatcgtgcgtcttgcgggttctccgaagatggtgcgcgcgtgctgtacggcatgcgagcctaacatgaacattatcacccacgacccggagataatcgcggttaggcgcacggttttggagcttatcctctccaatcaccccaacgattgtttacagtgccctcgcaatcagtcctgcgaacttcaaaatcttgccgccgagtttggcgttagggaagcccctttcttaaaaataaagaacgatcttcccgtggacgattccaaccccgcaatcgtactctgccccgaaaagtgcatccgttgcggcagatgcgtaaaagtctgccaggacgtgcagaacgtgtgggctttggaattcctcggacggggcatacacggaaaaatcgccagcgcggcggacgctccgttaggtgaaagtccgtgcatcaagtgcggacaatgcgccgcgcattgccccgtgggcgcgatttatgaaagggacgatacggtaaaagtgtggaccgccctgcaggacaatgaaaaacaccccgtcgtacagattgcccccgcagtccgcgtcgctttagcggaagaattcggcctaaaacccggcacggtttttacaaaaaaaatatacgccgccctgcgcagactgggatttaaaacggtctttgatacgaatttttcagccgacctcaccatcatggaagaaggctccgagcttgtaaaacgcttaaccgaaaaaggaagcgtcattcccttgataacttcctgttgtcccgcgtgggtggattatatggaaaaatattacaacgacatgattcccaatttttcaaccgcgaaatccccccagcaaatgatgggcgctatgattaaagcatactgggctgaaaaagcngggggtggatcccgataa

SEQ ID NO: 64070 - protein, 345 aa, Unknown
  Obtained from environmental sample
  DOMAIN (182)...(205): 4Fe-4S binding domain
  misc_feature (1)..(345): Xaa is any amino acid
MINLTINGKALEVEPGTTILQAAQKVNIKIPTLCYNPDLTPWASCGICIVRLAGSPKMVRACCTACEPNMNIITHDPEIIAVRRTVLELILSNHPNDCLQCPRNQSCELQNLAAEFGVREAPFLKIKNDLPVDDSNPAIVLCPEKCIRCGRCVKVCQDVQNVWALEFLGRGIHGKIASAADAPLGESPCIKCGQCAAHCPVGAIYERDDTVKVWTALQDNEKHPVVQIAPAVRVALAEEFGLKPGTVFTKKIYAALRRLGFKTVFDTNFSADLTIMEEGSELVKRLTEKGSVIPLITSCCPAWVDYMEKYYNDMIPNFSTAKSPQQMMGAMIKAYWAEKAGGGSR

SEQ ID NO: 64071 - DNA, 702 bp, Unknown
  Obtained from environmental sample
  misc_feature (1)..(702): n is a, c, g, or t
atggacagagcgacttgtttcgatgtaggcggcggaattaaagacgacaaaaaatttaagggagtgcagtcgggcggaccgtccggcggtattcttaccgaaaaatctcttgatgttccgattgactttgaatctttggtcgccaacggttcaatgatgggttccggcggtatgatcgtaatggacgaggacgattgcgtagtagacgtatcgcgcttctacatggagttctgcgtcgatgaaagctgcggaaaatgttctccgtgccgtattggaaccacgcaaattttaaaaattctggaaaaaatcgccgagggcaggggacatgacgaagaccttgtaaagcttgaagctatcggaatggcgatgacaaaagcgtcgctttgtatgcttggctgtacggcggcaaacccgactatctctactcttaaaaatttccgcgaagaatacatagaacatatacacgataaaaaatgccgctccggcaagtgcagaaaacttgtcaaatacagcattgacgcttcaaagtgtataggctgcggagcgtgcgcgaaaaaatgtccgggtaactgcattgtcgccgagaacgcgtcaagttatccagataaaaaacgtccgccttacaggattaataacgctgaatgtataaagtgcggcgagtgcttggtttcatgtaaatttaacgcggtgataaaggcataa

SEQ ID NO: 64072 - protein, 233 aa, Unknown
  Obtained from environmental sample
  DOMAIN (208)...(231): 4Fe-4S binding domain
  misc_feature (1)..(233): Xaa is any amino acid
MDRATCFDVGGGIKDDKKFKGVQSGGPSGGILTEKSLDVPIDFESLVANGSMMGSGGMIVMDEDDCVVDVSRFYMEFCVDESCGKCSPCRIGTTQILKILEKIAEGRGHDEDLVKLEAIGMAMTKASLCMLGCTAANPTISTLKNFREEYIEHIHDKKCRSGKCRKLVKYSIDASKCIGCGACAKKCPGNCIVAENASSYPDKKRPPYRINNAECIKCGECLVSCKFNAVIKA

SEQ ID NO: 64073 - DNA, 1137 bp, Unknown
  Obtained from environmental sample
  misc_feature (1)..(1137): n is a, c, g, or t
atgaaaactcggcaaatgatcgatactgggaaatttttatttacggcgatgaggataaaaaatgcagagaatttgccgaaaacgctggcgcaaatttgcgcaggacacccgttagttcgagaaaaggttcttaattttaaacaaggcagtaataaattgattttactgcctgacagagaaattttcgcttccgcgaatattaatttttactcggcggcggaaaccgctcggcttggagtgtatggtcctgtagcgtacaaaagaatcgataaaaacggggagacagacgtaagaatcagcactaacggaaacggaatttatcaatcaagggaaggcgcgttgaatctgcttgtttcggcaaagaatgaagaaagtatttcgtatttaaagattgattccctcatgaagaaaaaagaagaaattgagccgtcaagcattagaagagacagccgccgcagattcgcttctataacaattattactaaacctatggatccgcgcaaagtaaaaaaagaactggccggagtattcaaaaaactggaactcgatcccggttattccgtagaatttgatcctgaagccgtaaaacaaagtgaaaatttatctgcttctattttttcgcttgttttagcgatcattttctgttacatgatcattgcgtcaattaacgaatcgtttaccgttccgttgcttgtcctctcggcaattcctccgtctttagcggttcccgctctattacttgttttaaccggaaacgcatataattccgccgtcgcttgcgcctttattgttgtaagcggcatgacagttaatgcggcaattttatgcgtagacggtcttcgctcaaaaattaaatcaggaaaagaaaaaaactcattcagcatttattacgctctccgtttaaaaatgcccgccctgctctccaccaccggtacaaccgttaccggtgcaataccgtttcttttcctgacagaaggcgcaaatacattgatacgcacattatctcttgtaagcgcgctcggagtaacttgctcgtttttttgttcaataaccgtaattccatctattttatctattaaacacacaacaaaaaaaattccgcttgtgcgggataaaaatcaaaatttgggagaatag

SEQ ID NO: 64074 - protein, 378 aa, Unknown
  Obtained from environmental sample
  misc_feature (1)..(378): Xaa is any amino acid
MKTRQMIDTGKFLFTAMRIKNAENLPKTLAQICAGHPLVREKVLNFKQGSNKLILLPDREIFASANINFYSAAETARLGVYGPVAYKRIDKNGETDVRISTNGNGIYQSREGALNLLVSAKNEESISYLKIDSLMKKKEEIEPSSIRRDSRRRFASITIITKPMDPRKVKKELAGVFKKLELDPGYSVEFDPEAVKQSENLSASIFSLVLAIIFCYMIIASINESFTVPLLVLSAIPPSLAVPALLLVLTGNAYNSAVACAFIVVSGMTVNAAILCVDGLRSKIKSGKEKNSFSIYYALRLKMPALLSTTGTTVTGAIPFLFLTEGANTLIRTLSLVSALGVTCSFFCSITVIPSILSIKHTTKKIPLVRDKNQNLGE

SEQ ID NO: 64075 - DNA, 1791 bp, Unknown
  Obtained from environmental sample
  misc_feature (1)..(1791): n is a, c, g, or t
atgaaaaaaatctcttcccgactggaaagaaaaaaaatgagtctctgtattttggcggctatttgcgccgtatcgttattcgtcattatcaattcaaacgagaaaattaaagaaaacacaggaggttcttatttaataaaaatcaagcattacggcattgacgcaatggagatggaaagaagcgtaaccattccgcttgaggacgcgcttttttcgattaacggagtaacagcggttcaaagttccagcgaaaacagtttatcaaatgtttttgtccgttttagaccgggaacgcacggcaggtatgaggcgattcgtgacgcggcgcagagagtttatgaaacacttccttcgtccgcgcaaagaccggaaattttaagctctaataattcaaatgttcctgtctggtcagccgccgttttaacgggagatttaagcaacacggcgcaaatactggaaaaaattgtaaagcctcggttggaaagtttggaaggagcgggagaagttattgtctccggagtgggattaaaagaaatttatataattcttgatcaggaaaaattaggtcttcttcagttagacccgtctgtaataatgtccgttcttgaattaaatgattctattttttccggcggaataattgaacaaaaaaacagagaaataattgttaccgttgatggtcgttactcgtcgcttaacacagctttaattccgcttggcgagggaaaatatattgagctttcggatattgccgttattacggaaagggaacgggagccggatattctttcgcgtttgaacggagaaaaaacagcaagtatcgcaattatgggacggcacggcgcagacttacgcaaattatcttctgatattaaaaaggaaatagcttctctttcgctaccgattgaatttacagttttatccgatcttggagcggaagaaagtaaggcgtttaaatccgttttaaacgcggtattgtcaggcgcgatcatggtcgcattaataagttttttactaagcggaaaaaataatgttaataccgcgggctttttctgcgctttatcaattcctttaatctgtttaatttcaatcgctatactttcaatggttggcttttcaccggacaaacttcttcttgcgggcatcgccgccggaattggagcggcgattgacgccgttattctctgttccgaaaaattgcgtaaatgccgaagttatgaaaacgctcaggcggctttgtcttctcttgcgggaccgcttttggcgggcggagcgacaaccattgtcgcgttaattccgctttccgcaatggaagataactcaaaaattatcgcaagttccatcgccgttgtaactatcacatcgcttgttttaagtcttacgttattgccgccgctgttgctttggggattaaacgctaaaaaacaaaatcggcaaattaacgcaccgcaatttgtaagcgcggcgttaaaaagaatttcgcatcgcttgtgcagatttctcgccgctgttgtaaaattttgcgtttgttatccgcttttaattttatcagcctgcgtaactatcactattgttacaattattattttatttttaaaaggaatggatacatcgggatacggttccgaggattctgtattcgctcaagttgaatttgacggaggacttcacgcgcaggaaacggatcggcttctttccgtttacagtaaacaattaataaaaaaagcgggtataaaaaatgttgaaacaagcgcgagaacgggctcaggttcgctttcttatnttctttga

SEQ ID NO: 64076 - protein, 596 aa, Unknown
  Obtained from environmental sample
  SIGNAL (1)...(25)
  misc_feature (1)..(596): Xaa is any amino acid
MKKISSRLERKKMSLCILAAICAVSLFVIINSNEKIKENTGGSYLIKIKHYGIDAMEMERSVTIPLEDALFSINGVTAVQSSSENSLSNVFVRFRPGTHGRYEAIRDAAQRVYETLPSSAQRPEILSSNNSNVPVWSAAVLTGDLSNTAQILEKIVKPRLESLEGAGEVIVSGVGLKEIYIILDQEKLGLLQLDPSVIMSVLELNDSIFSGGIIEQKNREIIVTVDGRYSSLNTALIPLGEGKYIELSDIAVITEREREPDILSRLNGEKTASIAIMGRHGADLRKLSSDIKKEIASLSLPIEFTVLSDLGAEESKAFKSVLNAVLSGAIMVALISFLLSGKNNVNTAGFFCALSIPLICLISIAILSMVGFSPDKLLLAGIAAGIGAAIDAVILCSEKLRKCRSYENAQAALSSLAGPLLAGGATTIVALIPLSAMEDNSKIIASSIAVVTITSLVLSLTLLPPLLLWGLNAKKQNRQINAPQFVSAALKRISHRLCRFLAAVVKFCVCYPLLILSACVTITIVTIIILFLKGMDTSGYGSEDSVFAQVEFDGGLHAQETDRLLSVYSKQLIKKAGIKNVETSARTGSGSLSYXL

SEQ ID NO: 64077 - DNA, 1464 bp, Unknown
  Obtained from environmental sample
  misc_feature (1)..(1464): n is a, c, g, or t
atgaacgtcgatccgggaaccatgagcccgttccagcatggcgaggtttttgttacagacgacggcgcggaaaccgatcttgacctggggcattacgagcgttttattgatgaaaacctgaccaagctaagtaatctgacatccggccaagtgtacaggaatgtgcttgaccgtgagcgagctggcggctatcttggcagtaccgttcaggtcattccccatgtaaccggtgaaattaaaaattttatttacgccggggcggaaaaaagccaggcggatgtcctgattaccgagattggcggcacgaccggcgacattgaaagccagccctttctggaggctatccggcagatctcccttgaaaaaggccgcgaaaactgcctttttatccatgtgacattgatcccgtatttgaaagcctcgggtgaacacaagtcaaaacccacacagcactcggtcaaggaactgcgggccattggtatttcacctaacataatcatagcgcgggcggacgagcccataagcgacggtattacggataaaatagcgctcttttgcaatgtgaaacccgattgcgtaatagagaactacactattccttccctgtacgcagcgccgcttcttctccatcaaaacggtctggacaaggtcgtatgccgcgaacttgggattgacgcgccggagcccgatttgaatgagtggagcgtcatggtaaaaaaaatcggagagaaaaagcgggaagtaaatatcgcgattgtcgggaaatatgttcagttgcacgacgcgtatctttccattattgaaagcctgaaccacgcgggcattgaatccggagcgggagtaaacatccaatggattgacagcgagggcgtaacaagcgaaagcgtaggcggactgttacgcggcattgacgggatgatcattcccggcggtttcggcgaaagggggattgagggaaaaatcaccgcctgtcgttacgtcagggaaaacgatataccgtatcttggaatttgccttggaatgcagattgccgtgattgaatttgcgcgtaacgtctgcggactggaacgcgcccattcaagcgagtttgacgagatttcccctcatcgcgtcattgacctgatgccggatcaggccggcatggtcggctccggcggcaccatgcggctgggcgcgtatccgtgtaaaatcacgcagggcacgctgctgcacaagctgtacggcgcggatgaaataagcgaaagacaccgccaccgctttgaattcaacaatgactaccgggaagctctgacgggcaagggaatggttatctgcggcgtgtcgcctaacggcagccttgtcgaggctattgagcttccggatcgccgttttttcaccggggttcagtttcatcccgagttcaagagccgccccaataaaccgcaccctttgtttttgggcctggtaaaagcggcgattaaataa

SEQ ID NO: 64078 - protein, 487 aa, Unknown
  Obtained from environmental sample
  DOMAIN (250)...(466): Peptidase C26
  misc_feature (1)..(487): Xaa is any amino acid
MNVDPGTMSPFQHGEVFVTDDGAETDLDLGHYERFIDENLTKLSNLTSGQVYRNVLDRERAGGYLGSTVQVIPHVTGEIKNFIYAGAEKSQADVLITEIGGTTGDIESQPFLEAIRQISLEKGRENCLFIHVTLIPYLKASGEHKSKPTQHSVKELRAIGISPNIIIARADEPISDGITDKIALFCNVKPDCVIENYTIPSLYAAPLLLHQNGLDKVVCRELGIDAPEPDLNEWSVMVKKIGEKKREVNIAIVGKYVQLHDAYLSIIESLNHAGIESGAGVNIQWIDSEGVTSESVGGLLRGIDGMIIPGGFGERGIEGKITACRYVRENDIPYLGICLGMQIAVIEFARNVCGLERAHSSEFDEISPHRVIDLMPDQAGMVGSGGTMRLGAYPCKITQGTLLHKLYGADEISERHRHRFEFNNDYREALTGKGMVICGVSPNGSLVEAIELPDRRFFTGVQFHPEFKSRPNKPHPLFLGLVKAAIK

SEQ ID NO: 64079 - DNA, 1266 bp, Unknown
  Obtained from environmental sample
  misc_feature (1)..(1266): n is a, c, g, or t
ttgcccgcgacaggggcagtcccggggatattgtccagtttggcgcgcttgttacggcgctgtcttccactatcggcacggggaacattatcggagtgggaaccgccatcgcgtcgggcgggccggggcgcgctgttgtggatgtggcttaccggcgtgttcggcattgctaccaagtactccgaaagcttgatcgctgtaaaatacagagtaaaaaacaataaggggatgatgatcggcggagcgatgttcgccctggaacggggactgaagatgaagtggctcggggttctttttgccgcctttacctcattagccgcctttggaattggttcgggagttcagtccaacgcggtggcaaccagattatttaacgattttggcattgcccactgggtttcaggattaatcatttcggtcctgacggcgctcgtaatcatcggcggcctgaaatggattgccagggctgctcaggctctggttccctttatgacaattttctatattctcgggtgtattattattctggtaatcaaccatcatttcatcattccggccattcaactggtctgtacaaacgcctttaacatcaaatcgctgggcggagggttcctgggcttcgccgccgtccaaatgatgaccgccgcccgttacggagtcgcccgcgggcttttctccaatgaatcgggcatgggttcggctcccatcgttgccgccgcggcccagaccaaaaacccggtacggcaggctctggtttccagtaccggaactttctgggatacggtgattatctgcttattgacaggcctcgtaataatcagctcagtccttgcccatcctgaattgcgtattgacggcttggagggcgatacccttacccgtatagcgtttagccaaatccccatgattggaaactttatccttactttcgggcttatcacattcgccttttcaacccttctgggctggtcatactacggcgaaaaggggctggaatacctttttggaaccaggagtatcgctctataccgttttgtctatgtaatcgtggcttatctggggacggttctttccctggacatagtatggaatatcgcggacgcgctgaacgcgcttatgaccattcccaacctgattgcggtactgctcctttccggggttataacggcggaaacgaaaaagtatctggaaggcggccgcattgaagatgtggatgatacgcccattccgacgaggaaacaattaacagatggggaagaaaattag

SEQ ID NO: 64080 - protein, 421 aa, Unknown
  Obtained from environmental sample
  DOMAIN (1)...(407): Sodium:alanine symporter family
  misc_feature (1)..(421): Xaa is any amino acid
MPATGAVPGILSSLARLLRRCLPLSARGTLSEWEPPSRRAGRGALLWMWLTGVFGIATKYSESLIAVKYRVKNNKGMMIGGAMFALERGLKMKWLGVLFAAFTSLAAFGIGSGVQSNAVATRLFNDFGIAHWVSGLIISVLTALVIIGGLKWIARAAQALVPFMTIFYILGCIIILVINHHFIIPAIQLVCTNAFNIKSLGGGFLGFAAVQMMTAARYGVARGLFSNESGMGSAPIVAAAAQTKNPVRQALVSSTGTFWDTVIICLLTGLVIISSVLAHPELRIDGLEGDTLTRIAFSQIPMIGNFILTFGLITFAFSTLLGWSYYGEKGLEYLFGTRSIALYRFVYVIVAYLGTVLSLDIVWNIADALNALMTIPNLIAVLLLSGVITAETKKYLEGGRIEDVDDTPIPTRKQLTDGEEN

SEQ ID NO: 64081 - DNA, 372 bp, Unknown
  Obtained from environmental sample
  misc_feature (1)..(372): n is a, c, g, or t
atggaaacgttcagtcatataattaagatgctcaatgactggctttgggggcctccgcttttaattctgctgattggaacacatctttatttgaccttcaggacggggttcatccagcgtaaactggggctgggaataaaacttacgtttgcccgcgacaggggcagtcccggggatattgtccagtttggcgcgcttgttacggcgctgtcttccactatcggcacggggaacattatcggagtgggaaccgccatcgcgtcgggcgggccggggcgcgctgttgtggatgtggcttaccggcgtgttcggcattgctaccaagtactccgaaagcttgatcgctgtaaaatacagagtaaaaaacaataa

SEQ ID NO: 64082 - protein, 123 aa, Unknown
  Obtained from environmental sample
  misc_feature (1)..(123): Xaa is any amino acid
METFSHIIKMLNDWLWGPPLLILLIGTHLYLTFRTGFIQRKLGLGIKLTFARDRGSPGDIVQFGALVTALSSTIGTGNIIGVGTAIASGGPGRAVVDVAYRRVRHCYQVLRKLDRCKIQSKKQ

SEQ ID NO: 64083 - DNA, 1083 bp, Unknown
  Obtained from environmental sample
  misc_feature (1)..(1083): n is a, c, g, or t
atgaaacgcgcgggagatgaaatagtaaaagtagcggtttctgtaaaatccacccatgacgtattaaatgtttttagagcgtccagtacctttataaaacaggacaaaattcttatttgcatggggcattacggcatttactcaagaatccttgccgaaagattcggttcatttttaacttactcaagcgcgttatctgaaaacgtcatccccggcgctcccgggcaaatggatgtccgcgagctttcagagttataccattttaaaaaaataacaaaagatacaaaaatatacggggtaataggcaacccgttaaaatccagcgtaagcccctggtttttcaatactatttttaaccttgaaaacgcggattgcgtgtatgtcccattccctgttacagacattaatgattttatggatctcgcggatggattggaaatacagggactttccgttaccgtaccttacaaggaagaggttcttccctatattgaggaaaaatcggcaattgtacaatcaatcggcgcgtgcaataccatgtaccgcaaccgcagaggagacgcatggtacggcgataataccgattatgccggttttacaatgtcactgttgaattttttaggcagaaaagatttaaaacggcagaaaattacaatagtaggcgccggaggcgtgtcgcgcgccgtagcggctgaaatatataaaatgggcggcaaagcccttatattaaaccgtaccgttcataaagccgcaaatatcgcatcacgctataatttccgctggggaggattggataatcatggaatagaacttatatccaaatataatgacataataatccaaaccacttcagtcggtatggaaggctatgacgaatctgacccgttggaactctatgaattttcagggaaagaatcggtaatggatttgatttatactcccgcacagactccttttttaaaaagagccgcgtccgcgggatgcagaacgctcaacggttatgatatggtaatacgtcaggcttgtctgcagtacgcaaacttttttgacagagaaataccaaaaacacatttatcacattaa

SEQ ID NO: 64084 - protein, 360 aa, Unknown
  Obtained from environmental sample
  DOMAIN (199)...(320): Shikimate / quinate 5-dehydrogenase
  misc_feature (1)..(360): Xaa is any amino acid
MKRAGDEIVKVAVSVKSTHDVLNVFRASSTFIKQDKILICMGHYGIYSRILAERFGSFLTYSSALSENVIPGAPGQMDVRELSELYHFKKITKDTKIYGVIGNPLKSSVSPWFFNTIFNLENADCVYVPFPVTDINDFMDLADGLEIQGLSVTVPYKEEVLPYIEEKSAIVQSIGACNTMYRNRRGDAWYGDNTDYAGFTMSLLNFLGRKDLKRQKITIVGAGGVSRAVAAEIYKMGGKALILNRTVHKAANIASRYNFRWGGLDNHGIELISKYNDIIIQTTSVGMEGYDESDPLELYEFSGKESVMDLIYTPAQTPFLKRAASAGCRTLNGYDMVIRQACLQYANFFDREIPKTHLSH

SEQ ID NO: 64085 - DNA, 432 bp, Unknown
  Obtained from environmental sample
  misc_feature (1)..(432): n is a, c, g, or t
atgaaagaatggcaaagtttagcacataccaagtgggaatgtaagtatcatgtggtaatcgtaccaaagtaccggaagaaagtattgtatggccggctgagaaaacgaataggagagattctaagagagctatgtcgttgcaagggcatagaaatcttggaagcacatgcaatgccggatcacatacatatgtgtatatcggtaacgccgaagtacagtatagcgatgacaatcggttatctgaaggggaaaagtgcaatcaagattcacaaggaattatcaagacgggagccgaaagggtttacgaacaagaacttttggacgagaggttactgtgtcagtactgtagggttagatgaaaaacaaatccgagagtacatacagaaccaagaaaaactggagatgggagaacaaggttatctcaatttttag

SEQ ID NO: 64086 - protein, 143 aa, Unknown
  Obtained from environmental sample
  DOMAIN (19)...(123): Transposase IS200 like
  misc_feature (1)..(143): Xaa is any amino acid
MKEWQSLAHTKWECKYHVVIVPKYRKKVLYGRLRKRIGEILRELCRCKGIEILEAHAMPDHIHMCISVTPKYSIAMTIGYLKGKSAIKIHKELSRREPKGFTNKNFWTRGYCVSTVGLDEKQIREYIQNQEKLEMGEQGYLNF

SEQ ID NO: 64087 - DNA, 852 bp, Unknown
  Obtained from environmental sample
  misc_feature (1)..(852): n is a, c, g, or t
atgagcggcaatgggtttcctttatacaaaaaaatggccagttttctttcttctaaatcaggtgaaaagatattattaataaatgccgttgagtgtgatcctgcattgttacatgatgagtggttattaaagaatcggtataatgaaatattacagacaattaattatttgacaaagataattagtctggataaagtggttttagcgacaaagaataaatttatcaaatcaaatgacgaaattttaataaaggttgttccgccaagatacccaatgggagaagaacatttccttatacggcaggcattgagtattccattgaaaaacaatgaaattccggcggagcatggaattttaacattaaatattcaaagtatttaccaaatcggtaagatattaaataaatgttatgacaacggtcgttttataactattgctgatttgacgaaggcatctgcaagaatcgcatatgtatatccaaatgataatatattagaatttttaatgcgtgcttttggtaaaatggataataaatatttttatcgtggttatggtgtgatggagtgtacggaagcaaaagaagcagacgctttttccaatcatgaaaattttgccgcttatgcggataaattgggattagatgacaaaaataaatgcaagcgatgcggtagttgtacaagaagatgtcctgttaaaattaaagtttctaaaattattcaatcaattgataataataaggttatggattacaatatttatgatcctaaacggtgtattaaatgtggaagctgtacatttttttgtcccgcatataaaaatgtttccggttatattaggaaattaaataattaa

SEQ ID NO: 64088 - protein, 283 aa, Unknown
  Obtained from environmental sample
  DOMAIN (212)...(235): 4Fe-4S binding domain
  misc_feature (1)..(283): Xaa is any amino acid
MSGNGFPLYKKMASFLSSKSGEKILLINAVECDPALLHDEWLLKNRYNEILQTINYLTKIISLDKVVLATKNKFIKSNDEILIKVVPPRYPMGEEHFLIRQALSIPLKNNEIPAEHGILTLNIQSIYQIGKILNKCYDNGRFITIADLTKASARIAYVYPNDNILEFLMRAFGKMDNKYFYRGYGVMECTEAKEADAFSNHENFAAYADKLGLDDKNKCKRCGSCTRRCPVKIKVSKIIQSIDNNKVMDYNIYDPKRCIKCGSCTFFCPAYKNVSGYIRKLNN

SEQ ID NO: 64089 - DNA, 561 bp, Unknown
  Obtained from environmental sample
  misc_feature (1)..(561): n is a, c, g, or t
ttgaatacgattaatttgcctttgaatagcgatgatattctcaagtttcatataggagatgtaatttatctttctggaaaaattgtaactggaagggacgaggtttatcacagggtcgtagaaggggatattatgccacccgtggatttgaaagaaatggctatttaccatgcgggacccattgtaaaaacaacggggcaaaatcatgagcttatttctattggaccgactacttccatgcgtatggaaaaatgggcggcggattttattaaaaaaacaggtgtaaaagtgatgatcggcaagggcggtatgggggagaaaacaacagccgcctgccgcgagttaggcgcaattcattgtgtttatccgggtggttgcgctgtgttaggcgctagtcagatagagggcattgaaaattgctactgggaagaatttggaatggcggaatgtctttgggtgatgaagactcaagcgtttggtccgctgattgtcagcattgacgcgcatggggggaatctgtttgcggagaacgctttattttatgctggaaaaaagcaataa

SEQ ID NO: 64090 - protein, 186 aa, Unknown
  Obtained from environmental sample
  DOMAIN (1)...(180): Fumarase C-terminus
  misc_feature (1)..(186): Xaa is any amino acid
MNTINLPLNSDDILKFHIGDVIYLSGKIVTGRDEVYHRVVEGDIMPPVDLKEMAIYHAGPIVKTTGQNHELISIGPTTSMRMEKWAADFIKKTGVKVMIGKGGMGEKTTAACRELGAIHCVYPGGCAVLGASQIEGIENCYWEEFGMAECLWVMKTQAFGPLIVSIDAHGGNLFAENALFYAGKKQ

SEQ ID NO: 64091 - DNA, 891 bp, Unknown
  Obtained from environmental sample
  misc_feature (1)..(891): n is a, c, g, or t
atgagcgaaaaagaaaaatttataacgcttattgaaaagtttatcgcgcttactgcggtcaggttaagcgacgatgttatggctcggctggaagagatgcgtaaagccgaggactcgccactgcaaaaatcaatctacgacagttattttgaaaatctggcgttagctgaaaaacttaaccgcccatgttgtcaggatacggggatgcttcaattttttgtaaaagctggaaccgaattcccacatttggacattacggcggaagtattaacagaagcggtacgcagagcaaccgtaagcgtccccctaagaccgaacgctgtcaactattttgatgaaaacaatacaggcgacaacacgggagagcgaactccgtggatagactgggaaataattcccggctcaaaagaaatggaaataactctgtacttttcaggcgcgggttgcagtcttccggcgcaagcgaaagtttttaagccgtcggacggactggaggcgattattccctttgtgtacgaaattgtgtcagggccgggaatcaacgcctgtcctcccctgcttgtgggaattggtcttggacacaacatcgaaaacgcatcggtactttcaaaaaaggcaattttaaggccattaggcagtaaacacccccatcccaaaggagccgagcttgaaaaacagctaacagacggtcttaacagtcttggcatgggcgctcagggattgaggggcaatcatgcggtgatgggagtgcatattgaatcgtcggcaagacacacggcgacaagggcgtgcgcagtaaatgtttcgtgttacacgctaaggcgcggaattatccgccttaataacgatctctcttatgaactgacaggttttaagggagcgaaaatttaa

SEQ ID NO: 64092 - protein, 296 aa, Unknown
  Obtained from environmental sample
  DOMAIN (7)...(280): Fumarate hydratase (Fumerase)
  misc_feature (1)..(296): Xaa is any amino acid
MSEKEKFITLIEKFIALTAVRLSDDVMARLEEMRKAEDSPLQKSIYDSYFENLALAEKLNRPCCQDTGMLQFFVKAGTEFPHLDITAEVLTEAVRRATVSVPLRPNAVNYFDENNTGDNTGERTPWIDWEIIPGSKEMEITLYFSGAGCSLPAQAKVFKPSDGLEAIIPFVYEIVSGPGINACPPLLVGIGLGHNIENASVLSKKAILRPLGSKHPHPKGAELEKQLTDGLNSLGMGAQGLRGNHAVMGVHIESSARHTATRACAVNVSCYTLRRGIIRLNNDLSYELTGFKGAKI

SEQ ID NO: 64093 - DNA, 984 bp, Unknown
  Obtained from environmental sample
  misc_feature (1)..(984): n is a, c, g, or t
ttggctgcgcttgttaatgttcttcttgatacggcattgtctcatgtaaacagcattatgcccggttacacgcatcttcaaagggcgcagcctgtaacgcttggacatcacctaacggcatggtgcgccgcgctggaaagggattattcccgctttagcgacgctcttaaaagatttgacgagtgtcctttgggaagcggagcgttagccgccactaccctgccgctggatcgcaagaccgttgcgcaggatttggggttcagcaggttatgcgtcaattccatggacgccgtggcggatcgtgattttgttttggaactttcaagcgcctgcgctgtcactatggttcatttatcgcgtttttgtgaggacgtggttctgtgggcaagcgaagaatttaaatttatcgatcttgccgaatcatggagtacgggttcctcgatcatgcctcagaaaaaaaatcccgactttgcggaacttatccgtggaaaaacaggacgaacaacgggcaaccttgtagctcttttcactctgctaaagggactgccttatgcgtataacaaagatttacaggaagataaagaaaatcttttcgacagcatcgacacattgaacgcctgccttcgtatgtttacgggaatgattaaaagcgctcaatttaacattaagcgaatgaaagcggcttgcacgggcggctttttggaagcgacagacacggcggaatatcttgtccgcaaggggcttcctttccgagccgcccacgaaaccgccgcttctttggtgcgtgattgtatcgaggcgggacataaacatatttcagcgttgacgctcgcgcaattaaagaaacgctccaaacattttgaagaagacatttacaaactgataacgccgtcagcctgcgtaaaagcgcgcaagataccggggggacccgcgctaagagaagtccgcagacagataaaactgttacgcaaaaaaattaaataa

SEQ ID NO: 64094 - protein, 327 aa, Unknown
  Obtained from environmental sample
  DOMAIN (1)...(170): Lyase
  misc_feature (1)..(327): Xaa is any amino acid
MAALVNVLLDTALSHVNSIMPGYTHLQRAQPVTLGHHLTAWCAALERDYSRFSDALKRFDECPLGSGALAATTLPLDRKTVAQDLGFSRLCVNSMDAVADRDFVLELSSACAVTMVHLSRFCEDVVLWASEEFKFIDLAESWSTGSSIMPQKKNPDFAELIRGKTGRTTGNLVALFTLLKGLPYAYNKDLQEDKENLFDSIDTLNACLRMFTGMIKSAQFNIKRMKAACTGGFLEATDTAEYLVRKGLPFRAAHETAASLVRDCIEAGHKHISALTLAQLKKRSKHFEEDIYKLITPSACVKARKIPGGPALREVRRQIKLLRKKIK

SEQ ID NO: 64095 - DNA, 831 bp, Unknown
  Obtained from environmental sample
  misc_feature (1)..(831): n is a, c, g, or t
gtggcttccagttaccgggaattcgatgagaatataacgccgtatatgttcaataaatacaatgaaattaccgcggcggttgattattccctggttgaaaagaaagtccgccttgacgaactgcttggcgaaaccggaaaagaattgatcagggcggcgcatgaactttccaaaggggaaagccggagctttaaccacgataataaaatttttctggtaaattccattccggaaatggaatggtatatggcggtaagttatccgctgccggggatgttttcgcttaaccgcgccatgaataccgtatttttctgcatgcttttccttatccttttcctgttcatcgttatcaatattttcatcgcccgtctggaaaacgcgatggcggaacataacctgcagctgcttgaggcgaaccggaaggcggaatccgcttcgcaggcaaaaagcgattttctcgcgaagatgagccacgaaatccgcaccccgatgaacgccattaccggcatggcggaactgctgctgagggaggaactgtcaggcgaggcccttgactacgcgcaggacatcaaacaggcggggaataatctcgtttcgataattaatgacattctggatttttcaaaaatcgaagccggtaaactggaaatcatccccatcaactatctgctttcatcattgatcaacgacacggtcaatattatccgcacgcggcttatggaaaaacccctgcggttctttaccaatatagacgggactattcccaacagccttatcggggatgaaacgcgcatgcgccagattctccttaaccttttgtccacgcggtaa

SEQ ID NO: 64096 - protein, 276 aa, Unknown
  Obtained from environmental sample
  DOMAIN (148)...(213): His Kinase A (phosphoacceptor) domain
  misc_feature (1)..(276): Xaa is any amino acid
MASSYREFDENITPYMFNKYNEITAAVDYSLVEKKVRLDELLGETGKELIRAAHELSKGESRSFNHDNKIFLVNSIPEMEWYMAVSYPLPGMFSLNRAMNTVFFCMLFLILFLFIVINIFIARLENAMAEHNLQLLEANRKAESASQAKSDFLAKMSHEIRTPMNAITGMAELLLREELSGEALDYAQDIKQAGNNLVSIINDILDFSKIEAGKLEIIPINYLLSSLINDTVNIIRTRLMEKPLRFFTNIDGTIPNSLIGDETRMRQILLNLLSTR

SEQ ID NO: 64097 - DNA, 780 bp, Unknown
  Obtained from environmental sample
  misc_feature (1)..(780): n is a, c, g, or t
ttgtcgattatggaacataaacgggaaggcaaacaggtatggctcaagataatcgtagctgataccggaaagggaattaaaaagtcagatcaggataaacttttcggtgaatttgtccaggtagatataagcaagaaccggggcatagaggggaccggccttgggcttgcgatcacacggcggctctgccttcttatgggaggggacattacactggaaagcgaatacggcatgggaagcgctttcacggcggttattccccagggtataaattctcccgaacctttcgccgccgtaacggaaccggaaaaaaagaaaactcttgtttatgaacgccgggccatctacgcgcaggcggtatgctggtctttggaaaacatgaacgttccttattgttttgtaaaaaaacatgaagatttcgccgcggccttataccgtgaagaatggttttatgtgttttccggctatgggctttatgaaaaaatcaagccgttaatggacaagccggacagcgctttcgcgggcgggaaaaaaccgtctctcgcgctgatggtagaatggggaaccgaagtttacatacccggcatacgctttttgtctataccggtacagtccttgtctattgccaacactctgaacggcatggctgacagcaaagattatatcaaaaactccggtataaacctcttcacttttccccgtgcgcggattcttgtggtggatgacattgcgactaacctaaaagtagtcgaaggtctccttgccccttacaaactataa

SEQ ID NO: 64098 - protein, 259 aa, Unknown
  Obtained from environmental sample
  DOMAIN (1)...(89): Histidine kinase-, DNA gyrase B-, and HSP90-like ATPase
  misc_feature (1)..(259): Xaa is any amino acid
MSIMEHKREGKQVWLKIIVADTGKGIKKSDQDKLFGEFVQVDISKNRGIEGTGLGLAITRRLCLLMGGDITLESEYGMGSAFTAVIPQGINSPEPFAAVTEPEKKKTLVYERRAIYAQAVCWSLENMNVPYCFVKKHEDFAAALYREEWFYVFSGYGLYEKIKPLMDKPDSAFAGGKKPSLALMVEWGTEVYIPGIRFLSIPVQSLSIANTLNGMADSKDYIKNSGINLFTFPRARILVVDDIATNLKVVEGLLAPYKL

SEQ ID NO: 64099 - DNA, 801 bp, Unknown
  Obtained from environmental sample
  misc_feature (1)..(801): n is a, c, g, or t
atgatactcatggatcacatgatgcccgaaatggacggcatagaaacggtagacaagattcgggctttaggcactgactacgccaaaaaaataccgattattgcccttaccgctaacgccataaagggaacggagaagttgttctatgatcatgattttcaggcgttcataaccaagcccatcgacttagtggagatggacacggtcttaaggaaatttgtgcgcgacgaatccgtcgccgaagttgtaatcaacgacgagctttccgagaccgaccttaagattgaaaagctggttatagaaatacccggagtggacacgaaaaaaggcctttcactgtacgccggagcgaagaagatttatctgcccatgcttcgctcttacgcccacaacacgccgaaggtgctggaaaaactaaattccgtctcggcggagaatttgcacgactacgttatcaccgtacacgggctgaaaggcacgagcgccgccattggcgcggagcacattcgcaccgccgctttggaacttgaaaatctttcaagggccggcaacttgcagggcgttctcgccaaaaacgaccagctcattgtaaacactaaaatagttgtcgccagcgttcaggagtggctggataaaaatgacattcgcgaggttaaaccgcacctgaaagcgcccgacagggaacttcttgccaaactgcgggaaaactgtgaaagttacgacatggacgccgtggaagacgccatgaaagaactgaaaaagcggaatatgatgaagagggcgatcttgttacttggatga

SEQ ID NO: 64100 - protein, 266 aa, Unknown
  Obtained from environmental sample
  DOMAIN (123)...(198): Hpt domain
  misc_feature (1)..(266): Xaa is any amino acid
MILMDHMMPEMDGIETVDKIRALGTDYAKKIPIIALTANAIKGTEKLFYDHDFQAFITKPIDLVEMDTVLRKFVRDESVAEVVINDELSETDLKIEKLVIEIPGVDTKKGLSLYAGAKKIYLPMLRSYAHNTPKVLEKLNSVSAENLHDYVITVHGLKGTSAAIGAEHIRTAALELENLSRAGNLQGVLAKNDQLIVNTKIVVASVQEWLDKNDIREVKPHLKAPDRELLAKLRENCESYDMDAVEDAMKELKKRNMMKRAILLLG

SEQ ID NO: 64101 - DNA, 1599 bp, Unknown
  Obtained from environmental sample
  misc_feature (1)..(1599): n is a, c, g, or t
atggttgactttgttacccttcagaaaatcatggctgaccgcctggaaacggatcgggcgatacagagcgttgaggcagtaggcccgactctggaggcggccatttccgatgccgccgcccttttggatattccgacgcgccggcttgagtacgagattattgaaaaaggcaccggcgggttttgggggatgggtaagaaagactggcgcatccacgcctacgagaagatcagctcagtcaggaaaaaacaacagaaagcccaaattgatgaagaggccgccgccaatgtcgttgtcattgaggataaggacggcgaggcatttgtccatttcgagtccggaggggctgtaatgctcaaggttacacccgcttcaggccagggaaaaaaggctacggaattatatgccatgcgttttctgcaagaccgcaaagctgataatattgacgaggctctggtccgcaagacagtcaatgaagcagccgacgtttatgtcaaggttgcctcatttgatcaccactcgtacaatgacagcgtagtgtatgtggaaatcagcgaagatcagatgaccgcttttctcaggacaactcctcccggtgaaggcggttgcgatgtttcttatgatacctatatcgctacgcttaaacaaaacagggtagtccacggattaaaagaagatttcntgatgcattttgtagatcagcccgtatacaacgaaaatgtcacgatcgcggaaggaaccaaacctgtaaacggcaagaatgcttatatacagtataattttgaaactgatgaacgcaaggtaaggttgcgggaaggaagcgacggaaaaatagatttcaaagaacttaacattatccagaatgtggtcgaaaaccagcccgtggcggtaaggatacctccggaaaaaggcgtttcgggctggacagtaaccggaaaaatgattgacgcagaggatggcaaggacatcagtctgcctgttggagcgaatgtccatgtatcagaagatggcagcactattcttgcgaccataaacgggcaggtagtgatgagcaacggccttgtcaatatcgagcctgtgtatacggttgaaaacggagtgaatctaaaatcggggaatattgatttccgcggaaccgtaatggttaacggcgatgtcgaagacgggttcttcataaaggctgacggcaatatcgaggttaacggaagcgttggcaaggcggacatggatgcgcagggtgacatcatcatccaccagggtataaacggaaaaggagagggccgcatccgttgcgggaaatccctttgggcgcgttttatacagaatgtcaatatccagtcgggatctatggtggttgcttcggacggaataatcaactcaaatattgttgccaataacaggataatatgccaggggaaacgggcggctataatgggaggaaactgcgcgccggcgaggaaattaacgccaaaacacttgggaatcccacaagcggcacggaaacagtctgcgaagtcggttatgatccaaagagcaaggaagaaatggaaaggctccaaatggagaaggataacgcgaataagcttcttgaggatatga

SEQ ID NO: 64102 - protein, 532 aa, Unknown
  Obtained from environmental sample
  DOMAIN (178)...(530): Protein of unknown function (DUF342)
  misc_feature (1)..(532): Xaa is any amino acid
MVDFVTLQKIMADRLETDRAIQSVEAVGPTLEAAISDAAALLDIPTRRLEYEIIEKGTGGFWGMGKKDWRIHAYEKISSVRKKQQKAQIDEEAAANVVVIEDKDGEAFVHFESGGAVMLKVTPASGQGKKATELYAMRFLQDRKADNIDEALVRKTVNEAADVYVKVASFDHHSYNDSVVYVEISEDQMTAFLRTTPPGEGGCDVSYDTYIATLKQNRVVHGLKEDFXMHFVDQPVYNENVTIAEGTKPVNGKNAYIQYNFETDERKVRLREGSDGKIDFKELNIIQNVVENQPVAVRIPPEKGVSGWTVTGKMIDAEDGKDISLPVGANVHVSEDGSTILATINGQVVMSNGLVNIEPVYTVENGVNLKSGNIDFRGTVMVNGDVEDGFFIKADGNIEVNGSVGKADMDAQGDIIIHQGINGKGEGRIRCGKSLWARFIQNVNIQSGSMVVASDGIINSNIVANNRIICQGKRAAIMGGNCAPARKLTPKHLGIPQAARKQSAKSVMIQRARKKWKGSKWRRITRISFLRI

SEQ ID NO: 64103 - DNA, 558 bp, Unknown
  Obtained from environmental sample
  misc_feature (1)..(558): n is a, c, g, or t
atgccaggggaaacgggcggctataatgggaggaaactgcgcgccggcgaggaaattaacgccaaaacacttgggaatcccacaagcggcacggaaacagtctgcgaagtcggttatgatccaaagagcaaggaagaaatggaaaggctccaaatggagaaggataacgcgaataagcttcttgaggatatgaagcctaatatactgacccttacaaacctcaagaagcagaggaacagccttcctgacgataaagaagccattttgcaggatctgataaccaaacgggatatgctgactaccgacctgaaaaagatagatgaaggcctgaaaaaaattcaggaatacctcaacagcctgaaagcgcgcggcagggtatcggcttcacaaaagatatatccgggggtaaagataataatccgcgacgccagggaagaggttcatgccgaacacaaagccgcgaccttcatcctggaggccggccttatcagagcgacgaaatacgaagagccggatgacagaacgaagaagggaccggatggctatacaaccaattga

SEQ ID NO: 64104 - protein, 185 aa, Unknown
  Obtained from environmental sample
  misc_feature (1)..(185): Xaa is any amino acid
MPGETGGYNGRKLRAGEEINAKTLGNPTSGTETVCEVGYDPKSKEEMERLQMEKDNANKLLEDMKPNILTLTNLKKQRNSLPDDKEAILQDLITKRDMLTTDLKKIDEGLKKIQEYLNSLKARGRVSASQKIYPGVKIIIRDAREEVHAEHKAATFILEAGLIRATKYEEPDDRTKKGPDGYTTN

SEQ ID NO: 64105 - DNA, 429 bp, Unknown
  Obtained from environmental sample
  misc_feature (1)..(429): n is a, c, g, or t
atgccgaacacaaagccgcgaccttcatcctggaggccggccttatcagagcgacgaaatacgaagagccggatgacagaacgaagaagggaccggatggctatacaaccaattgatctccagacgctttttacccagcttgacaaggtggcgaaaacgcagagcgaccagcgtgaaggcgcggctctgcatcaggctattcagggcgcgcagcttcaacgtaaaacggaagatcaaattaaagcggtaaaccaggcgcagaatatgggcgaggacggcgccgagaaagtaaaagacagggggccgcaggcgcacgacggcaatggcaagggcaaaaaaaaagaaaacgaaaaacctcagcaggaggaaacaaaggcggcagttattcatgacctcagcctgggcagaaaaattgacataagcctgtaa

SEQ ID NO: 64106 - protein, 142 aa, Unknown
  Obtained from environmental sample
  misc_feature (1)..(142): Xaa is any amino acid
MPNTKPRPSSWRPALSERRNTKSRMTERRRDRMAIQPIDLQTLFTQLDKVAKTQSDQREGAALHQAIQGAQLQRKTEDQIKAVNQAQNMGEDGAEKVKDRGPQAHDGNGKGKKKENEKPQQEETKAAVIHDLSLGRKIDISL

SEQ ID NO: 64107 - DNA, 1455 bp, Unknown
  Obtained from environmental sample
  misc_feature (1)..(1455): n is a, c, g, or t
ttgaccgaaacctttacgaagaatttaacacaagagaagtttcactttcttatcttcctgcgggaatggcaaaggggctttctttcttccttaataacttcccctacggctgttcggaacaaattaccagcgcggttttccccgttcctgtatccacagcttttcagggagctcgggtatacaaagacgcaggcggacgaggggattaaccgcgcaatcggcatacttcaggcgcggatgaaggaaaacggcgctataggcgtgtggacttcccgttcctatgacgacccgctgattactgtctacgcggcccattttcttaccgaagcccggggcgcgaattattatgttccttcccaactgatgagtaagctgcttcaggcctgcaggaatatcgcttccggttcgggaacaagcctctatgattttaccaaccgctcttacgcgatttatatcctgaccctgaacgaaattgtcactacccagttgattgaatcgcttaaaaaggacatgaacaaatacgatgaagcgcaaacagggctcgccgggctctaccttgccggaagttacgcgctattgcagaaaacatcggacgcttccgccattctgggtaaaatcaaacgggcgatgacgaaagacggcagtttccgtttcatcgacaatcttatgtatcattcaatataccttaatattgtctcaaggcatttcccgcagcgtttgcgcgacatatccgagtccttgttagttgacatggcgcaacagatggaaatacagtcatataccacaatttccgccagccacgcccttatggcgattgacgcttacctgaaagcggtcccgaccgccgaaacaggcagttttaccgtacaggaaatttcaaaagacaaccagcgcaaggacttaaagcccgccggaaccgccgtgttcagtgttccattctccgccaacgcagcgaaaatcagcgtggagaacaaggataaccttaatctgttttatcagataacggccgccggttttgaccgcgaactgccggcaaaggaaacaaagaacggcatcgaaatttacagggaatccttgacagttcgggaaaaccgaccaagttctttcaaagtcagagacattatancggtaaaactcaacttcgacagcctttccaacatcgagtaccgggatgtcgctattgtcgatttatgccccgcgggccttgaaacggaaattgattcggtgcggcaagccgacaatcaatcgtcggcatggaaagccgactatgttgatatccgcgaagacaggctggtaatttacggctctgtaagcggaaaagccgcaagtttcagttaccgcgcaagggctatcaacgccggtacttttaccactccgccactttttgccgaagcgttatacgacaaatcagtatgggctttacgtccgcaggcttcgattaagattacgaaatga

SEQ ID NO: 64108 - protein, 484 aa, Unknown
  Obtained from environmental sample
  misc_feature (1)..(484): Xaa is any amino acid
MTETFTKNLTQEKFHFLIFLREWQRGFLSSLITSPTAVRNKLPARFSPFLYPQLFRELGYTKTQADEGINRAIGILQARMKENGAIGVWTSRSYDDPLITVYAAHFLTEARGANYYVPSQLMSKLLQACRNIASGSGTSLYDFTNRSYAIYILTLNEIVTTQLIESLKKDMNKYDEAQTGLAGLYLAGSYALLQKTSDASAILGKIKRAMTKDGSFRFIDNLMYHSIYLNIVSRHFPQRLRDISESLLVDMAQQMEIQSYTTISASHALMAIDAYLKAVPTAETGSFTVQEISKDNQRKDLKPAGTAVFSVPFSANAAKISVENKDNLNLFYQITAAGFDRELPAKETKNGIEIYRESLTVRENRPSSFKVRDIIXVKLNFDSLSNIEYRDVAIVDLCPAGLETEIDSVRQADNQSSAWKADYVDIREDRLVIYGSVSGKAASFSYRARAINAGTFTTPPLFAEALYDKSVWALRPQASIKITK

SEQ ID NO: 64109 - DNA, 1587 bp, Unknown
  Obtained from environmental sample
  misc_feature (1)..(1587): n is a, c, g, or t
ttgttccgccagccaaacggcgtatacaaataccagtctattcaaaaagagtatcccgtatcctcgcggcggattaccataccggtttccggtcttgagtacagcctgcccacaaacacccccggcgagtttaaactttcgatcacgggaccgggtgatttggaatacaattcgcttaatttcagcgtcgccggatcggacaatattcagcggagccttaaccgcaccgcggaactggaaattaccatgaataaaaacgatttcagaaacggcgaggaaattgagttgatgatcaaagcgccatacgcgggagcgggacttatcacaattgagcgcgacaaagtttacgcctaccgctggttcagaagcggaggcgaaacttccatgcagactatcaccgttccggctgaacttgaggggaacgcgtatgtgaatgtccagtatttaagatcgcaggattcgcctgaaatatttatgtctcctttaagttatggcgcggtttctttttccatcagccgcgagaaccgtaccaaccagatcacgctggacattcccgacgaggcaaaaccaggcgaagattttgtgataaaatattccaccgcccggcagggaaagataatcgtttacgcggtagacgaaggtatacttcaacttgcggcttatcagactcccgatcctttggcgttctttttcagaaaacgcgcactggaggtaaagacagcccaaatactcgacatggttctgccccgctattccgtcgttcaaaaccttgcggcaatgggcggcggcagcggttttgacgagcttgcgcgaaacttaaatccgtttaagcgcaggcaaaatgctccggtggcctattggtcagggatcattgacgccggcccggaacctaaagaactgcgttaccgcgtgccggattattttaacgggacattaagggtaatggccatcgccgtaagcgacagtacgctcggagccggagaagacaggtctctggtccgaggcactttcattatttcacctaacgcaccgatgatggcggctccgggagatgaatttgacgtttcgcttaccgtaaccaacaaccagaagggcgcgggggcgaacggaagggtgcgtatcagggcgattccttcggaacatctttccattacaggtaacagcgaatttaacctgcaaatcgcggaaggccaggagcaaaccctgaatattccggttaaagccctgggcccgcttggcgcggcgcaaatacgctttatcgcctccaacaacaatgaaagttcggaactttccgcatatatgagcgttcgtcccgcggttccgtaccgcgtatccctttattcgggagcgataaggaataaaagcgccgaaacggtaattgaccgaaacctttacgaagaatttaacacaagagaagtttcactttcttatcttcctgcgggaatggcaaaggggctttctttcttccttaataacttcccctacggctgttcggaacaaattaccagcgcggttttccccgttcctgtatccacagcttttcagggagctcgggtatacaaagacgcaggcggacgaggggattaa

SEQ ID NO: 64110 - protein, 528 aa, Unknown
  Obtained from environmental sample
  DOMAIN (75)...(221): Alpha-2-macroglobulin family N-terminal region
  misc_feature (1)..(528): Xaa is any amino acid
MFRQPNGVYKYQSIQKEYPVSSRRITIPVSGLEYSLPTNTPGEFKLSITGPGDLEYNSLNFSVAGSDNIQRSLNRTAELEITMNKNDFRNGEEIELMIKAPYAGAGLITIERDKVYAYRWFRSGGETSMQTITVPAELEGNAYVNVQYLRSQDSPEIFMSPLSYGAVSFSISRENRTNQITLDIPDEAKPGEDFVIKYSTARQGKIIVYAVDEGILQLAAYQTPDPLAFFFRKRALEVKTAQILDMVLPRYSVVQNLAAMGGGSGFDELARNLNPFKRRQNAPVAYWSGIIDAGPEPKELRYRVPDYFNGTLRVMAIAVSDSTLGAGEDRSLVRGTFIISPNAPMMAAPGDEFDVSLTVTNNQKGAGANGRVRIRAIPSEHLSITGNSEFNLQIAEGQEQTLNIPVKALGPLGAAQIRFIASNNNESSELSAYMSVRPAVPYRVSLYSGAIRNKSAETVIDRNLYEEFNTREVSLSYLPAGMAKGLSFFLNNFPYGCSEQITSAVFPVPVSTAFQGARVYKDAGGRGD

SEQ ID NO: 64111 - DNA, 1029 bp, Unknown
  Obtained from environmental sample
  misc_feature (1)..(1029): n is a, c, g, or t
ttgccggatatcgatcctgattttgtacgagagacgcaaatacttatcactaccgctttactgcttggaatggatcacgcttcgcgcaaattggctgcggcagatgaagaaataccgcccttgccttttgagaaagcggtctcttttatgaaaggcagaattcccatgacaaaagcggaattttacgataaaaagcttgagcaaaaattacggttcagagcgttcactgtctcacggcttacacagcttgattacatcgaagcggcaaggggcaggcttatttccgctatagaaaaaggcgatggctacgcttcaacttggaaggatattaaagccatcgctgcggaagacggcgcgattaatttcaaaaccggttattgggaaaacgtttatcgcacaaatacgcaaacggcatacaccgccgggaaacttatgcagttcaaagataatccgccgcctgcatggcgattgcttattgttgatgatgatcgcacatcagatatttgccgcgggcttatgagggacggaaaacaatctcttactatggcatcagatcatccgttctgggaaactttcgggtacccaccttatcacttccagtgtaggactggattgcaggcagtttataaaagcgagatcggtcagggaacaatcgttgaaaatccttcgatgaaaattctcagaaaagagtttatgccgatggacggttttggaggaaatccgctggataaggagagctggtggatgatgacggatactatggcgaagcgagcatcaaaatacggcattgatggagatattattttaatagcaaataatctaggaatgaaaaactatgcaatgaatattcttaatggttttgaaacactatatatttctgactctggtggttatgttaaaaaagcagaacgagctactcctggtacaaaaaatgttaaaaaaaataaaatatgggttgaaactgatgaattaggggctgctaaaagagcggcagatgcaggaaataaggtgtttttctgcctaaagtaa

SEQ ID NO: 64112 - protein, 342 aa, Unknown
  Obtained from environmental sample
  DOMAIN (87)...(206): Phage Mu protein F like protein
  misc_feature (1)..(342): Xaa is any amino acid
MPDIDPDFVRETQILITTALLLGMDHASRKLAAADEEIPPLPFEKAVSFMKGRIPMTKAEFYDKKLEQKLRFRAFTVSRLTQLDYIEAARGRLISAIEKGDGYASTWKDIKAIAAEDGAINFKTGYWENVYRTNTQTAYTAGKLMQFKDNPPPAWRLLIVDDDRTSDICRGLMRDGKQSLTMASDHPFWETFGYPPYHFQCRTGLQAVYKSEIGQGTIVENPSMKILRKEFMPMDGFGGNPLDKESWWMMTDTMAKRASKYGIDGDIILIANNLGMKNYAMNILNGFETLYISDSGGYVKKAERATPGTKNVKKNKIWVETDELGAAKRAADAGNKVFFCLK

SEQ ID NO: 64113 - DNA, 687 bp, Unknown
  Obtained from environmental sample
  misc_feature (1)..(687): n is a, c, g, or t
atgttcaaaaaagcggggtatgagtactggctgcaggcgactgaaaaattctcggttaaaaccattctggcgctctttacggccgacggcgacgataaaagaattcaagataccgccaaacgcatcgcggcggaacttctggctatcgaatcgggttcagccgcggcggttgggggcgttaactccatccacgaggtcggcatgtcgggggaactcatcgggtttgcttccctggtagacgcctgcgacacacagattagttacggccttacggggcaaactatcgcgaccagtaagaccgaaggcggcagcctcgccctgggcgaagtgcaagccgacctgttttatgaggacgccaaaggcatcgctctcgaagggcaggcgctcattcagagaattatcaattgggcggtagagattaacggctatggtaatgtggtcccgccgcttgccgaggtggacaccgaacgtaaagccagttttgaccaggttatgaaggcaatagaacacggcgtcgccgtttcccgtgacgccatgtacaaccgctacggtttaccgcgcccgcgcgatgatgaggactcttttattaaagaaactcccgcgagccttaccctgtctgattcaaacaaatctgaaaacggtaaaaaaaaagccctacaaccaaaaccgatgatacggattatgtaa

SEQ ID NO: 64114 - protein, 228 aa, Unknown
  Obtained from environmental sample
  misc_feature (1)..(228): Xaa is any amino acid
MFKKAGYEYWLQATEKFSVKTILALFTADGDDKRIQDTAKRIAAELLAIESGSAAAVGGVNSIHEVGMSGELIGFASLVDACDTQISYGLTGQTIATSKTEGGSLALGEVQADLFYEDAKGIALEGQALIQRIINWAVEINGYGNVVPPLAEVDTERKASFDQVMKAIEHGVAVSRDAMYNRYGLPRPRDDEDSFIKETPASLTLSDSNKSENGKKKALQPKPMIRIM

SEQ ID NO: 64115 - DNA, 1272 bp, Unknown
  Obtained from environmental sample
  misc_feature (1)..(1272): n is a, c, g, or t
gtgtctaaaccgaacggttcccttcaaaacaaactgcttcccatcagccgccgcgatatggacgagcgcggctgggaagaatgtgatttcatctttgtttcaggcgatgcctatgtagaccacccttcttttgcggcggcgattttatgccgcgcgttggaagcggcgggttttcgcgccggaataattccccaacctgattggaaaaatccctcatcatataccgtattgggacgacctcgtcttgcttttctggtcggcgcgggcaacatggactccatggtcgcgcattacaccgccgcaaaacgcaaacgctccgacgacgcgtattcgccgacaggaaaaaacggtctgcgtcccgaccgcaccactttggtttatgtcgagggaatacggcgcgcgtataaggatgtgccggtaattatcggcgggattgaggcaagccttcggcgctttgcccattatgattactggtcagatactgtgcgccgctcgattctgcttgattcaaaagcggatatgctggtctttggaatgggagaaaagccgctgctgaatatagcgcgccggttagcggagggtcaaagtattggcagtataatcaatgagaggggaacttgcgtccgtgttcatggaagagcggctatagagcaatggaaagacgtttgttttctgccaaaatatgaagcggtaaaagagaaggacgatgtttctttgcgcgcttacgccgaacattttatggtacagaaacaaaatgccgatccgttaaccgcaaagccgctggtagaagaaaatgacggagatcgctgggttattcaaaatccccccgctctgcccctttcaacaaaagaactggataatttgtacgagcttcccttcacgcgaaaagcacacccaatgtatgacgcgcaaggcggcatagacgcgcttaaagaagtttctttctcattaatttcaagccgtggttgtttcggcggctgttctttttgcgcgattacgggtcaccaggggcgggctgtcgtcgggcgcagcaaggaaagtctgctccgtgaggcgcgcgctcttgccgcgcgtcccgacttcaagggatacattcacgatgtcggcggacctaccgccaactttttccgacccgcctgcgaaaagcacgagcgcggcggtttttgcgcaaacagggaatgtctgtatcctcaagcctgttcacagttaaaagcggatcacgatcagtatctaaaaacattaaaagcattgcgcgaaattcccgggtattaa

SEQ ID NO: 64116 - protein, 423 aa, Unknown
  Obtained from environmental sample
  DOMAIN (12)...(316): Radical SAM N-terminal
  misc_feature (1)..(423): Xaa is any amino acid
MSKPNGSLQNKLLPISRRDMDERGWEECDFIFVSGDAYVDHPSFAAAILCRALEAAGFRAGIIPQPDWKNPSSYTVLGRPRLAFLVGAGNMDSMVAHYTAAKRKRSDDAYSPTGKNGLRPDRTTLVYVEGIRRAYKDVPVIIGGIEASLRRFAHYDYWSDTVRRSILLDSKADMLVFGMGEKPLLNIARRLAEGQSIGSIINERGTCVRVHGRAAIEQWKDVCFLPKYEAVKEKDDVSLRAYAEHFMVQKQNADPLTAKPLVEENDGDRWVIQNPPALPLSTKELDNLYELPFTRKAHPMYDAQGGIDALKEVSFSLISSRGCFGGCSFCAITGHQGRAVVGRSKESLLREARALAARPDFKGYIHDVGGPTANFFRPACEKHERGGFCANRECLYPQACSQLKADHDQYLKTLKALREIPGY

SEQ ID NO: 64117 - DNA, 402 bp, Unknown
  Obtained from environmental sample
  misc_feature (1)..(402): n is a, c, g, or t
ttggaaaccttgtgccaattccatgtgagcggtcagttaaaagtcgccccggagcatatttgcgaaaatgtgcttgaagcgatgggcaaatgcccccactcaaattatgaacagtttagggaagattttaccgctgtaaacaaacggctcggtttgaagcaatatctactaccctactttataacttcccacccgggcgcaggcatgaaggaagcggaagaactttcgcgatatttaaaaaaaacgcgttttgcccccgaacaaacgcaggacttttatcccaccccgggaaccatgtctaccgtgatgtatcacacaggactagaccccagaacaatgaagcctatatatgtcgctaagggaagcaaagaaaaacgcaagcaaaaagatttgcttcattaa

SEQ ID NO: 64118 - protein, 133 aa, Unknown
  Obtained from environmental sample
  misc_feature (1)..(133): Xaa is any amino acid
METLCQFHVSGQLKVAPEHICENVLEAMGKCPHSNYEQFREDFTAVNKRLGLKQYLLPYFITSHPGAGMKEAEELSRYLKKTRFAPEQTQDFYPTPGTMSTVMYHTGLDPRTMKPIYVAKGSKEKRKQKDLLH

SEQ ID NO: 64119 - DNA, 414 bp, Unknown
  Obtained from environmental sample
  misc_feature (1)..(414): n is a, c, g, or t
gtgatgcggttaaagcaggaactgaaaatccctgtagccggaaacggggacatatccacgcccgaggaacttgtccgccgagccgacggctcatgcgacgcggttatggttggacgggcggcggtgcgtcagccgtggatttttgcccatgcgcgaaagattgaagacgcggattccggttccgcaaaactttatcccatccccaatatcgaagaaaccggacttcgttttctggaacttttaaccaaatatcagccgcctgattttcatttatccagggcaatgcgatttttcggttttttctgcgacaacttaaaatgggggaattatcttaaaacccggttgaatagacaaaaaacgctctcagatattgagatagtttggaaagagtattttaaagagaatgaggaataa

SEQ ID NO: 64120 - protein, 137 aa, Unknown
  Obtained from environmental sample
  misc_feature (1)..(137): Xaa is any amino acid
MMRLKQELKIPVAGNGDISTPEELVRRADGSCDAVMVGRAAVRQPWIFAHARKIEDADSGSAKLYPIPNIEETGLRFLELLTKYQPPDFHLSRAMRFFGFFCDNLKWGNYLKTRLNRQKTLSDIEIVWKEYFKENEE

SEQ ID NO: 64121 - DNA, 948 bp, Unknown
  Obtained from environmental sample
  misc_feature (1)..(948): n is a, c, g, or t
atgggtagccgctatacattttccgaatcgcgctccggagaaattgttccttctattgttattgcgccgggaaacagcaagccccttcactcgttaatcgatcccaagcgcgaagcggaacgccttgtttcgaccatacctcaggacacaggctttgtgatatttcttggcctgggcggcggctttgccccactggccgcgctttccaataccgacgcgcaagttgtcgtcatagattttgacaagaacagcattcaagaactgttatccgcaaaggattatacgccgcttctcaacaacgggcgtttcagcctattaacagattttacgttagacgaaataaaagcctttatccttgccaactacaaccccgccctgcatggcggcattaaagttatccccctgcgaacaagaaccgaacaagattttgaaaagttcaaccgggccgccgagatcattcaggaggcgatagaagccgcctccgcggatttcagcgttcaggcgcacttcgggctccgctggttttccaacattatccgcaacataaaaaacgccggaacagcggatcaaagttttcacgctaaaaaaatcagggaggcggcgattgcagcggcgggcccttcgcttgacgggcagataacttcccttgccgaatataaatcacgcggagtattcataatctgttccgacaccgccctgcccgtacttttgcacaatagcattgaacccgacgcggttgtctctatcgactgccagcacatcagccactatcattttttcggctgtaacatacaaaacatccctcttgttctggacatcgcaagccctcccctgctctcgcgcttttcatcttcgccttttatttctcgggcgggcatccgcttgcgcagtatctttcatcaaactggcggtcatttttacagcttgacacatcgggagggaatgtaa

SEQ ID NO: 64122 - protein, 315 aa, Unknown
  Obtained from environmental sample
  misc_feature (1)..(315): Xaa is any amino acid
MGSRYTFSESRSGEIVPSIVIAPGNSKPLHSLIDPKREAERLVSTIPQDTGFVIFLGLGGGFAPLAALSNTDAQVVVIDFDKNSIQELLSAKDYTPLLNNGRFSLLTDFTLDEIKAFILANYNPALHGGIKVIPLRTRTEQDFEKFNRAAEIIQEAIEAASADFSVQAHFGLRWFSNIIRNIKNAGTADQSFHAKKIREAAIAAAGPSLDGQITSLAEYKSRGVFIICSDTALPVLLHNSIEPDAVVSIDCQHISHYHFFGCNIQNIPLVLDIASPPLLSRFSSSPFISRAGIRLRSIFHQTGGHFYSLTHREGM

SEQ ID NO: 64123 - DNA, 1164 bp, Unknown
  Obtained from environmental sample
  misc_feature (1)..(1164): n is a, c, g, or t
gtgcaggattttctggaaagggaagtccctgaaacggacgccgcgaacataaaaataatcgaatggcggccttcgatgaattactacaagcaagcctatgtaagcctgttttcttttgtcgttgattttattaaacgtactgacgccggaaaaagaacgacggcggcttttgggagaaaatgggtcggtaattttttcagaaacctcgggaatgtacggaaaaccatcctttacaaaactatggacatgcctgtaatcattacaggttccggtccatgtcttgaaaaagcgatgcccgctgttcaaaaaaagcaggaagagtgcttaataattgccgcttcttcttccgtaatggcgctctcccattacggcgtcagggcggacattgtgatgagtactgacggcggaaattgggcgctaaggcacatttatccctttttcagaaaacaagacaatgttgaaaacaacgttgaaaatgacgcgtcttttgccgtaaatctttgcgcggcgcttccctcccaatgcgcgggaagacccatgttaataatgaacgatggaagtttctggcagaacgttatcctgcatgaactttcgataccctccgtaatcatcgctcaaaaaggaaccgttaccgcctgcgccgtagaactcgctcttgcgcttacaagcggaaatatttatcttgcgggcttagaccttgccgtaaaagacatgagaagccatgtgcggccttatgcttttgatcacctgctttatgacaaagcaagccgttttatgcccgtttattcgcaaagttatataaggtcaaaccaaattcaggaaggcggaagccttgacatttacgcggcatggtttaagaaacagcttgcatcgtggccgaaacggatcttctctatcggcggcggcagcgaagtatttgaaaacgcgttttgcgaagagaaggcaggcaaaaaaaacacttgcgaatattttaaggccgagggcgtaaaaggcgaacccgcgaattttcgcgaaagaagcgccgccgccctgattgccgccttgaaaaacggcgaatacgcggaaaatctaaaaaaagaacttacgcccctgcttttcccgaatgaaaaagatgtaacggaaagtcaattggaaaaagcaattaacgaggcggcttatgggtag

SEQ ID NO: 64124 - protein, 387 aa, Unknown
  Obtained from environmental sample
  DOMAIN (64)...(233): Protein of unknown function DUF115
  misc_feature (1)..(387): Xaa is any amino acid
MQDFLEREVPETDAANIKIIEWRPSMNYYKQAYVSLFSFVVDFIKRTDAGKRTTAAFGRKWVGNFFRNLGNVRKTILYKTMDMPVIITGSGPCLEKAMPAVQKKQEECLIIAASSSVMALSHYGVRADIVMSTDGGNWALRHIYPFFRKQDNVENNVENDASFAVNLCAALPSQCAGRPMLIMNDGSFWQNVILHELSIPSVIIAQKGTVTACAVELALALTSGNIYLAGLDLAVKDMRSHVRPYAFDHLLYDKASRFMPVYSQSYIRSNQIQEGGSLDIYAAWFKKQLASWPKRIFSIGGGSEVFENAFCEEKAGKKNTCEYFKAEGVKGEPANFRERSAAALIAALKNGEYAENLKKELTPLLFPNEKDVTESQLEKAINEAAYG

SEQ ID NO: 64125 - DNA, 699 bp, Unknown
  Obtained from environmental sample
  misc_feature (1)..(699): n is a, c, g, or t
ttggacatgatttctcttgatgatctcaatatttccatgnatgactcagataatacatctgcagacgtaccatctgaagactttgcgtctgaggacttaatgtccttggatgcgccatctgaagatatatcagccgcggattcatcatctatcgatgattcatcatctatcgatgatgttgacattgatgtcgccatgccgctgggcgatgtaaaagatgacgggcaggacttgtcgcttgacagcggatttcagagcggcggcgggacaactattgacgatcaaatgccggaaggttttgaagatgaacttcaggacgctcctgttcagattgaagaagaaacggaaaccattgaagaagccgaacccgcggacgctgatttatcacttgaggaacccgcggaagatattgataaaatagaagaaataggcgagatagacgacgttgacgaaattgttgacatggatgaaaaacccgcaaaagcggcaagcgccccggcaagtgcgccatcaagcccgcctgcgcaaaaaggcggaaatttccagattccttcggacttaaaaagagaacttaaaaatattctcagttacatggaccagctccttgagtcactgccggaagaaaagatcgaggaattcgcaaagtcggaatattttgattcctacaagaaactctttaaagatttggggctggtataa

SEQ ID NO: 64126 - protein, 232 aa, Unknown
  Obtained from environmental sample
  misc_feature (1)..(232): Xaa is any amino acid
MDMISLDDLNISMXDSDNTSADVPSEDFASEDLMSLDAPSEDISAADSSSIDDSSSIDDVDIDVAMPLGDVKDDGQDLSLDSGFQSGGGTTIDDQMPEGFEDELQDAPVQIEEETETIEEAEPADADLSLEEPAEDIDKIEEIGEIDDVDEIVDMDEKPAKAASAPASAPSSPPAQKGGNFQIPSDLKRELKNILSYMDQLLESLPEEKIEEFAKSEYFDSYKKLFKDLGLV

SEQ ID NO: 64127 - DNA, 1290 bp, Unknown
  Obtained from environmental sample
  misc_feature (1)..(1290): n is a, c, g, or t
atgaaaaaccgttacggcattaccccttggggttcctggtttatcgatgtgcttaacagctacggattggaaggccgagtggacaggggcagaacctacgccaacaccggcaaggttctttcccttaagatggaaaaaggcagagtggtcgcgaaagttaagggcaactaccgcccttcttatcaggttgaaattatctttccgcctctaaaagaagcggaactcgtttacaagatgatagaagacgatccgcttttgcttgcccacattgcttcgggagagctgcctgaaactttcttgcagaagctaaagcgaagaaacatcagccttatcccgcggcattggggggaaatgaaaaaatcctgcacctgccctgacgagtacggcaacccctgcaagcaccttgcggctctttattacatcattgccagggagatagacacagacccccatgtgcttttccggctccggggcatggatctgtcgaagcgtttcggcgaagcggcggttcagcggatcctgccgcctttcacgataagttatagtaccgataggaaagagaacagctctccttttccggtagtgttggaggaaattccaaattgtgtgaatctaatcacagcgttgcttccttctgctccggttttttgccaaagggactatgccgttgttatggcggagttttaccaccgcacagcccattacagggcatgggaatctgtggaagcccaacctgaaacggagcataatttttcccactcggtctggacaattcactgtcccgaacatacccccggagctaaactgtttttggacgcccaggacattgacggcaacatcaggcgttttacaccctgcgatgcctttgaatactttgtgcgcttttcatcggaagacggaacatcgtcctacagttttcttttttatctttttaagtttctgaacctgttatgctccgcaagcgcgtttattccatatgtgcttgcgaagggcaaaacgctaagaatcatctggcgcccttttgaaactctgactgatgtaaagaaaatacttgacgcaataggctctattgaatgtggaatgttaaacacagtaaacggaagaagcattgtcgatttgcttgcctcggcgtttttaaacgagtgggtttacaggcgctctttgtcgtttcgtaatagtttcggcaggcagagcggaggtcaggaatacctggaattactcaacctgtttttttacgaaacagaaattgatgtttccactcctgcaaagcgcagcctcgtgccgatctga

SEQ ID NO: 64128 - protein, 429 aa, Unknown
  Obtained from environmental sample
  DOMAIN (104)...(143): SWIM zinc finger
  misc_feature (1)..(429): Xaa is any amino acid
MKNRYGITPWGSWFIDVLNSYGLEGRVDRGRTYANTGKVLSLKMEKGRVVAKVKGNYRPSYQVEIIFPPLKEAELVYKMIEDDPLLLAHIASGELPETFLQKLKRRNISLIPRHWGEMKKSCTCPDEYGNPCKHLAALYYIIAREIDTDPHVLFRLRGMDLSKRFGEAAVQRILPPFTISYSTDRKENSSPFPVVLEEIPNCVNLITALLPSAPVFCQRDYAVVMAEFYHRTAHYRAWESVEAQPETEHNFSHSVWTIHCPEHTPGAKLFLDAQDIDGNIRRFTPCDAFEYFVRFSSEDGTSSYSFLFYLFKFLNLLCSASAFIPYVLAKGKTLRIIWRPFETLTDVKKILDAIGSIECGMLNTVNGRSIVDLLASAFLNEWVYRRSLSFRNSFGRQSGGQEYLELLNLFFYETEIDVSTPAKRSLVPI

SEQ ID NO: 64129 - DNA, 684 bp, Unknown
  Obtained from environmental sample
  misc_feature (1)..(684): n is a, c, g, or t
ttgataggtcaaggcggcgctattgtaaatgtaaatgatatttcttccccttaccggctttataccaatgaagacatggaacgaaaactaatttacgtcgaaacatccagaggctgcccttttaactgcgaattctgtctgggctcctcaagaaacctgcctgcggcgcaaaaaatacgagagtttccgcttgagcctttttttgcggacatggaaactttaattaaaagaggcggcaaaacttttaagtttttagaccgtacctttaacctggacattgatcgggcgcggaggataatcgagttttttcttgtaaaaataaacgacaggcccttttgcgtccatttcgagatggttccttcccgctttcccgaatcgctaaaagaactgctttaccgttttcccgccgaaaccctgcgcttagaacttggtatccaaaccttcaacacgcagaccagggcgctgcttcaaatgtcagggaacatagatgaagagattaaaacactggaattcctaagagagaaaaccaatgcgatacttcacgtcgatcttattgccggacttccgggtgaaaaccttgcttctttcaaaagcggttttgatcggctctggcaggtcttatcaaaacaggaaagcgaagataaaacgccaggcgggcttttgaaattcaactgggcatcttaa

SEQ ID NO: 64130 - protein, 227 aa, Unknown
  Obtained from environmental sample
  DOMAIN (33)...(203): Radical SAM superfamily
  misc_feature (1)..(227): Xaa is any amino acid
MIGQGGAIVNVNDISSPYRLYTNEDMERKLIYVETSRGCPFNCEFCLGSSRNLPAAQKIREFPLEPFFADMETLIKRGGKTFKFLDRTFNLDIDRARRIIEFFLVKINDRPFCVHFEMVPSRFPESLKELLYRFPAETLRLELGIQTFNTQTRALLQMSGNIDEEIKTLEFLREKTNAILHVDLIAGLPGENLASFKSGFDRLWQVLSKQESEDKTPGGLLKFNWAS

SEQ ID NO: 64131 - DNA, 591 bp, Unknown
  Obtained from environmental sample
  misc_feature (1)..(591): n is a, c, g, or t
ttgggtgtagacctggacggggttgttggggatttttacggcgcactgcgaaaaatcgcagccgcctggcttaataaaccccttgaagcccttacagccgatgtcagctatggatttgaagaatggggccttgatgaattcggcggctatgaaaggcttcaccgtttcgctgtaacgcagcgtaaccttttccgcgacatggaacctatcaaagacgcgccagccatcctgcgaaaactttcaaacatgaatatcaggattcgcattatcacccatagactttttctaaaatacaaccataaagccacaatcacgcagaccgtagattggcttgattcctgggacattccctattgggatctttgtttcatggccgacaagggcgctgtgggggctcacatctatatcgatgattcccctgacaacattgtgcgcctgagggaaaatggctgcaaaacaattattttttccaattccaccaacctggacctgaacggtcccagagcggacaattggcaggaagcagaacgccttgtaatggaagccttaaaggaatgggaaaccggtaccagaaatatgttcgctccctga

SEQ ID NO: 64132 - protein, 196 aa, Unknown
  Obtained from environmental sample
  DOMAIN (3)...(178): 5' nucleotidase, deoxy (Pyrimidine), cytosolic type C protein (NT5C)
  misc_feature (1)..(196): Xaa is any amino acid
MGVDLDGVVGDFYGALRKIAAAWLNKPLEALTADVSYGFEEWGLDEFGGYERLHRFAVTQRNLFRDMEPIKDAPAILRKLSNMNIRIRIITHRLFLKYNHKATITQTVDWLDSWDIPYWDLCFMADKGAVGAHIYIDDSPDNIVRLRENGCKTIIFSNSTNLDLNGPRADNWQEAERLVMEALKEWETGTRNMFAP

SEQ ID NO: 64133 - DNA, 603 bp, Unknown
  Obtained from environmental sample
  misc_feature (1)..(603): n is a, c, g, or t
atgtctgatacggacgcaaacaacaaacaatcgaactactccatcgcgtcgcgctccgcgaagggcggggtgcttttgattgtccgtcaggtgtgcgtgcaggtgatgaatttcgccgggataatatttttggcgcggtacctatccatcgccgagtacgggttctacgggatagttttctttcttttttccttcatcgttaacttcggcgacgtcggtttttcggcgagccttctgcggcagcgcgaggagccgtccaatgcggactactccgtcgtcttctccgctcaggtaacgctggcggttctcgccggaaccgtgttttatcttttatcgccgttactgtgcggaatttacaaacttccgcagtcgtacaccatacacttcttgttgatctcgctttcgcttatcgcgacggcgttccgcagcgccccgaccgcgcggcttgagcggcatttggatttcaagtggttgtcgattattgagatctttcaagcgtttgtctacaacggcatggccgcggcgatggcgtttcacggctacgggccgctcagctttttttcttcgctgctgtgcagggtgctgatcggcaccatactgtaa

SEQ ID NO: 64134 - protein, 200 aa, Unknown
  Obtained from environmental sample
  misc_feature (1)..(200): Xaa is any amino acid
MSDTDANNKQSNYSIASRSAKGGVLLIVRQVCVQVMNFAGIIFLARYLSIAEYGFYGIVFFLFSFIVNFGDVGFSASLLRQREEPSNADYSVVFSAQVTLAVLAGTVFYLLSPLLCGIYKLPQSYTIHFLLISLSLIATAFRSAPTARLERHLDFKWLSIIEIFQAFVYNGMAAAMAFHGYGPLSFFSSLLCRVLIGTIL

SEQ ID NO: 64135 - DNA, 798 bp, Unknown
  Obtained from environmental sample
  misc_feature (1)..(798): n is a, c, g, or t
atgccgatacctaaaaagatacattattgttggctgagcggtgaagaaataccggaaaatataacaagcaccatgtcaacatggaaaaaagctatgccggagtacgaatatgttttatgggataaaaacaagttcgacataaattcagttgtgttcacacaagaagcttgcagcgtgaaaaaatgggcatttgccgccgattatataaggatttacgctctatattcggaaggcggcatatatatggacacggatgtatatgtcaaaaaaccttttgacgagtttttgagcaacgattttttcacgtcattggaatatcataaagaatcggcaataaaagataaagcctttgagctattgaatgacgacggtacgataaaagacaatcgagacagaatatttacacgatcaataggaatacaggccgccgtgttgggcggtataaaaggccacccgttcttaaaatcatgtctggattggtataatgacaaacattttattttaccggacggaacctattacgacaaaatcatttcaccggcaatatacgccgatgttatgatagaatacggatttaggtacaaagacgaactgcaatccctgaaaaacaatatggttgtttatccttcgtcggtattcgccggaagcatatccgaagctaaagacgaatcatacgcaatacactattgtaccggcggctggagggatgagacggtattgagcaaaatcaaaaagggattggcaaacaacaacctattacgaaaattgctaggtaaaaaaccatatacaaagaaatga

SEQ ID NO: 64136 - protein, 265 aa, Unknown
  Obtained from environmental sample
  DOMAIN (26)...(109): Glycosyltransferase sugar-binding region containing DXD motif
  misc_feature (1)..(265): Xaa is any amino acid
MPIPKKIHYCWLSGEEIPENITSTMSTWKKAMPEYEYVLWDKNKFDINSVVFTQEACSVKKWAFAADYIRIYALYSEGGIYMDTDVYVKKPFDEFLSNDFFTSLEYHKESAIKDKAFELLNDDGTIKDNRDRIFTRSIGIQAAVLGGIKGHPFLKSCLDWYNDKHFILPDGTYYDKIISPAIYADVMIEYGFRYKDELQSLKNNMVVYPSSVFAGSISEAKDESYAIHYCTGGWRDETVLSKIKKGLANNNLLRKLLGKKPYTKK

SEQ ID NO: 64137 - DNA, 975 bp, Unknown
  Obtained from environmental sample
  misc_feature (1)..(975): n is a, c, g, or t
atgtctctcgtatcaatagtaatcgtcaactggaacggcgccgaagtcctgccggagtgcctgcggagcctgctcgggctgaatcataaggatatcgaaatagtcattgtcgataacgcctcaaccgacgactctatagacgtcgtccgcaaaatttgcggcgataaagcgaaggtggttcatcttgaaaaaaacgtcggttttgccgccggggtaaacgtaggggtcgaaaacgccgccggggagttcatcgctaccttgaataacgatatgatcgtggagccgtcatggttagaccagccgctggagttgcttgaggacaaatcggttgggattgtgagctgtcggcagatgaactactacgaccgttccaaagtcgacggcctctatcactgtatatccaaagaactgacgtttatgccgttcggtacggggcgcggattcggcgacggcaaattatttgcaaagcaaggctatgtcataagcgcgaacggcggctcggccataataagggcggaaacaattagggcgataggcggttatgacgccgaatttttcggctacatggaagagacggatttttgtctgcgggcctttatgcgcggctggcgctgcgcgtatgccccgaatgcggtcgtatatcacatggacgggtttacattcaaaaaaaacagggagcgtcaatactatttccgtgaacgtaaccgcgtttggtttctttataaaaatattccgacgtgggatatttttaagcggttgccgtacatacttatcatggaactacgcgttatcagatggttcatagtgaaggccaaaaatccgcgtctttacttgaagacaagatttgacgctttacgcgggctgagacgctatcgccgaaccagaaaagaaaacgttgcgctgttcaaagagaaaagggcggagttctaccggtttgagaggttgaaaaagattgattttacgaatgtgggttag

SEQ ID NO: 64138 - protein, 324 aa, Unknown
  Obtained from environmental sample
  DOMAIN (5)...(179): Glycosyl transferase family 2
  misc_feature (1)..(324): Xaa is any amino acid
MSLVSIVIVNWNGAEVLPECLRSLLGLNHKDIEIVIVDNASTDDSIDVVRKICGDKAKVVHLEKNVGFAAGVNVGVENAAGEFIATLNNDMIVEPSWLDQPLELLEDKSVGIVSCRQMNYYDRSKVDGLYHCISKELTFMPFGTGRGFGDGKLFAKQGYVISANGGSAIIRAETIRAIGGYDAEFFGYMEETDFCLRAFMRGWRCAYAPNAVVYHMDGFTFKKNRERQYYFRERNRVWFLYKNIPTWDIFKRLPYILIMELRVIRWFIVKAKNPRLYLKTRFDALRGLRRYRRTRKENVALFKEKRAEFYRFERLKKIDFTNVG

SEQ ID NO: 64139 - DNA, 648 bp, Unknown
  Obtained from environmental sample
  misc_feature (1)..(648): n is a, c, g, or t
atgatcagatggccgagtacattttcccttcttgtggacgacggcgcaattccggaagtgccgattttcgtagactcgcctatggcgactaacgcgacgacgatttttcaggttcaccccgaatgttacggcgaagaaataaaacaggcttttattaaacaccataaaaacccgtttggttttaacagcctgcattttgtaacaagcgtggatgagtcaaaggccttaaacgatcataaggggccgcttataataatttcggcggacggaatgtgcgaagccgggcgcatacagcaccaccttatccacaacatacaggatccgaacacaacgattatgaccgtaggctacatggcggaaaacactcttgggcggcgaatacgcaaccgtgaaaaagaagtaaagattcacggcgaatggtttaagttaaatgcgcatgtcgaggaaattaacgcgttcagcgctcatgccgattattttgaaatactggaatggcttaaagcgcttgacacatcgcgcttaaaaaagatttttctggttcacggcgagaagaaggcgcagaccggtttacaaactcatcttaaaaataacggtttccctgatgtagaaatagtgaagtatgatgagttttatccattagccaaataa

SEQ ID NO: 64140 - protein, 215 aa, Unknown
  Obtained from environmental sample
  DOMAIN (139)...(185): RNA-metabolising metallo-beta-lactamase
  misc_feature (1)..(215): Xaa is any amino acid
MIRWPSTFSLLVDDGAIPEVPIFVDSPMATNATTIFQVHPECYGEEIKQAFIKHHKNPFGFNSLHFVTSVDESKALNDHKGPLIIISADGMCEAGRIQHHLIHNIQDPNTTIMTVGYMAENTLGRRIRNREKEVKIHGEWFKLNAHVEEINAFSAHADYFEILEWLKALDTSRLKKIFLVHGEKKAQTGLQTHLKNNGFPDVEIVKYDEFYPLAK

SEQ ID NO: 64141 - DNA, 474 bp, Unknown
  Obtained from environmental sample
  misc_feature (1)..(474): n is a, c, g, or t
atgaaagaatattttaagtcgtccggagatgtttttaattggttatccgggtttattaatttagagagggggcagactccgaaatgttttagggttgatcgaatggaatttttgacacggatggcgggggatccgcatgggcttgtgccttccattcatattgcgggatctaaggggaaggggtctgtaacggggatgttagcctccatgttggcggcggcgggataccgtgttgggcgttatatgtcgcctcatgttgttgatatacgtgagaggatttgcttaaacgattcttatttcagcgaagatgtttactgcgcggcgggtaatgaactgcgggatattgcggaaagactgcctttggcggcaaatcctctttttgatccgtcaaccgcggacgggtgcgagcctacttattttgagcttttgactctcttctttttcctttgcgccaacacgggaactgtaacgtaa

SEQ ID NO: 64142 - protein, 157 aa, Unknown
  Obtained from environmental sample
  misc_feature (1)..(157): Xaa is any amino acid
MKEYFKSSGDVFNWLSGFINLERGQTPKCFRVDRMEFLTRMAGDPHGLVPSIHIAGSKGKGSVTGMLASMLAAAGYRVGRYMSPHVVDIRERICLNDSYFSEDVYCAAGNELRDIAERLPLAANPLFDPSTADGCEPTYFELLTLFFFLCANTGTVT

SEQ ID NO: 64143 - DNA, 918 bp, Unknown
  Obtained from environmental sample
  misc_feature (1)..(918): n is a, c, g, or t
ttgcgccaacacgggaactgtaacgtaatggttgtggagacgggcatgggggggcggctggattctaccaatgtgattgatccgctgttaagcgtaataactttaatcgaactggaacatacgggctttttgggcgacactatcgcaaagatagcggcggagaaagcgggcattgttaaacggggcaagccgctggttttggcgaagcagagcggagaggctcttgagatttttcaaaaagccgcaaaagaaaaaaacagcccgcttatttattttccggaagcggcagaaatttccaacttaaaaatttctcccgaaggcacgaactttactttccgttcaaaaagcccgctcttccccgccccgctgtctctcttcattcccgtgccgggcaaggtgcaggcggaaaacgccgctcttgccattgccgccgtaaaaaccgccttcccgcaaatcggcgaagacgctattcgtgaggggctgaaaaatttaaaaatccccgcccgctttgaaaagatagctcccgattttataattgacggcgcccacacgccggagagtctcgctctcgcgatagaaaccttttgccaactctacggcgaaggcggcgtactcattttcggctgcgccgccgacaaagacgctaaagcaatggcaagaacagcgcactctcacttcgcgaaaatatttatcaccacccccggaacttttaagacaagcaatccgccgcaagtttacgaagctttcgcgtcgcaaggcgaacgggagaaaacgcgattaatcgctgatacgcgggaggctgtggaggaagcgagggaattccggcgagaaataaattgcgattttggggacagggtcattttacttagtctcagaaatacggaaaattattttaccttgatacattgtaacaaataa

SEQ ID NO: 64144 - protein, 305 aa, Unknown
  Obtained from environmental sample
  DOMAIN (166)...(236): Mur ligase family, glutamate ligase domain
  misc_feature (1)..(305): Xaa is any amino acid
MRQHGNCNVMVVETGMGGRLDSTNVIDPLLSVITLIELEHTGFLGDTIAKIAAEKAGIVKRGKPLVLAKQSGEALEIFQKAAKEKNSPLIYFPEAAEISNLKISPEGTNFTFRSKSPLFPAPLSLFIPVPGKVQAENAALAIAAVKTAFPQIGEDAIREGLKNLKIPARFEKIAPDFIIDGAHTPESLALAIETFCQLYGEGGVLIFGCAADKDAKAMARTAHSHFAKIFITTPGTFKTSNPPQVYEAFASQGEREKTRLIADTREAVEEAREFRREINCDFGDRVILLSLRNTENYFTLIHCNK

SEQ ID NO: 64145 - DNA, 438 bp, Unknown
  Obtained from environmental sample
  misc_feature (1)..(438): n is a, c, g, or t
ttggtaagcgtctttaagatgaggatagaactgcgtcaaatcggcgtgcgcgacgaggcgcgagtccttggcggccttggcgtctgcggcaggggttactgctgccactgtgtttccgacaaactaaaacccgtttccattaaaatggcgaaggatcaaaaactttcgcttaactccgtaaaaatttccggcccctgcggcaggctgatgtgctgtttattttacgaatacaacttctacagcgaacagcagcgcgccctcccccaggaaggcgtaagggtaagcctgaacaacgaatcatggaaaatcacggaagtaaaccccgttacggggcaaataaaattaagctccgacgacggccgcttcatgaccgcctcctccgcccaattcgaaagaaccgaaaaccactggcgcttacgggacgctgtgaagaattaa

SEQ ID NO: 64146 - protein, 145 aa, Unknown
  Obtained from environmental sample
  misc_feature (1)..(145): Xaa is any amino acid
MVSVFKMRIELRQIGVRDEARVLGGLGVCGRGYCCHCVSDKLKPVSIKMAKDQKLSLNSVKISGPCGRLMCCLFYEYNFYSEQQRALPQEGVRVSLNNESWKITEVNPVTGQIKLSSDDGRFMTASSAQFERTENHWRLRDAVKN

SEQ ID NO: 64147 - DNA, 888 bp, Unknown
  Obtained from environmental sample
  misc_feature (1)..(888): n is a, c, g, or t
atggccgagaacatacggataggaagccgtaacggccctttagctctcgcgcagacgcaaatagttatcgatgtcgtcaagaaaactaatcctgatattgactttgaaatcgttaccatcaaaacaaccggcgataagatattggacaagggcttggactctttgggcggcaagggggtgtttaccaaagaactggaacaggcgctggcagacggcggcatagacattgccgtccacagctacaaagatatgccgattgacgaaaatgacgacctgcctatcgtagcgctatccgtcagagaagcgccttttgacgttctggtattacctaaaacatccgccgttcttgataagtcaaaaccggtcggctcttcgagccttagaaggagaatccaattctcaaaactatatgacggggttaagacaaaggctgtgcgcggaaacgtgcctacccgcctgtcaaaattggacgacggcgagtactcggcgttgatactcgcccaagccggtctcaaccgtctttctctgcaagatagaatcacacgtgtattcaccgtcgatgaaatgatccccgccgcctctcagggtattctcgcggttcagggcagacggggcgaggattattcttttcttgacggatttcacaaccgcgaatcggagatcgtatcgatggccgagaggcggttcataaagacattgggcggcggctgttcatcgcctgtcgccgtatatgggcggatagataataatacattattacttacgggaatgtatgttgatcctcatggcaatatcgaaaaaggaaatatcggcggaggtattgataatagcgaacaactcggcgaagcgcttgccgtgcggttacgggagagggcggggcatatatga

SEQ ID NO: 64148 - protein, 295 aa, Unknown
  Obtained from environmental sample
  DOMAIN (220)...(292): Porphobilinogen deaminase, C-terminal domain
  misc_feature (1)..(295): Xaa is any amino acid
MAENIRIGSRNGPLALAQTQIVIDVVKKTNPDIDFEIVTIKTTGDKILDKGLDSLGGKGVFTKELEQALADGGIDIAVHSYKDMPIDENDDLPIVALSVREAPFDVLVLPKTSAVLDKSKPVGSSSLRRRIQFSKLYDGVKTKAVRGNVPTRLSKLDDGEYSALILAQAGLNRLSLQDRITRVFTVDEMIPAASQGILAVQGRRGEDYSFLDGFHNRESEIVSMAERRFIKTLGGGCSSPVAVYGRIDNNTLLLTGMYVDPHGNIEKGNIGGGIDNSEQLGEALAVRLRERAGHI

SEQ ID NO: 64149 - DNA, 1386 bp, Unknown
  Obtained from environmental sample
  misc_feature (1)..(1386): n is a, c, g, or t
gtgctgtatgaccgttttgtgagcgatgatatccttgccgcgattcctgactccgcggaaaagatagacgtcgggaaacacgcgggaaaccaccccgtgccgcaggatactatcaacgctcttttgctggaaaagtccacgcaggggaaaaacgtggtcagattaaaaggcggcgacccgtttgtcttcgcccgcggcggggaagagttggaattattgaccgagaataacatcccctttgaagtcgtgcccggcgttacctccgcaatcgccgccgcaacctacgccgggattcccgtaacgcatagggattatgcctcttcctttcatgtgataacagcccacactaaaaacaacgagccgataagtatcgatttcaacgctctggtgaaattaaacggtacgttgatattcttgatgggagcatcggtaatcgatgatatttgcgaaaaatgcgtttcggcaggtatggacaaagatatgccggctgtcgtcgtggagaacgccgccgcgagcggtcagcgtaaatttttggggactattaccactttgccgcagatcgccggtacaaataatgtgaaatcgccggcagttatcatcatcggtaaggtatgtcgattctcaacccgctacgattggtttgaccgaaagccgctattgggcaaacgcatcattgtcgcgtcgatacaatatgggacatctaaattgtctaacgctcttcgagagctaggttgcgatgtcatcgaaataccaaatttaaagatagtcccgcttatcggccgtgacgatacgttgacgaacaaattaaaaaatatagacgactactcatggcttgtttttacaagccgtgtcggcgtgaatatattttttgattatcttaaagaggcgttgattgatataaggggattaatcaatgttaaaatagcatgtgtcggtatggaaaccgaaaaagaagtgaacaagcgcgggattaaggttgaatacgttccggatgaatacaacggagccgctttggggcgtggtttatctatacttgtgaaaaatggtgaaaaattgcttattgccagagcgaaagatggtgatagagatttgacggatgtattaacggagaccggaatagcgtttgacgatgttccgatttacgaaaaggtcagtaacgataaaacaataagcgcggtcgtaaacgattttgatttcgccgccttcacaagcccgtccgccgtaaaaaattttgccgggatcgcaacgtttatggatttcggcaaggtaaaagccgtgtgtatcggagataagacggcgtcggcggcaagggagtacggaatggaagtttatgtatcggcggaggctacggtcgagagtatggttgaaaagataaaggagctatag

SEQ ID NO: 64150 - protein, 461 aa, Unknown
  Obtained from environmental sample
  DOMAIN (231)...(457): Uroporphyrinogen-III synthase HemD
  misc_feature (1)..(461): Xaa is any amino acid
MLYDRFVSDDILAAIPDSAEKIDVGKHAGNHPVPQDTINALLLEKSTQGKNVVRLKGGDPFVFARGGEELELLTENNIPFEVVPGVTSAIAAATYAGIPVTHRDYASSFHVITAHTKNNEPISIDFNALVKLNGTLIFLMGASVIDDICEKCVSAGMDKDMPAVVVENAAASGQRKFLGTITTLPQIAGTNNVKSPAVIIIGKVCRFSTRYDWFDRKPLLGKRIIVASIQYGTSKLSNALRELGCDVIEIPNLKIVPLIGRDDTLTNKLKNIDDYSWLVFTSRVGVNIFFDYLKEALIDIRGLINVKIACVGMETEKEVNKRGIKVEYVPDEYNGAALGRGLSILVKNGEKLLIARAKDGDRDLTDVLTETGIAFDDVPIYEKVSNDKTISAVVNDFDFAAFTSPSAVKNFAGIATFMDFGKVKAVCIGDKTASAAREYGMEVYVSAEATVESMVEKIKEL

SEQ ID NO: 64151 - DNA, 987 bp, Unknown
  Obtained from environmental sample
  misc_feature (1)..(987): n is a, c, g, or t
atgaaaacaagaacacgcagactgcgcggtagcgaaccgcttaggtgtatggttcgggagacgcggctctccgccaacgcccttatctatccgctcttcgtaagggacggcaagggtattgaagaggaactgccgtctttacccggacagatacgctatagtccggatacgttatcaaaaggcatcgacgccgccctaaacgccggagtacgttcattcctacttttcggcataccggaaccggaagcgaaggatgaaatcggtagcggagcctacgatgaaaacggcgttattcagaaagcgttaagactcgcaaagaaaactttcggtgacgacgcttacctcatcaccgatgtatgtctgtgcgaatacacaacgcacgggcactgcggccttatcaataacggacatattgacaacgacgcgacgctgccactcctttcgcaaacagcaatctctcatgtccgctctggcggcgatatggtcgccccctccggaatgatggacggaaccgtcgccgccataagagacgcctttgacgctgacggttttacggagactccgataatgagttatgccgccaagtacgcttccgccttctacggcccgtttcgcgaagccgccggttcaactcctcaattcggtgacaggaaaacatatcagatggattatcacaacggcaatgaggcgttgaaaaggatagagactgatattgacgaaggggcggatatcgtaatcgtaaaaccggccctcccctgccttgacataatctcttccgcgtcgcggttgataaaaacgccgatagccggttacagcgtcagcggagagtacgcgatgattaaggcgggggcggcttcgggctttatcgacgaatacaagacaatgtgcgaaagcgcggtttccgtttttcgcgccggggcggggatagttatcacatatttcgctaaggagttggcgggggcgattaaagggggggatattgggtga

SEQ ID NO: 64152 - protein, 328 aa, Unknown
  Obtained from environmental sample
  DOMAIN (1)...(322): Delta-aminolevulinic acid dehydratase
  misc_feature (1)..(328): Xaa is any amino acid
MKTRTRRLRGSEPLRCMVRETRLSANALIYPLFVRDGKGIEEELPSLPGQIRYSPDTLSKGIDAALNAGVRSFLLFGIPEPEAKDEIGSGAYDENGVIQKALRLAKKTFGDDAYLITDVCLCEYTTHGHCGLINNGHIDNDATLPLLSQTAISHVRSGGDMVAPSGMMDGTVAAIRDAFDADGFTETPIMSYAAKYASAFYGPFREAAGSTPQFGDRKTYQMDYHNGNEALKRIETDIDEGADIVIVKPALPCLDIISSASRLIKTPIAGYSVSGEYAMIKAGAASGFIDEYKTMCESAVSVFRAGAGIVITYFAKELAGAIKGGDIG

SEQ ID NO: 64153 - DNA, 822 bp, Unknown
  Obtained from environmental sample
  misc_feature (1)..(822): n is a, c, g, or t
gtgggcgggaatcctttgtttatcaacagagccgacggttcacgaatttacgatgtcgatggtaatgaatatattgattacgtctgttcttgggggccgatgattctcgggcataacaatgccgcgattcgagaggcggtaaccgcggccgctcaaaggggaatgagtttcggggcgccgacggaggcggaggtgaaattagcggagaagatcatatcattcgcgccgggcgtagagatggttcgtatggtgaactccggcacggaggcggtaatgagcgcgttgcggctcgcccgtgcctacacggggcggcaaaaaataatcaagtttgaggggtgttaccacgggcacgcggacagtatgcttgtcaaggcgggttccggagcgcttaccttgggtgaaccggacagccccggcgtatcggaaaaggttgcgggcgacacgctcgtcgccgcgtataatgatttagcgggagttgaggagttattaaagaaaaatgacgtagcctgcgtaatcgtggaacctgtcgccgcgaatatgggcgtcgttttgccgaaggatggatttctaaacgggctgaaagaactatccggcgcgtacgggacgctgttggtattcgacgaagtaatcacaggcttccgcctctgtaaaggcggcgctcaggagtactacggcgttgaggcggatttaaccgcttacggcaaaatcatcggcggcgggatgccggcaggggcttacggcggccgaaaagagatcatgagccttgtcgcgccaagcggcccccgtctatcaggcccggaacgctttccggcaatcccatag

SEQ ID NO: 64154 - protein, 273 aa, Unknown
  Obtained from environmental sample
  DOMAIN (7)...(273): Aminotransferase class-III
  misc_feature (1)..(273): Xaa is any amino acid
MGGNPLFINRADGSRIYDVDGNEYIDYVCSWGPMILGHNNAAIREAVTAAAQRGMSFGAPTEAEVKLAEKIISFAPGVEMVRMVNSGTEAVMSALRLARAYTGRQKIIKFEGCYHGHADSMLVKAGSGALTLGEPDSPGVSEKVAGDTLVAAYNDLAGVEELLKKNDVACVIVEPVAANMGVVLPKDGFLNGLKELSGAYGTLLVFDEVITGFRLCKGGAQEYYGVEADLTAYGKIIGGGMPAGAYGGRKEIMSLVAPSGPRLSGPERFPAIP

SEQ ID NO: 64155 - DNA, 732 bp, Unknown
  Obtained from environmental sample
  misc_feature (1)..(732): n is a, c, g, or t
atgcagtgcacaatcatgcaaagagcctctctgcgaagttaccagtccgttggcaataatgtgggtagcgagatgcctgcatatacacttaacttgattgtacatgtttatattgcgaaatgtatcgaaaatcccaaagagggcggacttctgaaaacggtgaaagcaaaactaaggggagcagcccaagaaaccgaatttgtgaaagatattaattataatcccaaagggcagagggaacgcataacctacggcaacggagcaactactaaatacgaatacgatgaaaacaacttcaggctgacaaggctatttaccactcgcagcaacggcacagatgcgttgcaggatttgaactacacgtacgaccagatggggaacattgccaagattactgatgattcgcagcagacgatatttttcaacggagcagccgtcaacccatcgcagaccttcgaatacgatgcgctttacagattgaccaaggcaacaggcagggagcataccggaaacggagctgatacagaaccagaagaaaacggataccctaacgctcatacttctataccaaatgatgcaacagccttgcgcaattacatgcggcagtgggaatacgaccaggtagggaacatcttgagcctgatacacaccgcaaacaacggaaactggaaccgtcagtataattacgctgccgcgaataaccgtttgttgtcaaccaccgcntggcaatag

SEQ ID NO: 64156 - protein, 243 aa, Unknown
  Obtained from environmental sample
  misc_feature (1)..(243): Xaa is any amino acid
MQCTIMQRASLRSYQSVGNNVGSEMPAYTLNLIVHVYIAKCIENPKEGGLLKTVKAKLRGAAQETEFVKDINYNPKGQRERITYGNGATTKYEYDENNFRLTRLFTTRSNGTDALQDLNYTYDQMGNIAKITDDSQQTIFFNGAAVNPSQTFEYDALYRLTKATGREHTGNGADTEPEENGYPNAHTSIPNDATALRNYMRQWEYDQVGNILSLIHTANNGNWNRQYNYAAANNRLLSTTAWQ

SEQ ID NO: 64157 - DNA, 381 bp, Unknown
  Obtained from environmental sample
  misc_feature (1)..(381): n is a, c, g, or t
atggtcgccgcatctgaccgttcggctgtgattttctcgctgtctccgggcagcgaccatgattctccgcaaggagagcagctgcttgagcgaatgctgcggttgccggagcaaatctatatgcttatggataaggcctacgagggcgatgagatgagggctaaggttgttgagaaaggcttcattcccgtggtgcctccgaaaagcaatcgcaaagagccatgggaatacgacaaggaacgatacaagcagcgcaatgagatagagcgatattttctccggcttaaacgctttcgcagaattttcacgcgatacgacaagctggattctgtgttttcgggatttatattttttgcaatggttatggatactatcttttag

SEQ ID NO: 64158 - protein, 126 aa, Unknown
  Obtained from environmental sample
  misc_feature (1)..(126): Xaa is any amino acid
MVAASDRSAVIFSLSPGSDHDSPQGEQLLERMLRLPEQIYMLMDKAYEGDEMRAKVVEKGFIPVVPPKSNRKEPWEYDKERYKQRNEIERYFLRLKRFRRIFTRYDKLDSVFSGFIFFAMVMDTIF

SEQ ID NO: 64159 - DNA, 432 bp, Unknown
  Obtained from environmental sample
  misc_feature (1)..(432): n is a, c, g, or t
ttgaaaatttctatattcaattacatggaactaacaaaagaacaatttgacttaatctccggctacctgccccgccagcgaggaaatgtgcgcattagcaaccatcagttggtaaatgcgcttctgtatatcacggagaatggctgcaaatggaggtcgttgccaaaatccttcgggaattggcatagcatttatatgcgcatgaatcgctggagcaatagcggagttttgcggaggctcttcgaggctcttcaaacggaggggataatccaaataaaaatggaagccgtttgccttgacagcacaactgtcaaggtgcatccagacggcaccggtgctttaaaaaaagaggaaagcaaagcatcgggcgttcccgcggaggcctcaccaccaaaattcatatggtcgccgcatctgaccgttcggctgtga

SEQ ID NO: 64160 - protein, 143 aa, Unknown
  Obtained from environmental sample
  misc_feature (1)..(143): Xaa is any amino acid
MKISIFNYMELTKEQFDLISGYLPRQRGNVRISNHQLVNALLYITENGCKWRSLPKSFGNWHSIYMRMNRWSNSGVLRRLFEALQTEGIIQIKMEAVCLDSTTVKVHPDGTGALKKEESKASGVPAEASPPKFIWSPHLTVRL

SEQ ID NO: 64161 - DNA, 426 bp, Unknown
  Obtained from environmental sample
  misc_feature (1)..(426): n is a, c, g, or t
atgaaaagatttaatttcaagcttcagaaaatccttaggttaaggaaattcagggaagaacaatgcaaaattgaacttgaacaggctttaagcgtccttaatatgatagaaaacgaaataaaagcaaccgctgttaagcgccataatgccgcagcgcggagatttacggatataaatgaagccggaaaatgggacaattacattttaaggctggatcaggaaaccgaaaggctgatggaaagggcggcaagcgcgcaaattgttgttgaggaaaaacgcgcaaaatatcttgaagcgtcaaaagcccttaaagcgcttgagaaaataaaagaaaaaaaagaaaaagaataccgaanagaagctgcggacttgcagatggcggagatagacgatcttacggcggcaaggtacgaaacgaaagtttaa

SEQ ID NO: 64162 - protein, 141 aa, Unknown
  Obtained from environmental sample
  misc_feature (1)..(141): Xaa is any amino acid
MKRFNFKLQKILRLRKFREEQCKIELEQALSVLNMIENEIKATAVKRHNAAARRFTDINEAGKWDNYILRLDQETERLMERAASAQIVVEEKRAKYLEASKALKALEKIKEKKEKEYRXEAADLQMAEIDDLTAARYETKV

SEQ ID NO: 64163 - DNA, 1506 bp, Unknown
  Obtained from environmental sample
  misc_feature (1)..(1506): n is a, c, g, or t
gtggaaaccgcaatttttgaaaaatatcttaataccgcacaacgtaccgatcctataaaatgcgtcggtaaagtagttaatgttaaaggtcttttaatagaaagccacggaccgcaggctattatcggagaagtttgcagaattatagtcccccgcggaaaaggccagataagagccgaagttgtagggttaaaagatgaaatagtccagcttatggcgtttgaggaaacagaagggcttgaagtaggctgcagggtaatcgccctgggaagccgtcttgaagtgcctgtatctaataaacttttaggcagagtgcttgacgctttcggcaatccggttgacggcaagggcgatattgacgctgccgcaatgtatcccgccctcgcaagtccgcctgatccgttaaaaagaagacgtataactgaacgcataacaacaggcatccgcgccatagacgggcttctggcggtaggcaaggggcaacgcctcggtattttctccggctccggcgtcggcaagtccacgcttcttggcatgattgcgcgtaacacaagcgctgatgtcaacgtcgttgccctgataggcgagcgcggacgggaagtaaacgactttatcgaaaaagatttaggccccgaagggcttgcccgcagtgttttaattgtaaccccctccaattcccctccccttatgcgtttccgcggcgcttatgtagccaccgctgtcgccgaatatttccgcgatcagggcaacgacgtaatgctgatgttcgattccgttacgcgctttgcccgcgccatgagggaaatagggcttgcgtccggggaacctcccgcgcaaagaggctttccgccgagcatgttcgattccatgcctaaacttcttgaaagatccggcacttccgacaagggaagcataacgggattttatacggtgcttgtagacggagacgacatggacgagcctgtcgcggataccgtccgcggtattctggacggtcatatatggctttcaaggaatctggcggaggcttatcattatccgcctattgacgtactaaaaagcatttcccgtctcgcttcaacggtagtgggaccggaaagtaaaaaagcgaccggtataatacgaagaaacatggctacttacgcggaaatggaagattttatcaatataggcgagtacaaaagcggttccaatcccgtggtagacgaggctatagccaaacacatccctatagaggaatttcttatgcaggaagttgacgaaccttcttcgcttgaggatactcttacagcaatggcggaaattgcggaaattcaaataccgccggaagaaatgacggataataacgcgaaacttgttaatacagccaaacccgagaaagttaaaaaagagaaacaacaggcgcaaaatacaaattccgcgcaggataccgccaacgcccttaacagcgtcgccgccctgttctcctcaacgtccgggttgggcggttttggactgactaaataa

SEQ ID NO: 64164 - protein, 501 aa, Unknown
  Obtained from environmental sample
  DOMAIN (25)...(90): ATP synthase alpha/beta family, beta-barrel domain
  misc_feature (1)..(501): Xaa is any amino acid
METAIFEKYLNTAQRTDPIKCVGKVVNVKGLLIESHGPQAIIGEVCRIIVPRGKGQIRAEVVGLKDEIVQLMAFEETEGLEVGCRVIALGSRLEVPVSNKLLGRVLDAFGNPVDGKGDIDAAAMYPALASPPDPLKRRRITERITTGIRAIDGLLAVGKGQRLGIFSGSGVGKSTLLGMIARNTSADVNVVALIGERGREVNDFIEKDLGPEGLARSVLIVTPSNSPPLMRFRGAYVATAVAEYFRDQGNDVMLMFDSVTRFARAMREIGLASGEPPAQRGFPPSMFDSMPKLLERSGTSDKGSITGFYTVLVDGDDMDEPVADTVRGILDGHIWLSRNLAEAYHYPPIDVLKSISRLASTVVGPESKKATGIIRRNMATYAEMEDFINIGEYKSGSNPVVDEAIAKHIPIEEFLMQEVDEPSSLEDTLTAMAEIAEIQIPPEEMTDNNAKLVNTAKPEKVKKEKQQAQNTNSAQDTANALNSVAALFSSTSGLGGFGLTK

SEQ ID NO: 64165 - DNA, 711 bp, Unknown
  Obtained from environmental sample
  misc_feature (1)..(711): n is a, c, g, or t
ttggagggggttacaattaaaacactgcgggcaagcccttcggggcctaaatctttttcgataaagtcgtttacttcccgtccgcgctcgcctatcagggcaacgacgttgacatcagcgcttgtgttacgcgcaatcatgccaagaagcgtggacttgccgacgccggagccggagaaaataccgaggcgttgccccttgcctaccgccagaagcccgtctatggcgcggatgcctgttgttatgcgttcagttatacgtcttctttttaacggatcaggcggacttgcgagggcgggatacattgcggcagcgtcaatatcgcccttgccgtcaaccggattgccgaaagcgtcaagcactctgcctaaaagtttattagatacaggcacttcaagacggcttcccagggcgattaccctgcagcctacttcaagcccttctgtttcctcaaacgccataagctggactatttcatcttttaaccctacaacttcggctcttatctggccttttccgcgggggactataattctgcaaacttctccgataatagcctgcggtccgtggctttctattaaaagacctttaacattaactactttaccgacgcattttataggatcggtacgttgtgcggtattaagatatttttcaaaaattgcggtttccacagcccctccccttttagggctgactcacatttcttaa

SEQ ID NO: 64166 - protein, 236 aa, Unknown
  Obtained from environmental sample
  misc_feature (1)..(236): Xaa is any amino acid
MEGVTIKTLRASPSGPKSFSIKSFTSRPRSPIRATTLTSALVLRAIMPRSVDLPTPEPEKIPRRCPLPTARSPSMARMPVVMRSVIRLLFNGSGGLARAGYIAAASISPLPSTGLPKASSTLPKSLLDTGTSRRLPRAITLQPTSSPSVSSNAISWTISSFNPTTSALIWPFPRGTIILQTSPIIACGPWLSIKRPLTLTTLPTHFIGSVRCAVLRYFSKIAVSTAPPLLGLTHIS

SEQ ID NO: 64167 - DNA, 1575 bp, Unknown
  Obtained from environmental sample
  misc_feature (1)..(1575): n is a, c, g, or t
atgaaatatattaactttgataaaacaggcgtttataagaaactagcaaagcaggcggaaaaggcttttctttttaaagataagcttgactcgaaaagggtgggggagtgccttgtccctatggcggcggaacttaaatactcatgggcggcaaaagccgttgacgagcagaccgtaaaattattgcaggaacttgcggacgagcaggagcttatagcgaaatacaaagcccttcttgacggcgaaatgatgaacacgggcgagaaacggaaagtgcttcaccatctgtcgcgcggacagcaaggacagcccgtaattgaaaacggaaaagatataggggaattctaccgcaaagagcttgcgaggttctgcgattttgcctccgcggtgcatggcggcaaatacaaaggctccacaggcaaggattttactacggtagtgcagataggtatcggcgggtccgaccttggtccgcgcgccatgtatattgctcttgataactgggcgctcaaggaaggcaaaaagaaacttgacgcgaaatttatttccaacgtagacccggacgacgcttcagcggtaattgcgtcatgtaatcttgaacagtgcctctttattttggtttccaagagcggcactactcaggaaactcttgccaacgagctttttgtaaaagacaaactttcaaaagcgggtcttgacccaagcaagcagatgattgccgttacaagcgaaacaagccctcttgcgcgtaacagcgcgtatcttgactctttctacattgacgactatgtcggcggacgctattcatcgtcatcggcggtgggcggatgtgttctgtctcttgccttcggtcccgatgtgtttaaagagttccttgcgggagccgccgaagccgacaaaatggcgcttgaacccgatgttttaaaaaacgccgctctccttgacgcgcttatcggcgtatgggagcgtaactttttgcagtatccgtataccgcggttttgccctacagtcaggcgctctcacgattccccgcgcatttacagcagatggacatggagtcaaacggaaagcgcgtaaaccgcaacggacaaccggtcgattacagtaccggtcccgttcttttcggagaaccgggaacaaacggacaacattcgttttatcagctgcttcatcagggaacgggaattgtcccgcttcaatttatcggtttttttgaaagccagaggggcgacgatgtaagcgtggacgggtctgtaagtcatacgaaattgaaagcaaatcttgccgctcaaattgtggctttcgcaaaggggcagggcagcgaggacggaaacaaagagtttaaaggcggacgcccgtcaagtttgattttcggaaaacgcctaacgcccgcagtattgggagctttgctcgcacactatgaaaacaaagtaatgtttcagggttttgtctggaatctgaacagttttgatcaggaaggcgtacagcttggaaaaatcctgaccaaaaaagtgctttccggcaacttcggcgacgacgcattggaagcgtacagcaagatattaggcgtatga

SEQ ID NO: 64168 - protein, 524 aa, Unknown
  Obtained from environmental sample
  DOMAIN (51)...(516): Phosphoglucose isomerase
  misc_feature (1)..(524): Xaa is any amino acid
MKYINFDKTGVYKKLAKQAEKAFLFKDKLDSKRVGECLVPMAAELKYSWAAKAVDEQTVKLLQELADEQELIAKYKALLDGEMMNTGEKRKVLHHLSRGQQGQPVIENGKDIGEFYRKELARFCDFASAVHGGKYKGSTGKDFTTVVQIGIGGSDLGPRAMYIALDNWALKEGKKKLDAKFISNVDPDDASAVIASCNLEQCLFILVSKSGTTQETLANELFVKDKLSKAGLDPSKQMIAVTSETSPLARNSAYLDSFYIDDYVGGRYSSSSAVGGCVLSLAFGPDVFKEFLAGAAEADKMALEPDVLKNAALLDALIGVWERNFLQYPYTAVLPYSQALSRFPAHLQQMDMESNGKRVNRNGQPVDYSTGPVLFGEPGTNGQHSFYQLLHQGTGIVPLQFIGFFESQRGDDVSVDGSVSHTKLKANLAAQIVAFAKGQGSEDGNKEFKGGRPSSLIFGKRLTPAVLGALLAHYENKVMFQGFVWNLNSFDQEGVQLGKILTKKVLSGNFGDDALEAYSKILGV

SEQ ID NO: 64169 - DNA, 771 bp, Unknown
  Obtained from environmental sample
  misc_feature (1)..(771): n is a, c, g, or t
atgtcacttctatccgcagacgttgaagctccggaatccaatccggttccagcctccgaatctgaaggcgtagcttcgcagaagcacggttcccctccggagtcattacgcaaaatcagaagttttgtcctgcgaggcggccgtttaacgagcgcccagaagcgttcatacgataccctttcccaaaagtttattattccatacgaggccaaaacgctggattttacatgtgttttcggcaacggcaattctgttattgccgaaatcggctttggcatgggcaaagcgaccgccgttatcgctggggaaaacccggataaaaactacatcgggcttgagattcacaaaccggggataggccgcctcctttgggaaatagagcagcgtttcctttccaatgtcagaataattgaacatgacgcggccgaggttttccggaatacaatccccgaaaattcgcttggcggagtgcatattttctttcctgatccctggccgaaaaaacgccaccacaagcgcaggctgatacagcggccttttacggattgtatcgcctcaaggttacagccgggggcctatatctacatggtcagcgactggctggactacgctaattgggctttgtctgtgttcaccaataccaaaggtttggtaaacgaatatgacggctttagcccgccgcaatcctggcggcccctgacaagttttgaaaaaaaagggcttgacaagaaacatgaaataaaggaattgtttttcaggcggggattatga

SEQ ID NO: 64170 - protein, 256 aa, Unknown
  Obtained from environmental sample
  DOMAIN (61)...(255): Putative methyltransferase
  misc_feature (1)..(256): Xaa is any amino acid
MSLLSADVEAPESNPVPASESEGVASQKHGSPPESLRKIRSFVLRGGRLTSAQKRSYDTLSQKFIIPYEAKTLDFTCVFGNGNSVIAEIGFGMGKATAVIAGENPDKNYIGLEIHKPGIGRLLWEIEQRFLSNVRIIEHDAAEVFRNTIPENSLGGVHIFFPDPWPKKRHHKRRLIQRPFTDCIASRLQPGAYIYMVSDWLDYANWALSVFTNTKGLVNEYDGFSPPQSWRPLTSFEKKGLDKKHEIKELFFRRGL

SEQ ID NO: 64171 - DNA, 540 bp, Unknown
  Obtained from environmental sample
  misc_feature (1)..(540): n is a, c, g, or t
atgaataacgattccagacgtatagagcaccttgagcgcgtcataaggaaataccaaaaatcttattacggcggagaggcggaaatttcagacggggaattcgatctcctctgggaccagctgaggtcccttgccccgaacagccccgtgatacttgggataggcgcggataatacggacggctttcccaaagcaaaacacctgattcccatgggcagccaggaaaaagcggctaacccggatgaattccttgcgtgggcggctaaacaccaattgccggaatttctggcgcagtacaaactcgacggcgcgagtcttgaactgcaatatgagaaaggcgttttggtcagagccgtaacacggggcgacggtatcataggcgacgacatcacggccacgccatacgcatggccggcgtgccggaaaagctcgatttaccgttttcaggaggagtgcgcggcgaggtggtcatgcccagggaaatctggcaacagaagtacccgtccaaggccaactgccgcaacgccgccaacggaataa

SEQ ID NO: 64172 - protein, 179 aa, Unknown
  Obtained from environmental sample
  DOMAIN (2)...(172): NAD-dependent DNA ligase adenylation domain
  misc_feature (1)..(179): Xaa is any amino acid
MNNDSRRIEHLERVIRKYQKSYYGGEAEISDGEFDLLWDQLRSLAPNSPVILGIGADNTDGFPKAKHLIPMGSQEKAANPDEFLAWAAKHQLPEFLAQYKLDGASLELQYEKGVLVRAVTRGDGIIGDDITATPYAWPACRKSSIYRFQEECAARWSCPGKSGNRSTRPRPTAATPPTE

SEQ ID NO: 64173 - DNA, 1545 bp, Unknown
  Obtained from environmental sample
  misc_feature (1)..(1545): n is a, c, g, or t
atggccggcgtgccggaaaagctcgatttaccgttttcaggaggagtgcgcggcgaggtggtcatgcccagggaaatctggcaacagaagtacccgtccaaggccaactgccgcaacgccgccaacggaataatgcgccgcaaggacggctgcggctgcgaggaccttaaggttatcacctatgacgccacggcaattaccggcgaagcatacgatgatggctattttcgggatgaagaaaaaaaaatcgaatggcttgacaagcggggttttgaaaccgctgtaacaaaaatctgcaaatccgccgacgaggtcatctcatacagggacaaggttgccacaacgcgtgacaagttgccgtttgacattgacggcctggttataaaggatattgaaatagacatggccgacctcagaaaagcgcggcccgaaaaacagattgccttcaaatttgagcttgaaacggcgttcagcatactaaggcgggttgaatggagcgaaaccggggcaacctatacgcccatcggcatagtagaccctgtcaggcttgcgggcactaccgtacagcgcgccaaccttaacaaccccggcatgataaggtcgctgggcctgcaaataggctcggtcgtttccgtagtgaaacgcggcgagattatccccaagatagaagggctcgcgcctgcgggggcattgccccaggaaaaagccgcgactctggaaccgataggattcccccttagctgctccgtatgtggaactgatctggtggactcaggcacgcggctgtactgccccaataccggctgcgcgaaacgcctccttcaccgtctggaaaaatggatttccgttctggacatccgcgaactgggcgataaactgatacgccagctctttgacaaggaaagggtgcggcgcattcctgacctttatacgctaaccgcccaggagctttcggtctacgaaaggatgggcgaactgtccgcaactaaagtcgtccgccatatacagacaaaaagggagctttcacttgcggcctttgtcgccggctttgatcttgaaggcgtcgctgagactacaatggataaagtcgcctcagccgggtttaacacgcttgaaaaactccgcaaggcttccgtggaagatctggccgcggtttacggacttggtgaaatcaccgcgaaaataattgttgacggtcttgtggaaaccgccgcagagatggacgaagtcctcgctaaaggcgttatcagcattgcgccgcctcctgaggaagactcacagcccatgcggggcctttcgttttgtttcacaggggagcttgcttccatgaagcgaaaccaggcggaagaaaaaataaaagcccttggcgcttcggcaaaatcaacggtagtaaaaggcctttcgtaccttgtcaccaacgatcccgcctccggctccgccaaaaacaaaaaagccagagaactggggataccgatcattaacgaggaagaattcctgaaactgctaacggccccgaccgagcctgtccagggagagttgttttaa

SEQ ID NO: 64174 - protein, 514 aa, Unknown
  Obtained from environmental sample
  DOMAIN (1)...(154): NAD-dependent DNA ligase adenylation domain
  misc_feature (1)..(514): Xaa is any amino acid
MAGVPEKLDLPFSGGVRGEVVMPREIWQQKYPSKANCRNAANGIMRRKDGCGCEDLKVITYDATAITGEAYDDGYFRDEEKKIEWLDKRGFETAVTKICKSADEVISYRDKVATTRDKLPFDIDGLVIKDIEIDMADLRKARPEKQIAFKFELETAFSILRRVEWSETGATYTPIGIVDPVRLAGTTVQRANLNNPGMIRSLGLQIGSVVSVVKRGEIIPKIEGLAPAGALPQEKAATLEPIGFPLSCSVCGTDLVDSGTRLYCPNTGCAKRLLHRLEKWISVLDIRELGDKLIRQLFDKERVRRIPDLYTLTAQELSVYERMGELSATKVVRHIQTKRELSLAAFVAGFDLEGVAETTMDKVASAGFNTLEKLRKASVEDLAAVYGLGEITAKIIVDGLVETAAEMDEVLAKGVISIAPPPEEDSQPMRGLSFCFTGELASMKRNQAEEKIKALGASAKSTVVKGLSYLVTNDPASGSAKNKKARELGIPIINEEEFLKLLTAPTEPVQGELF

SEQ ID NO: 64175 - DNA, 1449 bp, Unknown
  Obtained from environmental sample
  misc_feature (1)..(1449): n is a, c, g, or t
ttgatggcgagcccaagccaagcagagcggaaaaagaagtgcgaaaaaagcattgatgaatttgcacgaacgtacttcccagaatatgtaaaaaaagattccgcgaagtttcatagggagtgggaaaaaataaggctaatcgaaagcgagcctgttttattaatggcttttcgcggaagcggcaagtctacatttttcactttccttgatccaatacatgagattgtttatggcaaccgcaattttatgattttttcttcctacaacgaagaaaagagcgcggtatttaccgggcgcatccttttggagctgatgtataaccagcggctctgcaacgatttcggcagctttttccttccgaaccagcatcccggcataaaaaaatttactgtccatgtcccggattccggcggaaaaaaaataggagtccgcgcaatatctatcgggcaagacccgcgcggttatgttcacgggcctaacagaccggattatgtgaggtgcgacgatatccaaagccggaaacgagccaagagccgcaaattcgtgaaggaaactattgagtggatcacgcaggacttaatacctgcgcttgctgaaaattattcgctggttattcccgccacgcctctcaatacgcagtgcgttgccactaccctcgagaaagggactgacgatataaacccgatgaggacatataagtttccggcagagtccaaaggcaagccaacgtggaaagaagaatttccagtcgctaggcttgcaatgataaaacagaaagttggctcaagggcatataaccaagaatttttacttatacctatagctctcgatgaaatgatttttaaagaagaacacattcgtggttatgcggaagaggagctgataggaatcaggtttgcatatattttcagttggacagatccgtcggttaaagcggaagagaagcattgctttaaggcaacaatctgcgcggggatcaccaatgagggcgcgatctatatccttaaggcccggatcagaaaagaatcggtttcccgaatggtagacggaatgtacctaatctatgaagcctttaacccttcatggatgttttatgaggacaacggagggcaagccctgctgtcggaaatatttgatgccaaagcggaacgcgaaggatatcacatcccttataaagctgaaaccaacagcgtcaacaaactaacgcgaattgaagggacgctttctgcgcccatcgagaacggcgttattcgttttttgaaaagagacaaggatcaaaaagaactcatcgatcagcttctgcaattcccggacggcgaatacgttgacggcccggacgcgctggaaggcgttgtgagaaaactgctggagtatgcccggaaacgccgggcagggaaaccaaaatcaagccacgaaagggaagcggcgcgtgtgctggaggggtattga

SEQ ID NO: 64176 - protein, 482 aa, Unknown
  Obtained from environmental sample
  misc_feature (1)..(482): Xaa is any amino acid
MMASPSQAERKKKCEKSIDEFARTYFPEYVKKDSAKFHREWEKIRLIESEPVLLMAFRGSGKSTFFTFLDPIHEIVYGNRNFMIFSSYNEEKSAVFTGRILLELMYNQRLCNDFGSFFLPNQHPGIKKFTVHVPDSGGKKIGVRAISIGQDPRGYVHGPNRPDYVRCDDIQSRKRAKSRKFVKETIEWITQDLIPALAENYSLVIPATPLNTQCVATTLEKGTDDINPMRTYKFPAESKGKPTWKEEFPVARLAMIKQKVGSRAYNQEFLLIPIALDEMIFKEEHIRGYAEEELIGIRFAYIFSWTDPSVKAEEKHCFKATICAGITNEGAIYILKARIRKESVSRMVDGMYLIYEAFNPSWMFYEDNGGQALLSEIFDAKAEREGYHIPYKAETNSVNKLTRIEGTLSAPIENGVIRFLKRDKDQKELIDQLLQFPDGEYVDGPDALEGVVRKLLEYARKRRAGKPKSSHEREAARVLEGY

SEQ ID NO: 64177 - DNA, 648 bp, Unknown
  Obtained from environmental sample
  misc_feature (1)..(648): n is a, c, g, or t
ttggaggtaggaatgaataaggatcagaacgtattgcgtaacactcttggagtattgggttttttgttgcctatactgacattgtttttcaaccttgtttttggcggcgcatataacccgcccggcgttttaacatccataagcgccactcattacagtagcgggtacttgttatttgagggcttggtttttggcgttgggttatttttaatatgctatcgcgggtatgacgtaaaagaccgggtgtcaacaattctcgcgggaagcggtgctattgcgttgacattatttccctgcgctttggacggcgcggaaacaagaaattttttaatgctctctcaaagcgtaaccaacacaattcatttggcaagcgcagggttattttttggctccctgatttttttgataggcttccagtttgtcaaaactggggaaggaaacacgatatcacctaaaagccggaagtggcgcaggaatattctttataggacttgcgctgtgataatgttcgccgctcttgcaatcggcttcggcggcaaagccgcctttgcgtggcggtactccgtaattgcgggtgaagggattgggctttgggcttttagtctgtcatggctgaccaaaggcggtcttgtcttaccagacgtgtaa

SEQ ID NO: 64178 - protein, 215 aa, Unknown
  Obtained from environmental sample
  misc_feature (1)..(215): Xaa is any amino acid
MEVGMNKDQNVLRNTLGVLGFLLPILTLFFNLVFGGAYNPPGVLTSISATHYSSGYLLFEGLVFGVGLFLICYRGYDVKDRVSTILAGSGAIALTLFPCALDGAETRNFLMLSQSVTNTIHLASAGLFFGSLIFLIGFQFVKTGEGNTISPKSRKWRRNILYRTCAVIMFAALAIGFGGKAAFAWRYSVIAGEGIGLWAFSLSWLTKGGLVLPDV

SEQ ID NO: 64179 - DNA, 540 bp, Unknown
  Obtained from environmental sample
  misc_feature (1)..(540): n is a, c, g, or t
ttgtcttaccagacgtgtaatcttgagagcaatgcgatgggaatcaatatgcagggcaaaaaatattcatcagtgccggaaacgataaaacacattctccaagtcggcgagtttataaataaaatcgcaatgctcttgatcagccgaatttacgaacatgacaaatctaagctagaggaaccggaactgcgttattttgacgcccattcgcagaggcttgcgggtttaaagtatggaagcaacgaatacaaacaatctttaaaagaacttgaaccggcattaaagcatcattattcggttaacaggcatcacccggaacactttgaaaacggcatcaggggaatgaccctaatcgatatcgttgaaatgttctgcgattggtatgcatccacgaagaggtctgatggcggcaatatcatgcggtcaatcgaaatatgtcaggaacggtttgactattcggacgatctgaaagccatttttgaaaatacctataacgaaatttttgcggaggagccgaatgtccaagcaaaacccgaataa

SEQ ID NO: 64180 - protein, 179 aa, Unknown
  Obtained from environmental sample
  misc_feature (1)..(179): Xaa is any amino acid
MSYQTCNLESNAMGINMQGKKYSSVPETIKHILQVGEFINKIAMLLISRIYEHDKSKLEEPELRYFDAHSQRLAGLKYGSNEYKQSLKELEPALKHHYSVNRHHPEHFENGIRGMTLIDIVEMFCDWYASTKRSDGGNIMRSIEICQERFDYSDDLKAIFENTYNEIFAEEPNVQAKPE

SEQ ID NO: 64181 - DNA, 516 bp, Unknown
  Obtained from environmental sample
  misc_feature (1)..(516): n is a, c, g, or t
ttgaaaatacctataacgaaatttttgcggaggagccgaatgtccaagcaaaacccgaataaacagaaatgggcgcccgattcccatatagacagcgaaaagaaaaaaatctccgacactcccgatgtaaatatttccggcggcgatcacttcgccacacggagccgggcgaatgattttatccggctgatgcggagcctccccgatcccgatcctatcctaaaaaaaatgggcagaagcattacggccctgcaagagcttttaaccgacagccatcttgaaagcgtgtggggcgttagatgctctgccacttccggcgcggaatggtttatggctcccggagatgacagttccggcgcacaggaaatagcggacgcattcgccgaggaactcaaggacatggacgttccgcgaatcatcgaagagatgatggatgcggtcgcctacngatattcgccgctgagggtgctttggatgcganntgaaggacgtgggcaatatcaatatgnntggtaa

SEQ ID NO: 64182 - protein, 171 aa, Unknown
  Obtained from environmental sample
  misc_feature (1)..(171): Xaa is any amino acid
MKIPITKFLRRSRMSKQNPNKQKWAPDSHIDSEKKKISDTPDVNISGGDHFATRSRANDFIRLMRSLPDPDPILKKMGRSITALQELLTDSHLESVWGVRCSATSGAEWFMAPGDDSSGAQEIADAFAEELKDMDVPRIIEEMMDAVAYXYSPLRVLWMRXEGRGQYQYXW

SEQ ID NO: 64183 - DNA, 1221 bp, Unknown
  Obtained from environmental sample
  misc_feature (1)..(1221): n is a, c, g, or t
atgtctccgactgttgagttcgttaatggaacaaacgagaacagccccgtggctcatttcaagatgccggcgtcaaatgtgacggctacggctacattcaatacattgatagaatcagtcagtctatcggtcgttgagcccgtgaacgggcagccgctgaacaacaacgcgaccataaacgatgccagccctgcctattccgccagcgtagtcgcgtggcagccgagcggcgggacagtgaacggcacaagcgcatacacggcaacaatcaccctaacgccaaacacgggctacgtgttcgccaacccgctatctgtatcattgaacggaagcgtgctcacacccgttgctactaatcaagacggctctgtgacgataacaaggactttcgccgcaacattaacagccctgcccgcgcccagtattaccatagcaccggcgtacggagcaaacagaccgacaacagtatctgggactaacttcgccggcacggtatcgtggtctcccgtaggtgccacgttcccaagcggagtttcctcaggcacattcaccctgaccgccaatgcaggatacaggtggaacggcggcgcggttaccgtggacgggcagagcgttgccggagttctgggcgcgaacggaacgcaaataacattcacttatgatactccttcactcgttggggcaggaacattcacggattcgcgcgacaaccaaacatacggctacaaggcaatgccggatgggaaaatttggatgaccgagaacctgaactacaaccagagcggctcttgggtttacaacacgcccgctcaacccacgactaaacacgggcgattgtacacttgggaccaagccgttgcagcagtgcccgcaggctggcacttgccgaccgatgcggagtggacagcattggcacttgcggcaggcgggacgggagcaaatggagatggcggaacggcgggaaccgcgttgaaggctacaagcgggtggaacagcaatggcaacggcacggacacctacgggtttgctgcgttgcctgccggctaccgccacaccggtggcagtttcttcaatgtcggcaactacggctactggtggacggctacggcagacggttccagcaatgcgttcggccggggcatggactacgactacgccttcgtctctcggtactccgatgccaagggccacggttttagcgtgcgttgcgtcaaggactaa

SEQ ID NO: 64184 - protein, 406 aa, Unknown
  Obtained from environmental sample
  misc_feature (1)..(406): Xaa is any amino acid
MSPTVEFVNGTNENSPVAHFKMPASNVTATATFNTLIESVSLSVVEPVNGQPLNNNATINDASPAYSASVVAWQPSGGTVNGTSAYTATITLTPNTGYVFANPLSVSLNGSVLTPVATNQDGSVTITRTFAATLTALPAPSITIAPAYGANRPTTVSGTNFAGTVSWSPVGATFPSGVSSGTFTLTANAGYRWNGGAVTVDGQSVAGVLGANGTQITFTYDTPSLVGAGTFTDSRDNQTYGYKAMPDGKIWMTENLNYNQSGSWVYNTPAQPTTKHGRLYTWDQAVAAVPAGWHLPTDAEWTALALAAGGTGANGDGGTAGTALKATSGWNSNGNGTDTYGFAALPAGYRHTGGSFFNVGNYGYWWTATADGSSNAFGRGMDYDYAFVSRYSDAKGHGFSVRCVKD

SEQ ID NO: 64185 - DNA, 567 bp, Unknown
  Obtained from environmental sample
  misc_feature (1)..(567): n is a, c, g, or t
atggaaatggataaaaaacggcagctatacactttgagcgaggcgctgcgtgccgttcccgctggctggcatttgccgagcagggaagagtggcaggaactaattgattatgccgaggggtcgcccgacagggcggaccctggctatgtcccgactgcgggcaggaaactgaagtctgcgagcggctggcatatgaacggttgcggggcggacgagttcgggttttccgcgttgccagacgactacggcaatgccgctggatacgtatacgagccagggacaaacggcatttggtggagctcatcgccaagagttgacgaagaaggcaaggagatagaaggcaagatagccgtctatggaatgtactgccacgaagacaccttcggcatgtacgacttcggcgcaacgccctctttcagcgtccgtctcatcaaggatgacggcgttctgcctgcgggaaatgttttcacggacccgcgggacgggcaaacatacaagtgcgttcaaatcggcagccaggtatggcttgcggagaacctgaactacgaactgccggaggaagcataa

SEQ ID NO: 64186 - protein, 188 aa, Unknown
  Obtained from environmental sample
  misc_feature (1)..(188): Xaa is any amino acid
MEMDKKRQLYTLSEALRAVPAGWHLPSREEWQELIDYAEGSPDRADPGYVPTAGRKLKSASGWHMNGCGADEFGFSALPDDYGNAAGYVYEPGTNGIWWSSSPRVDEEGKEIEGKIAVYGMYCHEDTFGMYDFGATPSFSVRLIKDDGVLPAGNVFTDPRDGQTYKCVQIGSQVWLAENLNYELPEEA

SEQ ID NO: 64187 - DNA, 1095 bp, Unknown
  Obtained from environmental sample
  misc_feature (1)..(1095): n is a, c, g, or t
atgagccagctatcactaagcgggaaattcgtcaggcacatcatagatgaaactgaaatccttgttcccatcaagcaagccgttaaagagcttgccgaactcttgtacagacgcgccggctcgttcggacggcacccacagcggttgcagatagggggcacgtttgacataaacaaatatatgtactacggcacggacaacatagacctttttgccgcgccgttttccgatagcgatatcggcaaggtattcacatttattgaatgcggcgaaatcagctactggggttacgatgggtttgaagaaggcgatgatgagcagcccacaattgagtctttcaccattccgccagcaagcggaagctgctcggtcctgatgcttatagatagagtggaagacgagaacatattccaattggttaatacttcaaccggagttgctcccaatccgcccacgcccaaattttctgtcagcgttgtgaacggcataacgaacaaaccaacggctatggaaaatgagactgtaaccataacgtctctcagcctgttcatagaccctcgcgacaacaaaacatacggcttcaaaacaatgcctgacggaaaaaactggatggtggagaactttgattacgcccaagacggctcttggtactataacaacaaccttagctcgccgccattcactaaggcgggacggctatacacgtatgaccaagccattgcagcggtgcccgatggctggcacttgccgaccgatgcggaatgggctgctcttgcattagccgtagggcggcacgggcacttatgggcgagaggcggagctgccggaaacatattgaaagcaattagcgggtggagcggcaatggcaacggcatagatgaattcggctttgccgcgcttcctggcggcaaccgcgtggcttcgagcggcaactttgaaggtctcggttacggcgccctgttctggacggcaacggcagacggttcttccggcaatgcgttccgccgcacaatgggctacgacagcgacaacgtaggcaggagctcaagcgacaagggctacggtctcagtgtgcggttggtgaagaatacttaa

SEQ ID NO: 64188 - protein, 364 aa, Unknown
  Obtained from environmental sample
  misc_feature (1)..(364): Xaa is any amino acid
MSQLSLSGKFVRHIIDETEILVPIKQAVKELAELLYRRAGSFGRHPQRLQIGGTFDINKYMYYGTDNIDLFAAPFSDSDIGKVFTFIECGEISYWGYDGFEEGDDEQPTIESFTIPPASGSCSVLMLIDRVEDENIFQLVNTSTGVAPNPPTPKFSVSVVNGITNKPTAMENETVTITSLSLFIDPRDNKTYGFKTMPDGKNWMVENFDYAQDGSWYYNNNLSSPPFTKAGRLYTYDQAIAAVPDGWHLPTDAEWAALALAVGRHGHLWARGGAAGNILKAISGWSGNGNGIDEFGFAALPGGNRVASSGNFEGLGYGALFWTATADGSSGNAFRRTMGYDSDNVGRSSSDKGYGLSVRLVKNT

SEQ ID NO: 64189 - DNA, 762 bp, Unknown
  Obtained from environmental sample
  misc_feature (1)..(762): n is a, c, g, or t
ttggcggtagacggtagttttatccggcttccgatggaccaaggattgatagattactatggggcactggggcacgaagggacatcggcaaccgcgcttgcatcggttttgtatgatttggagaacgacattatcgttgatgcaaagattgagcctattgaaggcaacgagagatcattagcagcggagcacattgaggcgttgatgaagatgggggactttcagcagggacaccgagaattaatcatatttgatcgcgggtatccatcctatgattttattaaatctttagaggacaaagagatagcgtatgtaatgcgggtgcagaaagggtttataagggaagaagaacttggcacagctgtggatcggtgggtagcgttggggaaaagcgggaagcaggtacggacgatagtggtagacctcggtggcgaggaacgggaaatactaataacaaacctgcctgaaacggagatggaatataaggcgtttaaggagctctatcacaagaggtgggggatagagacaaagtataaaacggtgaaacagaagctggaattggaaaacttttctggaaggctggtagaaaacatcaagcaggacttttatgcgatgatgacggtatcgaatatgatagccagttgcaggcgagtggcagaccgcaaagtgaagaaggatcgagaagggctagggaataaatatgagtatcaggttaatgtgaatcatgcgataggagtatataaggagtggactttaccctaa

SEQ ID NO: 64190 - protein, 253 aa, Unknown
  Obtained from environmental sample
  DOMAIN (1)...(211): Transposase DDE domain
  misc_feature (1)..(253): Xaa is any amino acid
MAVDGSFIRLPMDQGLIDYYGALGHEGTSATALASVLYDLENDIIVDAKIEPIEGNERSLAAEHIEALMKMGDFQQGHRELIIFDRGYPSYDFIKSLEDKEIAYVMRVQKGFIREEELGTAVDRWVALGKSGKQVRTIVVDLGGEEREILITNLPETEMEYKAFKELYHKRWGIETKYKTVKQKLELENFSGRLVENIKQDFYAMMTVSNMIASCRRVADRKVKKDREGLGNKYEYQVNVNHAIGVYKEWTLP

SEQ ID NO: 64191 - DNA, 876 bp, Unknown
  Obtained from environmental sample
  misc_feature (1)..(876): n is a, c, g, or t
atggcgtatcaattcatgaaaacgaatcagaaccgatacgccatcaaggagatggccatgctttttggggtaagccgcagcgcctattacagatgggcacgggacggggcctcgcaacggcggaaggcaggcgatgcggagcttgtacgccttattcttgaaatagcggcaaggcatcaccgccggtatggcagcccacgggtacgccgggaacttcgcgatatctacggaaaacgcgtcagccttaagaaagtggcccgcctaatgcgggaaaacggccttaacgcacgaaaaagcaggaagcatatccggactaccgactccagccatacccttgtagtctttgaaaacatactctccagggagttttatgctgaaactggcggcataaagtgggtttcggacattacctatctgcgtacgataaatggctgggtatatctgaccatagtgcttgacctgtttgaccggaaaatcattggctgggcgcttagccttggcatggaggcttctgagaccaccattgctgcttttgaaatggcagtcaaaaaccggagccctcaaggcggcctgatattccattcggacaggggcgttcagtattgcgcccaatccttccgcgacgttttgcgggaaagctgtcctgccgttcgtcagagcatgagcaggaagggcaattgctgggacaacgcgtgcgccgaatcgtttttcaaaacgctgaagagtgaactggaaacactggacggcaggcattccgaggctgaagtcaggcaatcggtgtttttctacattgaggcgtattacaaccgcatccgcatgcattcggcgcttgactatgtagcgcctaacgtgtttaacttatgtaaccccgcttaa

SEQ ID NO: 64192 - protein, 291 aa, Unknown
  Obtained from environmental sample
  DOMAIN (124)...(287): Integrase core domain
  misc_feature (1)..(291): Xaa is any amino acid
MAYQFMKTNQNRYAIKEMAMLFGVSRSAYYRWARDGASQRRKAGDAELVRLILEIAARHHRRYGSPRVRRELRDIYGKRVSLKKVARLMRENGLNARKSRKHIRTTDSSHTLVVFENILSREFYAETGGIKWVSDITYLRTINGWVYLTIVLDLFDRKIIGWALSLGMEASETTIAAFEMAVKNRSPQGGLIFHSDRGVQYCAQSFRDVLRESCPAVRQSMSRKGNCWDNACAESFFKTLKSELETLDGRHSEAEVRQSVFFYIEAYYNRIRMHSALDYVAPNVFNLCNPA

SEQ ID NO: 64193 - DNA, 747 bp, Unknown
  Obtained from environmental sample
  misc_feature (1)..(747): n is a, c, g, or t
atgaatatattgataattaacggcagcccaaagaaaaaaagcggagcttctgcgtttttcgcgaaagttttacgttttatgctttttccgcataaggtcacaacaataagccttggtatatctaaagattaccatgaaatatttgataaccttcagaatactgacgctgttgtaataacggttccgctttatgtggacagcattcccgcgcattttatacatttcctgaaagagatggagcaattttgtaaaaataatacatgcggattcatgctttatgtaatttcaaacgccggttttgtcgggggacatcataatcaggcgcatttggaacagtatcaatgctggtgcgaaagagcaggcattaaatggggtggcggattaggcataggcggaggtgtaatgcttcatgtactatacaaaataacgctgatatggagcagtatacaatttactattggagtaataaccaacatcgttaatggaaatccatttataaataatgcgttattattggattttgccaatagtatgattataatgctgtttttttacagcgggatgttattttttgaatttattcttgcatgggcaataagaaacaagaagagtataaaaaataaatacacaagagtaatgctgccttcgtttatttttattatagtcgcaaatatatttatggcattaaccggattgcttcatggcaggttggtattttcattatttaaaaaagtgaaatacacataa

SEQ ID NO: 64194 - protein, 248 aa, Unknown
  Obtained from environmental sample
  misc_feature (1)..(248): Xaa is any amino acid
MNILIINGSPKKKSGASAFFAKVLRFMLFPHKVTTISLGISKDYHEIFDNLQNTDAVVITVPLYVDSIPAHFIHFLKEMEQFCKNNTCGFMLYVISNAGFVGGHHNQAHLEQYQCWCERAGIKWGGGLGIGGGVMLHVLYKITLIWSSIQFTIGVITNIVNGNPFINNALLLDFANSMIIMLFFYSGMLFFEFILAWAIRNKKSIKNKYTRVMLPSFIFIIVANIFMALTGLLHGRLVFSLFKKVKYT

SEQ ID NO: 64195 - DNA, 369 bp, Unknown
  Obtained from environmental sample
  misc_feature (1)..(369): n is a, c, g, or t
atgaaaatattggttcatgacttaaacgaacaagattttttgcagctgggaataaataaaaatgaatttaaagtaattaacgtaaacgccgcttccgctccgtgtacaggatgttttaattgctggtttaaaactcccggtatttgtaaagtaaatgattgcctacaaaacatcggttcattattgggaaacagcgaagaaacaataataatcagtcaaaattgttacggcggatacagtgagcatgtaaagaaaatacttgatcgcaacgtttcagcaagcactccgttctttacataccgctcatggaaaataagacacataaagagatatagctctaaatggatgctactgactgtgattttatag

SEQ ID NO: 64196 - protein, 122 aa, Unknown
  Obtained from environmental sample
  misc_feature (1)..(122): Xaa is any amino acid
MKILVHDLNEQDFLQLGINKNEFKVINVNAASAPCTGCFNCWFKTPGICKVNDCLQNIGSLLGNSEETIIISQNCYGGYSEHVKKILDRNVSASTPFFTYRSWKIRHIKRYSSKWMLLTVIL

SEQ ID NO: 64197 - DNA, 441 bp, Unknown
  Obtained from environmental sample
  misc_feature (1)..(441): n is a, c, g, or t
atgcgggacattcaagattttgattcgataatgatacggctggcctcgccggaaatgatccggtcatggtcttacggcgaagtaaaaaagcctgagacaattaattaccggactttgcgcccggaaaaagaagggcttttctgcgaaaagatattcggcactaccaaagagtgggaatgttactgcggaaagtttaaatcgatacggtacaagggagtcatctgcgaccgctgcggcgttgaagttacccactttaaggttcgcagagaaaggatgggtcatattgaattggcggctcctgtttcgcacatctggtactaccgctctgtgccgagcagaatgggtcttcttcttgaccttacaactaacgctttgcgttccgtactgtactatgaaaaatacatcgtaatgattcgggagacaccgctcggccgaatctga

SEQ ID NO: 64198 - protein, 146 aa, Unknown
  Obtained from environmental sample
  DOMAIN (4)...(146): RNA polymerase Rpb1, domain 1
  misc_feature (1)..(146): Xaa is any amino acid
MRDIQDFDSIMIRLASPEMIRSWSYGEVKKPETINYRTLRPEKEGLFCEKIFGTTKEWECYCGKFKSIRYKGVICDRCGVEVTHFKVRRERMGHIELAAPVSHIWYYRSVPSRMGLLLDLTTNALRSVLYYEKYIVMIRETPLGRI

SEQ ID NO: 64199 - DNA, 393 bp, Unknown
  Obtained from environmental sample
  misc_feature (1)..(393): n is a, c, g, or t
ttgcaccatcttgtagacgacaaaatgcacgcgcgctcgaccggcccttactcgcttgttacccagcagccgctgggcggcaaggcgcagttcggcggacagcgtctcggcgaaatggaagtctgggcgctggaagcgtacggcgcggcaaacacattgcaggaacttttaacaatcaagtcggacgatatgaccgggcgttcaaagatttacgaggcaatcgtaaagggcgagccttccacgacagcgggcattcccgaatcgttcaacgtgcttgttcaggaactgcgcggcctcgcgctcgacctttcgatctttgacaatagaggaaaacaaataccgcttacagaaaaagatgatgaattaatatccaagtccggaagtaatttttaa

SEQ ID NO: 64200 - protein, 130 aa, Unknown
  Obtained from environmental sample
  DOMAIN (32)...(108): RNA polymerase Rpb2, domain 7
  misc_feature (1)..(130): Xaa is any amino acid
MHHLVDDKMHARSTGPYSLVTQQPLGGKAQFGGQRLGEMEVWALEAYGAANTLQELLTIKSDDMTGRSKIYEAIVKGEPSTTAGIPESFNVLVQELRGLALDLSIFDNRGKQIPLTEKDDELISKSGSNF

SEQ ID NO: 64201 - DNA, 2319 bp, Unknown
  Obtained from environmental sample
  misc_feature (1)..(2319): n is a, c, g, or t
gtggacgagcttattaaaaacggcgttaaatcaatttgttatattaattttgaagccgaaggttcactcaattccacaatgttgcttaattgttttgaacgggaggatattaaatttgtaaaagaggcgggaagcgaacctacaaaagaagaagcgttaatggcggtttattccgtgttaatgcccggcgagtccattactgttgatcaggctgaaaaagatttaattggaatgttcttctccgaccgccgctacgatcttggcaaggtcggccgttataaattgaataaaaaattcgctcttgatcttcccacaaataaatttaccctctctaacgatgatattatagcaaccatgaaacacctgattaaggtgtatgtcggtgatgaatatattgacgatatcgatcatcttgggaacaggcgcatacgttccgtcggcgaattaatggcgaatcaaatgaagaccgcgttcagcagaatggaacggattgccaaagaacgaatgagtttaaaagagaccgatacgattaaaccgcaggaattaatttccataaaaccgattgtcgcgtctatcaaggaattcttcgggtcgagccagttgtctcagtttatggatcaggtaaacccgcttgccgagcttactcataagaggcggcttaacgccctcggcccaggaggtctttcacgcgaccgcgccggttttgaagtgcgtgaaattcattacacccactacggcagaatgtgccccattgaaactcctgaaggcccgaatatcggtcttattgtttcgcttgcgaactatacccgcgtaaacgaatacggctttttggaaaccccataccggaaagtaagcaaaggaattgcgacaactgacattgagtacctttccgcaattgacgaggaccgttattttatagcgcaggcttccgccaaagtgaacaacaacggcactttcgccgacgatcaaatttcctgccgcagtaagggcgattacacaacccgcgagccgaaagacattcagtacatggacgtctctcccaaacagatcatttcggtatccgcttcgctgattcctttccttgaacatgacgacgctaaccgcgctttgatgggttccaacatgcagcgtcaggcggttccccttgttttcccggaagcgccgcgcgtaggcacgggaatggaagggaaatgcgcgtatgattcgggcgtgcttgtaaaagcccgccgcaacggaacagttcttcgcgtaacatcacaggagattgtagtaaaaccggaaagggcgggcaacccgaaaccggcggcgcaggtatcgcttgactctcacggcaacgatgtttataaactggtaaagtttcagagaaccaatcaggacacatgttataaccagcgccccattgttaataccggcgataaaattaccacagggcaggtaattgcggacgggcccgccacgcaaaacggcgagcttgcccttggacgcaatatcctggtaggttttatgccctggaacggttacaactacgaagactcgattcttatttccgagaaagtcgtaaaagacgatatgtttacctcaatacacataaaagaatttattgtggaaataagggaaacaaaactgggacctgagaaaatcacccgcgacattcccaacacgtcggaaaaaagccttgataacctggacagcgaaggcattatccgcgtcggcgctaaagtgcgagccggcgacattcttgtcggcaaggtaacgcccaagagcgagacggagacgacgcctgaattcaaactgctcaattcaatcttcggcgaaaaagccaaggaagtgcgggacacctcccttaaagtgccgcacggcatagagggaacaataattgacatccagcggcttaagcggtcggaacatgacagcagtctaagccccggagttgacgagcaggttaaggtgttaatcgccgcgaagagaaaactccgtgaaggcgataaaatggcgggacgccacggaaacaaaggcgttgtcgcccgcattctgccggaagaggacatgccgtttatggaagacggaaccccgctggatatttgccttaccccgctgggcgttccttcgcgcatgaacataggccagcttttggaaaccgagcttggctgggcgggctccactcttaacgagtggtattcagctcccgtattccagtctccttcgacggatcaaatagaagaaaaacttaaagaagccggattacccgtaacaagcaaaacaattttgcgcgacggcagaaccggggaaccgtttataaatccgatttctgcggagtaa

SEQ ID NO: 64202 - protein, 772 aa, Unknown
  Obtained from environmental sample
  DOMAIN (203)...(272): RNA polymerase Rpb2, domain 3
  misc_feature (1)..(772): Xaa is any amino acid
MDELIKNGVKSICYINFEAEGSLNSTMLLNCFEREDIKFVKEAGSEPTKEEALMAVYSVLMPGESITVDQAEKDLIGMFFSDRRYDLGKVGRYKLNKKFALDLPTNKFTLSNDDIIATMKHLIKVYVGDEYIDDIDHLGNRRIRSVGELMANQMKTAFSRMERIAKERMSLKETDTIKPQELISIKPIVASIKEFFGSSQLSQFMDQVNPLAELTHKRRLNALGPGGLSRDRAGFEVREIHYTHYGRMCPIETPEGPNIGLIVSLANYTRVNEYGFLETPYRKVSKGIATTDIEYLSAIDEDRYFIAQASAKVNNNGTFADDQISCRSKGDYTTREPKDIQYMDVSPKQIISVSASLIPFLEHDDANRALMGSNMQRQAVPLVFPEAPRVGTGMEGKCAYDSGVLVKARRNGTVLRVTSQEIVVKPERAGNPKPAAQVSLDSHGNDVYKLVKFQRTNQDTCYNQRPIVNTGDKITTGQVIADGPATQNGELALGRNILVGFMPWNGYNYEDSILISEKVVKDDMFTSIHIKEFIVEIRETKLGPEKITRDIPNTSEKSLDNLDSEGIIRVGAKVRAGDILVGKVTPKSETETTPEFKLLNSIFGEKAKEVRDTSLKVPHGIEGTIIDIQRLKRSEHDSSLSPGVDEQVKVLIAAKRKLREGDKMAGRHGNKGVVARILPEEDMPFMEDGTPLDICLTPLGVPSRMNIGQLLETELGWAGSTLNEWYSAPVFQSPSTDQIEEKLKEAGLPVTSKTILRDGRTGEPFINPISAE

SEQ ID NO: 64203 - DNA, 639 bp, Unknown
  Obtained from environmental sample
  misc_feature (1)..(639): n is a, c, g, or t
gtggagcccgcccagccaagctcggtttccaaaagctggcctatgttcatgcgcgaaggaacgcccagcggggtaaggcaaatatccagcggggttccgtcttccataaacggcatgtcctcttccggcagaatgcgggcgacaacgcctttgtttccgtggcgtcccgccattttatcgccttcacggagttttctcttcgcggcgattaacaccttaacctgctcgtcaactccggggcttagactgctgtcatgttccgaccgcttaagccgctggatgtcaattattgttccctctatgccgtgcggcactttaagggaggtgtcccgcacttccttggctttttcgccgaagattgaattgagcagtttgaattcaggcgtcgtctccgtctcgctcttgggcgttaccttgccgacaagaatgtcgccggctcgcactttagcgccgacgcggataatgccttcgctgtccaggttatcaaggcttttttccgacgtgttgggaatgtcgcgggtgattttctcaggtcccagttttgtttcccttatttccacaataaattcttttatgtgtattgaggtaaacatatcgtcttttacgactttctcggaaataagaatcgagtcttcgtag

SEQ ID NO: 64204 - protein, 212 aa, Unknown
  Obtained from environmental sample
  misc_feature (1)..(212): Xaa is any amino acid
MEPAQPSSVSKSWPMFMREGTPSGVRQISSGVPSSINGMSSSGRMRATTPLFPWRPAILSPSRSFLFAAINTLTCSSTPGLRLLSCSDRLSRWMSIIVPSMPCGTLREVSRTSLAFSPKIELSSLNSGVVSVSLLGVTLPTRMSPARTLAPTRIMPSLSRLSRLFSDVLGMSRVIFSGPSFVSLISTINSFMCIEVNISSFTTFSEIRIESS

SEQ ID NO: 64205 - DNA, 933 bp, Unknown
  Obtained from environmental sample
  misc_feature (1)..(933): n is a, c, g, or t
atggttaaggtaaagcaagcggagaagcgtcagtacattgggaaagatattcaggatgtgatggatttgccggatcttatcgatattcaaattcattcttacgagcgttttttacaaagagataaaatcagtaaaaaagaaaaacctgcgtcacaggggcttcaggaagtatttgaagccacgttcccgataataagccccaatgaggatatgaaacttgaatttgaacactacacctttgatgaagacaatatcaaagtaacagaatttgaatgtaagcaaaaaggtcttaattacgctgttccgcttaaagcgcggataaatcttgtttttcagcagaccggcgaaatccgtcaaaaagatatttacatgggcgatattccccttatgactgaaagaggaacgtttattattaacggagcggagagggtagtggtttcgcagatacaccgctcacccggcgttattttttgtaaagaaaaggaagtttactcgtcgcggattatcccctaccgcggcagttggatcgagtttgaaatcgatcagaagcgcgaactgatttacgctaagattgacagaaaaaaaagaatccttgggactatttttcttcgtactctaggtttttcaaccagagaggaaataatcgaagctttttatgttaccgaaattttaaaaataaaagatgaccgcgagacaaaggaaaaaatttccggtatggttctcgccaaacccgttatggtcaaagatgaaaccggctccaagggcaatgaaaaggcgcttacagggccggtgaaaaactccatccgcataatgtggacgagcttattaaaaacggcgttaaatcaatttgttatattaattttgaagccgaaggttcactcaattccacaatgttgcttaattgttttgaacgggaggatattaaatttgtaa

SEQ ID NO: 64206 - protein, 310 aa, Unknown
  Obtained from environmental sample
  DOMAIN (25)...(252): RNA polymerase beta subunit
  misc_feature (1)..(310): Xaa is any amino acid
MVKVKQAEKRQYIGKDIQDVMDLPDLIDIQIHSYERFLQRDKISKKEKPASQGLQEVFEATFPIISPNEDMKLEFEHYTFDEDNIKVTEFECKQKGLNYAVPLKARINLVFQQTGEIRQKDIYMGDIPLMTERGTFIINGAERVVVSQIHRSPGVIFCKEKEVYSSRIIPYRGSWIEFEIDQKRELIYAKIDRKKRILGTIFLRTLGFSTREEIIEAFYVTEILKIKDDRETKEKISGMVLAKPVMVKDETGSKGNEKALTGPVKNSIRIMWTSLLKTALNQFVILILKPKVHSIPQCCLIVLNGRILNL

SEQ ID NO: 64207 - DNA, 387 bp, Unknown
  Obtained from environmental sample
  misc_feature (1)..(387): n is a, c, g, or t
atggcagccacaaaagaagaaattttagaagcgattgcgtccatgacggttctggaagtttcagaattggtaaaaatgatggaagagaagttcggcgtttcagccgccgcccctgttgcggtagcggtcgccggagccggcggtggagcggcggctcccgcggcggaagagaaaacagagtttaatgttattctcaaagcatttgacgatgccaagaaaattgccgttattaaagaagtccgcgccgttaccggtcttggccttaaagaggcaaaagatctggtcgaaggagcgccaaaaccgctcaaagaaggcgtttccaaggacgaggcggccaaaatcaaggatgtcgtcaccgctgcaggcggtactgttgagattcagtaa

SEQ ID NO: 64208 - protein, 128 aa, Unknown
  Obtained from environmental sample
  DOMAIN (60)...(128): Ribosomal protein L7/L12 C-terminal domain
  misc_feature (1)..(128): Xaa is any amino acid
MAATKEEILEAIASMTVLEVSELVKMMEEKFGVSAAAPVAVAVAGAGGGAAAPAAEEKTEFNVILKAFDDAKKIAVIKEVRAVTGLGLKEAKDLVEGAPKPLKEGVSKDEAAKIKDVVTAAGGTVEIQ

SEQ ID NO: 64209 - DNA, 462 bp, Unknown
  Obtained from environmental sample
  misc_feature (1)..(462): n is a, c, g, or t
gtgacgacatccttgattttggccgcctcgtccttggaaacgccttctttgagcggttttggcgctccttcgaccagatcttttgcctctttaaggccaagaccggtaacggcgcggacttctttaataacggcaattttcttggcatcgtcaaatgctttgagaataacattaaactctgttttctcttccgccgcgggagccgccgctccaccgccggctccggcgaccgctaccgcaacaggggcggcggctgaaacgccgaacttctcttccatcatttttaccaattctgaaacttccagaaccgtcatggacgcaatcgcttctaaaatttcttcttttgtggctgccatattatcttctcctaaatatgtgttatacgcctcatacgaagcgcttacccgtctgagcctaagaccaaacaggcatttatttaaaccgacaggaacggcagcttag

SEQ ID NO: 64210 - protein, 153 aa, Unknown
  Obtained from environmental sample
  SIGNAL (1)...(21)
  misc_feature (1)..(153): Xaa is any amino acid
MTTSLILAASSLETPSLSGFGAPSTRSFASLRPRPVTARTSLITAIFLASSNALRITLNSVFSSAAGAAAPPPAPATATATGAAAETPNFSSIIFTNSETSRTVMDAIASKISSFVAAILSSPKYVLYASYEALTRLSLRPNRHLFKPTGTAA

SEQ ID NO: 64211 - DNA, 2244 bp, Unknown
  Obtained from environmental sample
  misc_feature (1)..(2244): n is a, c, g, or t
ttgggagcgcgtcgtcgtcagaaggtttctttcgccgcagatccggccgtggttaagcccatggccgaggaggcgcccgtcgccgtcgccgacccggcggacgaggttgaccccaccgaacctgagattacggtaaacgactcggcgggcatcgacctcaccaccgacatcgacgagcttctgcggcaggcgcgcaaggcttgcgacgacagcttgtataccgtcgccgactccatactgcggaaggccgcggcgttcctcatgctgaacagcgagctgcccgacagcggcgccgaatggttcccgttgcaggattatatcgcggacattatctccatgtatgcggagcacttcccggccggcttcgaagcgccggaggagatctcctccatgatattcagccgccacctcttggaatcgctcttagactcgctcaaaatatcgtcccaagacagtatcttcctcgcccgcctatccggcaagcgcggcgttacctacgatattccgcttgtgtggaacgaccgcgtcaagcgcgcgctgctcttctacctcagaacgcgcaaaggcatctttgaccgctggctctatagggccggccactacctccccgtgatgaagcagatgttcgccgactccgggctgccgcgcgacctcgcccacctgccgatcatagagagcggcttcaacccgcacgcctactcgcgggcgcacgccgccgggatatggcagttcatcccctccacgggcaaaatgtacgggttgcggcagaactactggatagacgagcggcgcgaccccataaaatcgaccggggcggcgatacgctacctgagcaagttatacggcgacttcaacaactggcacatagcgctggcctcctacaactgcggcgagaacggcatggcgcgggcgataaacaaggccggaggcgtaaacgactattgggcgctctctctgcccaaggagacgatgaactacgtcccgctgtttctagccgcgcttgtaatagccaagaatccggacgtcttcgatttcgagttccctgacggcggcgtcttcgaccccgacacggtctttgtgaacgactgcttggagatgaatacaatcgcggacggtgtaggcgtgccgcttgacaccctgaccgtaatgaacccgcatatcctgcactggtgtacgccgccggacatgcaggacgtgcgcatttacctgcccaaggggtacgccgacaaattcaaggctttttacgacagcctgccggacgccaagaaaacgaagttctaccgttacactgttaagggcggcgacaatctactgcaaatagcgcgtaacttcagggtgtcggtggaggcgctgcgcgagataaacaaaatgaagacgaattccatagccgtcggcaagtacgtcataatcccaatcccggtgaacgattcggtacccacctaccttgcctcgcacctaaacgtcgtggatagggagcgccggggnccggggccggncggcccgnccccgncggtaaacagcggaggcggttttaaacggcagggcgtcgtgacatcgcgtaccggcaaaagatcacctacaagtacgcaccggcgaaacgctgtactcaatatcaaacactttcacgtgtcggtgaaagacctgttggcgtggaactacttggcaagcccgcgcagtctgaaagccgagcaaaccttggtcatataccagcagggcggctccgagcaatcggagtccgaccaaccgccgccctccgccaataagcccgccgctcaagcaacccaagccgccgcgcccccgcccccccatacggtagtaaggggcaacgcgacgctacactccggcaaacgtctggtaaagcagggcgaaacgctctacggaatagcggcggagttaggagtgccggtaagcgaattggcaaggataaacggcctaaacgcaagacgcccgctgatattccccggcgacgtactggtctacaccccaaagccggccggccagaccgcgggaacgggctcaaccggaacaaccggcggaacaacagctagccctacggcgtcggcgccgcgcccatcgccgacatcaggatcgggacaagttgtgatatacacggtaaagacaggcgacaatctatggcgaatagccttaaacttcggcgtaacggtagactcgataagggaaagcaacaacctgacgccgagttctgtaattatgccgggagacgtattaaggattacgcgttaa

SEQ ID NO: 64212 - protein, 747 aa, Unknown
  Obtained from environmental sample
  DOMAIN (202)...(317): Transglycosylase SLT domain
  misc_feature (1)..(747): Xaa is any amino acid
MGARRRQKVSFAADPAVVKPMAEEAPVAVADPADEVDPTEPEITVNDSAGIDLTTDIDELLRQARKACDDSLYTVADSILRKAAAFLMLNSELPDSGAEWFPLQDYIADIISMYAEHFPAGFEAPEEISSMIFSRHLLESLLDSLKISSQDSIFLARLSGKRGVTYDIPLVWNDRVKRALLFYLRTRKGIFDRWLYRAGHYLPVMKQMFADSGLPRDLAHLPIIESGFNPHAYSRAHAAGIWQFIPSTGKMYGLRQNYWIDERRDPIKSTGAAIRYLSKLYGDFNNWHIALASYNCGENGMARAINKAGGVNDYWALSLPKETMNYVPLFLAALVIAKNPDVFDFEFPDGGVFDPDTVFVNDCLEMNTIADGVGVPLDTLTVMNPHILHWCTPPDMQDVRIYLPKGYADKFKAFYDSLPDAKKTKFYRYTVKGGDNLLQIARNFRVSVEALREINKMKTNSIAVGKYVIIPIPVNDSVPTYLASHLNVVDRERRGPGPXGPXPXVNSGGGFKRQGVVTSRTGKRSPTSTHRRNAVLNIKHFHVSVKDLLAWNYLASPRSLKAEQTLVIYQQGGSEQSESDQPPPSANKPAAQATQAAAPPPPHTVVRGNATLHSGKRLVKQGETLYGIAAELGVPVSELARINGLNARRPLIFPGDVLVYTPKPAGQTAGTGSTGTTGGTTASPTASAPRPSPTSGSGQVVIYTVKTGDNLWRIALNFGVTVDSIRESNNLTPSSVIMPGDVLRITR

SEQ ID NO: 64213 - DNA, 900 bp, Unknown
  Obtained from environmental sample
  misc_feature (1)..(900): n is a, c, g, or t
gtgaaatcatcaacccacaaatggatagtaatagccatcttctccgcaaccctattcctatccataataatcctaaccgtttcgctgacactggacccgagtagagccggctcgagcggcggtttgagtttcggcaagcgtttggccgttgtgcgtcttgagggcgaaatattcgacgccgcctggcacgcggatttgctgcgcgggtacagaaccaacaacaacgtggccggcgtgcttttgcgcgtagactctcccggcggcgcggtcgcgccgtcgcaggagctttatagggaggttgcggcctacttggaggcggagaagccgctcgtcgtcagcatgggcaacgtggcggcgtcgggcggttactatgtcagcgcacccgctttaaagatattcgcctcgcccggcaccatgacaggaagcataggcgtaatcttctccatgcccatgtatcaggagctggccaagaaggtcggggttgattttcgcacgatgaaggccggggatatgaaggacgccgggagcccgttccgtcagatgacggataaggaggcgaagtattttcaggcgctgctggacgacgttcacgagcagttcatagcggatgtggcgacggggcgcagtcttgacacggttaaggtgagggcgctggccgacgggcgcgtgcttaccgggaggcaggctgtggagagcggcttggtcgacacgctcggcggcttcgcggaggcgttgcgctatttgggagaggtgtgcggcgtatcggagtcgtccaagcccatagaaaagcgtccggcggtgggttggcgcgagtttttgtttgagtcggcgcagaagcgcgttccgggtctaggcgcgctttcgcggcgggcggggctatactacctgcttgatatgtaa

SEQ ID NO: 64214 - protein, 299 aa, Unknown
  Obtained from environmental sample
  SIGNAL (1)...(26)
  DOMAIN (102)...(255): Peptidase family S49
  misc_feature (1)..(299): Xaa is any amino acid
MKSSTHKWIVIAIFSATLFLSIIILTVSLTLDPSRAGSSGGLSFGKRLAVVRLEGEIFDAAWHADLLRGYRTNNNVAGVLLRVDSPGGAVAPSQELYREVAAYLEAEKPLVVSMGNVAASGGYYVSAPALKIFASPGTMTGSIGVIFSMPMYQELAKKVGVDFRTMKAGDMKDAGSPFRQMTDKEAKYFQALLDDVHEQFIADVATGRSLDTVKVRALADGRVLTGRQAVESGLVDTLGGFAEALRYLGEVCGVSESSKPIEKRPAVGWREFLFESAQKRVPGLGALSRRAGLYYLLDM

SEQ ID NO: 64215 - DNA, 963 bp, Unknown
  Obtained from environmental sample
  misc_feature (1)..(963): n is a, c, g, or t
atgagcgaaaaaacgggccgtctgatgcttgaggtgcgcgggttgaacaagcgcttcgggcaggtgagagccgtgagcgacctgagtttcgaggtgcgccgcggcgaggtcttcggcttcctggggccaaacggcgccgggaagagcacgactatgcgcataatcacgtgcttcatcccgcccacgtccgggtcggtgctggtggacgggctgagcacggcggatcaagaccttgccgtgcgcgccaagatcgggtacctgcctgagagcacgcccctatacggcgacatgaccgtaaaggagtatttggcctttgcgggtcagatcagggggttgcggggggcggcgctcaagtcgcggacggacgagatgttttccgtgtgcgccctctcgaagatggccgaccggcagatcggcaagctgtcgaaggggtacagacagcgcgtcgggctggcccaggctatgatacacgacccggatttgctgattttggacgagcctatgtccgggctcgaccccaaccagattatcgagatacgcaacctcataaagaagttcggggaggagaagacggtcatatactgctcgcacatcctctcggaggtctccgcgacctgcgaccgtatccttataataaaggacgggcgcgtcgtggccacgggaacgcccggcgatctgacctccgggcataagggcggctcgcggtacacggcgagggtgaagggcgacgtcgccgcggtctaccgcagtcttcagtccgtgacaggggtatcgtgcgtcgatactgaggtcgtagcgccggaaggatgggtttgcgcccgcataagcgccgagggcaaggaggacataggcgaaggtatattcaagcgcgtcgtggagagcgggttcagtctgtcggagcttagacgcgaccagacgagtttggaggaggtatttacggaacttacaggaggtagcaaatga

SEQ ID NO: 64216 - protein, 320 aa, Unknown
  Obtained from environmental sample
  DOMAIN (35)...(215): ABC transporter
  misc_feature (1)..(320): Xaa is any amino acid
MSEKTGRLMLEVRGLNKRFGQVRAVSDLSFEVRRGEVFGFLGPNGAGKSTTMRIITCFIPPTSGSVLVDGLSTADQDLAVRAKIGYLPESTPLYGDMTVKEYLAFAGQIRGLRGAALKSRTDEMFSVCALSKMADRQIGKLSKGYRQRVGLAQAMIHDPDLLILDEPMSGLDPNQIIEIRNLIKKFGEEKTVIYCSHILSEVSATCDRILIIKDGRVVATGTPGDLTSGHKGGSRYTARVKGDVAAVYRSLQSVTGVSCVDTEVVAPEGWVCARISAEGKEDIGEGIFKRVVESGFSLSELRRDQTSLEEVFTELTGGSK

SEQ ID NO: 64217 - DNA, 327 bp, Unknown
  Obtained from environmental sample
  misc_feature (1)..(327): n is a, c, g, or t
atgaaatccctgctggaaccgacggagatcgcgatcgactgcgcgatgaacggcgtcgaggcggtgcggatgttcagcgaaaaccccgaaagctacgatttgattttaatggacctgcagatgccggaaatggacggttacgaagccacccgtaaaatcagggctatggaagaaggacgaccgaaaaaagttccgataattgccatgaccgccaatgtcttcaaggaagatattgaaaaatgccttcaagtcggcatgaacgcccatctcgggaagccgattgatttcaacgaagtgatggaaaagctgcaattctatttgaagtag

SEQ ID NO: 64218 - protein, 108 aa, Unknown
  Obtained from environmental sample
  DOMAIN (1)...(104): Response regulator receiver domain
  misc_feature (1)..(108): Xaa is any amino acid
MKSLLEPTEIAIDCAMNGVEAVRMFSENPESYDLILMDLQMPEMDGYEATRKIRAMEEGRPKKVPIIAMTANVFKEDIEKCLQVGMNAHLGKPIDFNEVMEKLQFYLK

SEQ ID NO: 64219 - DNA, 1479 bp, Unknown
  Obtained from environmental sample
  misc_feature (1)..(1479): n is a, c, g, or t
atgaaacaattcatggataagaattttttgctttcaaacaggacggcggaaaaactctaccatgaggccgcggcgggtgagccgattttcgactaccactgccatcttataccgaaagaaattgccgataaccgccgttttccggatctggcttccgtatggcttggcggcgaccactacaaatggaggcagatgcgttccaacgggattgatgagcggcttatcaccggcaacgcggaaccctacgacaaattccttgcctgggcggatacggttccaaagcttatcgggaaccccctgtaccactggacacatcttgaactgcaacgctattttgacattaacgagcctttgaattcgaagagcgccccggcgatatggaaagccgccaatgaaaaacttgccaatgacccctccctttcggtatttggaatcttcaagaaattcaatgtgtatgccctgggaacaaccgatgatccggctgacagcctggaatggcatgagaaagtaaaaagcgcaccctgtgggtgcgacgcgactgaaaccctggttctgccttctttcaggcctgaccgcgtcctcaacatagaaaaacccgattttgccgaatatatcgcaaaactgggaacggcatccggaaaaaaaataaactgccttgacgacctgttaggcgcaattagagcgcgtattgatttcttccataaaacgggctgccgcatttccgatcacggacttgaatttataccatatgccaccgcgtcatgcgacacctgccttgcccgcccttccgggataaattttgttcaatgggaaaaggaagtaaaggacattttcgcgcaggccatggcggggaaaaagccggacgcaaggggagcggaagcctggaagacattttgcttcaatttccttggggaggaatacgcgaagcggggctgggcaatgcagatacacgttgcggcgattcgcagcgccaacagcgccatgcttgccgcgcttggcccggacacgggtttcgacgcggtagcggattaccctgtcgcggaaaaactcgcccgttttatggaccttctggtttcaagggacaagctgcccaaaactatcctctacagccttaacttcaaagacctgtacccgatggcgacgatcatgggcagtttccagggcgaatctgatcccgggaaaaaagccgaacccggtaagatacagcttggctcaggatggtggttcctcgatcacatagacggcatggaagcgcagatgaaactgctggggaataccggtttactgtcgcgtttcgtgggcatgctcaccgattcgcgcagtttcctctcctatccgcggcatgagtatttccgccgcgtgctttgcgacatacttggaacctgggctgaaaacggcgaaatccccaatgactttgaactgcttggaggcatggtaagggatatttctttcaggaacgcgcagcgctacttcaaatag

SEQ ID NO: 64220 - protein, 492 aa, Unknown
  Obtained from environmental sample
  DOMAIN (1)...(492): Glucuronate isomerase
  misc_feature (1)..(492): Xaa is any amino acid
MKQFMDKNFLLSNRTAEKLYHEAAAGEPIFDYHCHLIPKEIADNRRFPDLASVWLGGDHYKWRQMRSNGIDERLITGNAEPYDKFLAWADTVPKLIGNPLYHWTHLELQRYFDINEPLNSKSAPAIWKAANEKLANDPSLSVFGIFKKFNVYALGTTDDPADSLEWHEKVKSAPCGCDATETLVLPSFRPDRVLNIEKPDFAEYIAKLGTASGKKINCLDDLLGAIRARIDFFHKTGCRISDHGLEFIPYATASCDTCLARPSGINFVQWEKEVKDIFAQAMAGKKPDARGAEAWKTFCFNFLGEEYAKRGWAMQIHVAAIRSANSAMLAALGPDTGFDAVADYPVAEKLARFMDLLVSRDKLPKTILYSLNFKDLYPMATIMGSFQGESDPGKKAEPGKIQLGSGWWFLDHIDGMEAQMKLLGNTGLLSRFVGMLTDSRSFLSYPRHEYFRRVLCDILGTWAENGEIPNDFELLGGMVRDISFRNAQRYFK

SEQ ID NO: 64221 - DNA, 309 bp, Unknown
  Obtained from environmental sample
  misc_feature (1)..(309): n is a, c, g, or t
atggatataggacaggagaggaccggcaagtcagcagtggtgctgacgcttaacggccgccttgacacggtaaacgcccccctgcttgagagcaagattaaagagcaggaagacataacggaactgacgcttgattttaaaggggttaattatatttcaagtatgggtctgcgggtattattgcaggcaaagaaggcaatgaaagccgatggcgacaggttgaatataataaatatgcaggattccgtccgtgaaatttttgagatgaccggtttcctaaatctgatggaacaagaagaaaaagcataa

SEQ ID NO: 64222 - protein, 102 aa, Unknown
  Obtained from environmental sample
  DOMAIN (4)...(102): STAS domain
  misc_feature (1)..(102): Xaa is any amino acid
MDIGQERTGKSAVVLTLNGRLDTVNAPLLESKIKEQEDITELTLDFKGVNYISSMGLRVLLQAKKAMKADGDRLNIINMQDSVREIFEMTGFLNLMEQEEKA

SEQ ID NO: 64223 - DNA, 789 bp, Unknown
  Obtained from environmental sample
  misc_feature (1)..(789): n is a, c, g, or t
gtggcatacctatacgaaacccatcttcacacttctcctgtcagtaaatgcgctatatcgcatggttctgattatattgccggttatcaggacttgggatacgccggtatcattgtaaccgatcatttttttcacggtaattcgggtttgtccagaaaacttccgtggaacgaatgggtaaacgaattttgcaagggctacgaagaggcaaaggaagagggcggcaggcgcgggcttgatgtctttttcggctgggaagaaacttttgacgtctgcgatgattatcttgtttacgggcttgataaagcgtggcttttggaacaccccgaaatgcgtttttggagcaggggagagcagtacgccgaggtaaaaaaagccggcggctgcgtcgtgcaggcccaccctttcagggagcggcactatatttcgcgcgttattttgtccacgggctgcgtggacggaattgaagtagccaacaggggaaatgatgagagcgccgacgcccttgcctaccgttacgcggctaaattaaaaaagccaatgaccgcgggctccgacattcatgacgcaagatcggtaaaagacgaaaatgtttttggagtataccttgataaaaaactgaacagtattcaggattatgttaaagcaatttgtaataatgaaattaccggccttaaaacggacgagtcaaggctggtttttcacggtacggaaaatgtcatgcttcctgtcgacgtgcgcgacgaanacgacaaggtaacaggcaaaagctggaaggaggttatatga

SEQ ID NO: 64224 - protein, 262 aa, Unknown
  Obtained from environmental sample
  DOMAIN (5)...(191): PHP domain
  misc_feature (1)..(262): Xaa is any amino acid
MAYLYETHLHTSPVSKCAISHGSDYIAGYQDLGYAGIIVTDHFFHGNSGLSRKLPWNEWVNEFCKGYEEAKEEGGRRGLDVFFGWEETFDVCDDYLVYGLDKAWLLEHPEMRFWSRGEQYAEVKKAGGCVVQAHPFRERHYISRVILSTGCVDGIEVANRGNDESADALAYRYAAKLKKPMTAGSDIHDARSVKDENVFGVYLDKKLNSIQDYVKAICNNEITGLKTDESRLVFHGTENVMLPVDVRDEXDKVTGKSWKEVI

SEQ ID NO: 64225 - DNA, 549 bp, Unknown
  Obtained from environmental sample
  misc_feature (1)..(549): n is a, c, g, or t
atgaacgaaaaagcggctcatgtcccggaaaggattaaggaattgagggaaattcttgatataagcgcccttgacatggcgaaggatacggagattccgtttgacacttacacaaaatatgagtcgggcgagatagatataccgatcagcgttttgtatacgattgccggccgtcttggaacggacgttacggttcttttgacgggagaagaggcaagaatggacagcgcggccgtatgcagaaaggacaagggcgttcagatcgaaagatatccgggatatgaattttcaagccttgcctataactttaagcacaggacaatggagcccttgctggtttcccttgattcttccaagccgcaggcggcgcaagtgtcccattcggggcaggagtttaactttgtgattgaaggtaaagtaaaagtgactgtaggaaagagcgagtatgtcctttcaaccggagattcaatttattttgacgcccgcctgccccacggacagagcgccgccggcggaagagcgcaatttattacaataatacaggaataa

SEQ ID NO: 64226 - protein, 182 aa, Unknown
  Obtained from environmental sample
  DOMAIN (12)...(66): Helix-turn-helix
  misc_feature (1)..(182): Xaa is any amino acid
MNEKAAHVPERIKELREILDISALDMAKDTEIPFDTYTKYESGEIDIPISVLYTIAGRLGTDVTVLLTGEEARMDSAAVCRKDKGVQIERYPGYEFSSLAYNFKHRTMEPLLVSLDSSKPQAAQVSHSGQEFNFVIEGKVKVTVGKSEYVLSTGDSIYFDARLPHGQSAAGGRAQFITIIQE

SEQ ID NO: 64227 - DNA, 1716 bp, Unknown
  Obtained from environmental sample
  misc_feature (1)..(1716): n is a, c, g, or t
atgaacgaaatagtttcaagatactgcccccgtattgattttgacagttacgaggatttttacgctaactacaaatgcaataccccagaagattttaattttgcctacgacgtagtagacgagtggtcaaggcttcagccggaaaaactcgcccttttgtggacggacgatacaaaagaaattaaatcttttacttttaccgagatcaagcgcctttcagacaaatcggcaaacgcttttttgtcgttaggcataaaaaaaggcgacgttgtaatgctgattttaaaacagcgtcccgaagtctggatacttatgtgcgcgttaatgaaaatcggggcgatctgtattcccggtacttaccagcttacacccaaggatttggaataccgctgtaacatagccgacgtaaaacttttagtcaccatagacgacgctgatgtgttaaaaaacattgatttggcgcgtccaaattgccaaaagctggaaaagatcgcgattgtgggaaattcaattcccgcgggtttcttaaatatgcgcgccgaaattgaaaaggcggatcaaaactttacaagaatcccaagcatggcaaaagaccctatgctggtttatttttcctccggcactacgggaatgcccaagatggttctgcataatcacgcgatccccttagggcacattgtcaccgcgaaatactggcactgcgtggaagacaacggagtccaccttacgcagactgattcaggctgggcaaaattcgcgtggggaaaaatttacggccaatggatatgcggagcggctataggcgcttacgacacggaaaaatttacccccaagggaatgttggaagccctgcaaagactgcgccccgtaacattctgcgcccccgccactgttttccgctatcttattaaagaagacctttccggttatgactttagtttcataaaccatacgtccgtggcgggcgagcccttaagccccgaagtttacaataaattcaaagagcttacaggccaggaaatccgcgaaggattcggccagtcagaaacctcggtaatggcggctgtattcaaatggctgccggtcaagccgggttcaatgggaaggcccgcgccgttattcgatcttaagctgttagacgaagacggcggcgtttgcgacaaaggcatagtcggcaatatgagcattacaagagccggtaaaaacatgtacgaaatcgaaggcgcaaaacccgacggcgcagtccccgtaatcggaatgtctgaaactcccggattgttccgcggttattggaaagacaaagagattaccgaatcttgttggaacggcggtatgtatcagacaggcgacatggcatggagcgatgacgacggctatctatggtttgtaggccgcaatgacgacgtaataaaatgctccggctaccgcatcggccccttcgaagtggaaagcgcccttatggaacatccctcggtactggaatgcgccgtaaccgccgcccccgacgcaatgcgcggacaggtagtaaaagcgacaattgttttggcgcgcggctttaccgccggcgaagaattaatccgcgagcttcaaaaccacgtaaaacgcgtaaccgccccctacaaatacccgcgcatagtggaatttgtgccggaactgccaaaaactataagcggaaaaatacaaaggaatatgatacgcaagaaagattttagttaa

SEQ ID NO: 64228 - protein, 571 aa, Unknown
  Obtained from environmental sample
  DOMAIN (65)...(497): AMP-binding enzyme
  misc_feature (1)..(571): Xaa is any amino acid
MNEIVSRYCPRIDFDSYEDFYANYKCNTPEDFNFAYDVVDEWSRLQPEKLALLWTDDTKEIKSFTFTEIKRLSDKSANAFLSLGIKKGDVVMLILKQRPEVWILMCALMKIGAICIPGTYQLTPKDLEYRCNIADVKLLVTIDDADVLKNIDLARPNCQKLEKIAIVGNSIPAGFLNMRAEIEKADQNFTRIPSMAKDPMLVYFSSGTTGMPKMVLHNHAIPLGHIVTAKYWHCVEDNGVHLTQTDSGWAKFAWGKIYGQWICGAAIGAYDTEKFTPKGMLEALQRLRPVTFCAPATVFRYLIKEDLSGYDFSFINHTSVAGEPLSPEVYNKFKELTGQEIREGFGQSETSVMAAVFKWLPVKPGSMGRPAPLFDLKLLDEDGGVCDKGIVGNMSITRAGKNMYEIEGAKPDGAVPVIGMSETPGLFRGYWKDKEITESCWNGGMYQTGDMAWSDDDGYLWFVGRNDDVIKCSGYRIGPFEVESALMEHPSVLECAVTAAPDAMRGQVVKATIVLARGFTAGEELIRELQNHVKRVTAPYKYPRIVEFVPELPKTISGKIQRNMIRKKDFS

SEQ ID NO: 64229 - DNA, 465 bp, Unknown
  Obtained from environmental sample
  misc_feature (1)..(465): n is a, c, g, or t
atgcgctgcccattctgcagtcatcaagaagacaaagtagtcgattcgcgtaccagcaaagagggccgcgccgtccgtaggcgccgcgagtgcctagcctgcggtaagcgctttaccacatacgagtacatagagaacatttcgataacgataataaagaacgaccagcgccgcgaaccctacgagcgccagaaactcatgcaaggcatcaccgccgcatgcaagaagcgccccataagcgtgaaaaaaatcgagagcatcgtggacaaaatagagaatcaaatagagaaaatcagcaaaagcgaggtgcccagcgtcgatatcggaaagatggtgatggaggagctgtacgcgctcgacgaagtggcctacgtcagattcgcctccgtctacaggaagttcaaggatataagcgactttatctcggaggtcaaggggatagggtcaaagtccggtcattgctga

SEQ ID NO: 64230 - protein, 154 aa, Unknown
  Obtained from environmental sample
  DOMAIN (49)...(139): ATP cone domain
  misc_feature (1)..(154): Xaa is any amino acid
MRCPFCSHQEDKVVDSRTSKEGRAVRRRRECLACGKRFTTYEYIENISITIIKNDQRREPYERQKLMQGITAACKKRPISVKKIESIVDKIENQIEKISKSEVPSVDIGKMVMEELYALDEVAYVRFASVYRKFKDISDFISEVKGIGSKSGHC

SEQ ID NO: 64231 - DNA, 1227 bp, Unknown
  Obtained from environmental sample
  misc_feature (1)..(1227): n is a, c, g, or t
ttgataggtatggaaacgaactcaaaggccccgaacggctccggtaccccaaacggcagtccggaggagattcagcgctacatcgtgcagaagttggacatcgtcggccagctggccggcgggatttcccacaatttcaacaaccagctgaccggcatcatgggcttcgccaacctcatagcgctccgggcggagaacgagaacatcaagaagttcgccgaagagattatcggcatctgcaaaaacgccgggaacatgatgagggagttgctcactttcgcccgatacaagccgatgagcgccaccgccctaaacgtcaacagcgcaataaccacggtctccaacctgctcgccaatagcatagacaagaggatagaaatcgtcacggaactgagttctgcgcagtgcaatgttttcgccgacgcggttcagttgcagagtttgctctttaacatcgccctaaactcgaaggacgctatgcccacgggcggcaagctcgttttctccactaagcgaatctacgaggaaaccgccgcggcgccctgcggctacgtgcggatagagatcgccgacaccggccacggtttcgacgacgatgtgaagaggcggatatttgagcctttcttcacgaccaaagctcaggggcacgtggggctggggctctgcgccgcgtacaacctcgtcactatgatgaacggaaccattgaactgaacagcgagataggcaaggggacgtctgtggtggttatgcttccgatccactcggacgcttcgggcggcggcgacggtacggcggcggtcaaggcggctgccaagcagggcgcggcggcgacggaaccggtgagcgccgagaagaaaactcgcgggacgatcctcctcgtggacgacgacaactgcatacgcgaaagcctctcggccttcctgaggggcagcgactacagcgtcttcacggctatagacgggctggacgccgtggagaagtacggcaagacggagggccgctccatagatctggtgatactcgacatggtcatgccgcgaatggacggcaaggaagccttcgtcaagatgaaggcgattaacccgtcaataaaggcaatcggcataaccggctacacgaactacacccaagaggagatggcggcgctcggcatgaagaagatgctgcacaagcccttcgcgtttgaggatctgttgaacgtcgttgcggagcacattcagcaatga

SEQ ID NO: 64232 - protein, 408 aa, Unknown
  Obtained from environmental sample
  DOMAIN (34)...(99): His Kinase A (phosphoacceptor) domain
  misc_feature (1)..(408): Xaa is any amino acid
MIGMETNSKAPNGSGTPNGSPEEIQRYIVQKLDIVGQLAGGISHNFNNQLTGIMGFANLIALRAENENIKKFAEEIIGICKNAGNMMRELLTFARYKPMSATALNVNSAITTVSNLLANSIDKRIEIVTELSSAQCNVFADAVQLQSLLFNIALNSKDAMPTGGKLVFSTKRIYEETAAAPCGYVRIEIADTGHGFDDDVKRRIFEPFFTTKAQGHVGLGLCAAYNLVTMMNGTIELNSEIGKGTSVVVMLPIHSDASGGGDGTAAVKAAAKQGAAATEPVSAEKKTRGTILLVDDDNCIRESLSAFLRGSDYSVFTAIDGLDAVEKYGKTEGRSIDLVILDMVMPRMDGKEAFVKMKAINPSIKAIGITGYTNYTQEEMAALGMKKMLHKPFAFEDLLNVVAEHIQQ

SEQ ID NO: 64233 - DNA, 825 bp, Unknown
  Obtained from environmental sample
  misc_feature (1)..(825): n is a, c, g, or t
ttgagcggtataaattatttttatgcaatgagattcataatagacaaaaatcgctccgccgagttcaatatggccgccgacctctacctgctgaggcgttgcggcggcggtgccgccggagccggcggggatgtcacgatccgcctctactcgtggctccgcccgaccgtctcgatagggtgcatgcagtcgcccgatacggagctcgacccggaggcgttgcaagccgccggagccgtttggataaggaggatcaccggcgggagggccgtcctgcacgacggcgacatcacctacagcgtaaccttccccaaaagcctgcgggagatgggcggcggcatacgggagacctacaacgttatagcgaaatgcctgatggccgggttgaacagggcttccgtcaactgcgaagcgcacgactccgacggcggcctgtccggaatcggacgccaagtcaaactgccctgcttcctagcccccaatagggacgaaataatggtcgccggaagaaaattagtaggttcggcccagaaaaggacggcggacggggtgctgcagcacgggtctataccgataaacggaaactaccgaaaactgccgatgtatttgcggattgatgagccggaacgggagaaacaagttgaattgttgaagtcaaagagttgctgtattgatgaactaacggacggcggggcggtgtttgaatcgttagcggagtgcctgatagacgggttcgcgtcagtgctgccgtttaagtatgaattgataccgtggagtccggaagaggaggatgaaataatgcgttcagacatccttatcagttaa

SEQ ID NO: 64234 - protein, 274 aa, Unknown
  Obtained from environmental sample
  DOMAIN (59)...(147): Biotin/lipoate A/B protein ligase family
  misc_feature (1)..(274): Xaa is any amino acid
MSGINYFYAMRFIIDKNRSAEFNMAADLYLLRRCGGGAAGAGGDVTIRLYSWLRPTVSIGCMQSPDTELDPEALQAAGAVWIRRITGGRAVLHDGDITYSVTFPKSLREMGGGIRETYNVIAKCLMAGLNRASVNCEAHDSDGGLSGIGRQVKLPCFLAPNRDEIMVAGRKLVGSAQKRTADGVLQHGSIPINGNYRKLPMYLRIDEPEREKQVELLKSKSCCIDELTDGGAVFESLAECLIDGFASVLPFKYELIPWSPEEEDEIMRSDILIS

SEQ ID NO: 64235 - DNA, 510 bp, Unknown
  Obtained from environmental sample
  misc_feature (1)..(510): n is a, c, g, or t
atgcgtttttgtagaaagctccttgcgggagcagagtatcatgtttctgccaggattaatcgaggtgaaatggctctattaccagaagaagagaaaaagctcatgttgattgtaattgagcgtgcaaagaaacgatatcgttttcaaatcaaaaacttctgcattatgaacaaccatattcatctgttgattaaaccgggtaaaaacgagtccctttctcgaattatgcaatggattcttagtgttttcgctatggcttggaatcgaaagcataacttgaaaggccatgtttggggtgaacggttctattccagaattgttgcgggaatagtagacttcctgcgggtttttatctatattgatgacaatccggttaatgcgcaattagtcgattgctcatggaaatggagattcggcggattatggcatcatcatcacggcataaaaacagtaacagatccgccggatgacttgatattgcggtactgccccgaacacatacaggactaa

SEQ ID NO: 64236 - protein, 169 aa, Unknown
  Obtained from environmental sample
  DOMAIN (52)...(102): Protein of unknown function (DUF1568)
  misc_feature (1)..(169): Xaa is any amino acid
MRFCRKLLAGAEYHVSARINRGEMALLPEEEKKLMLIVIERAKKRYRFQIKNFCIMNNHIHLLIKPGKNESLSRIMQWILSVFAMAWNRKHNLKGHVWGERFYSRIVAGIVDFLRVFIYIDDNPVNAQLVDCSWKWRFGGLWHHHHGIKTVTDPPDDLILRYCPEHIQD

SEQ ID NO: 64237 - DNA, 984 bp, Unknown
  Obtained from environmental sample
  misc_feature (1)..(984): n is a, c, g, or t
gtgcgggtcaataaaaccgaaggcggcagaggacagcccgacgcgtggaatgttttgaaatttggatttgacaaggttctgatgatttccgcggaacatggcgacaaaacaggcgagcttgaacaggagatcatcaagaggctggatttttcaaaatttgaaaacgctcccgagggacagagctcaagtataaattcaaatatacgcattgccctgatgggaaaaccgaacacgggcaagtccacgctttccaaccggcttacatcatcaaattcttcgattgtgagcgaaatccccggcactaccagagatatagttgaaggcagcttccactggaaaaagcgggattttgttattctggacaccgcaggcatacgccgtaaatccaaagttacggaaaatatcgagtactattcggttaaccgcgccattaaagcaatcgacgaagcggatatcgttatcctgatgattgacgcggcggaagggcttaccgatcaggataaaaaaatcgcggctctagcacatgacaagggcaggggaatcatcatggctcttaataagtgggataccatgcctcagaataaaaaaacgtttaaagaaatatcaagcagaatacattttatgttcggccagatggaatacgcgcctattgtccctgtcagcgcaaaggacggagacggcgttgataaacttttgaacacagcgattaaaatgtacgatcagcttaatcttaatatcgcaaccgcccgtcttaatcaggcgcttgaacaatggctgtccgagcatcctccgcctgtaggcccaaatacgcgcttcaagcttaagtacgctgtgcaaaaatccgccaaccctttgcattttatcatctttgcctcccgtccgcgcgcggtaagtgaggcgtacatttcgtatttgcgtaacaagatacgcaaggacttaggtttttctcttgttcctgttttggtcgaagtaaaagagtcttag

SEQ ID NO: 64238 - protein, 327 aa, Unknown
  Obtained from environmental sample
  DOMAIN (65)...(250): Elongation factor Tu GTP binding domain
  misc_feature (1)..(327): Xaa is any amino acid
MRVNKTEGGRGQPDAWNVLKFGFDKVLMISAEHGDKTGELEQEIIKRLDFSKFENAPEGQSSSINSNIRIALMGKPNTGKSTLSNRLTSSNSSIVSEIPGTTRDIVEGSFHWKKRDFVILDTAGIRRKSKVTENIEYYSVNRAIKAIDEADIVILMIDAAEGLTDQDKKIAALAHDKGRGIIMALNKWDTMPQNKKTFKEISSRIHFMFGQMEYAPIVPVSAKDGDGVDKLLNTAIKMYDQLNLNIATARLNQALEQWLSEHPPPVGPNTRFKLKYAVQKSANPLHFIIFASRPRAVSEAYISYLRNKIRKDLGFSLVPVLVEVKES

SEQ ID NO: 64239 - DNA, 639 bp, Unknown
  Obtained from environmental sample
  misc_feature (1)..(639): n is a, c, g, or t
gtgcagtcgggcggaccgtccggcggtattctcaccgagaaatcccttgatgttccgatagactttgaatctttggtagctaacggttcaatgatgggttccggcggtatgatcgtaatggacgaggacgactgcgtagtagacgtatcgcgcttctacatggaattctgcgtcgatgaaagttgcggaaaatgttctccgtgccgtattggaaccacgcaaattttaaaaattctggaaaaaatcgccgagggcaggggacatgacgaagaccttgtaaaacttgaagctatcggaatggcgatgacaaaagcgtcgctttgtatgcttggctgtacggcggcaaacccgactatttctactcttaaaaatttccgcgaagaatacatagaacatatacacgataaaaaatgccgctccggcaaatgcagaaaacttgtcaaatacagcattgacgcttcaaagtgtatcggctgcggagcgtgcgcgaaaaaatgtccgggtaactgcattgtcgccgagaacgcgtcaagttatcccgataaaaaacgtccgccttacaggattaataacgctgaatgtataaagtgcggcgagtgcttggtttcatgtaaatttaacgcggttataaaggcatag

SEQ ID NO: 64240 - protein, 212 aa, Unknown
  Obtained from environmental sample
  DOMAIN (187)...(210): 4Fe-4S binding domain
  misc_feature (1)..(212): Xaa is any amino acid
MQSGGPSGGILTEKSLDVPIDFESLVANGSMMGSGGMIVMDEDDCVVDVSRFYMEFCVDESCGKCSPCRIGTTQILKILEKIAEGRGHDEDLVKLEAIGMAMTKASLCMLGCTAANPTISTLKNFREEYIEHIHDKKCRSGKCRKLVKYSIDASKCIGCGACAKKCPGNCIVAENASSYPDKKRPPYRINNAECIKCGECLVSCKFNAVIKA

SEQ ID NO: 64241 - DNA, 1224 bp, Unknown
  Obtained from environmental sample
  misc_feature (1)..(1224): n is a, c, g, or t
ttgaaggctttcccgcagctccccgaaagccacgtgaacttcggggcggtcgtctccgagaaggagaagctcttccgcgtggccttcgagaactttacggccacctccgattttaaagagttttgcaaaaaagaggactcttggctcaacggatacgcgctgttccgcgtcataaagacgcttcacggggagaagccgtggtgggagtgggaagagtcttacaagaagcgcgataaggacgtcctagacaccgtatccgaaaagttcgccgacgacgtgacctaccacaagttcctgcagtacctctttgaccggcagtggcgcaaagtgcgcgccttcgccgctaagcaagggatctcgctcataggcgacgtgccgttctacaccgcctacgacagctccgacacttggatggagcccaagtatttcctcttcgacaaaaagctcaagcccacggaagtcgccggcgtgccgccggactatttcagcaaatccggccagctttggggcaacccgctgtacgattgggaggccctgaagaaaagcggttactcttggtggcgccgccgcatacagaaggccttggagttcgccgactacgtccgcattgaccatttcagagctttcgacagctactgggcgatcccttacgggaacccgacggccgtgaagggcaagtggtgcaagggccccggaaagcatttcttcgacaccttanaggagaagctgggcgacttgccgctaatagcggaggacttgggcgacataacggcggacgtcgtcaaactgcgcgacgcgataggcgcgccgggtatgaagatcctccagttcgccttcgactccaacacgaacaacccgtatctgccctacaacataccgagggagagcgtgacctacaccgggacgcacgacaacgacacgtcgctcggatggttctctacgctgcccgaagagaacaaaaagagggtttgcgactacttgggctgctaccggacggaggacaaattcttggacgctttcatccgttgcgccctcgcctcgccctcttggctgtgcctaatacccatgcaggacgtgctggctctcggttcaaggtataggatgaatacgccggcgacgacgcaggggaactggcagtggaggatgacgcagaaaatgccggtctacgaaaaattggaaaagctgtccgaattgacgcagacatacggcagggctagagggtag

SEQ ID NO: 64242 - protein, 407 aa, Unknown
  Obtained from environmental sample
  DOMAIN (2)...(402): 4-alpha-glucanotransferase
  misc_feature (1)..(407): Xaa is any amino acid
MKAFPQLPESHVNFGAVVSEKEKLFRVAFENFTATSDFKEFCKKEDSWLNGYALFRVIKTLHGEKPWWEWEESYKKRDKDVLDTVSEKFADDVTYHKFLQYLFDRQWRKVRAFAAKQGISLIGDVPFYTAYDSSDTWMEPKYFLFDKKLKPTEVAGVPPDYFSKSGQLWGNPLYDWEALKKSGYSWWRRRIQKALEFADYVRIDHFRAFDSYWAIPYGNPTAVKGKWCKGPGKHFFDTLXEKLGDLPLIAEDLGDITADVVKLRDAIGAPGMKILQFAFDSNTNNPYLPYNIPRESVTYTGTHDNDTSLGWFSTLPEENKKRVCDYLGCYRTEDKFLDAFIRCALASPSWLCLIPMQDVLALGSRYRMNTPATTQGNWQWRMTQKMPVYEKLEKLSELTQTYGRARG

SEQ ID NO: 64243 - DNA, 810 bp, Unknown
  Obtained from environmental sample
  misc_feature (1)..(810): n is a, c, g, or t
atgtatcttatggacattatggacgctcagccgattctaccatccaagaataggatcgccgcccgttacgggcgcgccgtcggcgtttccgagtccgccgccggcatgaatatggatatcgtgaagcgtgtggccgccattgtacgcaaagagatggatgaagggcagctgtgggcggatttaggcagcggcaccggtaagttggcggagaatttgcgggaaacgccatcaaccgcgcggttggtctgtttggacttggctttcccgccgctgcgccgcgccgcgcaatccgggcgcgcggcgtacaccgtaaacgcggacatagacaatctgccgtttcgcgccgaatctttgcacggtgcggtcgccgtctcggtactgcagtggctatcctcgccggaaaaggcgctgcgcggcgtggcgaactcgctgaagccgaacggggcgctgtgcttctcggtatacgtggacggcgctttcacggaactcgtggagacgagaacgcggatggggctgccgcaagtgatttggctaccgacggtaagcgagctgctgatggccttcgacctcgccggtttcgacgtgcaagaggagaggatagaccacttcgaccgcgtgcaacgcttccccgacgccgcctcggcgctggggaacctgagccgcttaggttctaccgccacaagcgggcgtctgctcaaccggtcggaactggcggagctctacaaagactacacgatggtcttcggcaaaaaaggatccgtaccgctcacctaccgctccatcatgggcacggtgcgtaagaggggctga

SEQ ID NO: 64244 - protein, 269 aa, Unknown
  Obtained from environmental sample
  DOMAIN (59)...(150): Methyltransferase domain
  misc_feature (1)..(269): Xaa is any amino acid
MYLMDIMDAQPILPSKNRIAARYGRAVGVSESAAGMNMDIVKRVAAIVRKEMDEGQLWADLGSGTGKLAENLRETPSTARLVCLDLAFPPLRRAAQSGRAAYTVNADIDNLPFRAESLHGAVAVSVLQWLSSPEKALRGVANSLKPNGALCFSVYVDGAFTELVETRTRMGLPQVIWLPTVSELLMAFDLAGFDVQEERIDHFDRVQRFPDAASALGNLSRLGSTATSGRLLNRSELAELYKDYTMVFGKKGSVPLTYRSIMGTVRKRG

SEQ ID NO: 64245 - DNA, 741 bp, Unknown
  Obtained from environmental sample
  misc_feature (1)..(741): n is a, c, g, or t
gtgggcggcggacattttcagatgattgccggaccgtgttcggtggaatcgcctgagcagattctttgtattgccgaaagtgtcaaagcctcgggcgccaagcttctgcggggaggcgcgtttaagccgcgcacctcgccttacgccttccagggcatgcgcgccgagggcatagaactcttattgaaaacaagagataaaaccggcatgcccatcgttacggaaataatgaacgccggtcatctgccgttgttcgataaggtggatgtgattcaggtgggcgcacggaatatgcagaactttgagctgttgaaggaactggggcaggtgaagaagcctatcctcttaaaacgcggattcgcgaacaccctgcaggagcttttaatgagtgcggagtacatcatggcggaaggaaacgataatgtgatcctctgcgagagggggatacgcacctttgaaacatatacaaggaacaccctcgatctgtccgcggtgcccgtgctgaaggaactctcccacctgccggtgatcatcgatccgagtcacgctataggcgtttcgcgttatgtgaaatcgatggcgcttgcgtcggtagcggcgggcgcggacgggcttatcgtcgaagtgcataatgatccacagaacgcggtctgcgacggcgcacagtccctcacgctggaacagttcgccgatgtcgcggaaaaggtgcggcggatacgcgaagtagtcacagagctttag

SEQ ID NO: 64246 - protein, 246 aa, Unknown
  Obtained from environmental sample
  DOMAIN (1)...(245): DAHP synthetase I family
  misc_feature (1)..(246): Xaa is any amino acid
MGGGHFQMIAGPCSVESPEQILCIAESVKASGAKLLRGGAFKPRTSPYAFQGMRAEGIELLLKTRDKTGMPIVTEIMNAGHLPLFDKVDVIQVGARNMQNFELLKELGQVKKPILLKRGFANTLQELLMSAEYIMAEGNDNVILCERGIRTFETYTRNTLDLSAVPVLKELSHLPVIIDPSHAIGVSRYVKSMALASVAAGADGLIVEVHNDPQNAVCDGAQSLTLEQFADVAEKVRRIREVVTEL

SEQ ID NO: 64247 - DNA, 834 bp, Unknown
  Obtained from environmental sample
  misc_feature (1)..(834): n is a, c, g, or t
atgaacataggcattatcggtctgggccttatcggaggctcgtttgccaaagcgtacaaggccgcaggccaccccgtcttcgcgggcgacatcgatcaaaacatactggatttcgccgttctttcgagcgttgtggacgctccgatggacaccgacacgctgtcccgctgcgatctgatccttatagcgctttatccgcaggcggcgatagaatttctggacaagacggcgcggcatatacctgcggccgccactgtcatcgactgctgcggcacaaaaaaaaagatatgcgccgcggggtttcaggccgccgcccagtacggattcacctttgtgggcggacacccgatggcgggtaccgaaaactccggatataaacacagcaaggcgaatttgttcaaaggcgcgtccatgatcatagtgccgcccgtgaaagacgacatcatattttttgaaaaaatcaagcgtctgctcgcgccggcggaattcggcaggttgaccgttaccacggcggacaaacacgacgcgatgatcgcgtttacttcgcagatggcccatctggtatccaacgcgttcattaaaagccctacagtatttgagcaccggggattttccgccggaagctacaaagacatgacgcgcgtggcatggctcaacgagcgaatgtgggccgaactgtttctggaaaaccgtgagaatctgctccatgagctcgatatgtttctcgcttccctcaaggaatacagggacgcgctgcaggaggaggactttcccaaactccggtcccttcttctggacggcaagcgccttaaagaagaggttgaccgccgatga

SEQ ID NO: 64248 - protein, 277 aa, Unknown
  Obtained from environmental sample
  SIGNAL (1)...(28)
  DOMAIN (1)...(142): NAD binding domain of 6-phosphogluconate dehydrogenase
  misc_feature (1)..(277): Xaa is any amino acid
MNIGIIGLGLIGGSFAKAYKAAGHPVFAGDIDQNILDFAVLSSVVDAPMDTDTLSRCDLILIALYPQAAIEFLDKTARHIPAAATVIDCCGTKKKICAAGFQAAAQYGFTFVGGHPMAGTENSGYKHSKANLFKGASMIIVPPVKDDIIFFEKIKRLLAPAEFGRLTVTTADKHDAMIAFTSQMAHLVSNAFIKSPTVFEHRGFSAGSYKDMTRVAWLNERMWAELFLENRENLLHELDMFLASLKEYRDALQEEDFPKLRSLLLDGKRLKEEVDRR

SEQ ID NO: 64249 - DNA, 1284 bp, Unknown
  Obtained from environmental sample
  misc_feature (1)..(1284): n is a, c, g, or t
atgaacctcaatctgaaagtttcgccctgtcggttaaacggcgttgttcgcgcaatcccttccaagtcgcaggcgcacagagcgcttatatgcgcggctctggctgataaacctacaatcatcgaatgtgaaggcggttccgatgatatagcggcgacagcggactgcctgtccgcgctgggagctaaaattgagcgcgaatcgggcgtttatgttgtccaccccctgatacgtgggacctacgacactgcgactctaggttgcggggaaagtggcagcacattccggtttatgttgcccattgttggcgcgctgggacgaaaagcttcgttcatcctgaaaggaaggcttcctgaacgtccgctttccccgttatacgaagagcttgtccgccacggagccgaattgtcgccccagagaactgttccgttttctgccgaaggcaaacttgcgcctgggccttattcgcttgacgcgggcgtatcgtcgcaattcatcagcggtctgttgttcgccctgcccctgctcggcggcgacagtgaattgcagctaacagggcaggcggaatcatttccctatattgaattgacgcttgggatgctggaaatatttggcatacggattgaattcaagaacaatgtttttctcataccgggcggacaaacgtattgctctccgggcaaggctcaggtagaaggcgactggtcgaacgccgcgttctggttgagcgcgggggcgattggaaaaagcagcattacctgcaccggtttaaatttcaaatcacggcagggcgaccgcgcgattctggacattctgtcaaagtttggcgcgggcattgaaattattgaaagcgactccagggtaacagtatccggtgggaaactgaagggcattgagatcaacgcaagtgatattcccgatctcgtgccggtattggcggttgtcggggccgttgccggggaaacaaccgtttttcgcaacgcggcgcggcttcgtaccaaagaaagcgacaggcttgccgccgcaagcgccgtactgcgcggcctgggcgcggacgcggacgagacagcggacggacttgtcatacgcggcggaaaagctttcaaaggcggacaggtatcgtcctgcggggatcaccggatcgcaatgtcagcggcaatcgccgcgacagtatgcgcgaacccggttgttattcagggagcgcaggcggtcaataaatcgtaccccgggttttttgacgatctgcgcttgctgggtggatcgattcaagagttaaagggataa

SEQ ID NO: 64250 - protein, 427 aa, Unknown
  Obtained from environmental sample
  DOMAIN (7)...(415): EPSP synthase (3-phosphoshikimate 1-carboxyvinyltransferase)
  misc_feature (1)..(427): Xaa is any amino acid
MNLNLKVSPCRLNGVVRAIPSKSQAHRALICAALADKPTIIECEGGSDDIAATADCLSALGAKIERESGVYVVHPLIRGTYDTATLGCGESGSTFRFMLPIVGALGRKASFILKGRLPERPLSPLYEELVRHGAELSPQRTVPFSAEGKLAPGPYSLDAGVSSQFISGLLFALPLLGGDSELQLTGQAESFPYIELTLGMLEIFGIRIEFKNNVFLIPGGQTYCSPGKAQVEGDWSNAAFWLSAGAIGKSSITCTGLNFKSRQGDRAILDILSKFGAGIEIIESDSRVTVSGGKLKGIEINASDIPDLVPVLAVVGAVAGETTVFRNAARLRTKESDRLAAASAVLRGLGADADETADGLVIRGGKAFKGGQVSSCGDHRIAMSAAIAATVCANPVVIQGAQAVNKSYPGFFDDLRLLGGSIQELKG

SEQ ID NO: 64251 - DNA, 849 bp, Unknown
  Obtained from environmental sample
  misc_feature (1)..(849): n is a, c, g, or t
atgtcttcgcagtatggaaaaaaattaaagatatcgatcttcgggcaatctcactctcntgcgataggcgtaaacatcgacggatgcccggcgggaatcagaatcgacacagatgaacttcaagccttcctcaaacgcagggctcctgggcaaagcgctatttccacggcgcgcgtggaggatgattctcctgagattttatccgggctggcaggcggcgttacctgtggcgctccgcttgccataatcatccgcaacggtgacgcccgatccgccgattatcgcgagttgcgggatattccgcgcccgtcgcacgccgattacgccgcgcacgtaaaatgcggcgggtatcaggatgtggcgggcggcgggcatttctcgggcaggctgacagctcccttgtgcgccgccggggggatctgcctgcaaatattgcgcggtttagggattcatgtcgctgctcatattttgcggattggcggcgcagaagacgatccgtttgactgcgttggcatatcgacggagagcttcgatatgattcgcggaaattcattaccggtactcaaacgggaagctggtgaggctatgaaattgcgaattttggaagcgcgggaaaaaggcgactcagtaggcggcgttgtcgagtgcgcggcagtcggcctgccagccgggttgggcgacccgatgttcgacggtatcgagaacaggatcgctggtatagtcttcggtataccgggcgcaaaaggcatcgaatttggaagcggttttgccggggcagagcgcaggggatcggaaaataacgacagcttttatatagacggtaagaatgtaaaaacngcgcacaaataa

SEQ ID NO: 64252 - protein, 282 aa, Unknown
  Obtained from environmental sample
  DOMAIN (9)...(282): Chorismate synthase
  misc_feature (1)..(282): Xaa is any amino acid
MSSQYGKKLKISIFGQSHSXAIGVNIDGCPAGIRIDTDELQAFLKRRAPGQSAISTARVEDDSPEILSGLAGGVTCGAPLAIIIRNGDARSADYRELRDIPRPSHADYAAHVKCGGYQDVAGGGHFSGRLTAPLCAAGGICLQILRGLGIHVAAHILRIGGAEDDPFDCVGISTESFDMIRGNSLPVLKREAGEAMKLRILEAREKGDSVGGVVECAAVGLPAGLGDPMFDGIENRIAGIVFGIPGAKGIEFGSGFAGAERRGSENNDSFYIDGKNVKTAHK

SEQ ID NO: 64253 - DNA, 1215 bp, Unknown
  Obtained from environmental sample
  misc_feature (1)..(1215): n is a, c, g, or t
ttggagtatcaagtgaagaaaactaaaattattactatcgcgataatttcgcttattgcgttatttgccgtccttatcctgcttaattttctttttcccggaaaagcaaaaaccccgggacaggcgcaagcaggcggtccagccgccgcaagcaattccggcagcggtaactcaggcggttccggcagagcgggcaacgcagccggttcggaaaattccggtaccgcaaacagagcgggcggcagcgccggtcaaggcggttcaggcagagccgataatgccggcggttccggcagggcggacaattcaggcggtcagggcgatcaaggcagttccggcagagcgggaaattccggcggtcagggcggacaaggtaattcgggcggaaacgcaggtcgccaaggcggtcccggcggcggctcttcgcgtaacgttacgacagttcgcgttacgcctgtttccacaagcactatcgaaaaaagcgtaatcattaacggcgaaatattagcccgcaatcaggtaactatcttccccactatcggcggaaaacttgtagagacaagactcggcgtaggggacagagtttcaagcgggcagattgtcgctatggtagacccttcaagacccggtgaagtttattcacgcagtcctgtagtttccacagtgtcgggaacggttatacaagctccgttcagtataggcgatacgcttactacgcagtcggcagtctttatagtgggagacctttcatcgctgttagttgaaacttttgtgcctgaacgttttgtagcgtcggtaaaacagggaatgagggcgcaattaaagtttgaagccataagcggcgaaacatttatcgccgaagttaacgaaataaatcccgtgcttgatcccgcaagcagaacattaagaatacgcctgcggtttgtaaaccccgatcctcggataaaagctggaatgttcgcaactatcagtcttgtaacaaaccgcaaggtcgatgtccctgtcattgccagaacatcggtaataaatacttacggttcatggatcgtttttacagtggacgaaaacaatacggcgaagcgtcgtgaagtaacattggggcttgataacgaagatttttttgaaatattagacggcgtaagtttaggcgaaaaagttgtaagcgcaggacagaattttctttccgacggcgatcctgtaagaattgtagagtaa

SEQ ID NO: 64254 - protein, 404 aa, Unknown
  Obtained from environmental sample
  misc_feature (1)..(404): Xaa is any amino acid
MEYQVKKTKIITIAIISLIALFAVLILLNFLFPGKAKTPGQAQAGGPAAASNSGSGNSGGSGRAGNAAGSENSGTANRAGGSAGQGGSGRADNAGGSGRADNSGGQGDQGSSGRAGNSGGQGGQGNSGGNAGRQGGPGGGSSRNVTTVRVTPVSTSTIEKSVIINGEILARNQVTIFPTIGGKLVETRLGVGDRVSSGQIVAMVDPSRPGEVYSRSPVVSTVSGTVIQAPFSIGDTLTTQSAVFIVGDLSSLLVETFVPERFVASVKQGMRAQLKFEAISGETFIAEVNEINPVLDPASRTLRIRLRFVNPDPRIKAGMFATISLVTNRKVDVPVIARTSVINTYGSWIVFTVDENNTAKRREVTLGLDNEDFFEILDGVSLGEKVVSAGQNFLSDGDPVRIVE

SEQ ID NO: 64255 - DNA, 432 bp, Unknown
  Obtained from environmental sample
  misc_feature (1)..(432): n is a, c, g, or t
ttgcgttatttgccgtccttatcctgcttaattttctttttcccggaaaagcaaaaaccccgggacaggcgcaagcaggcggtccagccgccgcaagcaattccggcagcggtaactcaggcggttccggcagagcgggcaacgcagccggttcggaaaattccggtaccgcaaacagagcgggcggcagcgccggtcaaggcggttcaggcagagccgataatgccggcggttccggcagggcggacaattcaggcggtcagggcgatcaaggcagttccggcagagcgggaaattccggcggtcagggcggacaaggtaattcgggcggaaacgcaggtcgccaaggcggtcccggcggcggctcttcgcgtaacgttacgacagttcgcgttacgcctgtttccacaagcactatcgaaaaaagcgtaa

SEQ ID NO: 64256 - protein, 143 aa, Unknown
  Obtained from environmental sample
  misc_feature (1)..(143): Xaa is any amino acid
MRYLPSLSCLIFFFPEKQKPRDRRKQAVQPPQAIPAAVTQAVPAERATQPVRKIPVPQTERAAAPVKAVQAEPIMPAVPAGRTIQAVRAIKAVPAEREIPAVRADKVIRAETQVAKAVPAAALRVTLRQFALRLFPQALSKKA

SEQ ID NO: 64257 - DNA, 1308 bp, Unknown
  Obtained from environmental sample
  misc_feature (1)..(1308): n is a, c, g, or t
ttgccttttatatgtttttcttttacttttttcctcttttgcgtatccgttcaggctgtcgaattggggcttgacgacgctgttaatcgggcgctggaatacaatctttcattaaagaagagccagattgatcttgcggcaagcggttactcggaaaagaatctttggtcggaaatttttccgtcgattagcgcaagcgccagcgcagggtacagaaacaatcttttcagcgatattcctcttaacaattcgggttataattacagtgtcggtttcggcgttacgcttggtctgaacgcaggtattccctatgctatgcgaaacattaaattggctcatcagggaaatatcttaaaatacgaagacgcaaaaaatcagctttcaatccaaattaccaaattattttattcgcttaccgcggagaagaataatattctgctccttgaagaaatttttaaccttgcgcaaagacaatatacaagaagcgaagtttcattcaggaacgggcttgtgggggaactttcccttacgcagagcagtctcgctctggaaaacgcgcggtacaatcttaacacggcgaaaacagcccacaaaaacaatatgtctgactttcttgcaatgcttggaatgtccgatgatgatattacattgtcaggtgaagttaaaatatttaagatcgacgccgacgcggaagcgcttataaatgattatcttcccaaacgtcccgacatcataagggcgattcaggagattgagaggcttacgattacgcaaaagcaaaccttattgcaaacaaaagccccttctttaaatttatcggttgattggagtagctccgcttccgagccttatgataagccttttaccgactcagtaagcgctaccgcccgtatcagcataccgattgatccgtggattccgggtacaacaaaattccaaaatgtctcaaaagcctccgactcgacaaaaaaggcaaaacttgatctttcagcggcggaaaattccgcaaaaactcaaatacgctctctttgctcccaacttcgcaattcatgggacaatatattgattgcccgccttagctttaccgcggcgcagagaagttatcagctaacggaacaaggttttaataacggaactgttgaattgttaattttgcaggacgcgcgtaacaatatggcaaacgtaagacagcgtttattgcaggcggaactttcatattttaatatgattcttgatctttcgtccgccttgaatatcgactggaaaaatcttattcaaacttttggagtatcaagtgaagaaaactaa

SEQ ID NO: 64258 - protein, 435 aa, Unknown
  Obtained from environmental sample
  SIGNAL (1)...(19)
  DOMAIN (230)...(418): Outer membrane efflux protein
  misc_feature (1)..(435): Xaa is any amino acid
MPFICFSFTFFLFCVSVQAVELGLDDAVNRALEYNLSLKKSQIDLAASGYSEKNLWSEIFPSISASASAGYRNNLFSDIPLNNSGYNYSVGFGVTLGLNAGIPYAMRNIKLAHQGNILKYEDAKNQLSIQITKLFYSLTAEKNNILLLEEIFNLAQRQYTRSEVSFRNGLVGELSLTQSSLALENARYNLNTAKTAHKNNMSDFLAMLGMSDDDITLSGEVKIFKIDADAEALINDYLPKRPDIIRAIQEIERLTITQKQTLLQTKAPSLNLSVDWSSSASEPYDKPFTDSVSATARISIPIDPWIPGTTKFQNVSKASDSTKKAKLDLSAAENSAKTQIRSLCSQLRNSWDNILIARLSFTAAQRSYQLTEQGFNNGTVELLILQDARNNMANVRQRLLQAELSYFNMILDLSSALNIDWKNLIQTFGVSSEEN

SEQ ID NO: 64259 - DNA, 378 bp, Unknown
  Obtained from environmental sample
  misc_feature (1)..(378): n is a, c, g, or t
gtgcagatgaaagttcacaggatgatggggcttttgcggtttaccaagaatgaagacggcgagtttaccgcaaagtgcgaacctgatcatcttatccttccctgtcttggagatttttttaccgcccgttttggggacactccttgggcgattatcgacgaaaaaagaaggttagttttaagcaaaaaacacggggaacgggcaaaaatcaatattttagaggatgccgccgagggcatttccgccgccaagagcgacgaatgggaagacctttggaaacactaccacaaaacaattaacaacgaagaccgcaataatcccgatttacagcgtcagcttatgcccaaacgttactggaaacaccttccggaagtgtga

SEQ ID NO: 64260 - protein, 125 aa, Unknown
  Obtained from environmental sample
  misc_feature (1)..(125): Xaa is any amino acid
MQMKVHRMMGLLRFTKNEDGEFTAKCEPDHLILPCLGDFFTARFGDTPWAIIDEKRRLVLSKKHGERAKINILEDAAEGISAAKSDEWEDLWKHYHKTINNEDRNNPDLQRQLMPKRYWKHLPEV

SEQ ID NO: 64261 - DNA, 795 bp, Unknown
  Obtained from environmental sample
  misc_feature (1)..(795): n is a, c, g, or t
ttggagctgtctgatgttgccaggccacgggtagagcatcagcaaatccatcgtctcggcgctcacgggcgcggtgtaacccatttttctcagcagatgttcgacaaggcctgggatgtcctcccggcggttcctaagcgacggcagggttatgtggaaggtgtttatgcggtagaagaggtcctcccggaacgtgccggcggtcaccgcgatgcgcaggttgcggttcgtggcgcatataagcctgaaatcgctcttgcgctgccggttctcgccaacacgcctgaaggtcttctcctccacgatcttgagcaacaggctctgcacctcgctcggcatgtcgccgacctcgtccaaaaagagcgtaccgccgttggccgcctccacaagcccgaccctatcgttcaccgcgccggtgaacgacccgcgggcgtggcccaagacctcgctcttgagcagctccccgcgcagggccgaacagctgatgtcgacgaacgccttgccgctacgggcgctgcagtcgtgaatcttacgcgccagcacgctcttgcccgtacctgtctcgccgagaataagcaccgcgctatccgtcgccgcgacggaatttacgtcgcttttgacactctcgatggatgggctagaaccgaaatagtggccgccctcctcgttcctgccgtctgtaccgataacgccgtccataacgactgtaccgtcaaagtttgtcgccgccatatctcacctccgtataaggttgtagattttgtttgcgtaaccatgatatatatggatggttga

SEQ ID NO: 64262 - protein, 264 aa, Unknown
  Obtained from environmental sample
  misc_feature (1)..(264): Xaa is any amino acid
MELSDVARPRVEHQQIHRLGAHGRGVTHFSQQMFDKAWDVLPAVPKRRQGYVEGVYAVEEVLPERAGGHRDAQVAVRGAYKPEIALALPVLANTPEGLLLHDLEQQALHLARHVADLVQKERTAVGRLHKPDPIVHRAGERPAGVAQDLALEQLPAQGRTADVDERLAATGAAVVNLTRQHALARTCLAENKHRAIRRRDGIYVAFDTLDGWARTEIVAALLVPAVCTDNAVHNDCTVKVCRRHISPPYKVVDFVCVTMIYMDG

SEQ ID NO: 64263 - DNA, 624 bp, Unknown
  Obtained from environmental sample
  misc_feature (1)..(624): n is a, c, g, or t
atgataggggatatgctgcagtcgctgctgggcgatgggaagacgccgggcggtcagggtcagggccagggtcggcgcatgggtcagggccgctcctcaggtcaaggcggcgaaggcgagggggagggcggcggtgataacggcggcgacgcgccgggcggtcggggagaggttgacgccgaggcgcgcaaacaggctcgggaagctcaaaaggccattgccgacgaactcaagcgccttgccgacgcctacggcagggaggcgggggagggcatggagaagcgcgtccgcgaattggagcaggaggcccgcaggcttgcgcagctacttgaaaacccgcccgccgatatagtggatatgcaggataggtttttatccaggatgctgcagtcgaccttgtcgctgaataggaaggacgagggtaaggatgaacgcaagggcaccgtgtcgcagacgcttttctccgaaaagggggtcaaagccgccggggcgggcgctacggcgaaggccgacagctttcacctactgcgcaaacgggcgtttgaggacaacttccccgaagagtaccgctcggcaatccgagagtatttcgatgtattgggtgagatgaagtggggagaatag

SEQ ID NO: 64264 - protein, 207 aa, Unknown
  Obtained from environmental sample
  misc_feature (1)..(207): Xaa is any amino acid
MIGDMLQSLLGDGKTPGGQGQGQGRRMGQGRSSGQGGEGEGEGGGDNGGDAPGGRGEVDAEARKQAREAQKAIADELKRLADAYGREAGEGMEKRVRELEQEARRLAQLLENPPADIVDMQDRFLSRMLQSTLSLNRKDEGKDERKGTVSQTLFSEKGVKAAGAGATAKADSFHLLRKRAFEDNFPEEYRSAIREYFDVLGEMKWGE

SEQ ID NO: 64265 - DNA, 1353 bp, Unknown
  Obtained from environmental sample
  misc_feature (1)..(1353): n is a, c, g, or t
gtgcgcgacaataggctgtccggagcgcagaccgcttgcagcgacaccttctggtttcggatgccgagcttcgaagagatacatgcggccgtggccatgaaagagcagtacgcgcaagagaagctcggggaggtgcgcaaccgccaagacaacatcagcagttccatagagaagttagtcaagtcggcgaccggatctaaggatctctcttgggatcagaaacgggtgatagacgacgtgaaggcgcagcttaccgcccaagccgattcgttgcagaaggcctttcaggctcttgaggagggcatagaggctatgcgtgaggacggcaagctgaacgaggagctcttcgcgaagatggagcaggtcaagaagagcgtggaagagcttatgaaggagttcggggagaacatcttcaagatgaacggcgatagggagctgtcgatgaacgaaatgaggcaggcggcctcaaagctcaaggacatgctgccggagctaagcgagcggctcgaccagacgcttgcttttctggataagatgcgtcaagacaagcagctcgcggagctagcgatacgcgccgagaatctagccggcgagcaggcggagcttgccgcgtctaagcaggatccgctgattgaaaaacggcaaaaagagttgctcgacaggatagacggttttaacaaagaggtgaaggagttcttcaaggagcagggcggggagccgccgtcgtcgtcggagcaggttcgggaactgtcggaagagatgaggcggcagggcggtcagcctaataacggcaaaccggacggcggtaagaaagacggcggcgataaagagagcaagaacgcgatgagccgggagttgctgtcgctctccgagcagttgaagagcaacctgaccgtcaacatgatggcgaagatggaggcggataggaaacgcattttaaggatggcgcgcgacgcccttacgctcgaggattggcagcaggctataaagtttcaggctctcggcaaatccgacgacaggggcgtggccagcgcccagcaggcgctgggcaacgctatccgcatgagcctcgccaagtcggacagtttgaccatggtcggctccgccgttatgcgggagatactgcgggtgtacagaaacgcctcggcgaagtcggcaagcgtggtgaactcgctggacgtttcggacgggtcgcggcagatggaccagagcgttcaggcgctgcgcgaggtggctaacgtgctgctgtccatagcgggcgacgacgaaagcggaagcggttcgggggggggcggcgggatgatgtcggggctacgccgcgcctcggaaggcaggccgctctcaattcaatga

SEQ ID NO: 64266 - protein, 450 aa, Unknown
  Obtained from environmental sample
  misc_feature (1)..(450): Xaa is any amino acid
MRDNRLSGAQTACSDTFWFRMPSFEEIHAAVAMKEQYAQEKLGEVRNRQDNISSSIEKLVKSATGSKDLSWDQKRVIDDVKAQLTAQADSLQKAFQALEEGIEAMREDGKLNEELFAKMEQVKKSVEELMKEFGENIFKMNGDRELSMNEMRQAASKLKDMLPELSERLDQTLAFLDKMRQDKQLAELAIRAENLAGEQAELAASKQDPLIEKRQKELLDRIDGFNKEVKEFFKEQGGEPPSSSEQVRELSEEMRRQGGQPNNGKPDGGKKDGGDKESKNAMSRELLSLSEQLKSNLTVNMMAKMEADRKRILRMARDALTLEDWQQAIKFQALGKSDDRGVASAQQALGNAIRMSLAKSDSLTMVGSAVMREILRVYRNASAKSASVVNSLDVSDGSRQMDQSVQALREVANVLLSIAGDDESGSGSGGGGGMMSGLRRASEGRPLSIQ

SEQ ID NO: 64267 - DNA, 705 bp, Unknown
  Obtained from environmental sample
  misc_feature (1)..(705): n is a, c, g, or t
atgatcctagtattttgcgaaaccaaagacggagcaatacgaaagcccagcctagaggcattgtctgaagccagaaggctggctggcgattccggtgtggctgccctatttgtaggcaacgacatttcaggggccgaggaagcggccgattttggcgcggacacgacaatcaaaatagaatcgccgacgctttccagctattcaagcgacctttttgccagtgcaatttctggcgcggcaaaggccaaaaatgcaactattttgctactggccgccacatccatcgggaaagacgtagccccaagggtcgcggcgcggctaggggctggccttgctgccgacgctaccgcgctctgcatgaaagacggcaagttacaggccacccgcccgatatatgcgggcaaggctatggccactgttgacttttccaccgaaatacaaatagctacaacccggcccaacgtgttcgccttggccaaagttcccaaaaaaggcgcagtggaaactcttccagccccaagcgatgcattcaaggccatcgtgaaggaaataatcgccaaagtaggcgaaaagcaggacttgaccgaggcagacatcattgtgtcaggcggacggggcatgaaggacggggcaaacttcaagctgctggaggaactggccgaagcctttggcggcgtggtgggcgccagccggggctgccgttga

SEQ ID NO: 64268 - protein, 234 aa, Unknown
  Obtained from environmental sample
  DOMAIN (191)...(234): Electron transfer flavoprotein FAD-binding domain
  misc_feature (1)..(234): Xaa is any amino acid
MILVFCETKDGAIRKPSLEALSEARRLAGDSGVAALFVGNDISGAEEAADFGADTTIKIESPTLSSYSSDLFASAISGAAKAKNATILLLAATSIGKDVAPRVAARLGAGLAADATALCMKDGKLQATRPIYAGKAMATVDFSTEIQIATTRPNVFALAKVPKKGAVETLPAPSDAFKAIVKEIIAKVGEKQDLTEADIIVSGGRGMKDGANFKLLEELAEAFGGVVGASRGCR

SEQ ID NO: 64269 - DNA, 1719 bp, Unknown
  Obtained from environmental sample
  misc_feature (1)..(1719): n is a, c, g, or t
atggaaaactttttaaccgataacgaggatattctgtttcatctggatcatcttgatttggaccggattattcacttcaaagaagataattttgaacaggcgaaacaattcgcgtacgctccgcgggatgtggaagacgcgaaggactcataccgcagggtgctttccattgtcggggagatagccggcgattatatggcgcctaacgctccggcggttgacgaggccggccccacgctggcaaacaatcaggtgacgatgcatccggcgacgcaaaaggcgctggatatgttcgccaaagccgacatgatgggttttgtcattccccgcaggtacggcggattgaatatgcccaacacgatcctcagcatcgcggcggaaatagtcgcccgcgcggacgggtcgttccttaacctgggccttcagcaggacaacgcgggaactatcaataaattcgcgtccgaggaacagaagcaggcttttctgcccaaactctgttccggcgaatgggactcggcgatggtgctgaccgaaccggacgcgggcagcgatctccagtcggtcaacctcaaggtcgtgcaggacgctgacggtaaatggtacttgaacggcgttaagcgctttatcaccaacggctgcgggactatcggcctggtgctggcccgcagtgaggaaaagggaaaaggcgcgagggggctttcgttctttatttacaagcgcgatgacaaaatgataatcaggcggttggagcacaagctgggcatacacggttcgcccacctgcgagctgcaatttaacaacgcgcccgcggaactgctcggcgagaggcagaggggccttaccaagtacaccctctggctcatgaacaacgcgaggctcggagtggcggcgcaaggagtcggcattgccgaggccgcctaccgcgaggctgacctttacgcggcaaagcgcatacagttcggcgctccgattcgggaactgcccgcggtcttcgagatgcttacggagatgagggtcgcggtcgaggctggccgcagcctgttatacgaaaccgcccgctttgttgacctcaaggaagggctggaagagtattccgaaaaacaccccgaggaaaagggcgagataactgaagacaaaaagaaatacggaaaatacgcgggtttcttcactccgcttgtaaaggcctacgccacggaaatggcgaacaaggtcgccaatgacgcgattcagattcacggcggcacgggctacatgaaggaattcaacgcggaacgccattatagagacgcgagaattacgaatatctacgagggaaccacacagcttcagattgtggcggctatcgggccggtgacatcgggcgttgcccagatggttatggacgaatacgacaaggtgaattacaaccacagccctgatctgctcgcgaaaatccgcgactgtcgcaaggtttttgaagaggccctggaatacgccaagtcttacgaaggccatgggcagtttctcacctaccattcccgcaggcttgtggaaatggccaccgaccttatcctgagttatctgctgatgagagacggtaaccacagcgagcgcaagcaaaaagtagcggcaatcttcattacgaaaatgccctcgcggattaaagcgaacagggatttcatcatgggtgaagaggcgactctgctgaaaaattacgaagcggtgattgggaagaattag

SEQ ID NO: 64270 - protein, 572 aa, Unknown
  Obtained from environmental sample
  DOMAIN (173)...(224): Acyl-CoA dehydrogenase, middle domain
  misc_feature (1)..(572): Xaa is any amino acid
MENFLTDNEDILFHLDHLDLDRIIHFKEDNFEQAKQFAYAPRDVEDAKDSYRRVLSIVGEIAGDYMAPNAPAVDEAGPTLANNQVTMHPATQKALDMFAKADMMGFVIPRRYGGLNMPNTILSIAAEIVARADGSFLNLGLQQDNAGTINKFASEEQKQAFLPKLCSGEWDSAMVLTEPDAGSDLQSVNLKVVQDADGKWYLNGVKRFITNGCGTIGLVLARSEEKGKGARGLSFFIYKRDDKMIIRRLEHKLGIHGSPTCELQFNNAPAELLGERQRGLTKYTLWLMNNARLGVAAQGVGIAEAAYREADLYAAKRIQFGAPIRELPAVFEMLTEMRVAVEAGRSLLYETARFVDLKEGLEEYSEKHPEEKGEITEDKKKYGKYAGFFTPLVKAYATEMANKVANDAIQIHGGTGYMKEFNAERHYRDARITNIYEGTTQLQIVAAIGPVTSGVAQMVMDEYDKVNYNHSPDLLAKIRDCRKVFEEALEYAKSYEGHGQFLTYHSRRLVEMATDLILSYLLMRDGNHSERKQKVAAIFITKMPSRIKANRDFIMGEEATLLKNYEAVIGKN

SEQ ID NO: 64271 - DNA, 1356 bp, Unknown
  Obtained from environmental sample
  misc_feature (1)..(1356): n is a, c, g, or t
gtgcagttatttaacgaagctaaaaaaatgcttccgcccggtgaatcgcgttttgacgcgcagaagttatctgaaatggctgacgcttattatgattacggggcaaaaaacgcaaattccgctaatggaaaggaagcgactaacaacgcgcttcagcttgcaaacgaagctatagcgacagatgcgactcaagctttgccgcattatgttgtcgggcgtgtcgcgcgcgacgccagccaaaatgataaggcaataaacgaattcagggaggcgacgcgtcttgattcttcaaacgccatgtactttcatgatttgggaagagtgttgtttttggcgaagcgttattcggaagccagagacaatttccagtcggctacaagaataaatccggggtatgaaccttcgtggtacaaccttggcggaactttgcgcgcgttaaaccgcaccgacgacgcgattgccgcgtacaggcaggctgtcgccgtaaaagccgattattcagccgcgcaccgcgaaatcggcaggcttcttttggcaaagggagacacacagggcgcgattaaatcatttacaagcgcgttacaatcgaatcaaaatgattttaatgcaatgtgcgaattaggcgccgcgtacagtcaggcgaataactttacggaagcggaaaatattttttcaagagcgataaaattaaacgcttcagacccgcagacaaattacaatatggctgtagttaaactggagcttaaaaaaaataccgaagcgcttagttacgcgaaaatggctgtagacgcgaatcccaacaacgccgtttatgtgtacactttggggcttgcgtgcgaggctatgaacgcatctgatcaggctattgcggcgtacaaaaaagccgcgtctttggactcaaaatatgcgcgtcccagaattaacctaagcaatatttttcttgccaaaggaaatgcttccgaagctatagcatatcttaacgaagcgtattcagccgacccgaccaattttgaggttaacaacaatttaggagcggtatacgccaaacaggaaaattggttttccagcattaatcattatgaacgcgctttgaatgtaaagcagaatgatccggttgtgcgccttaatcttgctcgcgcttacacgggagcgggcgatcttcaaaaagcgcagaacgcttaccaagccgtattacgtttaacccccgataactgggacgccatgtatgagcttggaatgacctgcatatcgcttgggcagaacgccgacgcgaaacgctatttacaggaattggtaagccgtaaccctaattattcggggaaagccgaagcggaaaggatactaagaagtttatga

SEQ ID NO: 64272 - protein, 451 aa, Unknown
  Obtained from environmental sample
  DOMAIN (99)...(132): Tetratricopeptide repeat
  misc_feature (1)..(451): Xaa is any amino acid
MQLFNEAKKMLPPGESRFDAQKLSEMADAYYDYGAKNANSANGKEATNNALQLANEAIATDATQALPHYVVGRVARDASQNDKAINEFREATRLDSSNAMYFHDLGRVLFLAKRYSEARDNFQSATRINPGYEPSWYNLGGTLRALNRTDDAIAAYRQAVAVKADYSAAHREIGRLLLAKGDTQGAIKSFTSALQSNQNDFNAMCELGAAYSQANNFTEAENIFSRAIKLNASDPQTNYNMAVVKLELKKNTEALSYAKMAVDANPNNAVYVYTLGLACEAMNASDQAIAAYKKAASLDSKYARPRINLSNIFLAKGNASEAIAYLNEAYSADPTNFEVNNNLGAVYAKQENWFSSINHYERALNVKQNDPVVRLNLARAYTGAGDLQKAQNAYQAVLRLTPDNWDAMYELGMTCISLGQNADAKRYLQELVSRNPNYSGKAEAERILRSL

SEQ ID NO: 64273 - DNA, 402 bp, Unknown
  Obtained from environmental sample
  misc_feature (1)..(402): n is a, c, g, or t
atgcagaaactctacgaaactaaagaaaaacccaaaagagcctttcttgtcagcatactaaacggaaactctagtgacgaagcaatgtgccgcgagcttgaaggacttgcctcaactcttgaacttgaaatcgccgcgcatgaaaaaatacgcgtccgcgaaaaaagcgcgaaattcggcatgggaagcggaaaagcggaggaattgtcaaaaaaagcgggggaaatcggggcggatctgctggtttttgactggaatccaagtccgtctcagcaaagaaattgggaggaactttcgggtcttcccgcgctggacaggcaggaacttataatccgtattttttcactaagagcccttacaagagaggcggaattgcaggtaaagcttctcggccgattctga

SEQ ID NO: 64274 - protein, 133 aa, Unknown
  Obtained from environmental sample
  misc_feature (1)..(133): Xaa is any amino acid
MQKLYETKEKPKRAFLVSILNGNSSDEAMCRELEGLASTLELEIAAHEKIRVREKSAKFGMGSGKAEELSKKAGEIGADLLVFDWNPSPSQQRNWEELSGLPALDRQELIIRIFSLRALTREAELQVKLLGRF

SEQ ID NO: 64275 - DNA, 1887 bp, Unknown
  Obtained from environmental sample
  misc_feature (1)..(1887): n is a, c, g, or t
atgtctaattttgcccttagatcagcaatatttttcattgccgcgtgcctttggctgctaaccgcgccggttttcggagcgggcttgcgcgacccggatctggtcaaagccgacaaacttatagacgaaaaaaaacacgatgaagccattctggttttaaccgactatataaggcgcaatcccgaacgtttcgacaacgctcaaaaacgccttaaaaggatttatcaggaaagggaaaactttgacagaacggcggatgaattaattaattcgcttttaaatgaacccgaaaatcaggagaaaatttacaatttatcgacaaagttaaaatccatggaaaacgagacaagcccccttttgtcatcgtttgtatcaagaacgcatgaaatcgccgagtttaacgtattcagaaacagactggtcaatattttagaaaccggcagagcgcagcttgacaagggcgaatgtgaagccgccctgcaaacttacgcaagcggaatggatcttatgcgcgatgagtttttcaatgaagggtacggcataaccgtagaaaataatatccggcgcgaaacggaaagggttaacgcggtcattgccgcgttccgcgcggcaagtacgggatttggagtcccggcctcggaactggcgcgcgcgataacttccggcaacctgaacacaactacggaaattataaaccgcctgactccggcaatggacaggtttatcgcgcaaaagcaggaactgtacacggcggtaaatgtttttgacagcactcttgacaggataagaagcgccaaccccgaaacagccgaccgcaaccacctttctttcctgtcaatattgattaacggacggcagggagaatcaatacaggaaggaatgttaggcgcctttgaaacttactggaaaaattcaattaatcccataatatccgcaatttcgcaaaacgccttagccgcgtattcaacggggcttacggctgttacagcgggacaatattcaaacgcagtaacctcccttcaaagaacgggaagctttgtaaacatatccccgctgttttttcaaaaacgcagagcgcttaacgaaaaaggaaacgcacagaaggttgatgtcttcggcaatataattattaaagacgatattcccgcctatattacaataagggcgttaagcgagtcatcaaattttctgatacaggcctcaaatcttgcaatgcgtacaaataattacgcaggtacgattcagtcaacatatacgctttggcaggaagggaaagccgacgcggttacggcgataaacggcgaattgcaggcaagaagcggcgcggcggcgattaaaaatgaacttgacgcgataatactcagcgccgctcaaatggataactcgcttaaaaattattatacgaccaggtatttaacagaaacggttaacgcgattgataaaatttattccgcttcggccgctttggaactccgggcggcatactattattatttcgttgtagacgccgaacttaaacgcggaataaccgcaagaacggcggaactggaaaaaggaagaaattatcttaacggtcaaaaacgaacaagagcagacggttccacagtaacagatctgttcccctcggaggcgttggaaacgcttaccgcaatgctcgcttcgctgtcaattgatttggaacgcgggaattccgcgattgcctattacagggatgaaacaaggctggttttaaccgatgaacaaatcactgaaataaagaaaagctgtgaaaaaagcataaccgaactgaacacgctcccgtatcagggcgttacgcttcgtaccacagcgaaattcaggacaacacaggccgaagccttcagngcagaaggggaacgggctttttag

SEQ ID NO: 64276 - protein, 628 aa, Unknown
  Obtained from environmental sample
  SIGNAL (1)...(26)
  misc_feature (1)..(628): Xaa is any amino acid
MSNFALRSAIFFIAACLWLLTAPVFGAGLRDPDLVKADKLIDEKKHDEAILVLTDYIRRNPERFDNAQKRLKRIYQERENFDRTADELINSLLNEPENQEKIYNLSTKLKSMENETSPLLSSFVSRTHEIAEFNVFRNRLVNILETGRAQLDKGECEAALQTYASGMDLMRDEFFNEGYGITVENNIRRETERVNAVIAAFRAASTGFGVPASELARAITSGNLNTTTEIINRLTPAMDRFIAQKQELYTAVNVFDSTLDRIRSANPETADRNHLSFLSILINGRQGESIQEGMLGAFETYWKNSINPIISAISQNALAAYSTGLTAVTAGQYSNAVTSLQRTGSFVNISPLFFQKRRALNEKGNAQKVDVFGNIIIKDDIPAYITIRALSESSNFLIQASNLAMRTNNYAGTIQSTYTLWQEGKADAVTAINGELQARSGAAAIKNELDAIILSAAQMDNSLKNYYTTRYLTETVNAIDKIYSASAALELRAAYYYYFVVDAELKRGITARTAELEKGRNYLNGQKRTRADGSTVTDLFPSEALETLTAMLASLSIDLERGNSAIAYYRDETRLVLTDEQITEIKKSCEKSITELNTLPYQGVTLRTTAKFRTTQAEAFXAEGERAF

SEQ ID NO: 64277 - DNA, 630 bp, Unknown
  Obtained from environmental sample
  misc_feature (1)..(630): n is a, c, g, or t
atgtatttgtgtggtacgctacactttttgctaaaatgtagggatttctttttgggagagaaaatggaaaagaaggaaaatcgaaagagccgttactccaaaatggtaatacgcgaaagcctaatggagttgatgaagtcaaagtcgattttaagcgtttctgtcaaggatatatgcgaccttgcggatataagcagatcaactttttatgatcattacaaagaccaatacgatttattaaaacaaatagaagatgaaactctcgcttattttgaggatatgctgatcaagtacaaggataaacagaacaagaaagagacaactcagatggttgaagaaatgctgacatacattgcgaataacggcaatacgattcatgtgctgttaagcgaaaacggcgatattggatttcagaaaaaattgttataccactttattatgcacagccagataacaaaatatttctccgagaaacaacagaacgacgaaacaatgccctattattccgtttttctggtacacggagcaataggtttaattcagcactggcttaaagacaatatgacaatgccggttccgcagttggcaaaaatgctgatgaaatggacggaacatcagattaaatcttaa

SEQ ID NO: 64278 - protein, 209 aa, Unknown
  Obtained from environmental sample
  DOMAIN (37)...(83): Bacterial regulatory proteins, tetR family
  misc_feature (1)..(209): Xaa is any amino acid
MYLCGTLHFLLKCRDFFLGEKMEKKENRKSRYSKMVIRESLMELMKSKSILSVSVKDICDLADISRSTFYDHYKDQYDLLKQIEDETLAYFEDMLIKYKDKQNKKETTQMVEEMLTYIANNGNTIHVLLSENGDIGFQKKLLYHFIMHSQITKYFSEKQQNDETMPYYSVFLVHGAIGLIQHWLKDNMTMPVPQLAKMLMKWTEHQIKS

SEQ ID NO: 64279 - DNA, 1389 bp, Unknown
  Obtained from environmental sample
  misc_feature (1)..(1389): n is a, c, g, or t
atggagaaactgtttaagcatccggctttgatagtcggcgttatcacactcatcacggtgtttttgggtctctggattccacgtgctgagctggacaacaataacatccgctttttgccggacaaaaatccggccaagcttatctctgaatatattgatgagactttcggcgggcaggttttgattctggttggacttgagcgcccttaccggacggtttttgaaaaaggctttctcaggcgaatccgggaattctcccaggctgttgaaaatactgaatacgtcaaatccgtcaattcaatcatgtcaacgcagtatattactggtgacaacgacagtattgttgtttcggatttggtgccggaagatttttcgggaaccgatgaggagatcaccgagcttaagcggcgtatcgcctcctgggatttgttcagcaattccctggtttccgacgatctttcggccacgcagattctgatcaccctggacgctgtaacagcggattttacccgccccgaagtaacgcggagcatcgaagaaatcaggagaatcgcggatgaaatctttaatggcgaagcggaagtttattttaccgggcagccgattatcaacgaaattatcaataaatcaataattacggataaccttcttctgatacccctggttgtcatcgtagtgctggcgatgctgtttttttcgttcaggcgttttacctttgttgccctgccgtttttgaccgttattatagcggttgtctgggccatagggatggcggcgctgttcgggataaaactctcggttattacaaccatactgccggtgattctcgttgcggttggcagcgcctacggtattcacatagttacccattatatggaagatacccggcaaaaaaaattgactgttacagaacaccgtgaattggttatagagctggtaaaaaaactgattaagccggtatttctggcggcgcttactacaatggcgggttttgtatcgttctgttttacgccgattgtcccaatgagggagttcggattttgcgccggcttcggggtaatcaccgcctttaccgtggctgtactgtttatcccgtcaatgttcctgctccgcggcccccgcgctctgaagtctgaccactggtcagacgaacggcggaaagaacaaaccagcggccatttcagcaatactatcgcggtattttttacccgcattgcggagaaaagaatactggtactcgttctcgcggcgctggccgtggtaatttcgttatacggactttcaaaggttattgtcgataacgcggtggttgaattttttcagaaggaaacagacataagccgctccgaccgttttatccgcgagtattttggcggctcaaaagattaa

SEQ ID NO: 64280 - protein, 462 aa, Unknown
  Obtained from environmental sample
  DOMAIN (148)...(261): MMPL family
  misc_feature (1)..(462): Xaa is any amino acid
MEKLFKHPALIVGVITLITVFLGLWIPRAELDNNNIRFLPDKNPAKLISEYIDETFGGQVLILVGLERPYRTVFEKGFLRRIREFSQAVENTEYVKSVNSIMSTQYITGDNDSIVVSDLVPEDFSGTDEEITELKRRIASWDLFSNSLVSDDLSATQILITLDAVTADFTRPEVTRSIEEIRRIADEIFNGEAEVYFTGQPIINEIINKSIITDNLLLIPLVVIVVLAMLFFSFRRFTFVALPFLTVIIAVVWAIGMAALFGIKLSVITTILPVILVAVGSAYGIHIVTHYMEDTRQKKLTVTEHRELVIELVKKLIKPVFLAALTTMAGFVSFCFTPIVPMREFGFCAGFGVITAFTVAVLFIPSMFLLRGPRALKSDHWSDERRKEQTSGHFSNTIAVFFTRIAEKRILVLVLAALAVVISLYGLSKVIVDNAVVEFFQKETDISRSDRFIREYFGGSKD

SEQ ID NO: 64281 - DNA, 780 bp, Unknown
  Obtained from environmental sample
  misc_feature (1)..(780): n is a, c, g, or t
gtgattgtggccgatactacggaagaacttttacaccccgacgtgttgcaggcggcggataatctttccgtttaccttaccgcgaatgttccggccgtaggcaaagttgtcggctttacggatattatcaagcgtatcaatcaggtgttcaatgtcgatgaaaaccctgagggattacaacgtaccatttcatctaacgcatttggttttagtgataatatctctggtaacgactcagggagttttggttttaacgataatgactctgataatggctccggaggttttggcggttttggttttagcgaggatgttgctgttactgaaactccgatacaggaaaacatttataatataacccaatacaacacggcggatattttacggtttctggataacgcggccggaaaatcgccccatttaagcggaagtgaattagtgcgggaattgaaacgccttactaattatgacggtatggcatattatgaaattccttcaaatccccggcgctatggaaaagaaacgcccgaagaacttcagcggctgatagcaaattatctcgttctgctttccggagatgacgattccgggtactccaatgaccctcttgaacctacggcaattagaacactggtacaaatgcgtacgataggaagcaaggatactcaggttgttatcgacacgataaaaaaatttattgccgtaaatttccccaaaaatgtgcgggtgataataggcggcggcatagtatatgaaatggcggttaccgatctgatataa

SEQ ID NO: 64282 - protein, 259 aa, Unknown
  Obtained from environmental sample
  misc_feature (1)..(259): Xaa is any amino acid
MIVADTTEELLHPDVLQAADNLSVYLTANVPAVGKVVGFTDIIKRINQVFNVDENPEGLQRTISSNAFGFSDNISGNDSGSFGFNDNDSDNGSGGFGGFGFSEDVAVTETPIQENIYNITQYNTADILRFLDNAAGKSPHLSGSELVRELKRLTNYDGMAYYEIPSNPRRYGKETPEELQRLIANYLVLLSGDDDSGYSNDPLEPTAIRTLVQMRTIGSKDTQVVIDTIKKFIAVNFPKNVRVIIGGGIVYEMAVTDLI

SEQ ID NO: 64283 - DNA, 456 bp, Unknown
  Obtained from environmental sample
  misc_feature (1)..(456): n is a, c, g, or t
atgtccgctcttgtaggcatactcagcggctcgacttctgacaaatcggttgtggataaaataacatccgtcttagacgagctgggcgtagcttgggaatattcggttttatccgcgcaccgcacgcctaacaaggtggctcgttattcaaaagaagccgagggcagaggcttgaaggttttaataggcgtggctggcctttctgccgctttgccgggttgccttgccgcgcacaccacattgcccgttataggcgttccttgcgatggtggcgcccttggtggggcagacgctctttactcggtggctcaaatgccgcccgggattcctgtggctgcggttggaattgggaatggcaaaaacgccgcgtatctggcggcatcaattctatcagtttcagatcagggcataaaagagaaattgcaagcctaccgaaagagtttaggcgatgagtaa

SEQ ID NO: 64284 - protein, 151 aa, Unknown
  Obtained from environmental sample
  DOMAIN (3)...(151): AIR carboxylase
  misc_feature (1)..(151): Xaa is any amino acid
MSALVGILSGSTSDKSVVDKITSVLDELGVAWEYSVLSAHRTPNKVARYSKEAEGRGLKVLIGVAGLSAALPGCLAAHTTLPVIGVPCDGGALGGADALYSVAQMPPGIPVAAVGIGNGKNAAYLAASILSVSDQGIKEKLQAYRKSLGDE

SEQ ID NO: 64285 - DNA, 885 bp, Unknown
  Obtained from environmental sample
  misc_feature (1)..(885): n is a, c, g, or t
atgagtaatgctcagaaaaatacttacgaaagccctttgctttccagatattcctctagcgaaatgctgtatttgttcagcccgcagttcaagcaccaaacttggcgcaagctgtggatttggttagccgagggagaaaaagaacttgggcttccaataacagaagaacaaatagcagaactcaaagcccacgaaaacaatataaactgggaaaaagccgcagaagaagaaaagcgccgccgccacgatgttatggctcatgtccacgcttacggcttgcaggctccaaaggcaaagggaataatacacctcggcgcgacaagcgcttatgtgggggataacaccgatttaatccaaatgcaatatggcttggttctgattcgccgccgtttgtgcagggttatagacaagctctcaaatttcgctttggaatataaagccatgccaattttggggcgcacgcacttccaagcggcgcagctcacgaccgttggcaaaagggctgcgatgtggatacaggatttgctgatagatttagaggaaatagaccacttgatagaaattttgccatttaggggagttaagggaacaacaggcactcaagccagttttatggagttgttcgatggcaatcacgagaagattaaaaaattggacgcttatgtaagcgagaaagctggttttaaaaaagttttgaccataacggggcaaacatatacccgcaaattggattatatggtgaataacgccttagcttctcttgctaccagccttagcaaattcgcaacggatttgcgcataatgcaagggcttaaggaaatggaagaaccgtttgaaaaagaccagataggttcgtctgcctcgtgccgctcgtgccgaatctga

SEQ ID NO: 64286 - protein, 294 aa, Unknown
  Obtained from environmental sample
  DOMAIN (15)...(294): Lyase
  misc_feature (1)..(294): Xaa is any amino acid
MSNAQKNTYESPLLSRYSSSEMLYLFSPQFKHQTWRKLWIWLAEGEKELGLPITEEQIAELKAHENNINWEKAAEEEKRRRHDVMAHVHAYGLQAPKAKGIIHLGATSAYVGDNTDLIQMQYGLVLIRRRLCRVIDKLSNFALEYKAMPILGRTHFQAAQLTTVGKRAAMWIQDLLIDLEEIDHLIEILPFRGVKGTTGTQASFMELFDGNHEKIKKLDAYVSEKAGFKKVLTITGQTYTRKLDYMVNNALASLATSLSKFATDLRIMQGLKEMEEPFEKDQIGSSASCRSCRI

SEQ ID NO: 64287 - DNA, 633 bp, Unknown
  Obtained from environmental sample
  misc_feature (1)..(633): n is a, c, g, or t
atgcctgaataccagagcgacggcgcgaaatccacggataaagtagtagagctggttaagcgcgcgttaaacggcgaaaatctgttatttgagtggactctctgcacgtcaacaggagagcctattcataatgaagttactctggtacgcgcaatgtatcaaggcaagtatgtggtgttgggatatcaatacaatctgcatgacagaaaaacgcgggaaatggaactggcgcgcgcgaagaacttaaatgatcttcagcttgccaaacttaatctggttgttaaggctacaaaaatcgccctgtgggatatggaagtggtacacgacgatcccataaacccgtacaatgttttcacatggtcaaacgagttcaggcgtatgctggggtattcggacgaatatgattttcccaacgtgtttggcagttggagcagccttctgcacccgcaggacaaggaaatggcgctcgaccttttaaaaagacacatactcgacaaaaccggcaatacgccattcgacgttgaatgccgcctcttgcgaaaaaacagcgaatacggttattaccgggcttccggcgagtgcgtacgcgacaaggacgggcaacgccatacgcgcggccggcgcgttagttga

SEQ ID NO: 64288 - protein, 210 aa, Unknown
  Obtained from environmental sample
  DOMAIN (117)...(206): PAS fold
  misc_feature (1)..(210): Xaa is any amino acid
MPEYQSDGAKSTDKVVELVKRALNGENLLFEWTLCTSTGEPIHNEVTLVRAMYQGKYVVLGYQYNLHDRKTREMELARAKNLNDLQLAKLNLVVKATKIALWDMEVVHDDPINPYNVFTWSNEFRRMLGYSDEYDFPNVFGSWSSLLHPQDKEMALDLLKRHILDKTGNTPFDVECRLLRKNSEYGYYRASGECVRDKDGQRHTRGRRVS

SEQ ID NO: 64289 - DNA, 669 bp, Unknown
  Obtained from environmental sample
  misc_feature (1)..(669): n is a, c, g, or t
atgagtgatgaaaacacagccctgttagagcattacgcctccatgtcgaaagccttgagtaattttatagaaatattttctgtaaatatagaagagacatttgaagctacaatggcggccggcgttaaggcaatggccgacgctttcaatttagacagattttccatttggcgcaatgaatccatgcctgacggcctgcatggaaagcaaatattccggtgggacagggcatccggcggcgcgacgaaaccggttaagggattggaggatataaaatatgccgatttctcgccgcgatgggaagagttattatcgtcggacgaagtaattaacggccctgtaaagcttatgccggaagcgcgtcagcttgaatcattcggctgcttatcgattcttgttatgcccctgtttatcaacaataatttttggggttttgccctgcttgaagacctccaaaatgagcgctgtttccgcgatgaagatataggcatgctgcgctcggcggcgttcatgtgcgcgaacaccgtcatacgcgccgacatggagcgtgaaatagcggacgctaacgaaatttacatcgccattcttgacgcgtctccgctgggttttcgatttttgatgaaaacgccaatgttattgactgtaacgatactctcgcgaaattattaa

SEQ ID NO: 64290 - protein, 222 aa, Unknown
  Obtained from environmental sample
  DOMAIN (33)...(176): GAF domain
  misc_feature (1)..(222): Xaa is any amino acid
MSDENTALLEHYASMSKALSNFIEIFSVNIEETFEATMAAGVKAMADAFNLDRFSIWRNESMPDGLHGKQIFRWDRASGGATKPVKGLEDIKYADFSPRWEELLSSDEVINGPVKLMPEARQLESFGCLSILVMPLFINNNFWGFALLEDLQNERCFRDEDIGMLRSAAFMCANTVIRADMEREIADANEIYIAILDASPLGFRFLMKTPMLLTVTILSRNY

SEQ ID NO: 64291 - DNA, 1464 bp, Unknown
  Obtained from environmental sample
  misc_feature (1)..(1464): n is a, c, g, or t
gtgaaacaaatatataccaacctgctcaccaacgccgttaaatacacccgcgaggggagcatagaattaagcgtgttctgcaaacgcgaaggcgataatgtgtggatggacgttgccgtcagcgacaccggcatgggcataccaaaggaagccatagaaagcctgttccttgattattatcaggtcaccgccacttccaaccggaacattgaaggcacagggctgggcttgtccatcaccaaaaggcttatagagatgatggacggagaaatcaaggtggaaagcgagctaggcaagggatcaaagtttagcttccgcgtaaggcagggctttgtcgatgaggcggttctcggatcggatgtctcgaacaaactccgtaccttctgctattccgacgacaaaaagattaataccaggaaactgataaggatcaatttgagctacgccagggtactggtagtagacgatatggagaccaacctggacgtggcttcgggcattttgcacaggtacaagatgcaggttgactgtttaagtaacgggccagccgcgattgacaggatacgcgaagggaccccggtttacaacgccgtattcatggatcacatgatgcccgggatggacggcatagaaacggtagacaagattcgggctttaggcactgactacgccaaaaaaataccgattattgcccttaccgccaacgccataaagggaacggagaagttgttctatgatcatgattttcaggcgttcataaccaagcccatagacttagtggagatggacacggtcttaaggaaatttgtgcgcgacgaatccgtcgccgaagttgtaatcaacgacgagctttccgagactgatcttaagattgaaaagctggttatagaaattcccggagtggacacgaaaaaaggcctatccctgtacgccggagcgaagaagatttatctgcccatgcttcgctcttacgcccacaacacgccgaaggtgctggaaaaactaaattccgtctcggcggagaatttgcacgactacgttatcaccgtacacgggctgaaaggcacgagcgccgccattggcgcggagcacatccgcaccgccgctttggaacttgaaaacctttcaagggccggcaacctgcagggcgttctcgccaaaaacgaccagctcattgtaaacacgaaaattgttgtcgccagcgttcaggagtggctggataaaaatgacattcgcgaggttaaaccgcgcctgaaagcacccgacagggggcttcttgccaaactgcgggaaagctgtgaaagttacgacatggacgccgtggaagacgccatgaaagaactggaaaaagcggaatatgatgaagagggcgatcttgttacttggatgagggaatatgttgatatgtccaagttgggggatgtagcaaagaaactcgcagaagtattgaacgggaaaaaataa

SEQ ID NO: 64292 - protein, 487 aa, Unknown
  Obtained from environmental sample
  DOMAIN (319)...(394): Hpt domain
  misc_feature (1)..(487): Xaa is any amino acid
MKQIYTNLLTNAVKYTREGSIELSVFCKREGDNVWMDVAVSDTGMGIPKEAIESLFLDYYQVTATSNRNIEGTGLGLSITKRLIEMMDGEIKVESELGKGSKFSFRVRQGFVDEAVLGSDVSNKLRTFCYSDDKKINTRKLIRINLSYARVLVVDDMETNLDVASGILHRYKMQVDCLSNGPAAIDRIREGTPVYNAVFMDHMMPGMDGIETVDKIRALGTDYAKKIPIIALTANAIKGTEKLFYDHDFQAFITKPIDLVEMDTVLRKFVRDESVAEVVINDELSETDLKIEKLVIEIPGVDTKKGLSLYAGAKKIYLPMLRSYAHNTPKVLEKLNSVSAENLHDYVITVHGLKGTSAAIGAEHIRTAALELENLSRAGNLQGVLAKNDQLIVNTKIVVASVQEWLDKNDIREVKPRLKAPDRGLLAKLRESCESYDMDAVEDAMKELEKAEYDEEGDLVTWMREYVDMSKLGDVAKKLAEVLNGKK

SEQ ID NO: 64293 - DNA, 690 bp, Unknown
  Obtained from environmental sample
  misc_feature (1)..(690): n is a, c, g, or t
atggcgatttacacaaacaccgggtttattttggcaaattacctgccggaaatgattgggaggcagctggttgaggtggaaacgcaatacggcgaacatttagacctggtcgccgaggctgttcaaaacgcgtgggaatgggaagctgccagtttcgaccccgaattgaaaacaaccatgtatatgagcatagcccctattcctctggccgcttccccgacaacatggtcggtaatgatcggttctaccgaagcctacatccttaaagacatcaacgcgatgacaaattttaccgtcatgctgatgataatagtagtttttgcggcggcgacgctggtgagcgttctcatccgcgttgacgcggcaagaaccaaatccgacgtggaaagcaggcacaaaagcatgttcctagccaatatgagccacgaactgcgcaccccgctcaacgtggttatagggcttaccgagttaatattggaagacgacggccgcctggacaagcatactacggaaaacctggtaaagataagcaacgcgggcagtacgcttcttagcattgtaaacgacgttcttgatttttccaaaatcgagtcgggcaagctcaccctgtcgccggttgagtattacacagccagcctgctgaacgacatcgctacccttgttattacccgccttgggaaaaacccataa

SEQ ID NO: 64294 - protein, 229 aa, Unknown
  Obtained from environmental sample
  DOMAIN (132)...(199): His Kinase A (phosphoacceptor) domain
  misc_feature (1)..(229): Xaa is any amino acid
MAIYTNTGFILANYLPEMIGRQLVEVETQYGEHLDLVAEAVQNAWEWEAASFDPELKTTMYMSIAPIPLAASPTTWSVMIGSTEAYILKDINAMTNFTVMLMIIVVFAAATLVSVLIRVDAARTKSDVESRHKSMFLANMSHELRTPLNVVIGLTELILEDDGRLDKHTTENLVKISNAGSTLLSIVNDVLDFSKIESGKLTLSPVEYYTASLLNDIATLVITRLGKNP

SEQ ID NO: 64295 - DNA, 663 bp, Unknown
  Obtained from environmental sample
  misc_feature (1)..(663): n is a, c, g, or t
ttgtcgcttggaataggcataacgccgttttttataaataatgagccagaaaacattcccgttaacctagacaaaaacaaagtaaacggttttgacagagctttaatgttntcatacaagaaaccgcttgatttaattacagataacggcgcgtgcgtattagcgttattgcctattatttctgttataccaaatataaaagaagaaaacacactattaacttacggagttatgtacggacaggcgctgttactcacccttggcacgacatttacgttaaaaaacgctgtaatccgttaccgtccgtatatgtataccgatggtattcctgagggaaaggaaaaagattattacaacagctttccttcaggagccgcgtctttttcatttctgggagcctcttttttaagcgcgaccttttctcatgaatttcccgagtcaaaattgaaacttccggtaattattggcagttattcattggcggctgtgatatcgtctcttcgtattgtatcgggagcccatttttttacagacgtactaacctcggcgttaataggttcagtatatgggtggttaatacctgctcttcatctgaataataatagtgaaaaactggcaataattccgacaggaaacggcgttattttttcacttaaaatttaa

SEQ ID NO: 64296 - protein, 220 aa, Unknown
  Obtained from environmental sample
  DOMAIN (75)...(202): PAP2 superfamily
  misc_feature (1)..(220): Xaa is any amino acid
MSLGIGITPFFINNEPENIPVNLDKNKVNGFDRALMXSYKKPLDLITDNGACVLALLPIISVIPNIKEENTLLTYGVMYGQALLLTLGTTFTLKNAVIRYRPYMYTDGIPEGKEKDYYNSFPSGAASFSFLGASFLSATFSHEFPESKLKLPVIIGSYSLAAVISSLRIVSGAHFFTDVLTSALIGSVYGWLIPALHLNNNSEKLAIIPTGNGVIFSLKI

SEQ ID NO: 64297 - DNA, 1116 bp, Unknown
  Obtained from environmental sample
  misc_feature (1)..(1116): n is a, c, g, or t
atgaaggaacaaattgaaatgaaagttgccatcatacactactggcttatcaatatgcgcggtggggaaaaaatgcttgagtcgcttcttgaaatatttcctcaagccgatatttatacccatgtatacaatccaaaagctgtttccgacttgataaaaaacaggcgcgtaatcacttcgaggataaaccgcctgcccttcgcaaaaaaactctatcagctttatatgcctcttatgccaaacgcgctaatggattttaacttacaggaatatgatcttgtaatttccagtgaagcgggtcccgcaaaaggcgtggtcgctaatcccgacgcgtatcacctttgttactgccacagcccaatgcgctacctttgggatatgtaccatgaatatttcaggggaacaaatccgttagtacgcttttttatgaaacggctcattccctctctcaggctatgggatgtaacttccgccaatttagtggatcgttttgttaccaattcaaattatgtcgcaaaaaggatacgcagaatttacaaccgcgaagcggaagttgtctacggtcctgcgtctatcgaacaatttatttctgcggagcgtaaacccgccgattactatttattttttggtcagctaacaggctacaaaagagccgatatagctattgaagcgtgtattaaatcgggaagaaaacttgtcattgcggggtcaggcgcgaaaaagaaagatattaacaagtataaaaaaacaggtcttatcatattcaaaggcagagtttccgatgaagagcggaaaacacttttcgcggaagcgaaagccctgctcttccccggcattgaggacttgggtttagtgccgatagaagccaatgcagcaggctgccctgtaatcgcataccgcagcggcggcgcgcttgatacggttaaagaagaagtaacaggcgttttctttgacgaacaaactcccgattcattgattaaagcaatggagcattttgaagccaatcaggagcgttttaacaaccgcgaatcctttaacgcgcaggtacaacaattctcgcgcgaagcgtttaaggagcgaatacaacgcgtaattactgaaagaaagagagtataa

SEQ ID NO: 64298 - protein, 371 aa, Unknown
  Obtained from environmental sample
  DOMAIN (190)...(350): Glycosyl transferases group 1
  misc_feature (1)..(371): Xaa is any amino acid
MKEQIEMKVAIIHYWLINMRGGEKMLESLLEIFPQADIYTHVYNPKAVSDLIKNRRVITSRINRLPFAKKLYQLYMPLMPNALMDFNLQEYDLVISSEAGPAKGVVANPDAYHLCYCHSPMRYLWDMYHEYFRGTNPLVRFFMKRLIPSLRLWDVTSANLVDRFVTNSNYVAKRIRRIYNREAEVVYGPASIEQFISAERKPADYYLFFGQLTGYKRADIAIEACIKSGRKLVIAGSGAKKKDINKYKKTGLIIFKGRVSDEERKTLFAEAKALLFPGIEDLGLVPIEANAAGCPVIAYRSGGALDTVKEEVTGVFFDEQTPDSLIKAMEHFEANQERFNNRESFNAQVQQFSREAFKERIQRVITERKRV

SEQ ID NO: 64299 - DNA, 789 bp, Unknown
  Obtained from environmental sample
  misc_feature (1)..(789): n is a, c, g, or t
atgttggtgcttacaagcgatcacattataaaaccgcttgatatttttattaatgattcagattcagccgccagatttgcgcagcagaacaaacttgttgtatttggtatttctccgacaggaccggaaacaggttttggttacattgaagcggcggaaaatcttacagaaaatgtttataatgtcgccgctttccgagaaaaacccaaccgggaaacggcggagcgattttttgcgtcaaaaaaatatttttggaattccggaatgtttgcttttcattgtgattttttgtcggaagaataccgccgtacggcggcggcggtaaatggtccatttgaaaatcttaaaccccctgataaaaagtcatacacaaaaataaaaggtctttgcgtattggataaatgggctgggttggataaagcttacaaacaggcaaaaagcatttcttttgattatgccattgccgaaaaatgcactcaaaccgttatgatccgcgcggcttttgactggatcgatataggcagttgggatgattatgcccgtcttctttcaaacgattcttctgccggcgataccggcaaggatgtatatgacgcaggctcaaacgactgttttgtcgattccgacattcccgtcgctcttgccggagttgatgaccttattgttgtaatccgttcgggcaaagacggttctccgccttcagcgttgattactaaaaaaggcaaaacacagcttgtgcgcgatatcgttgaaaaaattaaacaatcagacagaaaagacatattatga

SEQ ID NO: 64300 - protein, 262 aa, Unknown
  Obtained from environmental sample
  DOMAIN (1)...(189): Nucleotidyl transferase
  misc_feature (1)..(262): Xaa is any amino acid
MLVLTSDHIIKPLDIFINDSDSAARFAQQNKLVVFGISPTGPETGFGYIEAAENLTENVYNVAAFREKPNRETAERFFASKKYFWNSGMFAFHCDFLSEEYRRTAAAVNGPFENLKPPDKKSYTKIKGLCVLDKWAGLDKAYKQAKSISFDYAIAEKCTQTVMIRAAFDWIDIGSWDDYARLLSNDSSAGDTGKDVYDAGSNDCFVDSDIPVALAGVDDLIVVIRSGKDGSPPSALITKKGKTQLVRDIVEKIKQSDRKDIL

SEQ ID NO: 64301 - DNA, 369 bp, Unknown
  Obtained from environmental sample
  misc_feature (1)..(369): n is a, c, g, or t
atggtttatcttgaggcgggcttcccgcttagatgccttcagcggttatcccttccgaacgtagctacccggcgcttgcccttggcaggacaaccggtacaccagaggttcgtccatttcggtcctctcgtactaaaaacagctcctctcaaccatccaacgcccatggcagatagggaccgaactgtctcgcgacgttctgaacccagctcacgtaccgctttaattggcgaacagccaaacccttgggacctgcttcagccccaggatgcgatgagccgacatcgaggtgccaaaccttcccgtcgatgtggactcttggggaagatcagcctgttatccccggagtaccttttatccgttaagtga

SEQ ID NO: 64302 - protein, 122 aa, Unknown
  Obtained from environmental sample
  misc_feature (1)..(122): Xaa is any amino acid
MVYLEAGFPLRCLQRLSLPNVATRRLPLAGQPVHQRFVHFGPLVLKTAPLNHPTPMADRDRTVSRRSEPSSRTALIGEQPNPWDLLQPQDAMSRHRGAKPSRRCGLLGKISLLSPEYLLSVK

SEQ ID NO: 64303 - DNA, 303 bp, Unknown
  Obtained from environmental sample
  misc_feature (1)..(303): n is a, c, g, or t
gtgccaaaccttcccgtcgatgtggactcttggggaagatcagcctgttatccccggagtaccttttatccgttaagtgacggcgcttccactcgctgccgccagatcactaagacctactttcgtacctgctcggcctgtcggcctcgcagtcaagcctccttgtgcctttacactcatgcgccgatttccaaccggcgcgaggagaccttcgcgcacctccgttactctttaggaggcgaccgccccagtcaaaccgcctgcctaccactgtccccataccggtttcacggcacgggttag

SEQ ID NO: 64304 - protein, 100 aa, Unknown
  Obtained from environmental sample
  misc_feature (1)..(100): Xaa is any amino acid
MPNLPVDVDSWGRSACYPRSTFYPLSDGASTRCRQITKTYFRTCSACRPRSQASLCLYTHAPISNRREETFAHLRYSLGGDRPSQTACLPLSPYRFHGTG

SEQ ID NO: 64305 - DNA, 531 bp, Unknown
  Obtained from environmental sample
  misc_feature (1)..(531): n is a, c, g, or t
ttgtgggtttacggtttcaggttctctttcactcccctcaccggggttcttttcgcctttccctcacggtactgctgcgctatcggtcgtataccgtatttagccttggatcgtggtcgacccggattcccgcggggtttctcgtgccccgccgtacttaggataccgctcccaaacgttcataatttcagatacggggctttcaccctctctggccggctttcccaaaaccgttctcttatcatggacatccagttatcgcggtcctgcaaccccactcctcagagtggtttaggctcctccggtttcgctcgccgctacttccggaatctcatgttgatttctcttcccggggtactgagatggttcagttcccccagtgtcgcttccgcgccctatgtattcagatgcggatggcagactcgcgtctgccgggttaccccattcggctatcggcggatcaaaggatgtgtgctcctccccgccgcttttcgcagcttgccgcggccttcttcgccggtatacgcctag

SEQ ID NO: 64306 - protein, 176 aa, Unknown
  Obtained from environmental sample
  misc_feature (1)..(176): Xaa is any amino acid
MWVYGFRFSFTPLTGVLFAFPSRYCCAIGRIPYLALDRGRPGFPRGFSCPAVLRIPLPNVHNFRYGAFTLSGRLSQNRSLIMDIQLSRSCNPTPQSGLGSSGFARRYFRNLMLISLPGVLRWFSSPSVASAPYVFRCGWQTRVCRVTPFGYRRIKGCVLLPAAFRSLPRPSSPVYA

SEQ ID NO: 64307 - DNA, 402 bp, Unknown
  Obtained from environmental sample
  misc_feature (1)..(402): n is a, c, g, or t
atgaacagatttgcattaatgttactgaacattgcagccgccctttatctctttgcaaacgggattttgggaataaccagggatcgcggcggcgactttggcgcaatggttcgcacaattttcgggagaggtgatttttccaatgtgttaatccttcttctggcggtttgcggtatcgcagcaggtatcttcatgctgttatcgctattcagggttgatgtcccgattacagatattatactgcttgtctttattgtactgtggctgattttcatagtgattgtggacattatcagaccgcttcagggcggagttagcttccttcattacttgacgcaattagctacgcacctgatggttctcggagctcttgccctagcgacaagacgttacggttcttaa

SEQ ID NO: 64308 - protein, 133 aa, Unknown
  Obtained from environmental sample
  SIGNAL (1)...(19)
  misc_feature (1)..(133): Xaa is any amino acid
MNRFALMLLNIAAALYLFANGILGITRDRGGDFGAMVRTIFGRGDFSNVLILLLAVCGIAAGIFMLLSLFRVDVPITDIILLVFIVLWLIFIVIVDIIRPLQGGVSFLHYLTQLATHLMVLGALALATRRYGS

SEQ ID NO: 64309 - DNA, 1722 bp, Unknown
  Obtained from environmental sample
  misc_feature (1)..(1722): n is a, c, g, or t
atgcagcgcaactggattggaagaagcgaaggcgcgaatgttgtttttaaggttgataaatctaatttgacggttttgcaaaaagaaaaattgcatgacaaagacctttcgattgaagtttacaccacgcgtcccgacacgcttttcggggcgacctacatggttctttcgccggaacatccgctggttgaaatacttaccacgccggaacaaaaagaggctgtaactgcgtacatcgaagccgccgctcgcaagagcgaccttgagcgcaccgaccttgccaaagacaagaccggtgttttctgcggcgcttatgcgattaatcctgttaacggtgaaaagattcctgtctggattgcggactatgttttaatttcctacggaacaggcgctattatggcggttcccgctcatgacgaacgtgactgggattttgctaaagtgtttaatctgccgattattcaggttgtcgcggcggaaaagccacagccgggaaaagattattccgccgaacctgttgaatgtacagcggcggacggctactcggtgaactcaagtacattcacaggccttccgacagcggaagcaaaaaagcgagtaacagaatggcttgaggagaaaggcgctggtaaaaaagcggtgaactacaaactgagggactgggttttcagccgccagcgctactggggagagccgatccctgttgtgcactgcgagaaatgcggaattgtccctctgtctgaaagcgcactccctctcaaattacctgatgtcaaatcttatgcgccgacaggaacaggcgaatcgcctcttgccggaatcgacgagtggataaatactacctgccccaaatgtggcgggaaggcaaagcgagagacgaacacaatgcctcagtgggcaggttcctgttggtactacattcgctaccttgattcgaaaaatgacaaagcgtttgcggcaaaagaaaaaatcgactactggctgccagttgatctttatgtcggcggcgctgaacacgctgtgcttcatctgctttacagccgcttctggcacaaagtactgtacgacctgagtcttgtaaacacagttgaaccttttcagcggctgataaaccaggggatgattctgggggctgacaatcagaagatgagcaagagccggggcaatgtaataaaccctgacgacattataaaagaatacggagcggattctcttcgtgtttacgaaatgtttatggggccgctggaagtcagcaagccctggaatatggcaggtgttgtcggagtgtcacgttttttggaaaggctttgggcaatcggggaaaaaccgttatgcgatgccgtgcagggaagcgatgaagccggaggcgttgaactgcaaaaacttctgcaccgcactgtaaagaaagttactcaggatactgaaagccttaactttaacaccgctatcagccagatgatggtttactctggagaacttgcgagattagcggaaatcccccgcgccatgtgggagccgctcgtaataatggtcagcgcatacgctccgcatttgggcgaggagctttgggaaaaactcggtaataatgaatctgtgtctgtgtgcaagtggccgtcttatgaagaaaaactgacgctttttgacgaagtaaatatcgttgttcaggtgaacggaaaaatccgtgataagtttaccgccgcgnncagggactgccaaagatga

SEQ ID NO: 64310 - protein, 573 aa, Unknown
  Obtained from environmental sample
  DOMAIN (456)...(573): Anticodon-binding domain
  misc_feature (1)..(573): Xaa is any amino acid
MQRNWIGRSEGANVVFKVDKSNLTVLQKEKLHDKDLSIEVYTTRPDTLFGATYMVLSPEHPLVEILTTPEQKEAVTAYIEAAARKSDLERTDLAKDKTGVFCGAYAINPVNGEKIPVWIADYVLISYGTGAIMAVPAHDERDWDFAKVFNLPIIQVVAAEKPQPGKDYSAEPVECTAADGYSVNSSTFTGLPTAEAKKRVTEWLEEKGAGKKAVNYKLRDWVFSRQRYWGEPIPVVHCEKCGIVPLSESALPLKLPDVKSYAPTGTGESPLAGIDEWINTTCPKCGGKAKRETNTMPQWAGSCWYYIRYLDSKNDKAFAAKEKIDYWLPVDLYVGGAEHAVLHLLYSRFWHKVLYDLSLVNTVEPFQRLINQGMILGADNQKMSKSRGNVINPDDIIKEYGADSLRVYEMFMGPLEVSKPWNMAGVVGVSRFLERLWAIGEKPLCDAVQGSDEAGGVELQKLLHRTVKKVTQDTESLNFNTAISQMMVYSGELARLAEIPRAMWEPLVIMVSAYAPHLGEELWEKLGNNESVSVCKWPSYEEKLTLFDEVNIVVQVNGKIRDKFTAAXRDCQR

SEQ ID NO: 64311 - DNA, 1092 bp, Unknown
  Obtained from environmental sample
  misc_feature (1)..(1092): n is a, c, g, or t
gtgcagagaatgctgtgggaaatggcggaaaacggctgcgaatacgccgtggcggaatcaagctcccacgggctctcacccaggaccaaccggcttggcgatgtggaattcgacgcctgtctgtacaccaatgtcacccacgagcatctggaatttcacggcacctgggaacagtaccgcgacgacaaggcgaacctgttcagggcgctggatcgggtacagaaaagatttaccacggaggacacggttgattcttacgaacccttcggcgtaatcaacgcggacgacccgagcgcggaatttttttcaaacgcgaccaggcgggagacattgagtttcagcgtgaaaggaaaagacgccgatcttgtagtaaaaagcatagaaagctgcgcccaggggaacaagtacaatgtgttcattagagctgaaaaggcgtacatcgacataattgacaatcttcccggcgccttcaacgcggggaacgtgctggcctcgcttttggttgtttccggtttgacaaagatcccggttcgggagttgtgccccctctgccccaaactgctgcccgtgcgcgggcgcatgaccgccgttgacaagggccaaaacttcgaggtactggtggactacgcccacacgccctcgtcttttcagacgatttttcctccttttagaaaacgccttgacagttccggcaaggccgccctcacgcggaggataatcagcgtcttcggctcccccggcgagcgtgacacgcaaaaacgcgccgaacagggaaaaatcgcaggcctctactcggactttatcgttattacggacgaagatccgcggggagagaaaccaatggacattctggaagagatcgccaagggggttgaaaaaggcgaaaatggcggaaaattcaatcgcgaaaaaaatttattcctgatacctgaccgccccaacgcgatacggaaagcgctgagcatggcgcgcaagggcgacctagtcctgcttttggggaaagggcatgagaactcaattatttacgcggatcatgttatgccttatgacgagattgctgaggcggaaaaggctttaggcgaaatatcgtaa

SEQ ID NO: 64312 - protein, 363 aa, Unknown
  Obtained from environmental sample
  DOMAIN (3)...(169): Mur ligase middle domain
  misc_feature (1)..(363): Xaa is any amino acid
MQRMLWEMAENGCEYAVAESSSHGLSPRTNRLGDVEFDACLYTNVTHEHLEFHGTWEQYRDDKANLFRALDRVQKRFTTEDTVDSYEPFGVINADDPSAEFFSNATRRETLSFSVKGKDADLVVKSIESCAQGNKYNVFIRAEKAYIDIIDNLPGAFNAGNVLASLLVVSGLTKIPVRELCPLCPKLLPVRGRMTAVDKGQNFEVLVDYAHTPSSFQTIFPPFRKRLDSSGKAALTRRIISVFGSPGERDTQKRAEQGKIAGLYSDFIVITDEDPRGEKPMDILEEIAKGVEKGENGGKFNREKNLFLIPDRPNAIRKALSMARKGDLVLLLGKGHENSIIYADHVMPYDEIAEAEKALGEIS

SEQ ID NO: 64313 - DNA, 933 bp, Unknown
  Obtained from environmental sample
  misc_feature (1)..(933): n is a, c, g, or t
atgaataaaccaatattttgtctaatcctcctcctctccctctcccaaacagcccgcgccgacgactacaaatggaacctaatcgacgccatgatgaaaaacaaccttgaagcaatagatacaatattaaaagcgaacgctccttcaatgacattaacagataaaaaccttgtgatgaatttcgcgatgaactattcttccggggaaaacgccttaaaagtatgtcaaatattgttaaaatataatatccgcccaagctcttatgatttatataccgctataagcagaaacaggcaaaatagcgttattcaatttatgataacaagcggggcggctccgaatggggagatactgttgttggctatggaaaaacaaaggttcgatctggcaaaacaatttatagaggcgggagttgatgtaaattaccgatatgctttgacaaaaaaatacgcggatggcatgacgccgcttttatacgcggtaaaatgggaaaatcttgatatagtaaaattattggtggaaaaaggagcgaataaaaatatacaggctgttaacggcgattcggcaatatctttagcgcgtaaaaataataatgataaaatatacaattatttgattgaacaaggcgcggttgaatttggcaataatatgccgcctcaaagcggcggtattgcgagtagtcaaacatataattttcaaattggttcgtatctactgaccggggggaataaatatttaaaattttcaggaaatgcaaacgccgggaatataagttatgtggatggaattaatagtaaaacaagtaatggttattacagaataacgggaaatagtatgacaattgtaatggatggaagcacatacgtgtataaaatagattctaacgaaactttttccggaaatggagaaatatggataagaaccggaaattaa

SEQ ID NO: 64314 - protein, 310 aa, Unknown
  Obtained from environmental sample
  SIGNAL (1)...(20)
  DOMAIN (152)...(184): Ankyrin repeat
  misc_feature (1)..(310): Xaa is any amino acid
MNKPIFCLILLLSLSQTARADDYKWNLIDAMMKNNLEAIDTILKANAPSMTLTDKNLVMNFAMNYSSGENALKVCQILLKYNIRPSSYDLYTAISRNRQNSVIQFMITSGAAPNGEILLLAMEKQRFDLAKQFIEAGVDVNYRYALTKKYADGMTPLLYAVKWENLDIVKLLVEKGANKNIQAVNGDSAISLARKNNNDKIYNYLIEQGAVEFGNNMPPQSGGIASSQTYNFQIGSYLLTGGNKYLKFSGNANAGNISYVDGINSKTSNGYYRITGNSMTIVMDGSTYVYKIDSNETFSGNGEIWIRTGN

SEQ ID NO: 64315 - DNA, 363 bp, Unknown
  Obtained from environmental sample
  misc_feature (1)..(363): n is a, c, g, or t
atggctaataaatcctatcaagacctaaccgtctggcagaaatcaatggaactcacagtacaggtttatcaaataacgaaaaaactgccaaaagaggaaatgtattctctgacaaaccaaatgcgaagagcgtcagtttcgatcccgtcgaatatagcggaaggtcaggcacgacattcaaaaaaagaattcatacagtttctaaggatagcgcagggatcaaaagcggaattggaaacccaattcctgctatgtttgaaaataggatattttatagattcggaaataaagggaataatgaatttactgcaagaaattggcaaaatgctgacaacactcattgccaggttaagaagttgttag

SEQ ID NO: 64316 - protein, 120 aa, Unknown
  Obtained from environmental sample
  DOMAIN (4)...(113): S23 ribosomal protein
  misc_feature (1)..(120): Xaa is any amino acid
MANKSYQDLTVWQKSMELTVQVYQITKKLPKEEMYSLTNQMRRASVSIPSNIAEGQARHSKKEFIQFLRIAQGSKAELETQFLLCLKIGYFIDSEIKGIMNLLQEIGKMLTTLIARLRSC

SEQ ID NO: 64317 - DNA, 807 bp, Unknown
  Obtained from environmental sample
  misc_feature (1)..(807): n is a, c, g, or t
ttgcaccaatacaaaaaaggtatcaacatgactaaaacaatacaatatcgttctgtagcttcattaaataaatcggaaaagaatttaatcacacgcacaggcaataaagaaaataaaataaaacatattgctttaatagtaaaaatatccggcataaccattatttgtgtgcttgttgcatatatagttatttcaattttcggtatatattccatgaaaacaacaagcataaaacctgctatcaacattggaataaataaacttaaaaacgacatggtttttttcgtaaacagactatcaaccgaatacggacaattaaaacttatagacggcgaactgatagggcaggaaggcacttcccttaaaaataattacaaactggtagacgatataagttctaattatgctattgcggcaacagtctttgcccgtaacggaaatgattaccgccgaataagtaccagtattgtagacaacaccggaaaacgtgcggttgatacctttcttgaaacagacaatgccgcatatcagcgaatacaaaacggtaacggttatataggaaaagatgtcattctcggtaaaaattatattaccaaataccgtccaattttcacggaaaacggaaaagaagttatcggtattttgtttatcggaaaggatatgacggaaatcgaaaaagtaattaacagtaatattattaaatgcattataagaatgacagctatcacatttatcattatattggcttccgttgcaatattcgtattaggctataaatataaatttgtaagccacagagttaaatga

SEQ ID NO: 64318 - protein, 268 aa, Unknown
  Obtained from environmental sample
  misc_feature (1)..(268): Xaa is any amino acid
MHQYKKGINMTKTIQYRSVASLNKSEKNLITRTGNKENKIKHIALIVKISGITIICVLVAYIVISIFGIYSMKTTSIKPAINIGINKLKNDMVFFVNRLSTEYGQLKLIDGELIGQEGTSLKNNYKLVDDISSNYAIAATVFARNGNDYRRISTSIVDNTGKRAVDTFLETDNAAYQRIQNGNGYIGKDVILGKNYITKYRPIFTENGKEVIGILFIGKDMTEIEKVINSNIIKCIIRMTAITFIIILASVAIFVLGYKYKFVSHRVK

SEQ ID NO: 64319 - DNA, 822 bp, Unknown
  Obtained from environmental sample
  misc_feature (1)..(822): n is a, c, g, or t
atggcaagaacaccgcttattccggttatacggattgatgaaaaaaagtgcgttaattgttacgcctgtatcgtaatttgtccggttaaatactgtatggacggatcggcggataagttacagataaatcacgacatgtgtatcggttgcggaaactgcattaacgcctgcacccacaaggcaagaacgctcatagatgacaccgaccgtttcatggaagacctgaaacaaaacaagaaaataatcgccgtagccgcccccgccgtcgcttcgttttttccagatcaatttctcaacttaaacggatacctgaaatcacttggcgttgaagccttttttgacgtgagccttggagcggaactgaccgtcataacatatcttgaccacatcaaagaaaaaaatccccgaacggtaatcgcccagccctgccccgcgattgtaacttatatcgaaattcatcaccctgaattattgccctttctagctccggcggacagccctatcctgcatacaattaaattggtaaaaaaattttatcccaaatataaagatcacaagatagcggtaatttctccctgtatcgccaaacggcgtgaatatgacgaaaccggtctgggtgattacaacgttacaatgctcgcgttaaaaaaaattatggacgatcagaaaataatcctctcctcatttccgcaggtggaatataccggagtaagcgcggaacgggcggccggatttccaattcccggagggctcttggataccgccgagcgttttaaaccgggtattagacggctcacagataagattgaactgagttcataa

SEQ ID NO: 64320 - protein, 273 aa, Unknown
  Obtained from environmental sample
  DOMAIN (68)...(273): Iron only hydrogenase large subunit, C-terminal domain
  misc_feature (1)..(273): Xaa is any amino acid
MARTPLIPVIRIDEKKCVNCYACIVICPVKYCMDGSADKLQINHDMCIGCGNCINACTHKARTLIDDTDRFMEDLKQNKKIIAVAAPAVASFFPDQFLNLNGYLKSLGVEAFFDVSLGAELTVITYLDHIKEKNPRTVIAQPCPAIVTYIEIHHPELLPFLAPADSPILHTIKLVKKFYPKYKDHKIAVISPCIAKRREYDETGLGDYNVTMLALKKIMDDQKIILSSFPQVEYTGVSAERAAGFPIPGGLLDTAERFKPGIRRLTDKIELSS

SEQ ID NO: 64321 - DNA, 879 bp, Unknown
  Obtained from environmental sample
  misc_feature (1)..(879): n is a, c, g, or t
atgagaaaattcaaaaaggaagatatatacaactgtacttgctgcggttacggaagctgtaaagcgatggcgacggcaatttacaacaagctgaacaaacatgaaaattgcgcccattatattctcgccctgctcaaggagaatcaggaacacattgccaacgcttcaaaccttattgaagggataaacaatttaatacaggaattaaacgatattatcagctcacaggcggaggcggttgatcactcctcggcggaaaccgaagaaatagtcgcctcgattaaaaacacttcggaaatgtcccttaaacagcaggaatcagtaaaagggttgatggaagtcgcgggacatggacaggaatccatgagaaaaaccattcaatcaataagtgaaatctctaaatctgttgaaggcataagttcggcaatacatataatttcttcaatagcggcaaataccaatttgctgtccatgaacgcggcgattgaagccgcccatgccggagacgccggaaaaggctttgcggtagtcgccggagaaatacgccgcctttcggaaaacaccagagaaaacgcggtaagtatttcccatacgcttactaatattatcaacggaatatcggacacgacaaaacaatccggagaaacagacacgcgaatagcccaaatgtcaaaagagataagcgggtttgccgaaaccatgtctgtttttatgaacacgtttaatgaattatcagcaaaaagcggaaacattaccgcctctcttgtaagcctgaaagagcaaagttcggcggttaaaacaagttatgcgcaaatgattgaaatgaccaataaacttgccaaagcgttgaaagacttatccgacttgtcaaaaagataa

SEQ ID NO: 64322 - protein, 292 aa, Unknown
  Obtained from environmental sample
  DOMAIN (74)...(287): Methyl-accepting chemotaxis protein (MCP) signaling domain
  misc_feature (1)..(292): Xaa is any amino acid
MRKFKKEDIYNCTCCGYGSCKAMATAIYNKLNKHENCAHYILALLKENQEHIANASNLIEGINNLIQELNDIISSQAEAVDHSSAETEEIVASIKNTSEMSLKQQESVKGLMEVAGHGQESMRKTIQSISEISKSVEGISSAIHIISSIAANTNLLSMNAAIEAAHAGDAGKGFAVVAGEIRRLSENTRENAVSISHTLTNIINGISDTTKQSGETDTRIAQMSKEISGFAETMSVFMNTFNELSAKSGNITASLVSLKEQSSAVKTSYAQMIEMTNKLAKALKDLSDLSKR

SEQ ID NO: 64323 - DNA, 372 bp, Unknown
  Obtained from environmental sample
  misc_feature (1)..(372): n is a, c, g, or t
atgaagaaaaagattcttgtaattgatgataatgaaactatccttaccatgacaaaaggcatgctggaagaagattatgacgttaccacagtcgattccggcaatgcagcctgggatttgatcaaaagggggtttaatcccaatttggttttgttggatatgtatatgcctgaaatgggcggctggaatactcttatcagaatacgaaaattatgcgaatcacgcaaaatccggatagcgatatacacgtcagcggaagacccggaaggtatggcaaaagcgaaagaattgggcgcggttgactacatacacaagccgatcagtagacccaaactgcttgagaaagtggcaaagttggtagaaacctggtag

SEQ ID NO: 64324 - protein, 123 aa, Unknown
  Obtained from environmental sample
  DOMAIN (3)...(117): Response regulator receiver domain
  misc_feature (1)..(123): Xaa is any amino acid
MKKKILVIDDNETILTMTKGMLEEDYDVTTVDSGNAAWDLIKRGFNPNLVLLDMYMPEMGGWNTLIRIRKLCESRKIRIAIYTSAEDPEGMAKAKELGAVDYIHKPISRPKLLEKVAKLVETW

SEQ ID NO: 64325 - DNA, 1350 bp, Unknown
  Obtained from environmental sample
  misc_feature (1)..(1350): n is a, c, g, or t
gtgatagattggccgagaccttttatcatttatatatattttttattatcttgcgccacaaacaaggccgaatacagggaaattgacaacgctgttgacggtaataaatacatggcggctgtagatgaaatcaccgtcaggcaggaatcgaaaaggcccctttatccggaaaaaaacgcaattatgctttttcttgacaaggggcttcttgaatattacgcgggtgataataaaaaatcctcacaatcgctacaggaagcggaacgattaatagaagaagcgtacaccaggagcattacagcgggtttcatgtcgtatattctgaacgacaatacaaaggaatatcccggcgaagattttgagaatatctatatcaatatttttaacgcgcttaattattataaaagaggcgatcttggaggagcgcttgttgaaatcagaaaattaagcgaaacaaacgggaagctggatatgcttgcaggaaaatacgaatataaagatccaacttccggcgcaagtctggaagagcttgtaagaagagaggccgctgatgcagaactgccaaagggaatgaatgttaattttaacaactgcgcgcttgcaaggtatcttgccgtccttttctatcttgcagacggtaacgacgacggcgcgcgcatagaatatgaacagcttcaaagggcatttctcaccaatagagccgtttacagaaacccaattccaaaaattgccgcgcaattaaacgacgttccgaaaggaaaagcaatgctgaatataatcgctttttcaggtctttccccggtaaaagaagaagaaataatttcgtatccttttcctatgttccaatttcccgtgctgactacggcaaactttaaactcccgaaaatggtaaaaagaccaagtaaaatcgaccgtatcgaagttgtggtaaattcaaataaaaaaattaatcttgaacttttggaagatatgagcgcggtagtcgaggaaacatttgccaaccgttatacaaatatcgtaataaaaacctatatccgtacaatattgaaatatgtctcggtgggtattatggcggcggaagttgaaaaaagacaggacagcagcctcatggctttggcagtcgcaatagccgcaaagacagcttttgaggcgaccgaaaaagccgatatcagaatgtcccgttattttccgggtaaagcgtatgtcggaggaatcattcttgagcccggaacttataatgttaccgtgaatttttactcgggaaacactgttattgccaaagaagaacacaataattatattgtgcgcgaaaaagggcttaaccttattgacgatgtaagcttaaaataa

SEQ ID NO: 64326 - protein, 449 aa, Unknown
  Obtained from environmental sample
  misc_feature (1)..(449): Xaa is any amino acid
MIDWPRPFIIYIYFLLSCATNKAEYREIDNAVDGNKYMAAVDEITVRQESKRPLYPEKNAIMLFLDKGLLEYYAGDNKKSSQSLQEAERLIEEAYTRSITAGFMSYILNDNTKEYPGEDFENIYINIFNALNYYKRGDLGGALVEIRKLSETNGKLDMLAGKYEYKDPTSGASLEELVRREAADAELPKGMNVNFNNCALARYLAVLFYLADGNDDGARIEYEQLQRAFLTNRAVYRNPIPKIAAQLNDVPKGKAMLNIIAFSGLSPVKEEEIISYPFPMFQFPVLTTANFKLPKMVKRPSKIDRIEVVVNSNKKINLELLEDMSAVVEETFANRYTNIVIKTYIRTILKYVSVGIMAAEVEKRQDSSLMALAVAIAAKTAFEATEKADIRMSRYFPGKAYVGGIILEPGTYNVTVNFYSGNTVIAKEEHNNYIVREKGLNLIDDVSLK

SEQ ID NO: 64327 - DNA, 603 bp, Unknown
  Obtained from environmental sample
  misc_feature (1)..(603): n is a, c, g, or t
atgaaaaaaacagtgttgttaatattaactatttttattttattgccgtcctgcgctacttcaaaagtaacaagagtcgattccaatactcaaattgatttaagcggctactggaacgacagggatgtcaggattgtctgtgaatcgcttatcaatgactgtctttcaagccaaagggttaatcaggcgttaacggcttttggcaaaaaaacgcctgttgtaatagtcgggaatttcaggaacgagagcagcgagcacatagacacggcgattattacgtcaattatggaaacgacaatttttaacacgggaaaaatggactttgtggcttcaggagcggcaagggacgcgctccgcgccgagaggcaggatcagcaggggaacgcgagcgagaataccgcggcggcgctggcaaaagaaacaggcgcggattttatgcttttggggacggtaaggacaataattgacaaggcggacaacaaatccgtaaggacatattttgtcaacgctgaactgacaaacatcgaaaccaaccaaagaatatggatggggcaaaattcagaaataaagaaaatagtggtaagagccaagaacaaactttaa

SEQ ID NO: 64328 - protein, 200 aa, Unknown
  Obtained from environmental sample
  SIGNAL (1)...(21)
  misc_feature (1)..(200): Xaa is any amino acid
MKKTVLLILTIFILLPSCATSKVTRVDSNTQIDLSGYWNDRDVRIVCESLINDCLSSQRVNQALTAFGKKTPVVIVGNFRNESSEHIDTAIITSIMETTIFNTGKMDFVASGAARDALRAERQDQQGNASENTAAALAKETGADFMLLGTVRTIIDKADNKSVRTYFVNAELTNIETNQRIWMGQNSEIKKIVVRAKNKL

SEQ ID NO: 64329 - DNA, 309 bp, Unknown
  Obtained from environmental sample
  misc_feature (1)..(309): n is a, c, g, or t
atgatgcttgaaggcgccggtttcgaagtcatagatttgggcgttgatatagatgaaaacaaaatagtagaagccgttaaagagcaccaaccccagatactgtgcctgtccgcgctgttaacaacgaccatgagccagcaaggcgtggtaatcgaagcgctaaaaacggcaggcttacgcgacaatgttaaagtgatggtaggcggagcgcccgtcactcaaagcttctgcgaagcaatccaagccgacgcctacagcccggacgcggcaagcgcggctgaaaccgcgaaggcatttgtcgtaagctaa

SEQ ID NO: 64330 - protein, 102 aa, Unknown
  Obtained from environmental sample
  DOMAIN (1)...(98): B12 binding domain
  misc_feature (1)..(102): Xaa is any amino acid
MMLEGAGFEVIDLGVDIDENKIVEAVKEHQPQILCLSALLTTTMSQQGVVIEALKTAGLRDNVKVMVGGAPVTQSFCEAIQADAYSPDAASAAETAKAFVVS

SEQ ID NO: 64331 - DNA, 747 bp, Unknown
  Obtained from environmental sample
  misc_feature (1)..(747): n is a, c, g, or t
atgaggaaatcgggcgtggtggattatttattaaaacaaaaacaaacggggcgtatacgtcatcttggcttttcctcccacggcagagccgacacaattgacaaattcctgtccaaatatgattgctttgagtttgttcagattcagcttaattacctggattggactttacaaaatgcgggcaaaaaatatgaggttattacaaaacacggcctgcctgttatttcgatggagtcatgccgcggagggcggcttgtttcccttagccccgaggctaatgcattgcttaaggccgcccggccaaacgatacagtagtttcctgggcgtttcgttttctgcagtctcttcctaatattccggttatcctaagcggcatgactactctggaacagttaaaagaaaacattgagttattctccaaagaagacccgacaacagatcaggaaaaagagttactccaaaaggctgtcaaaacaatggcagatatggttcagtgtaccgcctgcgcttattgtatcgaagcctgcccgcaggaactggacatacccaaacttatctcggcgagtaatgaaatgcgttttgctgccgcctcatcgaaaagctttaactacaaggccaggacaaaaaaagaacagccttccgcctgtattgcgtgcggggcttgcagcaaactctgtcctcaggggatagacattccttctgtattgaaacagttttcagaagcgctggtgaatcaattatcttag

SEQ ID NO: 64332 - protein, 248 aa, Unknown
  Obtained from environmental sample
  DOMAIN (209)...(232): 4Fe-4S binding domain
  misc_feature (1)..(248): Xaa is any amino acid
MRKSGVVDYLLKQKQTGRIRHLGFSSHGRADTIDKFLSKYDCFEFVQIQLNYLDWTLQNAGKKYEVITKHGLPVISMESCRGGRLVSLSPEANALLKAARPNDTVVSWAFRFLQSLPNIPVILSGMTTLEQLKENIELFSKEDPTTDQEKELLQKAVKTMADMVQCTACAYCIEACPQELDIPKLISASNEMRFAAASSKSFNYKARTKKEQPSACIACGACSKLCPQGIDIPSVLKQFSEALVNQLS

SEQ ID NO: 64333 - DNA, 312 bp, Unknown
  Obtained from environmental sample
  misc_feature (1)..(312): n is a, c, g, or t
atgggttacatagtttttgcgcggaaatggcgccccaaaacgtttggcgacatgatcggccaagagcatatcgtcgacacgctgagccgcgccatagagaaggatagggtcgcccacgcctacgtgttcaccggcacgcgcggagtgggcaagacgaccgccgcccgcatcttggcccgcgccctgaactgcgagaagggcccgaccccgacgccgtgcggcgagtgcccgtcctgcaatgacatcgtgaacggttccagtctggacgtgatggagattgacggcgcctccaacaacagctctcggccataa

SEQ ID NO: 64334 - protein, 103 aa, Unknown
  Obtained from environmental sample
  misc_feature (1)..(103): Xaa is any amino acid
MGYIVFARKWRPKTFGDMIGQEHIVDTLSRAIEKDRVAHAYVFTGTRGVGKTTAARILARALNCEKGPTPTPCGECPSCNDIVNGSSLDVMEIDGASNNSSRP

SEQ ID NO: 64335 - DNA, 726 bp, Unknown
  Obtained from environmental sample
  misc_feature (1)..(726): n is a, c, g, or t
atgggggtgctctacatcttagaggcgatacgggagttttcgccgaaaacgcgcctatatcaggcctccacctccgaaatgttcggcaaagtccaagagataccgcaaacggagaccacccccttctacccgcgctccccgtacggcatctccaaactcatggcacactgggcctgcgtgaattatagcgagagtttcggcatctttgctagttcggggatacttttcaaccacgagagccctatgcgcggcaaggagttcgtcacgcgcaaaataacatcgcacttcgcgaggctcttcaccggggagacggaggagccgcttgaactcggcaacatgaacgctaaacgcgactggggcttctcgggcgactatgttgagatgatgtggaagatgctccaaagcgacaaaccgggtacctacgtcatagccacaggggagacgcacaccataaaggagtttgtcgaggaggtcagcaaacgctgcgggttcgaactgcgctgggaggggagcggggtggacgaggtgggcataaacgccaagaccggtaagacaatcgtgaaagtcaatcccaaattctaccgtccggcggaggtggacaaactgatcggcaatccggagaaagcgatcagggaactctcgtggaaggtcaaagtcgcctttaaggaactctgcgccatgatgatggacgccgatattgagcgggcgaaaaaaggcacgttgtga

SEQ ID NO: 64336 - protein, 241 aa, Unknown
  Obtained from environmental sample
  DOMAIN (1)...(144): NAD dependent epimerase/dehydratase family
  misc_feature (1)..(241): Xaa is any amino acid
MGVLYILEAIREFSPKTRLYQASTSEMFGKVQEIPQTETTPFYPRSPYGISKLMAHWACVNYSESFGIFASSGILFNHESPMRGKEFVTRKITSHFARLFTGETEEPLELGNMNAKRDWGFSGDYVEMMWKMLQSDKPGTYVIATGETHTIKEFVEEVSKRCGFELRWEGSGVDEVGINAKTGKTIVKVNPKFYRPAEVDKLIGNPEKAIRELSWKVKVAFKELCAMMMDADIERAKKGTL

SEQ ID NO: 64337 - DNA, 1209 bp, Unknown
  Obtained from environmental sample
  misc_feature (1)..(1209): n is a, c, g, or t
atgtcagatagtttgtcaaaaaaaatttccgtcctagcgctaacctccgtctacccgcgcttcaatgaggacaccgaggttccgtggctgcgtatatctatgcgcgagctggcggcgcgcgggtgcgatgtgatgatcgccgccccgtcgtacaaggggctcaaaaaccaccgcatcgacggcatacccgtctaccgatataggtacgctccggctaagttggagtttttgacccacgacgagggcgcgccgtcaaagatagcgcgaaacccgctcctgcagttattggccgtcccctacctcatttccggctctctgaagacgctccttttgtgcctcaagctgaaacccgcgattatccacgtccactggcccttcccgcacgcgtttatggccctcttcgcgcgtttcttccgcagacaggcaaagattgtactgacattctacagcgcggagcttttgttggccaaaaagaaaaaatggatcagaccgatattgaaacatttcattaaacgggccgactccgtcatcgcgataagcgcattcgccaaagataccgtgatgggcatttacgatagagatatagagatcctaccatacggcacgaccctgcgcaacacctccggcgccgcggtggcccgccccccctccgacaagttccgcatcctcttcgtaggccggcacatcgagagaaaggggatagaatacctgatcaaggcggcggccgctctcaacccaaatatataccaagtgcggatagtcggtcaaggcgacctaacggaaaaactaaaagcgcaagccgccaaagaggcccccgatcaagtcgtatttttgggaaagatttcaaacgaagagctggaaaaagagtaccaaaacgccggctgctttatcctccccgccatcgtcgactcgcggggcgacacggaaggcttgggcgtcgtgttgatagaagccgccgagtacggcgtcccggtgatagcaagcgccgtaggcggtatagtagacgtagtcattgacggcaagacgggcctgttggtcaaagaaaaatcaccgcaagatttagccgacgcgataagacgcctgcacgatgatccgagtctctctaaatcgcttgccgacaactgcttaacgcacgtgcgagaatttttctcttgggataggattacggaaaaacaagtggggatatacaaaaaggtaatttgtaattga

SEQ ID NO: 64338 - protein, 402 aa, Unknown
  Obtained from environmental sample
  DOMAIN (206)...(378): Glycosyl transferases group 1
  misc_feature (1)..(402): Xaa is any amino acid
MSDSLSKKISVLALTSVYPRFNEDTEVPWLRISMRELAARGCDVMIAAPSYKGLKNHRIDGIPVYRYRYAPAKLEFLTHDEGAPSKIARNPLLQLLAVPYLISGSLKTLLLCLKLKPAIIHVHWPFPHAFMALFARFFRRQAKIVLTFYSAELLLAKKKKWIRPILKHFIKRADSVIAISAFAKDTVMGIYDRDIEILPYGTTLRNTSGAAVARPPSDKFRILFVGRHIERKGIEYLIKAAAALNPNIYQVRIVGQGDLTEKLKAQAAKEAPDQVVFLGKISNEELEKEYQNAGCFILPAIVDSRGDTEGLGVVLIEAAEYGVPVIASAVGGIVDVVIDGKTGLLVKEKSPQDLADAIRRLHDDPSLSKSLADNCLTHVREFFSWDRITEKQVGIYKKVICN

SEQ ID NO: 64339 - DNA, 495 bp, Unknown
  Obtained from environmental sample
  misc_feature (1)..(495): n is a, c, g, or t
atgtcgatgacgggccacggcagagtagtcggtaaaccggtaggaaaggcgggtcgaaacagcaaggaacaaccggcagaaacgcaggtatcggcgcaaccgacgcccgccgtaccgacacagcaatccgcaccggcaccggcgcaaccggcacccgccgtatcaacacagcaagcggctccggcagcggcgcagcaaaccgcaccggcgccgatacaaccgccggctacgtcaacacaaaaggctccggtaccgacacagcaggccgcaccggcgccaacgcaaccgccggccgcgtcaacacaaaagactcaggtaccgacacagcaggctactccggcgccaacgcaaccgacgccaacatcgacgcaaaaggctttcggatcaacacagcaaacagcaccgacacaaccggcgccgcaaaaggctccgtcatcgacgcaaccggcgccgacgccgacgccgcccatacaaccgcctcaaccgcggaactag

SEQ ID NO: 64340 - protein, 164 aa, Unknown
  Obtained from environmental sample
  misc_feature (1)..(164): Xaa is any amino acid
MSMTGHGRVVGKPVGKAGRNSKEQPAETQVSAQPTPAVPTQQSAPAPAQPAPAVSTQQAAPAAAQQTAPAPIQPPATSTQKAPVPTQQAAPAPTQPPAASTQKTQVPTQQATPAPTQPTPTSTQKAFGSTQQTAPTQPAPQKAPSSTQPAPTPTPPIQPPQPRN

SEQ ID NO: 64341 - DNA, 1527 bp, Unknown
  Obtained from environmental sample
  misc_feature (1)..(1527): n is a, c, g, or t
atgaagagaaaactgttttttattctaacaacggttgttctgctgattgcgaccgcgtgcagcggttcatttatagatcccggaatgctggaccaacccggtggtggcggcggcggtttcttcgaccgcgataaggatcacggtggcgggctgcctccctttgggggccgccgaggaggtggctgccgaagaggtggccgccgaagaagtggcggcggcggcggtggcggcggcggcggtgaagatgcaaaactcgccgctccatcagatgtaactgctgaggcgcgatcatcacacagtattagaataacctggtctgcggtaacgggagccactcgttactatgtatatagaagtacaagcgctaacggtacatataacaatttaaattatgtgtctagccctagcacctcttatacagacaacagattatcagcagataccacttattattacaaagtatcagcctatgatactaaaggagaaggcagccagtcttcatctatatcggcaaaaacatcatctcccagcgacgccgagaaaaacccgattcctctgactgaaaacaaatgggccgacggcgaaataaaatccgacaatactgacagagaagtttggtactcgttcaatgttacaaacgggataacatactatgtctggtggaatggtcgttacggcggtgataacacaaaagaattggatgtctatgtcgacgcgtattacatcaatgatgattcatctatcttttacagaataaattacggatggactacggctcaatcgttcacggcaaattcaaacggcaaagtaaaactgagagtctatccgtccggcagcggcaacggtacttttgccattgtgtacagcacgagtaatacaagaccaactccttacaccgttacttttgacagtaatggcggaaccggaacccctcctgagccacaaacggtaaataccggttcaagcataacattaccgggcggaaacagtctttcaaaaagcggctatactttcgccggttggagtaccgccgcgtccggcggaacctattacaacgcaggcgcttcttatactgttaacaacgatattaccctgtacgctgtatggattagcgcacttaccggcgatggaaccaaagcaagcccgttccaattaaacgcaaacacatgggctgacggcatcattacttctagtactgctaacaaagaaatttggtactcgtttgccgttacgccggaaactacatactatgtctggtggaatgataaaaccaacggtgatggcaacaaaacattagatattaaagtaagcgcatattacagcgacgattcacttatcttggataagactgttgacgcttttaacacaccaaaatctttcactacaagttcagatgatacgattgatgatgatacttttgatgatacttttgatacggtaaaaataaaagtacagccgtatagcgataacagcaccggcacttttgccattgtttacaacacaagcggtacaaagcccgctccctga

SEQ ID NO: 64342 - protein, 508 aa, Unknown
  Obtained from environmental sample
  SIGNAL (1)...(19)
  DOMAIN (85)...(167): Fibronectin type III domain
  misc_feature (1)..(508): Xaa is any amino acid
MKRKLFFILTTVVLLIATACSGSFIDPGMLDQPGGGGGGFFDRDKDHGGGLPPFGGRRGGGCRRGGRRRSGGGGGGGGGGEDAKLAAPSDVTAEARSSHSIRITWSAVTGATRYYVYRSTSANGTYNNLNYVSSPSTSYTDNRLSADTTYYYKVSAYDTKGEGSQSSSISAKTSSPSDAEKNPIPLTENKWADGEIKSDNTDREVWYSFNVTNGITYYVWWNGRYGGDNTKELDVYVDAYYINDDSSIFYRINYGWTTAQSFTANSNGKVKLRVYPSGSGNGTFAIVYSTSNTRPTPYTVTFDSNGGTGTPPEPQTVNTGSSITLPGGNSLSKSGYTFAGWSTAASGGTYYNAGASYTVNNDITLYAVWISALTGDGTKASPFQLNANTWADGIITSSTANKEIWYSFAVTPETTYYVWWNDKTNGDGNKTLDIKVSAYYSDDSLILDKTVDAFNTPKSFTTSSDDTIDDDTFDDTFDTVKIKVQPYSDNSTGTFAIVYNTSGTKPAP

SEQ ID NO: 64343 - DNA, 1146 bp, Unknown
  Obtained from environmental sample
  misc_feature (1)..(1146): n is a, c, g, or t
ttggggcgggttatggaatcagccttgcaggagatttttaaagacgaaaacctgccccgcagtgaaagacccctgccctattccaccccggaatttcagggcaaaccggaatttgatttcgataaagaccttcaatttgccgtaacttacgacgttctgccggaagtgaaaatcggtcagtggaaggggttaaatgttgagtacccttacgcggaagtcgagaaaaaagatattgataaagaactagaggaaatccgcgagcgaaacgccgtcgtcatggatagggacgataacgcgactgcgagaaaaggcgatgtcgtaacaatcgactaccagttctacgaggaaaacggcgaaaaaagtcccgatatacatcgcaaagattttgcctttactctcggttcgggaactaatgtttacaaattcgacgatgacataatcgggatgaaaaagggcgaaacaaaagaatttacaaagaagtttgagaaagatcattttgataccgcgcttgcgggcaattcaagaaaaatacaggtaacgcttaccgcgctcaaagagaaaaaactccccgatcttgacgacgatttggcgcaggacgttgatgaaaagtttaaaactcttgacgatcttaaaaacagcataaaagataaattgaccaaaactctggaataccgcctgcgggaaagaaagctaagcgagctattaaagaaaattatggaaaatacgcccgtcgttctgcccgaatccatgattagggcggaagttgaaggacgctggcggaggcttgcccgctactacaacatgaacgccgaaactatcgcccagatgatgagcggtgaagaaaagagcaaagaatggcgcgacgcggcggaaaaggcgctccactcaagattgataatcgaaactttaatggaagagcaaaaaatcgaggtttcggacaatgatgtagaagaagaatttaagtcgattgccgcggcaaacggagccgatattgaagaagttaaaaagcattataacgaggaagcggttttctacttaaaagaagacatcagagaaaagaaaattacagatatgatgtttgcggaaaacaacttaaaacaagggaaaaaggagaattatctggattttatgtcagataatggttaa

SEQ ID NO: 64344 - protein, 381 aa, Unknown
  Obtained from environmental sample
  DOMAIN (96)...(182): FKBP-type peptidyl-prolyl cis-trans isomerase
  misc_feature (1)..(381): Xaa is any amino acid
MGRVMESALQEIFKDENLPRSERPLPYSTPEFQGKPEFDFDKDLQFAVTYDVLPEVKIGQWKGLNVEYPYAEVEKKDIDKELEEIRERNAVVMDRDDNATARKGDVVTIDYQFYEENGEKSPDIHRKDFAFTLGSGTNVYKFDDDIIGMKKGETKEFTKKFEKDHFDTALAGNSRKIQVTLTALKEKKLPDLDDDLAQDVDEKFKTLDDLKNSIKDKLTKTLEYRLRERKLSELLKKIMENTPVVLPESMIRAEVEGRWRRLARYYNMNAETIAQMMSGEEKSKEWRDAAEKALHSRLIIETLMEEQKIEVSDNDVEEEFKSIAAANGADIEEVKKHYNEEAVFYLKEDIREKKITDMMFAENNLKQGKKENYLDFMSDNG

SEQ ID NO: 64345 - DNA, 579 bp, Unknown
  Obtained from environmental sample
  misc_feature (1)..(579): n is a, c, g, or t
ttgaacaaacagggatgggagaacgttcctacgatattttttccccgggcttttaaagatcgtatcgtattctggnacggngagataaatgacatttccgccgatcttgtcgtagcccagcttttgtttctggacggccaggataccgataaagacatcaacctctatataaattcccccggtggttcagttaccgcggctcttgctatttacgacaccattcagcttttaaaatcggaagttcagacaatttgccttggacaggccgccagtatggccgcccttattttaactgccgggtcagtgggaaagcggaaggttcttccgtcctcaagggtgcttattcaccagccgtggggcggcgcgcagggacaggcgagggacatcggcattcaatcaaaggagatagtccgtcttaaaaaactgataatagattattttgccaaacacaccggcaagccggcagagcaaatagcgtccgatttggaaagagatttttttatgtccgcgcaggacgcggttgagtacggcatagccgactccatattaacgagggagaaagatggcaaagcttcgtaa

SEQ ID NO: 64346 - protein, 192 aa, Unknown
  Obtained from environmental sample
  DOMAIN (5)...(186): Clp protease
  misc_feature (1)..(192): Xaa is any amino acid
MNKQGWENVPTIFFPRAFKDRIVFWXGEINDISADLVVAQLLFLDGQDTDKDINLYINSPGGSVTAALAIYDTIQLLKSEVQTICLGQAASMAALILTAGSVGKRKVLPSSRVLIHQPWGGAQGQARDIGIQSKEIVRLKKLIIDYFAKHTGKPAEQIASDLERDFFMSAQDAVEYGIADSILTREKDGKAS

SEQ ID NO: 64347 - DNA, 1263 bp, Unknown
  Obtained from environmental sample
  misc_feature (1)..(1263): n is a, c, g, or t
atggcaaagcttcgtaacggacctgaagtatttgaaagagtctgctctttttgcggcaagagcgccgacatggcgcgccgcttgattgccggccccaatgacgtttttatctgcgatgaatgtatagaagtttgccgcaaaattttaagcgaagaagagcatgagcttacctcgcattttacgggagatattcctactccgcaggaaattaaaaaataccttgacctttttatcatcgggcaggataacgcgaaaaaagcgctttcagtcgccgtttacaaccactacaaaagaatcgcgaacccgccgtccaaagaaagcgatgaagttgaaattgaaaaatccaacgttctgttaatcggtcctacgggaaccggcaaaacattgctcgcgaaaatattggcgaagaaattaaaagttccgtttgccattgtggacgccacaactctaacggaagccggttatgtcggcgaagacgtggaaaacattcttcttaaactgatacagagcgcgggcggcaacatctccgccgcggaaagaggaattgtttatatcgatgaaatcgacaaaattgcgcgcaagggcgaaaatatttccattacacgagacgtttcaggcgagggcgttcaacaggcgcttttaaaaataattgaggggactgtagcctctgttccgccgcagggtggtagaaaacatcctaatcaggaaatgatacggattgacacaacaaatattctttttatttgcggcggagcttttgtaggactggataaattaatcgctcagcgcgttgttaaccacccgctgggctttggctccgagacatacggcggagaaaagtctttaagggagctttacgacgcactgcatccggacgatttaatccgtttcggcatgattcccgaatttatcgggaggcttcccattaccgtcggtcttgaagaattaagactcgaagatttaaagcgcatcatcacggagccgcgcaacgctattgtgcgccagtatcaggcgtcgttggcttatgacaatgtaaaacttgagtttacggagaaagcaatcgacgcgatagcggacaaggcgattaaacaaaaaacaggcgcgcgcggtttaagggcgattgtcgaaaaacttatgactgatattatgttcgatattccttctataccgggcgataaaaaaataataatttcccaagatacagtggaaaaatcagaaccgccgcagataatatatctggagcagaagcaaaagagcgcataa

SEQ ID NO: 64348 - protein, 420 aa, Unknown
  Obtained from environmental sample
  DOMAIN (116)...(334): ATPase family associated with various cellular activities (AAA)
  misc_feature (1)..(420): Xaa is any amino acid
MAKLRNGPEVFERVCSFCGKSADMARRLIAGPNDVFICDECIEVCRKILSEEEHELTSHFTGDIPTPQEIKKYLDLFIIGQDNAKKALSVAVYNHYKRIANPPSKESDEVEIEKSNVLLIGPTGTGKTLLAKILAKKLKVPFAIVDATTLTEAGYVGEDVENILLKLIQSAGGNISAAERGIVYIDEIDKIARKGENISITRDVSGEGVQQALLKIIEGTVASVPPQGGRKHPNQEMIRIDTTNILFICGGAFVGLDKLIAQRVVNHPLGFGSETYGGEKSLRELYDALHPDDLIRFGMIPEFIGRLPITVGLEELRLEDLKRIITEPRNAIVRQYQASLAYDNVKLEFTEKAIDAIADKAIKQKTGARGLRAIVEKLMTDIMFDIPSIPGDKKIIISQDTVEKSEPPQIIYLEQKQKSA

SEQ ID NO: 64349 - DNA, 1200 bp, Unknown
  Obtained from environmental sample
  misc_feature (1)..(1200): n is a, c, g, or t
ttggtttccggtaataatttttattgtattaggcgtgcatcttttacggagttcaaaaacctgatgcgtttcagcataacatcccgcgataaggcttgcgccgcaagaacgggaattttacaccttccgcacggcgatgtaattactcctgtctttatgcctgtgggaacaaacggaaccgtaaaagcgctgacaacggacgacataaaagaaatcggttattcattaattctttcaaatacatatcatctgtatttaagaccgggcgaggaagttatacaaaaagcgggggggcttcataaatttattaactgggacagaaatattttaacagactcaggcggtttccagattttttccctttccgctctgcgaaaaattaaaccggaaggggcatggtttcaatcgcacattgacggctccaaacattttatcagtcccgaaaaagccgtaacaattcaggcgattctggacagcgatatacaaatgcagttggattattgttctccctggggcgcaagccgtaaggaagccgagaaagcccttgcgattaccaccgaatggcttggcagggcaaagggcaaattggaagaagttaccgcagacggaaaatatcagggcagtttattcagtattgtacagggaaacttttttaacgatctgcggaaaaagagcgcggaagtttgcatagagtcgaatactcccggcatagccataggcggtttatcggtaggggagccttcagagattttttatgaaactttagcctataccgccgcctttttacccgaagaaaagccccgttatgtaatgggaatcgggacgcccgaatacattttaaacgcgatagagcatggaatagacatgtttgactgcgtattattcacccgcgaggcgcgaaacgggcgtgtttatacgcataaaggcgcgtttgccttaaaaaagcccgaaaacaccgacgatttttcgccgatagataaagagtgcgggtgtaaagtttgcaaagagtactcccgcgcttatttacggcatctttttaagaccggggagatactttgttccatgttggcaagttatcataacctgtactttattaacgaattgataacaaacagccgtaatgccatcaaagaaggacggtttttagagtttaaaaaggattttttatcaaggtatactgaaggaaatgctaatgaatag

SEQ ID NO: 64350 - protein, 399 aa, Unknown
  Obtained from environmental sample
  DOMAIN (148)...(390): Queuine tRNA-ribosyltransferase
  misc_feature (1)..(399): Xaa is any amino acid
MVSGNNFYCIRRASFTEFKNLMRFSITSRDKACAARTGILHLPHGDVITPVFMPVGTNGTVKALTTDDIKEIGYSLILSNTYHLYLRPGEEVIQKAGGLHKFINWDRNILTDSGGFQIFSLSALRKIKPEGAWFQSHIDGSKHFISPEKAVTIQAILDSDIQMQLDYCSPWGASRKEAEKALAITTEWLGRAKGKLEEVTADGKYQGSLFSIVQGNFFNDLRKKSAEVCIESNTPGIAIGGLSVGEPSEIFYETLAYTAAFLPEEKPRYVMGIGTPEYILNAIEHGIDMFDCVLFTREARNGRVYTHKGAFALKKPENTDDFSPIDKECGCKVCKEYSRAYLRHLFKTGEILCSMLASYHNLYFINELITNSRNAIKEGRFLEFKKDFLSRYTEGNANE

SEQ ID NO: 64351 - DNA, 1365 bp, Unknown
  Obtained from environmental sample
  misc_feature (1)..(1365): n is a, c, g, or t
atgctaatgaatagacaattgtggttaatatttttttctcttcttttaatcgcatctttcgcccacgcgcaggatgaccccagaaatgacatcataaaatacggaacggaaacggaaatcgccaatcttatacagtcgctcagagcggaaaaaactgattcttttgacaacgagcttatcgctctggcgcaagtatccaaaaacacaaaagttttaacgggtattttcggcttcttcggagaaagagaaaaaggcgggcttcaggaacgcgcgataaaagtaatatcccagcgcgaggacgaagcgacagagaccattctttccgcgatggattatcttggcaagatgaaatccggcgagtcggttcccgttcttatggaactccttgaaacagaggaaaaaaagtttttaaacgccggtttccgcgccattggcagcgcaagctcaggggacaaaaaactggcggacaagacggcggaatttttagttgatttttataacgacaaagaccccggcaatgataaccgcagcgtagtaataaccgccataggagccacaggctcgtccgcaggcgttgagttccttacggaaatcgctacaaaccccgatgagcgcgtacctcttcgcatggcggcgttaggcgctttgtctcaaatcggagacccaaaaggacttgacgcgatagtaagttgtatcagcgcaaaagatccaaacttgcgctcctcagcggtcgccgctcttggtccgttttcaggttcagccgcggagaacgcgatattcgatgctttcagggattcatactaccgcacaagaatcgccgcggcgcaggcaagccgcgaccggaaactcgccgccgccgtccccttcttaaaattccgcgccgagcgcgacgacgttcccggcgtcaaagacgaatcgatccgcgcactcggcgccatcgccaacgatgaagcgatagcggttcttgaaagtttgtttttggaacggaaaaacacagaccgcgtccgcatccttgccgccgatatgcttagtaaaaattcaaaccgaaaatatttcagcaaaattatcgtggagcttgacgaggcaaaaaaaagaaaccaaacaaacctttacaacggctttttaaaaattataggcgagacagtatccgaagccgataaacaggaaatcgaaaccgtagcccgccgtttcctaagcacaggcggcataatggaaaaattatacggtcttgatatggcgagtaacaataaacttatgggactaaaggaagaaataattacgcttacaaaagacaaaaatgaaggtctttcaagaaaggcaaaaagaacagcggagaatctgggcatagagataccaagtgattga

SEQ ID NO: 64352 - protein, 454 aa, Unknown
  Obtained from environmental sample
  SIGNAL (1)...(23)
  misc_feature (1)..(454): Xaa is any amino acid
MLMNRQLWLIFFSLLLIASFAHAQDDPRNDIIKYGTETEIANLIQSLRAEKTDSFDNELIALAQVSKNTKVLTGIFGFFGEREKGGLQERAIKVISQREDEATETILSAMDYLGKMKSGESVPVLMELLETEEKKFLNAGFRAIGSASSGDKKLADKTAEFLVDFYNDKDPGNDNRSVVITAIGATGSSAGVEFLTEIATNPDERVPLRMAALGALSQIGDPKGLDAIVSCISAKDPNLRSSAVAALGPFSGSAAENAIFDAFRDSYYRTRIAAAQASRDRKLAAAVPFLKFRAERDDVPGVKDESIRALGAIANDEAIAVLESLFLERKNTDRVRILAADMLSKNSNRKYFSKIIVELDEAKKRNQTNLYNGFLKIIGETVSEADKQEIETVARRFLSTGGIMEKLYGLDMASNNKLMGLKEEIITLTKDKNEGLSRKAKRTAENLGIEIPSD

SEQ ID NO: 64353 - DNA, 1644 bp, Unknown
  Obtained from environmental sample
  misc_feature (1)..(1644): n is a, c, g, or t
ttggtctattggttcatgttcggcggccccggcagcagcgatcaagctacccttctcaccggcaccgtcctcccgatcctcaacggtttcgcgatgggcgcgtcgtcgatagcgctgttcgcccgcgtgggcggcggcatctacaccaaagccgctgacgtgggcgccgacttggtcggcaaggtcgaagccggtatacccgaagacgacccccgcaaccccgcgactatcgcggacaacgtgggcgacaacgtaggcgacgtggcgggcatgggcgccgacctcttcgagtcttatgtcggcgctataatcggttcgatggttctcggagccgccgcgggcagggtggaactggtcgtgctgccgctcgtcttggccggcgcgggcattatcatatcgatactcggaactttcttcgtacgcaccaaagagggcggcaacccgcaggccgcgctcaacaccggcacattcggcgcgggcatagtgatggctatcgtcacctatcccatagttaaatatatcgctcccgaaagcacaaacggtatattcatcgccacggtcggcggattggccgccggtatcgctatcggtatgctgacagagtactacacagccgagagcaagaagcccgtcgcgaaaatcgccgactcttccgaaaccggcccggccacaaacatcatcgccggtctcagcacaggcatgatgtccacggcgttccccactatcgctatcggcgcggcaatctttatcgcttatttcttcggcgagcaccaagcgggcgagggcctcggcctctactgcatagccatagccgctctcggtatgcttgtcacaaccggcatccagctcgccgttgacgcctacggccccatcgccgacaacgccggcggcttggccgagatggccgaattggagaaggacgtgcgcaagcgcaccgacaagctcgacgcggtaggcaacaccaccgccgccatcggcaagggcttcgccatcggctccgccgcgctcaccgcgatagcgctcttcgcggccttccgcgaaagctacttcgcactcaccggcaagaaggtcaatatcgacgttaccgagccgatggttatgatcggtctcttccttggcgcgatgctaccgttcctgttctcctccttcgctatgggcgcagtaggccgcgccgctttctccatgatcgaggaagtgcgccgccagttcaagcagatccccggcctcttggagggtacgggcaaagccgactacgcccgctgcgttgacatttcgacgcaagccgccatacgcgagatgatcgttccgggcctcatagcggtgctgacgcccgtggtagtaggtctggccggcggcccgcagatgctcggcggcgttctcgccggcgtaacggtctccggcgtgatgatggcgctcttcatgtccaacgccggcggcgcgtgggacaacgccaagaagcacattgagggcggaacccacggcggcaaaggcagcgacgcccacaaggcggcggttatcggcgacactgtcggcgacccgtttaaagacaccgcgggcccgtcgctaaacattctagtgaaactgatcagcgtagtgtcgctggttatcgtgccgattatcgcggcgattcatgggaagggttaa

SEQ ID NO: 64354 - protein, 547 aa, Unknown
  Obtained from environmental sample
  DOMAIN (1)...(537): Inorganic H+ pyrophosphatase
  misc_feature (1)..(547): Xaa is any amino acid
MVYWFMFGGPGSSDQATLLTGTVLPILNGFAMGASSIALFARVGGGIYTKAADVGADLVGKVEAGIPEDDPRNPATIADNVGDNVGDVAGMGADLFESYVGAIIGSMVLGAAAGRVELVVLPLVLAGAGIIISILGTFFVRTKEGGNPQAALNTGTFGAGIVMAIVTYPIVKYIAPESTNGIFIATVGGLAAGIAIGMLTEYYTAESKKPVAKIADSSETGPATNIIAGLSTGMMSTAFPTIAIGAAIFIAYFFGEHQAGEGLGLYCIAIAALGMLVTTGIQLAVDAYGPIADNAGGLAEMAELEKDVRKRTDKLDAVGNTTAAIGKGFAIGSAALTAIALFAAFRESYFALTGKKVNIDVTEPMVMIGLFLGAMLPFLFSSFAMGAVGRAAFSMIEEVRRQFKQIPGLLEGTGKADYARCVDISTQAAIREMIVPGLIAVLTPVVVGLAGGPQMLGGVLAGVTVSGVMMALFMSNAGGAWDNAKKHIEGGTHGGKGSDAHKAAVIGDTVGDPFKDTAGPSLNILVKLISVVSLVIVPIIAAIHGKG

SEQ ID NO: 64355 - DNA, 378 bp, Unknown
  Obtained from environmental sample
  misc_feature (1)..(378): n is a, c, g, or t
gtgggcgtcgctgcctttgccgccgtgggttccgccctcaatgtgcttcttggcgttgtcccacgcgccgccggcgttggacatgaagagcgccatcatcacgccggagaccgttacgccggcgagaacgccgccgagcatctgcgggccgccggccagacctactaccacgggcgtcagcaccgctatgaggcccggaacgatcatctcgcgtatggcggcttgcgtcgaaatgtcaacgcagcgggcgtagtcggctttgcccgtaccctccaagaggccggggatctgcttgaactggcggcgcacttcctcgatcatggagaaagcggcgcggcctactgcgcccatagcgaaggaggagaacaggaacggtag

SEQ ID NO: 64356 - protein, 125 aa, Unknown
  Obtained from environmental sample
  misc_feature (1)..(125): Xaa is any amino acid
MGVAAFAAVGSALNVLLGVVPRAAGVGHEERHHHAGDRYAGENAAEHLRAAGQTYYHGRQHRYEARNDHLAYGGLRRNVNAAGVVGFARTLQEAGDLLELAAHFLDHGESGAAYCAHSEGGEQER

SEQ ID NO: 64357 - DNA, 1074 bp, Unknown
  Obtained from environmental sample
  misc_feature (1)..(1074): n is a, c, g, or t
atgtcgacacagataatacaaggccccaaggggacgcgggacttctaccctgaggatatgtcttttctacagcatatcttcgactcttggcaccgctcctgccggctctacgggttcgagcagtacgaggggcctatgttcgagcaccttgacctatacacccagaaatccggcgccgagattgagaagcagctctattcgtttgaggacaagggtgggcggcaaatcgctttgcggccggaactaacgcctacattggcccggatggtcgcggcgcaggggacgaacctaaagaggccggtgcggtggtactccatatcgcgtctgttcaggtacgagaggatgcagaaggggcgcctaagggagttcatacagctgaatatggacatcttgggcgtcgatgacgtgagcgccgacgcggagcttatcgcggcggcggtcgatatgatgagggctttcgggttcgacgagagtgattttaaggcgcgggtatcaagccgcacattgttggaggagatgtttttggcctgcggggtcggtcaagagaagttgccggggttatacgctttgctcgacaagaagggcaagatagcgccggaggagttcgagcgggagcttgcggaggcggtcggcggggcgccgtttgtccgcagcaagatcaaggctctttttaactgcgccggactggacgacgtcgagacgttcgcggagtcgctgggggttacgatcggttctatcgcccaattaaaaaagctcttttcgctgatcgacgcgtacgggcttaaagactacgccgtcttcgacatcgggatagtccgcggcctggcttattatacggggatagtcttcgagttgtttgatgttcgcggcaatttaagggcgatagcggggggcgggcggtatgataagctggtcgggctatacggcggccctacgacgcccgcggtgggcttcgcggcgggggacgtggtgcttggggagttgatcaaggcgaaatcattaacccctaaaaaaccgccgcgtagcgacgtctttatcgtatcgatagacggcgacgcggaaatggagcgataa

SEQ ID NO: 64358 - protein, 357 aa, Unknown
  Obtained from environmental sample
  DOMAIN (22)...(187): tRNA synthetase class II core domain (G, H, P, S and T)
  misc_feature (1)..(357): Xaa is any amino acid
MSTQIIQGPKGTRDFYPEDMSFLQHIFDSWHRSCRLYGFEQYEGPMFEHLDLYTQKSGAEIEKQLYSFEDKGGRQIALRPELTPTLARMVAAQGTNLKRPVRWYSISRLFRYERMQKGRLREFIQLNMDILGVDDVSADAELIAAAVDMMRAFGFDESDFKARVSSRTLLEEMFLACGVGQEKLPGLYALLDKKGKIAPEEFERELAEAVGGAPFVRSKIKALFNCAGLDDVETFAESLGVTIGSIAQLKKLFSLIDAYGLKDYAVFDIGIVRGLAYYTGIVFELFDVRGNLRAIAGGGRYDKLVGLYGGPTTPAVGFAAGDVVLGELIKAKSLTPKKPPRSDVFIVSIDGDAEMER

SEQ ID NO: 64359 - DNA, 408 bp, Unknown
  Obtained from environmental sample
  misc_feature (1)..(408): n is a, c, g, or t
atgacagattggccgagaggctgtaattttaaaggagcttcgttttacaattgtaattttaccgaaataaaaatcggaatgagtttttttgatttttccgaatttatcgactgtgatttttcaaagacggacagtcaattcctgtcatttgccggagccaacttcaataactgcgatttttccggttcggagcttgtacatatcaattttgagggtgcgtcaattattaattccaaatttgataattccaatttatacaacagccgttttataggcgcagatttgtctaaaacttcgtttagagactgtaatgtaaaacgggtttattttgcgagcgcaaaactggatgatgttatctttaagtcatccaataccgcagaagccgtatttgaaatggaagaaaaatga

SEQ ID NO: 64360 - protein, 135 aa, Unknown
  Obtained from environmental sample
  DOMAIN (83)...(122): Pentapeptide repeats (8 copies)
  misc_feature (1)..(135): Xaa is any amino acid
MTDWPRGCNFKGASFYNCNFTEIKIGMSFFDFSEFIDCDFSKTDSQFLSFAGANFNNCDFSGSELVHINFEGASIINSKFDNSNLYNSRFIGADLSKTSFRDCNVKRVYFASAKLDDVIFKSSNTAEAVFEMEEK

SEQ ID NO: 64361 - DNA, 621 bp, Unknown
  Obtained from environmental sample
  misc_feature (1)..(621): n is a, c, g, or t
atgaaactgttttttcaatactgttcttttggtttcagtaattgttatatcctgggagaagaagataccggggacaggcagcctcaggcgattataatcgatcccggcagcatggaaattgttacgctcgaatcaatagagaacaacaattttaatttaaaagctgtacttattacccatgatcatttcagccatgtgcgcggattacagacattaaaacgcatttacaatgccgaagtttttgcggtaaaccgcaatatcgtgaactataaaaccaatatggtaaaagacggcgacaaattagtaatcgcgggatttcccgtagaggtaatttcaatacccggtcattcatctgattctgttgtgtaccggattaataatctgctttttacgggcgatgttcttacggcgggtctggtcggcagcactgcaagcgtttacggagccgctactcagatgaataaactccgcagccgcctgctttcccttcccggtgattatgttgtgctgccgggacatggaccgccgtctacaatggaagcggaacgccgctttaatacggatatctttaattacgatataacccgaagcaagcgtcccgttttccgcatagatatttga

SEQ ID NO: 64362 - protein, 206 aa, Unknown
  Obtained from environmental sample
  DOMAIN (12)...(173): Metallo-beta-lactamase superfamily
  misc_feature (1)..(206): Xaa is any amino acid
MKLFFQYCSFGFSNCYILGEEDTGDRQPQAIIIDPGSMEIVTLESIENNNFNLKAVLITHDHFSHVRGLQTLKRIYNAEVFAVNRNIVNYKTNMVKDGDKLVIAGFPVEVISIPGHSSDSVVYRINNLLFTGDVLTAGLVGSTASVYGAATQMNKLRSRLLSLPGDYVVLPGHGPPSTMEAERRFNTDIFNYDITRSKRPVFRIDI

SEQ ID NO: 64363 - DNA, 1503 bp, Unknown
  Obtained from environmental sample
  misc_feature (1)..(1503): n is a, c, g, or t
atgaatattatacaaaaactgtcttccaaaaacatttttatattcaaccttgtacttatcggagccattttcggcttttctctgtcctttttctcgttttcctgttcttcaccgaaaaacaaggtacaagcccagcaaagttcggtaataattccggaaaacgccattgccgcggctgaaagttttcagactgctgtacgcgcagtatctgaaaaattactgccgtctgttgtcgaattgaaaaccgtatctgtcagacgccagcaggtacaggggtacaacggaattccatgggaattcttctttggaccgcgcgacagggcgcaggaaggacaggaacgcgaataccgctcacagggtctcggttcaggtatcattgtaaggtttaaggacggcgtttactatgtcattaccaataaccatgttgtagatgacgctacagaaatcagggtcgctacaaaagaaggcaaggagtatcctgcggaacttgtcggaaaagacgaacgcaaagaccttgcgatggtttcctttaaaacaaatgatcgctacccgcttgcaacgctcggcgattccgacagcgtaacagtcggggactttgcaatagcgatcggcaacccgcttggagaacaattttccttttcggtaacaatgggaatcgtcagcgctgtagggcgtacaggcggaccgggcggaaacattaacgattttatacagacggacgctccgattaatatgggaaactcaggcggtcctcttgtaaacatccgaggagaggtaatcggaatcaatacatggattgcgagtaacctttcaggcggaggaaatgtcgggcttgggtttgccattccgattaacaacacaaaacgttccatagatgagtttataacaaccggttcgataagttacggctggcttggcgttaatttacaggagcctacaagagagacggccgcagaactcggcattgaaggaaaaagaggcgcgcttgcgtctcatgtgtttatcggctctccagcggataacggcggaattagagcgggcgactttattacccatgttaacggcagggaagtaaggggagtaacccagctccagatggttgtaggcgatctaaagcccggcgacagggcgacattcaccgtaataagagacaaacagtcaagagatttacaggttcgtattgagacacgcaccgatcagttagcgtcagacagcaaaagactttggccgggagtcacggtttttccgctgacagatcaaattaggcagaattttgacataaaagaaaatgtaaaaggtctttggcngtatgaaattatctcaggcactccggcggacattgtcggtctcaggaggggagatataataacatcaattaacggcgagaatgtaagcgatacagcagcattcttcaaggtgttacgcgaaaaaacatcctctgaattgtggttcggtattaccagaggagaatctacgcttgagtcgctgaggttcaagcgctaa

SEQ ID NO: 64364 - protein, 500 aa, Unknown
  Obtained from environmental sample
  DOMAIN (293)...(382): PDZ domain (Also known as DHR or GLGF)
  misc_feature (1)..(500): Xaa is any amino acid
MNIIQKLSSKNIFIFNLVLIGAIFGFSLSFFSFSCSSPKNKVQAQQSSVIIPENAIAAAESFQTAVRAVSEKLLPSVVELKTVSVRRQQVQGYNGIPWEFFFGPRDRAQEGQEREYRSQGLGSGIIVRFKDGVYYVITNNHVVDDATEIRVATKEGKEYPAELVGKDERKDLAMVSFKTNDRYPLATLGDSDSVTVGDFAIAIGNPLGEQFSFSVTMGIVSAVGRTGGPGGNINDFIQTDAPINMGNSGGPLVNIRGEVIGINTWIASNLSGGGNVGLGFAIPINNTKRSIDEFITTGSISYGWLGVNLQEPTRETAAELGIEGKRGALASHVFIGSPADNGGIRAGDFITHVNGREVRGVTQLQMVVGDLKPGDRATFTVIRDKQSRDLQVRIETRTDQLASDSKRLWPGVTVFPLTDQIRQNFDIKENVKGLWXYEIISGTPADIVGLRRGDIITSINGENVSDTAAFFKVLREKTSSELWFGITRGESTLESLRFKR

SEQ ID NO: 64365 - DNA, 552 bp, Unknown
  Obtained from environmental sample
  misc_feature (1)..(552): n is a, c, g, or t
atggcgaaaaattctgttgtacaaacatttaagggttatcagaaaaaattgttaacctttattaaaagtcaggttaaccaaattgaggacgctgaagatattctacaggatgttttttatcagttcagccgtgcggataatttaattaacccgatagaaaatatttcagggtggctttaccgcgccgcccgcaacagaataatcgaccatcgcagaaaaaagaaagacgagtctctgccttcgtcgtatgatgaagacgccgatgattatatttttgacgaaatatcggagattatctacggcgaagagtcaacgcccgaaaccgaaatgcttcgctcgctagtttttgaagaaatacagaccgctcttgcagaccttccgcaagaccagcgggaagtttttcagatgaccgaattgcttggtttttcggtaaaagaaacagcggatataaccaacacgcccgttaatactgttctttcacgaaaacattacgcggtgaaatatttgcgcaaaagactggaagagttgtatgacgatgttatggggaagtga

SEQ ID NO: 64366 - protein, 183 aa, Unknown
  Obtained from environmental sample
  DOMAIN (9)...(77): Sigma-70 region 2
  misc_feature (1)..(183): Xaa is any amino acid
MAKNSVVQTFKGYQKKLLTFIKSQVNQIEDAEDILQDVFYQFSRADNLINPIENISGWLYRAARNRIIDHRRKKKDESLPSSYDEDADDYIFDEISEIIYGEESTPETEMLRSLVFEEIQTALADLPQDQREVFQMTELLGFSVKETADITNTPVNTVLSRKHYAVKYLRKRLEELYDDVMGK

SEQ ID NO: 64367 - DNA, 819 bp, Unknown
  Obtained from environmental sample
  misc_feature (1)..(819): n is a, c, g, or t
atgagcgaacttgttttagcgcgaaaaaattcgcaggtttttagggagttaaacaccattttaaccgtcatggcgcgtgagataactttatttttcagatcacctggtaccgcgattattagtatttcgatgcccattgtcttaatgggaatgatcggcggcaatttaatgcaaaatatggctggaggacttggtttccaatttgggcaatttatgctggtgggaatgttagtcaacatgctgtttatggttactacaatgggcatgacttcgctagttgatgatcatgacattgattttaatcaggaaatgcttgtctcgcccgtatcccgttattcaattgtagttggaaaaatactaggctccggtttcgccgcaattattagcatggcaggaactctgatcgtctcccttacgatgggtattaccctgcccgtcggcaaactgctcctgatccttgccttatcgccgctgatgtgtttatcgggaggcgcgttggcgatgataatcatcgggctaatcaaaaacaaaagagcggcgaatcttgccgtaatgctcattgtcatgccgcagatgtttttgtcgggagcgataatccctatcaacaattcatcgggcgcattgctggttttgaaccgaataatgccgatgacatactgcctagaccttgttagggcggtagtctacaggggcaatcccgagtatgatagtgtagtgatgtttaatccgttggtcaatttcggcgcaattattttgttgacgataatttgccttgtgtttggcacttacttctttgcgaagagcgaaaaagacaggtaa

SEQ ID NO: 64368 - protein, 272 aa, Unknown
  Obtained from environmental sample
  DOMAIN (18)...(229): ABC-2 type transporter
  misc_feature (1)..(272): Xaa is any amino acid
MSELVLARKNSQVFRELNTILTVMAREITLFFRSPGTAIISISMPIVLMGMIGGNLMQNMAGGLGFQFGQFMLVGMLVNMLFMVTTMGMTSLVDDHDIDFNQEMLVSPVSRYSIVVGKILGSGFAAIISMAGTLIVSLTMGITLPVGKLLLILALSPLMCLSGGALAMIIIGLIKNKRAANLAVMLIVMPQMFLSGAIIPINNSSGALLVLNRIMPMTYCLDLVRAVVYRGNPEYDSVVMFNPLVNFGAIILLTIICLVFGTYFFAKSEKDR

SEQ ID NO: 64369 - DNA, 975 bp, Unknown
  Obtained from environmental sample
  misc_feature (1)..(975): n is a, c, g, or t
atgacaagtccggcgcaaaaaaggatgatagcggtgaataattctgtcattaccgtacaaaacctgataaagcggtacaagggcgcggaaaaacctgcggttgacgacatcagtttttccgttggaaaaggggagttcttcgcgtttctgggagcaaacggcgcgggtaaaacaacgaccatttctattttaacaacaactctttccaagacttcaggtcaggtaaaaatcgccgggttcgacgtggaaaaagaggcgcggaaggtgagggaaaagattggcatcatctttcaacagccaagccttgatccgcagttgacggcggagcagaatatccgctttcacgcatgcctgtatgggatgtgcggataccgcccctcatttcgcctaatgccatccgcataccgcaaacgggtaatggatcttgccgaaattgtcggaatacaggacgtactttttaaacctatcaaaaaactttcaggtggtatgcagagaaaacttgaaattatccgcagtcttatccatacgcctgacgtactttttcttgatgagccgactcaaggcttggacgctgtaagcaggcgcgggctttggaattacattaatgaaacgcgggaacgttacgggacaacggtattcctcactacccattacattgacgaagccgagaacgttgataccgtatgtcttatcaataacggaaaaatcgcctcttgctgtccgcctgaagaattaaaacaaagtttactgcggcatgaacttattttagatgccgatgacaggtcggcgttgacaaatgagttatccgcgcttggacttcatttttcgctgaacgggcgtgttgttgttccttacaatgattccgcgcaggaaattatttcgcggataaagacaaaattgacagtactgaaaatacacgaaccttcgcttgaagacgcgtatattgaatttttaaccaaacaaaagggaatgtaa

SEQ ID NO: 64370 - protein, 324 aa, Unknown
  Obtained from environmental sample
  DOMAIN (44)...(234): ABC transporter
  misc_feature (1)..(324): Xaa is any amino acid
MTSPAQKRMIAVNNSVITVQNLIKRYKGAEKPAVDDISFSVGKGEFFAFLGANGAGKTTTISILTTTLSKTSGQVKIAGFDVEKEARKVREKIGIIFQQPSLDPQLTAEQNIRFHACLYGMCGYRPSFRLMPSAYRKRVMDLAEIVGIQDVLFKPIKKLSGGMQRKLEIIRSLIHTPDVLFLDEPTQGLDAVSRRGLWNYINETRERYGTTVFLTTHYIDEAENVDTVCLINNGKIASCCPPEELKQSLLRHELILDADDRSALTNELSALGLHFSLNGRVVVPYNDSAQEIISRIKTKLTVLKIHEPSLEDAYIEFLTKQKGM

SEQ ID NO: 64371 - DNA, 432 bp, Unknown
  Obtained from environmental sample
  misc_feature (1)..(432): n is a, c, g, or t
atgaaaaacacaatcaaattcagatttatgggcattcttaccttactggtaacctgcgccatattcgccgtggccgctatgctgctttggaacgccctcttgccggagattttcgctctaccgcagattagctacctgcaagcggcagggttactcattctggcgcggctcttattcggcggtataggcggcgatttgcatggcggaggccgggggccagggagaggcaggcatccgtttcatcacggtaataaattccgtgaaaaatggatgaacatgagcgaggaagaacgcaaagagtttatggaaaaggagaaggatttctttaagctttataaaggcttttcacgttttaatggtcgttttgacgatgaggaagaaatgaaaaagaatgacaagtccggcgcaaaaaaggatgatagcggtgaataa

SEQ ID NO: 64372 - protein, 143 aa, Unknown
  Obtained from environmental sample
  SIGNAL (1)...(25)
  misc_feature (1)..(143): Xaa is any amino acid
MKNTIKFRFMGILTLLVTCAIFAVAAMLLWNALLPEIFALPQISYLQAAGLLILARLLFGGIGGDLHGGGRGPGRGRHPFHHGNKFREKWMNMSEEERKEFMEKEKDFFKLYKGFSRFNGRFDDEEEMKKNDKSGAKKDDSGE

SEQ ID NO: 64373 - DNA, 849 bp, Unknown
  Obtained from environmental sample
  misc_feature (1)..(849): n is a, c, g, or t
atgaagaaatcactttttatttttatgtcttttgttttaactgcggcattggcctttgcgggcggcgggcaagccggcagttcacagacgcagccggcggctgcgtcctacactattgcggtgggcgggtcaacctccgttaatcccctgatggaactgtttattgccgaatatgccaagattcgcggcaatgtcagattcaccgtcagcgcaaccggctcaggcgatggaatcaaaggcgtgccggcaggcacctgcgaaatcggtatgtcaagccgggaactgactcctgccgaaatcggaacaggaattgacgagctcgttatcgcaatcgacggcatcgctgttatcatcaataccgcaaacccgattacaagtctgacccaggaacagatcaagaatatctacaccggagaaattaccagctgggaacaactgggcgcagccgcgcagggcaagactgggcgtatcgctgtggtttccagggaaccgggatcgggaacacgcggcgcttttgaggagatcctcaagttccaggacaagctggtcaggggcgcgatagagttcgatggaaccggcgctatcaaagccgaagtgtcccgcaacgccgacgcaatcggttacatatcacttggctcagtggataactcaatcaaggccttgagcgttgacggagtcgccgctactacagccaacgtggttgccggttcttacaaaattgcccgtccctttattctcctgacaaaaaaaggcgttgcgcttaacgctgaaaccaaggcttttcttgactgggtcatgagctctgctggtcaaaacattgtgaaaacaagctggatcagcgttaagtaa

SEQ ID NO: 64374 - protein, 282 aa, Unknown
  Obtained from environmental sample
  SIGNAL (1)...(25)
  misc_feature (1)..(282): Xaa is any amino acid
MKKSLFIFMSFVLTAALAFAGGGQAGSSQTQPAAASYTIAVGGSTSVNPLMELFIAEYAKIRGNVRFTVSATGSGDGIKGVPAGTCEIGMSSRELTPAEIGTGIDELVIAIDGIAVIINTANPITSLTQEQIKNIYTGEITSWEQLGAAAQGKTGRIAVVSREPGSGTRGAFEEILKFQDKLVRGAIEFDGTGAIKAEVSRNADAIGYISLGSVDNSIKALSVDGVAATTANVVAGSYKIARPFILLTKKGVALNAETKAFLDWVMSSAGQNIVKTSWISVK

SEQ ID NO: 64375 - DNA, 1653 bp, Unknown
  Obtained from environmental sample
  misc_feature (1)..(1653): n is a, c, g, or t
atgaaattaactgcccttgcgtttttgggcgtaatcggattattcatagttactcctcttttttcattaaactttaacgattcagggactccggaagaacttgccgcctccattgaaaaagcgatgacggacgaacaggctttagcccaggtttttatgcttggctgggtaggggaagaaccttcgcccatcattatggattggatacggaacaggaatataggcggggtaaaaattttcggctggaacaccgccgatactacaaggctcgcgaaaacggttggcgaactgcagaaggcaagtctgcaaggcccatttcaaattccgcttcttattgccaccgatcaggaaggaggctggatacgccacgtcaagggaagcacgagcgagacacccggcaatatggcgataggggccgcgagttatccgcgtgacgcctaccttgccggtttttacataggaaaagaacttgccctgcttggtattaatatgaatttcgcgcctacagtcgatgttttttcaaatcacgactcgtcgctgataggcccccgcgctttcggaagcgatcccgtgaaagcgggaattctcggagcggcttttatgaaaggccagcttgccgcgggtattattcccaccgcgaaacattatcccggtcacggtgataccgatcttgattcacacggcatacttccccaaaataacgctacgtttgaggttttgtggaacaggaaacttgttccgtacagaaatgctggccgccgaaggcatacccgccgtaatgagcggtcatctcgcctttcctttgacgcaggccaaagatactcctgcttccctgtcttcgtggtttttaacgagctgttacgcgacaaaataggttttaagggagtcataataacggacgatttaaatatgatgggagccacctcttttttgggaactctttcccgcaccgcgaaacaggcgttaatagcgggtaacgatataatcatgttttcgaacacgccccttctttacgatcctgtttggaccttattgataaattcaatgaaagaagacgaggtgttccgcagaattgtaagaaacgcggcgcgtaaaacgctggaattaaaattaaagcaccttcgcggaaacacaagcgttccgtatattccggatcccgcgcgcgtacaggccgggatatccgatcaggaaggcgcggtttttttcatgaaccttgcggcgcgcagcgtaaccatagtaaagccgtctcccgcaaatttagtatttccggttacaaaagataacgccgggcgcgtgcttttggcgggcaaattcaacgattttttctcttacggcaaaaccgccttcccaaacgcttccttttacaggtactccggcgcgggagacgcggagattttcacggcttttgcgcgtaacgcggatacggtaattttctgcctttcagacacatcggatttgcgtttattgcgttccattcagcaattaggtaaaaaagttattgttctttcggtattaaaccccgtatatatagaaagcgtcccctgggtaagcggagccgtcgctgtttacagttacgctcccgaatctttcgccgctggtttttccgtcataataggcagaattcccgcgcagggaattctgccctatgaataa

SEQ ID NO: 64376 - protein, 550 aa, Unknown
  Obtained from environmental sample
  SIGNAL (1)...(22)
  DOMAIN (100)...(331): Glycosyl hydrolase family 3 N terminal domain
  misc_feature (1)..(550): Xaa is any amino acid
MKLTALAFLGVIGLFIVTPLFSLNFNDSGTPEELAASIEKAMTDEQALAQVFMLGWVGEEPSPIIMDWIRNRNIGGVKIFGWNTADTTRLAKTVGELQKASLQGPFQIPLLIATDQEGGWIRHVKGSTSETPGNMAIGAASYPRDAYLAGFYIGKELALLGINMNFAPTVDVFSNHDSSLIGPRAFGSDPVKAGILGAAFMKGQLAAGIIPTAKHYPGHGDTDLDSHGILPQNNATFEVLWNRKLVPYRNAGRRRHTRRNERSSRLSFDAGQRYSCFPVFVVFNELLRDKIGFKGVIITDDLNMMGATSFLGTLSRTAKQALIAGNDIIMFSNTPLLYDPVWTLLINSMKEDEVFRRIVRNAARKTLELKLKHLRGNTSVPYIPDPARVQAGISDQEGAVFFMNLAARSVTIVKPSPANLVFPVTKDNAGRVLLAGKFNDFFSYGKTAFPNASFYRYSGAGDAEIFTAFARNADTVIFCLSDTSDLRLLRSIQQLGKKVIVLSVLNPVYIESVPWVSGAVAVYSYAPESFAAGFSVIIGRIPAQGILPYE

SEQ ID NO: 64377 - DNA, 858 bp, Unknown
  Obtained from environmental sample
  misc_feature (1)..(858): n is a, c, g, or t
atgaataacgaaacgcccaagtggcgtaaaatgaaaaaaaaagaaagcgatataaaagccgccgaaacgctgttgcttgcaaatgaaaacaagtgcgtaggcgcctgcgggcggtttctctctcttgacgagacaaaaggccatgtttggattttaaatgaaaataaaacaagcgtttcggcgttaatattatattcaaaaagcactgtaattcccgtattatgcggcaagaaagagatcccttcccccgattttcttaaagaatttgtcaaaaaaaagaaaatacattcattacagggacagaaagaagatgtacttgttctggaaaacatgttgaaacaaatgggagcgcaaacctcctgttttttcgattacgatcttatgagtcttgacagacagcccggccaaaaatgtttttcatccggtcctgtaaatcttattttgcgcgcaccccgtttagtagatttagacgcaatagcccctttgcaggcggcgtatgaaaaagaagaagttcttcccggcggttcagatttcagtcccgctacaagcagggtaaacctagcccatattatcgcaaaaggacaaatcctttgcgccgaaatcgacgggcgcatagtcggaaaaatcaacataaacgccgtttcctttacaagatatcaagtaggcggcgtctatgttcaccccgatttccgcaacttgggaatcgcctgccgaatggccgcggaatttatcgcgtctttagttaattcaggaagaggagtaacccttttcgtaaaaaaagcgaatctacacgctaaacgtttatacaccggcctgggggttaccgtttccggagattatagaataacttatttttag

SEQ ID NO: 64378 - protein, 285 aa, Unknown
  Obtained from environmental sample
  DOMAIN (205)...(282): FR47-like protein
  misc_feature (1)..(285): Xaa is any amino acid
MNNETPKWRKMKKKESDIKAAETLLLANENKCVGACGRFLSLDETKGHVWILNENKTSVSALILYSKSTVIPVLCGKKEIPSPDFLKEFVKKKKIHSLQGQKEDVLVLENMLKQMGAQTSCFFDYDLMSLDRQPGQKCFSSGPVNLILRAPRLVDLDAIAPLQAAYEKEEVLPGGSDFSPATSRVNLAHIIAKGQILCAEIDGRIVGKININAVSFTRYQVGGVYVHPDFRNLGIACRMAAEFIASLVNSGRGVTLFVKKANLHAKRLYTGLGVTVSGDYRITYF

SEQ ID NO: 64379 - DNA, 894 bp, Unknown
  Obtained from environmental sample
  misc_feature (1)..(894): n is a, c, g, or t
gtgctggataccgatatgcttacaataacacaggggccattctttataatccccggttcttgttacagcgaaggcacaggctttgaagatcatgaattttttgaagcttcttctatcagaaaattcggcgatacttattattttgtttattcttccgttacattaaatgaattgtgttatgcgacaagtaaaaatccgataaaagatttttcttacggcggcgttatcgtaagcaataccgacatgcattttggaaaaccgatgaatcacaacgcaaataatcacggcggtttaattgaaataaacggcagatactacattttttatcacaggcacacaaacgggaaagatttttgcaggcaggcatgtatggagaccgttaaaattaacaaagacggaaaaatcaaccaggtaatgatgacttcctgcgggcctaatgacggacatcttgcaggttttggcgaatatccggcttatatagcgtgtaactttttttcagtagcggataacgataaacaagagtgggatttgctgccaaagggaaaatggccgcgacgcgatactcgtctgccctttgtttctcaggacgggagagacggcgatgaagaaacaggttttgtaacgaatatatatgacaattacggaattggttttaaattctttgactgcaagggagtaaaacgcataaaagtaaaaatacgcgggtacagccgaggcttctttgaggtcaaaacatcattggatgaaaaaccgcatggaactatcgaaattacatccagcaatatctggaaggaattttcgtctgacataacgatccccgatggcatacaggcaatattttttatttacaaaggtacaggaagcgcgacacttggcgcttttacgctggagtaa

SEQ ID NO: 64380 - protein, 297 aa, Unknown
  Obtained from environmental sample
  misc_feature (1)..(297): Xaa is any amino acid
MLDTDMLTITQGPFFIIPGSCYSEGTGFEDHEFFEASSIRKFGDTYYFVYSSVTLNELCYATSKNPIKDFSYGGVIVSNTDMHFGKPMNHNANNHGGLIEINGRYYIFYHRHTNGKDFCRQACMETVKINKDGKINQVMMTSCGPNDGHLAGFGEYPAYIACNFFSVADNDKQEWDLLPKGKWPRRDTRLPFVSQDGRDGDEETGFVTNIYDNYGIGFKFFDCKGVKRIKVKIRGYSRGFFEVKTSLDEKPHGTIEITSSNIWKEFSSDITIPDGIQAIFFIYKGTGSATLGAFTLE

SEQ ID NO: 64381 - DNA, 597 bp, Unknown
  Obtained from environmental sample
  misc_feature (1)..(597): n is a, c, g, or t
atgagtaccctggctcaaaacagcaaagttgtactggtctccccttcggcgaccaatatcaatgtaaccaaggccggcgattatattttccgggcctgtttcatcgatcccttccagggcgtagtgggcgctgattttgcctatgggaccctgggaagccgccgggcagccattctgtacgacgcgggcgccgattataatgccggtctggccgattctttcaggaaccagttcaaggcgattggcggccaggtcgtagccgatgaagcctatcagtccggagacgtggattttaacgcccagattacccgcattaagacggcgaaccccgatgtagtgtacctgcccaattactacaacgacgtgtcgctccaggcaaagcagcttcgggatcaggggataacctgcgcccttgtcggcggcgacggttgggacagcctcaccgacaacgccggggacgagatactcaacggcttctggtcttcgggatttgcctcggatacaaccgatcccttgggagtagcctttgtcaaggctttcaatgcaaagtataacgggctggcttccagtttgccgctctcggctatgatacgatga

SEQ ID NO: 64382 - protein, 198 aa, Unknown
  Obtained from environmental sample
  misc_feature (1)..(198): Xaa is any amino acid
MSTLAQNSKVVLVSPSATNINVTKAGDYIFRACFIDPFQGVVGADFAYGTLGSRRAAILYDAGADYNAGLADSFRNQFKAIGGQVVADEAYQSGDVDFNAQITRIKTANPDVVYLPNYYNDVSLQAKQLRDQGITCALVGGDGWDSLTDNAGDEILNGFWSSGFASDTTDPLGVAFVKAFNAKYNGLASSLPLSAMIR

SEQ ID NO: 64383 - DNA, 891 bp, Unknown
  Obtained from environmental sample
  misc_feature (1)..(891): n is a, c, g, or t
atgatcgtccttcagcagcttataaacggcttgtctctgggctcaatttacgcgttgattgccttgggctataccatggtctatggtatagtcctcttaatcaattttgcccacggcgatattttaatggtgggggcgtacgcggcgttttttgtgttaagcgcaatcggcgcggggccggtggggatgctgtttgcctttgtgatcgcaatgatcttctgcgcggtttttggcattaccattgaacgccttgcctacaggcccctccgcacggccccccgccttaattcactaattacagccatagccgtcagcctgattctggagaacggcgcgagagttctgccctttatcggccccaacccgcggcagttcccgcgccccacggttgtcaacatcaaaatagccggagagctttccatctcaaacatacagattatagtgattgttctctcggcgcttttaatgctcgcgcttaactacatcatcaattacaccaaacgcggtaaggcaatgcgggccgtctcttttgacatacaggcggcaagccttatgggaatatctgttaacaggatcatctccttcacatttgcccttggctcggtgctggcggctgccgggggagttctttacgcttcagcttaccctcaggtaaaccccatgatgggcatgatgcctggtcttaaggcctttgtcgccgcggtgctgggcggtattggttcagttccgggggcaatgcttggcggatttattcttggtatcgccgagacttttaccaagggatttatctccagccagttcagcgacgcgatttcattctcagttttgataattgttttgttaatcagaccgacaggcattcttggcaaaaaagcaagggtgaaggtttga

SEQ ID NO: 64384 - protein, 296 aa, Unknown
  Obtained from environmental sample
  DOMAIN (6)...(280): Branched-chain amino acid transport system / permease component
  misc_feature (1)..(296): Xaa is any amino acid
MIVLQQLINGLSLGSIYALIALGYTMVYGIVLLINFAHGDILMVGAYAAFFVLSAIGAGPVGMLFAFVIAMIFCAVFGITIERLAYRPLRTAPRLNSLITAIAVSLILENGARVLPFIGPNPRQFPRPTVVNIKIAGELSISNIQIIVIVLSALLMLALNYIINYTKRGKAMRAVSFDIQAASLMGISVNRIISFTFALGSVLAAAGGVLYASAYPQVNPMMGMMPGLKAFVAAVLGGIGSVPGAMLGGFILGIAETFTKGFISSQFSDAISFSVLIIVLLIRPTGILGKKARVKV

SEQ ID NO: 64385 - DNA, 990 bp, Unknown
  Obtained from environmental sample
  misc_feature (1)..(990): n is a, c, g, or t
atggctttcggattcccgttccgttcaaccgtaatactgactgttaccggaatcatggttgtagtcatcccgcttttgctgatgaagatagggatcattgatccttacaccacccgtattcttacaatgggcggggtaaacgcgataatggctatgtcagttaacatgattgtcggcattaccggccagctttccctgggtcaagccggctttcttgcaattggcgcatattcatgcattttttttaatttcgatatgggcctgccccttccgtttgcggtattgtgcgccgttattgtaaccactctcgcgggctttcttatcggttttccggtattaaagcttaccggtgattatcttgcaattgttaccctgggttttggtgaaattatccgcgtggtatttatcaaccttaaagctcttacgggcggcccaaacggaaggtcgtttactacaagcattgtactgaatggccaactggcctttattttcacaacggcaacgctggtcgtcattcttgcgctgttgcaaaattttctccgttccacctatggcagagcaatcaaggcgtgcagggaagacgagattgcggctaacgcaaacgggattaacattttccgctacaagatgatcggttttgtcattgccgcttttatcgccggcataggcggttgtgtttatgtgctggttgtcggctttgtcaggccggatatagcgcagttcctcagatccatcgacttccttatttatgtcgtgctgggcggcatgggttccatgaccggctcgattctcgcggcttatgtccttacctatttgcaggaatttctgcgtttcctgcaagattaccgcctcttgatatatccgataatactgatatttgtcatgctgttccgtccgaagggccttatgggaatgaaagaattttccattgtaggttttgttgataaaatttccggcaaattcctcaagcgggcgaagggagaagcatag

SEQ ID NO: 64386 - protein, 329 aa, Unknown
  Obtained from environmental sample
  DOMAIN (36)...(295): Branched-chain amino acid transport system / permease component
  misc_feature (1)..(329): Xaa is any amino acid
MAFGFPFRSTVILTVTGIMVVVIPLLLMKIGIIDPYTTRILTMGGVNAIMAMSVNMIVGITGQLSLGQAGFLAIGAYSCIFFNFDMGLPLPFAVLCAVIVTTLAGFLIGFPVLKLTGDYLAIVTLGFGEIIRVVFINLKALTGGPNGRSFTTSIVLNGQLAFIFTTATLVVILALLQNFLRSTYGRAIKACREDEIAANANGINIFRYKMIGFVIAAFIAGIGGCVYVLVVGFVRPDIAQFLRSIDFLIYVVLGGMGSMTGSILAAYVLTYLQEFLRFLQDYRLLIYPIILIFVMLFRPKGLMGMKEFSIVGFVDKISGKFLKRAKGEA

SEQ ID NO: 64387 - DNA, 813 bp, Unknown
  Obtained from environmental sample
  misc_feature (1)..(813): n is a, c, g, or t
atgagccatagcatgagccagggcgatttgcgcttaagggtacaggatctctccattgattttggggggctaaaagccgtcagcgatttttcctgcgagctgtaccacggggaactggtcgggcttatcggcccgaacggagcaggcaagacaacggtgttcaatatgctttcaggaatatatgtcccgacgggaggggagattgaatttcgcgaccgtgggggcaatacctgccttgtgaaaaaccttgatcctgccaggatgaaccggattggccttgcaaggacttttcagaacatacgcctcttttccaatctttctgtcgaggataatatccgcatagcgttacattctggcagaaccagcggccccctggacgcgctgttccgcctgaagcctttcaggattgatgaggaacggatgcactcccaggcgggtgaattgctttcccttttcaagattgaaaaaaagaaagatgaacttgcccgcaatcttccttatggcgagcagcgcaggctggagattgcccgcgccctggcttctaacccctgcctcctcttgctggatgagcccgcagcaggaatgaacccccaggaaaccgaggatctgatgaagacaattaaatttatcaggaatgaattccacctgacgattcttttgatcgaacacgatatgcggctggtaatggggatatgcgagcggctcatagtgctggattacgggcggacaatcgcctcaggctcgccggaagaaatccggcagaacccggcagtgataaaagcttaccttgggacggatgctgtcaatggctaa

SEQ ID NO: 64388 - protein, 270 aa, Unknown
  Obtained from environmental sample
  DOMAIN (37)...(241): ABC transporter
  misc_feature (1)..(270): Xaa is any amino acid
MSHSMSQGDLRLRVQDLSIDFGGLKAVSDFSCELYHGELVGLIGPNGAGKTTVFNMLSGIYVPTGGEIEFRDRGGNTCLVKNLDPARMNRIGLARTFQNIRLFSNLSVEDNIRIALHSGRTSGPLDALFRLKPFRIDEERMHSQAGELLSLFKIEKKKDELARNLPYGEQRRLEIARALASNPCLLLLDEPAAGMNPQETEDLMKTIKFIRNEFHLTILLIEHDMRLVMGICERLIVLDYGRTIASGSPEEIRQNPAVIKAYLGTDAVNG

SEQ ID NO: 64389 - DNA, 543 bp, Unknown
  Obtained from environmental sample
  misc_feature (1)..(543): n is a, c, g, or t
atggcaattttagcaagaaaattacaagaaagtaaaaccaaagctattggcgaactcaaagatacattaaaagttgcaaacgactttatctttacggagtaccgaggtcttaccgtagaacagatcacagagttaagaaaacaactgcgggcgaaagatgtagtttataaagttgtaaaaaacaattacgcgcaaattgtttttaaggacttgtcggatcaagacgtatccaagtaccttgtaggtcctacggcggtagcgattaccccgaaagataccaacgaagtagcgaagatactctttgaattcttaaaagaagttcccgccttaaaggtaaagggcgcattgataagcaacgctgtatacgataccgcccaaactgaagcgttctcgaaactgccgggcagactggaacttatttctatgcttatgtcggtaatgaacggaccagcgcgcaatcttgcttctgctctcaacgacattccttcaaggttggtacgcacggttaaagccgtcgccgaccaaaaggggaaagcaggctga

SEQ ID NO: 64390 - protein, 180 aa, Unknown
  Obtained from environmental sample
  DOMAIN (7)...(105): Ribosomal protein L10
  misc_feature (1)..(180): Xaa is any amino acid
MAILARKLQESKTKAIGELKDTLKVANDFIFTEYRGLTVEQITELRKQLRAKDVVYKVVKNNYAQIVFKDLSDQDVSKYLVGPTAVAITPKDTNEVAKILFEFLKEVPALKVKGALISNAVYDTAQTEAFSKLPGRLELISMLMSVMNGPARNLASALNDIPSRLVRTVKAVADQKGKAG

SEQ ID NO: 64391 - DNA, 492 bp, Unknown
  Obtained from environmental sample
  misc_feature (1)..(492): n is a, c, g, or t
gtgagaaaacaacctgtcatatcacatggcttaatcgccttcaatctccattattggatttcaacagtgccgcccgccgcggtaatcgcatccttgatcttcgcggcttcttccttggaaatattttccttgaggggcttgggcacgccttcaacaaggtctttggcttctttaaggccaaggctggtgatcgtcctgacttccttgataaccgcgattttcttggattcctcgaaagccttaagaatgacggtaaactcggttttttcctcagccgccgccgcgggagccgccccgccgccgccgccaaccgctaccgccacaggggccgccgcggacacgccgaatttctcttccatcattttaaccagttctgaaacctccagaacggtcattgaagcaatcgcttccagaatttcttcttttgtggctgccatattatcttctcctaaattgtgttatacgcttcatacgaaacgcatgcccgcctga

SEQ ID NO: 64392 - protein, 163 aa, Unknown
  Obtained from environmental sample
  misc_feature (1)..(163): Xaa is any amino acid
MRKQPVISHGLIAFNLHYWISTVPPAAVIASLIFAASSLEIFSLRGLGTPSTRSLASLRPRLVIVLTSLITAIFLDSSKALRMTVNSVFSSAAAAGAAPPPPPTATATGAAADTPNFSSIILTSSETSRTVIEAIASRISSFVAAILSSPKLCYTLHTKRMPA

SEQ ID NO: 64393 - DNA, 387 bp, Unknown
  Obtained from environmental sample
  misc_feature (1)..(387): n is a, c, g, or t
atggcagccacaaaagaagaaattctggaagcgattgcttcaatgaccgttctggaggtttcagaactggttaaaatgatggaagagaaattcggcgtgtccgcggcggcccctgtggcggtagcggttggcggcggcggcggggcggctcccgcggcggcggctgaggaaaaaaccgagtttaccgtcattcttaaggctttcgaggaatccaagaaaatcgcggttatcaaggaagtcaggacgatcaccagccttggccttaaagaagccaaagaccttgttgaaggcgtgcccaagcccctcaaggaaaatatttccaaggaagaagccgcgaagatcaaggatgcgattaccgcggcgggcggcactgttgaaatccaataa

SEQ ID NO: 64394 - protein, 128 aa, Unknown
  Obtained from environmental sample
  DOMAIN (60)...(128): Ribosomal protein L7/L12 C-terminal domain
  misc_feature (1)..(128): Xaa is any amino acid
MAATKEEILEAIASMTVLEVSELVKMMEEKFGVSAAAPVAVAVGGGGGAAPAAAAEEKTEFTVILKAFEESKKIAVIKEVRTITSLGLKEAKDLVEGVPKPLKENISKEEAAKIKDAITAAGGTVEIQ

SEQ ID NO: 64395 - DNA, 900 bp, Unknown
  Obtained from environmental sample
  misc_feature (1)..(900): n is a, c, g, or t
ttggagggggtaccaatgacgaaaggcaaattgaccggcaagcgcatatatatcgggaacgacattcaggatgttatggatctgccggatctgatcgatattcagattagctcttacgagcgctttttacaacgggataaaacaaggaaccgcgagaaagttgccttgcaggggctggaagaagtttttcagtcaacctttcctattgacagccccaatggcgacatgaagctgacgtatgaatactatacgcttgacgaggacgccgtcaaattctccgaattggactgcaaacagaagggcattacctatgcgattccccttaaagcaagggttaatctgatattccagcagacaggcgagatcaggcagaaagacatctacatgggcgacattccgatcatgagcgagagggggactttcatcatcaacggcgcggagcgtgtggttgtttcgcagctccaccgttctcccggcgttatatttagccatgagaaagggattttttcctccagaatcataccctaccgggggagctggctggaatttgaaattgaccagaaacgcgagcttatctacgcgaaagttgacaggaagaagcgcattcttggcacgattttcctgcgcgccctgggctttgaaagccgcgaggaaattatcaaagctttctatgtcaccgagaccctcaaagtcaaggacgacagcgagttcagagacaggatatcagggtgcgttcttgccgccgctgtttgggtaaaggatactgccacgggccggaaaagcgggaaacaggccgatacccacgacgggatgaaaaaattgttcaggcgggtgaaaagctgcatccccacaatgttgacgagcttctctcgaacaacgtcaaatcaatcgaagttataa

SEQ ID NO: 64396 - protein, 299 aa, Unknown
  Obtained from environmental sample
  DOMAIN (30)...(258): RNA polymerase beta subunit
  misc_feature (1)..(299): Xaa is any amino acid
MEGVPMTKGKLTGKRIYIGNDIQDVMDLPDLIDIQISSYERFLQRDKTRNREKVALQGLEEVFQSTFPIDSPNGDMKLTYEYYTLDEDAVKFSELDCKQKGITYAIPLKARVNLIFQQTGEIRQKDIYMGDIPIMSERGTFIINGAERVVVSQLHRSPGVIFSHEKGIFSSRIIPYRGSWLEFEIDQKRELIYAKVDRKKRILGTIFLRALGFESREEIIKAFYVTETLKVKDDSEFRDRISGCVLAAAVWVKDTATGRKSGKQADTHDGMKKLFRRVKSCIPTMLTSFSRTTSNQSKL

SEQ ID NO: 64397 - DNA, 1800 bp, Unknown
  Obtained from environmental sample
  misc_feature (1)..(1800): n is a, c, g, or t
gtgcgttcttgccgccgctgtttgggtaaaggatactgccacgggccggaaaagcgggaaacaggccgatacccacgacgggatgaaaaaattgttcaggcgggtgaaaagctgcatccccacaatgttgacgagcttctctcgaacaacgtcaaatcaatcgaagttataaaattcgttgaccttgaagattcttccgatgagaagtcctataattattcgctggattcggacattctccttaactgttttgagagggaagagataaaatataccaaagaaggcaatgaggagcctacaaaagaagaagccctcatggcggtattcgcggtgctgatgcagggagaaaccatatccatagacgccgcggagaaagagcttaacgggatgttctttaccagccgccgttatgatctgggaagggtagggcgctacaagctcaacaagaagttcgcctttgatcctccccttaacgattttacccttaccaaagatgacattatcgccacaatgaaattccttatcaaagtgtacataggcgatgaaaactttgacgatattgaccacctgggcaacaggcgcgtgcgctctgtcggcgagcttatgtccgttaccatgaaaaccgcgttcagcagaatggaacgcatagccaaggaaaggatgggccttaaagagaccgatacaattaagccgcaggatcttgtttccattaagcccatcgtcgcggccattaaggaattctttggctcaagccagctttcacagttcatggatcaggttaacccccttgccgagctgacccacaagcggcgtcttaacgctctgggccccggcggactttcccgcgagagggccggttttgaggtgcgcgacgtacattatacccattatggaaggatgtgccccattgaaacgccggaaggtccgaatatcggcctgatcgtgtcgctggcaaattacacccgtgtcaacgaatacggctttttggaaactccttaccgcaaggtaaacaaaggtatcgccaccagagaaattgaatacctttccgccatggacgaagatcgttactttatcgcccaggcttcggcaaagttgaaagataacggctcctttgcggatgatcagatttcatgccgcaaacagggcgattatgccacccgtctgccggaagatattcaatacatggacgtttcccccaaacagattatttcggtttccgcttctctcattcccttcctggagcatgatgacgccaaccgcgccctcatgggttccaatatgcagcgccaggcggtgccgctggtatttcccgaagcgccgcgggtcggcacgggaatggaagaaaaatgcgcctatgattccggcgtgctggttaaagcgtaccgcggcggaaccgtactgcgggttacctcccatgaaattatcataaagccggataaacccaacacgcccaagactcttacccaggcggtagttgatgaacacggcaatgacgtatacaaactggtaaagtttcagcggacgaatcaggacacctgctacaatcaacggcccattgttaaagtgggtgacaagattgttaccggacaggttattgccgacggtcccgctacccagaacggcgagcttgccctgggcagaaatattcttgtaggctttatgccctggaacggttacaactacgaagattcaatactcatttcccagcgcgtagttaaagaggatatgtttacctcaatccatataaaagaattgcaaccgaagtgcgcgagacaaaactctcggccgattctgacctag

SEQ ID NO: 64398 - protein, 599 aa, Unknown
  Obtained from environmental sample
  DOMAIN (6)...(196): RNA polymerase Rpb2, domain 2
  misc_feature (1)..(599): Xaa is any amino acid
MRSCRRCLGKGYCHGPEKRETGRYPRRDEKIVQAGEKLHPHNVDELLSNNVKSIEVIKFVDLEDSSDEKSYNYSLDSDILLNCFEREEIKYTKEGNEEPTKEEALMAVFAVLMQGETISIDAAEKELNGMFFTSRRYDLGRVGRYKLNKKFAFDPPLNDFTLTKDDIIATMKFLIKVYIGDENFDDIDHLGNRRVRSVGELMSVTMKTAFSRMERIAKERMGLKETDTIKPQDLVSIKPIVAAIKEFFGSSQLSQFMDQVNPLAELTHKRRLNALGPGGLSRERAGFEVRDVHYTHYGRMCPIETPEGPNIGLIVSLANYTRVNEYGFLETPYRKVNKGIATREIEYLSAMDEDRYFIAQASAKLKDNGSFADDQISCRKQGDYATRLPEDIQYMDVSPKQIISVSASLIPFLEHDDANRALMGSNMQRQAVPLVFPEAPRVGTGMEEKCAYDSGVLVKAYRGGTVLRVTSHEIIIKPDKPNTPKTLTQAVVDEHGNDVYKLVKFQRTNQDTCYNQRPIVKVGDKIVTGQVIADGPATQNGELALGRNILVGFMPWNGYNYEDSILISQRVVKEDMFTSIHIKELQPKCARQNSRPILT

SEQ ID NO: 64399 - DNA, 639 bp, Unknown
  Obtained from environmental sample
  misc_feature (1)..(639): n is a, c, g, or t
atggagatgtctatagaccttacccgctccgctctcagcgctctcctctttaacgggtttttaccccgatattcaccgatgcgttacttacagttaaatttacaatacctcgtcatgttcggcttgtgctgttattattacacgataatgaagcggtattcaggcaggctttcgtttgccagttgggtaatccttattatcgctccgttaattcaatttatggtattaacctattttacctacatcgccgatcctcttttggagcaacaggggattaacatttacggtcccggtttttgtttcggtcttttttgtatattgctcaatcttgtattgctctatttctatatccgccaactgattatttccgactctcagcatttgaaaatagaagtctctcacgcggagccgatatggactgtcgaaaggggattgtcggcggctttctgcgagcgttaccaactgacagaccgtgaaaaagatattatcgaaaccatgatgcaaggcaagagcaacagggaaattgccgatacactgctcatttcaatcaggacggtcggaacttaccttcaaaatgtctacaagaaaacaaacgcgccgaaccgcttcgctctttattcgctgattaaaggggaataa

SEQ ID NO: 64400 - protein, 212 aa, Unknown
  Obtained from environmental sample
  DOMAIN (152)...(209): Bacterial regulatory proteins, luxR family
  misc_feature (1)..(212): Xaa is any amino acid
MEMSIDLTRSALSALLFNGFLPRYSPMRYLQLNLQYLVMFGLCCYYYTIMKRYSGRLSFASWVILIIAPLIQFMVLTYFTYIADPLLEQQGINIYGPGFCFGLFCILLNLVLLYFYIRQLIISDSQHLKIEVSHAEPIWTVERGLSAAFCERYQLTDREKDIIETMMQGKSNREIADTLLISIRTVGTYLQNVYKKTNAPNRFALYSLIKGE

SEQ ID NO: 64401 - DNA, 1776 bp, Unknown
  Obtained from environmental sample
  misc_feature (1)..(1776): n is a, c, g, or t
atgaacagcttaaaatggaaattttttgtgttttttatcggactgggactgggtatctcgctgttgatgtatattccgtataaaagatatatcaaaacttcgtatagagaaaaacttgccaatgttttgcaaatactggagatagattaccctgaattgtcaaatccggataatcttgtcgaactggtaaccgaaggatcagacaaatactgggacattgtttattcaatgagagacatagccaaagtttttgatatcgacactttttattatgtgcggcgggtggaagacacctaccggtttgtgtttgattccggtgaaacacccgagacacctcttgatgatattctatctctctatgaaaagcatgacattccacaggcaatggaaaccgcctataaaaccaaaagcatacagataaccccgtctccgtttaccaatgtatggggtacgtttgtatcggcgtacattcctataatgcataacggagccgtagccggaatattgggagctgattatgaaatttccaaaattaagggttttgagttaggcgcccgaatatctttgatagtttccgttataatatccggggttatcgcgtatgtgctgtctatgtccctgataaagcccatcgtcaggattttcggcgtattaaagattatcgccgcgggcgatcttactcaatgcattgaagtaaaaggcaaagacgaaattgctacaatgacattattgataaaagaaacccaggaaagcatcagaaacatggtaataaagattaagacagaagcgaaagcattatctgaaatcggcgataatcttgccgccaacatgacagaaacggcggcggcagtcaatgaaattaccgccaatatccaaagtattaaaagcatggttattaaccagagcgcaagcgtcagtgaaacccatgcgactatggagcaggtcatagccaacatcaacaaactcaacgagcatgttgaaaaccagagccgcaatgtttcacaggcgtcctccgccattgagcaaatggtcgccaatatcagttcggtaacccaaactctggtcaaaaataccgacaatgtaaattcattaaaagaagcctccgaagtaggccgcagcggattgcaggaagtggcgtctgacattcaggaaatcgcccgcgaatccgagggccttttggagataaacgcggtaatggaaaacatagccagccagaccaatttgctttcgatgaatgcggcgatagaagccgcccacgccggggaagcaggaaagggcttcgccgtagtcgccgatgagatacgcaaactggcggaaagctcaagcgatcagtccaaaacgattggcacggtactgaaaaagatagcggaatcgatcaaaaagatcacagtctccaccgacaacgttctaaaaagattcgaagcaattgactcaggcgtcaggacggtggcggatcaggaagaaaacatccgcaacgcaatggaggaacagggtcaggggagcaagcaagtcctacaaagcgtcagcagtctgaacgaccttacccggaacgtaaaaagcggctccgaggaaatgcttgatggcagcaaggaagtaatgcatgagagccagaacctggaaagggtaacgcaggagatcacgggcagcatgaacgaaatggcctcgggtgcggagcaggtgaacatagcagtaacccacgtcaacgaaataagcgcaaagaaccgcgaaggtattgggactttaatgcgggaagtgtcgcgcttcaaagtggcttga

SEQ ID NO: 64402 - protein, 591 aa, Unknown
  Obtained from environmental sample
  DOMAIN (185)...(254): HAMP domain
  misc_feature (1)..(591): Xaa is any amino acid
MNSLKWKFFVFFIGLGLGISLLMYIPYKRYIKTSYREKLANVLQILEIDYPELSNPDNLVELVTEGSDKYWDIVYSMRDIAKVFDIDTFYYVRRVEDTYRFVFDSGETPETPLDDILSLYEKHDIPQAMETAYKTKSIQITPSPFTNVWGTFVSAYIPIMHNGAVAGILGADYEISKIKGFELGARISLIVSVIISGVIAYVLSMSLIKPIVRIFGVLKIIAAGDLTQCIEVKGKDEIATMTLLIKETQESIRNMVIKIKTEAKALSEIGDNLAANMTETAAAVNEITANIQSIKSMVINQSASVSETHATMEQVIANINKLNEHVENQSRNVSQASSAIEQMVANISSVTQTLVKNTDNVNSLKEASEVGRSGLQEVASDIQEIARESEGLLEINAVMENIASQTNLLSMNAAIEAAHAGEAGKGFAVVADEIRKLAESSSDQSKTIGTVLKKIAESIKKITVSTDNVLKRFEAIDSGVRTVADQEENIRNAMEEQGQGSKQVLQSVSSLNDLTRNVKSGSEEMLDGSKEVMHESQNLERVTQEITGSMNEMASGAEQVNIAVTHVNEISAKNREGIGTLMREVSRFKVA

SEQ ID NO: 64403 - DNA, 753 bp, Unknown
  Obtained from environmental sample
  misc_feature (1)..(753): n is a, c, g, or t
atggaaaagcaataccacattgattttgacgacgctcacggcgcgtcctatgcgattcttcccggtgatcccggtcgggtcgagaagatcgcatcatacctggagaacccccgctttttccaccagaaccgcgaatacactacctggcttggggaattatcaggcgcggctgtgatggtcatgtctaccggcatgggcggcccttccacagccatcgcggtggaagagctttacaaaacgggcgtaaagactttcatccgggtcggtacctgcgggggcatggcactgcctgttgtcggcggggacattgtcattgcaacaggagccatacgcatggagggcacctccagggaatacgttcccattgaatttccggcagtggcaaacctcgatgtgagtaacgctcttgtcgaagcggcaaaagctcttaaagcgcaatggcacgcgggaatcgtacagtgcaaggattccttttacgggcagcacgatcccgagcgtatgcccgcaggctacgagctgataaacaagtgggatgcctggataaaagccggctgccttgcctcggagatggaaagcgccgccctgttcatcgtaagccagattcttggcgcaagggccggctgcgtgctaaacgtggtgtggaatcaggaaagggaacgcgtcggcatgagcaacccccaaagccacgacacaagccttggcattaaaactgcggtggaagcaataagaattttaatcgggaaaggcatttaa

SEQ ID NO: 64404 - protein, 250 aa, Unknown
  Obtained from environmental sample
  DOMAIN (16)...(238): Phosphorylase family
  misc_feature (1)..(250): Xaa is any amino acid
MEKQYHIDFDDAHGASYAILPGDPGRVEKIASYLENPRFFHQNREYTTWLGELSGAAVMVMSTGMGGPSTAIAVEELYKTGVKTFIRVGTCGGMALPVVGGDIVIATGAIRMEGTSREYVPIEFPAVANLDVSNALVEAAKALKAQWHAGIVQCKDSFYGQHDPERMPAGYELINKWDAWIKAGCLASEMESAALFIVSQILGARAGCVLNVVWNQERERVGMSNPQSHDTSLGIKTAVEAIRILIGKGI

SEQ ID NO: 64405 - DNA, 312 bp, Unknown
  Obtained from environmental sample
  misc_feature (1)..(312): n is a, c, g, or t
ttgcaatttctgcgtgcaaaacagaaaggagaatttgaaatgatagcggcggcaaatcctgagatacggaaagcagtagacatcctgtacgagataagcgcggatgaaaaagtaagggcggagtataacgcacggcaaaaagcatggatggacaggcaatcgcaatttgacggctattataaaaaaggcaaagcggaaggcatcgaagaaggcatagttaagactgctcacaacttaaaagtgttagatattccaacagacataattgttaaatcaaccggtttgtcgcctgaagaaatagccaaattgtaa

SEQ ID NO: 64406 - protein, 103 aa, Unknown
  Obtained from environmental sample
  misc_feature (1)..(103): Xaa is any amino acid
MQFLRAKQKGEFEMIAAANPEIRKAVDILYEISADEKVRAEYNARQKAWMDRQSQFDGYYKKGKAEGIEEGIVKTAHNLKVLDIPTDIIVKSTGLSPEEIAKL

SEQ ID NO: 64407 - DNA, 2694 bp, Unknown
  Obtained from environmental sample
  misc_feature (1)..(2694): n is a, c, g, or t
gtgcaggcacaggcatggcccctcatcgagaatggcgctcatgtgctggctttggctcctaccggcagcgggaaaacccttacggcgtttctgtcggctatttcccgtttctgccggaatggtacaatgtacccggagggtacacagtaccccgcaaacaagcttactgtgttatacgtttccccgctcaaggcgctgaacgaggatatacggaggaacctgcttaaaccgctggaggctattcgctctcgctttgagcaggcggggcttcaattccccgatataaaggtagagacccgctcaggggacactccacagtcgcagcgccgccgtttctatttagctacgccctcaattctggcgcttaccccggaaagtctggctattcttctgctgaatcccaagggaaggcaggcgctttccaatgtgaagtaccttatcctcgacgaaatccacgccgtgctggggaacaagcggggcgcgtttctcagttgccagatcgacaggctttcgcttattgcaggagagttccagcgtataagcctttccgccacaatccgcgcgccggagattgccgccgcttttgtcgcgggtattgaccaaaacggccagggacgcaaaatcagtattgtcgcgccggcggctgaaaagaaaatagaacttactctgtcatttgatgacagagagaacaataacgatttgccgctaatcgataaatacggaagacgctattcaaatcttattaactatattttgagtcgaatctccggacgttctaccattctggtgtttactgaatcccgccgccgcgcggaacggctctgttattttatcaatcaagaggcggcgctttatgaaacggcgcttcaaaaagccggtgttagcggcactgtcgcctttacccatcacggctcgctttcaaaagaattgcggcaaagcgtggagaggcggttggcagcgggcagcctgttctgcgtggttgccaccgcttctctggaacttggcatagacataggcagcgttgatgaggtggtgctggcgggaagcccaaattcagtgtcccaggccctgcagcgcgttgggagatcaggtcacggcgtgggaatggtcagccggggccttctctttccctttcatggaatggacttgcttcttgcctcggcccttaaaagcgctgttgaggatagagacatcgaagaaatacgccccattgaaaatcccctggacattctcgcccagatgatccttgccctctgcgttgagaaaaaccggaacattgacgagctttacagattgttaaaaggattttatatattcaggaacctcaaccgcgaggcgtatttacggacagtgcgtatgctcgccggattgtcatccaggggagacggaaatgtcaggctgagggatataaagccgcgtatatggctggacaacgcgccttctccggaaggcaagacctgtgaaatcggcgccctcgacggcagcctgcttcttttgtattcatcaggcggggttattgccaaccgtggacagtattcacttaggcttgcagacggaacaaaaatcggcgaattggatgaggaatttgtatgggaacgccgccttggggacattttcgatttcggaaatcgctcgtggaggatcaccgctataggaagcgaggcggtcgaggcaattcccatttctaccggtgcggactatgctcccttctggacaggcgaaagcacttaccgcagttcggttctttcccgacgaattctggaaatactggaagggtattaccccaagggctggacttcattaaaagccgaaaggatgttggactgcttcagcgatgaagcgaaaaaagcgctggaagattttcttctttcccaatggtcgcttcaaaacgggctccctttgcccgggccgtctttcattcccatagaaataatagacgaccctgatcgcggcgacgcttacctcgtcatctttcacagctttaggggaggggcgataaactttcctctttcgctggcgctggcaagagacctggaagcgcaattcaatttgcgcgttgacggagcaggaaatgacaacgccgtctttataaggcttccgcgttccattgacgaggatcccgctgtaataattcaggaatccctgcgccgcattgccgaaggcggaacgggagaagagcgcttcaaggaacgccttgagtcgtcggggatttttggcgccgccttccgggaatcgtccgagcgctcgctcgtactgccccactctcccttcggtaagcgtatgcccctctggataaccagacaaaaatcaaaaaccctttttgatgctgttaggcgctatcgcgattttcccgtcaccgcagaggcctggagaacctgccttaacgaccagttcgacatgaagggctttaccgccattctggaagacattggctcaggcgcgctttcatatgattttttcacaacccgccaggcaagccccttctcaaaagaattaacctgggccgaaaccaacaccctcatgtacgagtacgacgagcggccggatctcacgggcggcggcccttccctttcagacagggtcatctccgaggctttgggaagcgccgccgcccggcctccacntcaaagccgcattggtcgaagacttctgctcaaggctcaggcgggaaatcccgggctgggccccggatga

SEQ ID NO: 64408 - protein, 897 aa, Unknown
  Obtained from environmental sample
  DOMAIN (1)...(188): Type III restriction enzyme, res subunit
  misc_feature (1)..(897): Xaa is any amino acid
MQAQAWPLIENGAHVLALAPTGSGKTLTAFLSAISRFCRNGTMYPEGTQYPANKLTVLYVSPLKALNEDIRRNLLKPLEAIRSRFEQAGLQFPDIKVETRSGDTPQSQRRRFYLATPSILALTPESLAILLLNPKGRQALSNVKYLILDEIHAVLGNKRGAFLSCQIDRLSLIAGEFQRISLSATIRAPEIAAAFVAGIDQNGQGRKISIVAPAAEKKIELTLSFDDRENNNDLPLIDKYGRRYSNLINYILSRISGRSTILVFTESRRRAERLCYFINQEAALYETALQKAGVSGTVAFTHHGSLSKELRQSVERRLAAGSLFCVVATASLELGIDIGSVDEVVLAGSPNSVSQALQRVGRSGHGVGMVSRGLLFPFHGMDLLLASALKSAVEDRDIEEIRPIENPLDILAQMILALCVEKNRNIDELYRLLKGFYIFRNLNREAYLRTVRMLAGLSSRGDGNVRLRDIKPRIWLDNAPSPEGKTCEIGALDGSLLLLYSSGGVIANRGQYSLRLADGTKIGELDEEFVWERRLGDIFDFGNRSWRITAIGSEAVEAIPISTGADYAPFWTGESTYRSSVLSRRILEILEGYYPKGWTSLKAERMLDCFSDEAKKALEDFLLSQWSLQNGLPLPGPSFIPIEIIDDPDRGDAYLVIFHSFRGGAINFPLSLALARDLEAQFNLRVDGAGNDNAVFIRLPRSIDEDPAVIIQESLRRIAEGGTGEERFKERLESSGIFGAAFRESSERSLVLPHSPFGKRMPLWITRQKSKTLFDAVRRYRDFPVTAEAWRTCLNDQFDMKGFTAILEDIGSGALSYDFFTTRQASPFSKELTWAETNTLMYEYDERPDLTGGGPSLSDRVISEALGSAAARPPXQSRIGRRLLLKAQAGNPGLGPG

SEQ ID NO: 64409 - DNA, 624 bp, Unknown
  Obtained from environmental sample
  misc_feature (1)..(624): n is a, c, g, or t
ttggtcgaagacttctgctcaaggctcaggcgggaaatcccgggctgggccccggatgacgagctaaccctttgcgaatgggtgaaagaacggattgccattcccaccgacgagtgggaaaagcttctgcaatgcgtcccagtcgaattgctggacgcaatacacagcgataaaagccttgggggaaaactcgaatactcaagacaagaaaattccgaaaactcagtcgtggttcaccgggaatgggcaaaaaaatggaaaggcagcgacaggaaaaaactggccgaagattgccttgggcaatggctccgctaccagggacccgttcccgtttcaaaaattgccaatgcctttaccctttccttaaccgaagcgaaggaagtcatcctgcttttaacggaagaggaaacccttgtacctgacgttacaatagaggacaccgggaaagaccttgtctgcgacagggaaaacctgggaatgcttctcaggctgagccgcagaaagcaaaggcctgagataaaggaaaagcctgcggcgcttctcgttcctttcatggcaaggagacaggggcttatgcgcagcacgccgcaggcggaatccggcagaccggctcggccgatctga

SEQ ID NO: 64410 - protein, 207 aa, Unknown
  Obtained from environmental sample
  misc_feature (1)..(207): Xaa is any amino acid
MVEDFCSRLRREIPGWAPDDELTLCEWVKERIAIPTDEWEKLLQCVPVELLDAIHSDKSLGGKLEYSRQENSENSVVVHREWAKKWKGSDRKKLAEDCLGQWLRYQGPVPVSKIANAFTLSLTEAKEVILLLTEEETLVPDVTIEDTGKDLVCDRENLGMLLRLSRRKQRPEIKEKPAALLVPFMARRQGLMRSTPQAESGRPARPI

SEQ ID NO: 64411 - DNA, 822 bp, Unknown
  Obtained from environmental sample
  misc_feature (1)..(822): n is a, c, g, or t
atgaataattttgttaaattttttgcgtgttttttagtcgcagcggtgatggcgggatgtgtttcggacaatgggaccaataagcccaataacggtaatgaaaacggagaagaaataatgtttgataccggaataaaagcggaaattgaggctgatattgaagctcattggagagagtacggatacaaagaaaaacctaagaaatttgttgccataagttttgacgatggaccatgtcctgcttccagttatggcggaaccgcggcaatgctcgctaaacttgacgagcttaaagtaaaagcgactttctttgtgattggagggaatgtccgcgccaacaaatcggtagcaaaagcgattttcgacgccggccacgaattgggcaatcattccgacggctacgccagcctcggcagcgaaactgcaagcgccataaaaacgaaccttaacgccgcctctttggcgatcaaagagataaccggaaaagatcctgttttgttccgcgctcccaacttaaaccacggcggtaatttatctcaagtctgcaaagaaatgggcatggctattattgacggcaatgttcataatgattggcccggagacgcggcttcaattaaaaacagcgttcttacaagcccgtataacggcggtattattcttttgcatgataataacacgtcgcaaggtaatacaatgtcggtactgccggaaataatcaggggccttagggaaaaaggtttctggatattaacggtaagccaacttgctgctgtgaaggagacatctctggaagcggggaaaaggtataattctattaattaa

SEQ ID NO: 64412 - protein, 273 aa, Unknown
  Obtained from environmental sample
  SIGNAL (1)...(22)
  DOMAIN (63)...(190): Polysaccharide deacetylase
  misc_feature (1)..(273): Xaa is any amino acid
MNNFVKFFACFLVAAVMAGCVSDNGTNKPNNGNENGEEIMFDTGIKAEIEADIEAHWREYGYKEKPKKFVAISFDDGPCPASSYGGTAAMLAKLDELKVKATFFVIGGNVRANKSVAKAIFDAGHELGNHSDGYASLGSETASAIKTNLNAASLAIKEITGKDPVLFRAPNLNHGGNLSQVCKEMGMAIIDGNVHNDWPGDAASIKNSVLTSPYNGGIILLHDNNTSQGNTMSVLPEIIRGLREKGFWILTVSQLAAVKETSLEAGKRYNSIN

SEQ ID NO: 64413 - DNA, 1320 bp, Unknown
  Obtained from environmental sample
  misc_feature (1)..(1320): n is a, c, g, or t
gtgcaggatattcagggcataatccaccttgatccgcaaatggcccttgaaaaaatcaagttcatgatttcagcgcaggtaaaccacggcggcgcgcttccgctggtgaagtatgaccacaaccccggacacgaggacaggcccgaagacgaatcctaccgcaagaatacagggcatccctcataccgcgccgacgatgcgttgtggctgttccctactgtctggaaatatgtcgcggaaacaggcgacacctgtctgttagacgaaaagatcccctacgctgacaagggcaaggacagtgtattcaaccacctgaaaaaagcaatcggcttttcgcttaacaaccttggaatacacggattgccagccgggcttcacgctgactggaacgactgcctccgccttggggcaaagggcgtttccgtatttgtcgcgctccagttatactacgcgttcgagatcatgatccgtttcgcgaaattcaagaaagattccgcgacagagcaggaaatgacgaaacaaaaaaatcgttttggaaaagttatcgaaaaatactgctggaaagacgaccgctttgtgcgcggcatcaccgaacacgatgttacagtcgggaagaaaggcgatccggaagcgaacatctggcttaacccgcagagctgggcggtaataagcggctatgctgatgaaaagcgcggcaaacagatacttgatttagtctacaagaaactgaacacaaaatacggtgcgcggcttatgtctcctccgtaccgcaaacacgcttttgacggggcgcttgccttattgttcaatcccagtacaaaagaaaacggcggtatcttcctgcaaacacagggctggataattcttgccgaagcgttactcggacgaggaaaccgcgccgttgagtattacttggaaagctgtccggccgctcagaatgaaatcgccgacacacgccttatggagccgtatgtttattcgcaatttacggaaagcgtagacagcccgtttgaaggacgcagtcacgttcactggctgacaggaaccgcaagcacggtaatggtcggcagtgtggaaggcattttgggattaagacccgacattgaaggactgcgcttagcgcctgcaattccctcatcgtggaaatcttttacaatggaaaaatctttccgaggcaaaaaacttaacataaaagtaaataatcccgacggacatgaaagcggctgtaaaaaactgactgtcaacggaacggctgttgaaggaaattatattcccgcaggcattttgaaaccggagaacgaaataattttagaaatgtga

SEQ ID NO: 64414 - protein, 439 aa, Unknown
  Obtained from environmental sample
  misc_feature (1)..(439): Xaa is any amino acid
MQDIQGIIHLDPQMALEKIKFMISAQVNHGGALPLVKYDHNPGHEDRPEDESYRKNTGHPSYRADDALWLFPTVWKYVAETGDTCLLDEKIPYADKGKDSVFNHLKKAIGFSLNNLGIHGLPAGLHADWNDCLRLGAKGVSVFVALQLYYAFEIMIRFAKFKKDSATEQEMTKQKNRFGKVIEKYCWKDDRFVRGITEHDVTVGKKGDPEANIWLNPQSWAVISGYADEKRGKQILDLVYKKLNTKYGARLMSPPYRKHAFDGALALLFNPSTKENGGIFLQTQGWIILAEALLGRGNRAVEYYLESCPAAQNEIADTRLMEPYVYSQFTESVDSPFEGRSHVHWLTGTASTVMVGSVEGILGLRPDIEGLRLAPAIPSSWKSFTMEKSFRGKKLNIKVNNPDGHESGCKKLTVNGTAVEGNYIPAGILKPENEIILEM

SEQ ID NO: 64415 - DNA, 1131 bp, Unknown
  Obtained from environmental sample
  misc_feature (1)..(1131): n is a, c, g, or t
atgatttacaaaccgtttggaaaaacagggataaaagtttcggctcttggttttggcgcaatgcgcttacccatgaaagaagttgacggcaagaaaattgtagacgaagaccttgccgtccctcttatgcaaaaagcgtttgacatgggtataaattatgtcgataccgctccgctttactgcgaaacgttaagcgaaatagcggtaggcaaggcgttgaagggctaccgtgacaaagtgtatttgtccacaaagaaccccattgaagacgcagacggcgatcattggatggagcgtctggaaaaatcgcttaaaaaattggacacggactgcatcgacttttatcatttttggggtatctcattaaaaagtttcgagtcatggcagggattaaaattcggtcctatcgaagcggcgtacaaagccaaagagcaggggcttatcaagcacatttctttttcgtaccacgacgcggcggaaaattataaaaagatagtagactcaggacactttgaaacaacacttgttcagtacaatatgctcgatcgttccaacgaggaaaacattgcctacgcaaagtccaaaggcttgggcgttgtggtaatgggacccgtaggcggcggacgtctcggcgcgccaagcgaaaaaattcaaagcctgcttaaaaacaaatcgacaagcacggcggaaatggctctgcgttttgtacttgcaaatgaaaacatagacatggctctttccggcatgggcaatctcgacatgttaaaggaaaattttgaaatcgcctcgcgcacaggacatttaacggaagaggaactgcgtcaagtaaaatccatgatggaagaaaacaaaaacctagccaaactttactgcacaggctgtaattactgcaaaccatgtccgcagggaatagacattccctacctttttgaaataatgaaccgctaccgcgtctacgatttaaaagaacacgcaaaaagcgcatacaaggaaatgatgaacggcttaagctggataaaaagcgcggacgcgtcaaagtgcgttgcctgcggcgcgtgcgaggaaaaatgcccgcaaaagctgccgattatcaaacagctgcaagagacgcataagacattggcaaactag

SEQ ID NO: 64416 - protein, 376 aa, Unknown
  Obtained from environmental sample
  DOMAIN (340)...(363): 4Fe-4S binding domain
  misc_feature (1)..(376): Xaa is any amino acid
MIYKPFGKTGIKVSALGFGAMRLPMKEVDGKKIVDEDLAVPLMQKAFDMGINYVDTAPLYCETLSEIAVGKALKGYRDKVYLSTKNPIEDADGDHWMERLEKSLKKLDTDCIDFYHFWGISLKSFESWQGLKFGPIEAAYKAKEQGLIKHISFSYHDAAENYKKIVDSGHFETTLVQYNMLDRSNEENIAYAKSKGLGVVVMGPVGGGRLGAPSEKIQSLLKNKSTSTAEMALRFVLANENIDMALSGMGNLDMLKENFEIASRTGHLTEEELRQVKSMMEENKNLAKLYCTGCNYCKPCPQGIDIPYLFEIMNRYRVYDLKEHAKSAYKEMMNGLSWIKSADASKCVACGACEEKCPQKLPIIKQLQETHKTLAN

SEQ ID NO: 64417 - DNA, 864 bp, Unknown
  Obtained from environmental sample
  misc_feature (1)..(864): n is a, c, g, or t
gtggctgaatcagtcctaatagcgccgattttcgcgttacccggccctgattatgccgagatttgccgccgcactgcccgcgccgaagaagccaagtacgcggagaaagcaatcgctaaaatgattgaggctattgatcaacacggttgggacggagattggtttgttcgcgcctatgacgcttatggtaagaaaatcggcagtcatgaatgtgatgacggaaaaatatttatcgaatcaaacggttttgcagtaatggcggatatcggtattaaagacggacgtgcgcggaaggcgcttgattccgtaaaagagcatcttgaaacgccatacggtattgtgcttttgcagcctgcatacaaggactaccatcttgagttaggtgaagtttcttcgtatccgccagggtacaaagaaaacgccgggattttctgtcataataacccgtgggttacgatagcggaaacaaggcttgggagggggaatcgcgcgtttgaaacttacgcgaaaatatgccccgcttaccgcgaagacgacagcgatctgcgccgattggagccttatgtatatgcgcaaatggtggctggtaaggatgcagttcgtcatggagaggcgaaaaattcgtggcttacgggaaccgcggcgtggacgtttgtcagtatttcgcagtacattcttggagtgcgccccgtctttgacggccttatgatagacccgtgtattccttcaactatgaagggatttaccgttacccgtcatttccgaggcgcggattatcacatcacggtggacaacggcgcgggcgtggaaaagggaataaagtccataccgattgacggcaaaccatggaaaggcgaatgttaa

SEQ ID NO: 64418 - protein, 287 aa, Unknown
  Obtained from environmental sample
  misc_feature (1)..(287): Xaa is any amino acid
MAESVLIAPIFALPGPDYAEICRRTARAEEAKYAEKAIAKMIEAIDQHGWDGDWFVRAYDAYGKKIGSHECDDGKIFIESNGFAVMADIGIKDGRARKALDSVKEHLETPYGIVLLQPAYKDYHLELGEVSSYPPGYKENAGIFCHNNPWVTIAETRLGRGNRAFETYAKICPAYREDDSDLRRLEPYVYAQMVAGKDAVRHGEAKNSWLTGTAAWTFVSISQYILGVRPVFDGLMIDPCIPSTMKGFTVTRHFRGADYHITVDNGAGVEKGIKSIPIDGKPWKGEC

SEQ ID NO: 64419 - DNA, 1035 bp, Unknown
  Obtained from environmental sample
  misc_feature (1)..(1035): n is a, c, g, or t
atgctcgtttgcaatatcataaaaaaccttagcggttttgccctgaatgtaaatatagaagcaaaggctggcgtaaccgctcttatgggtgcatcgggtagcggcaagagcattacacttcgctgcatagctggcatttcaaaaccggacagcgggcacattgaactgaacggaagggtgctatttgattccgaaaaaaaaatcaacctaccgcctcaaaaacggagtactggttttctgtttcaagattacgccctgttcccgaatatgactgtgctgcaaaatataatgaccggaataaaaaacaaaaccgatcgcgaaaaacaagctactgaatttgcggaaacattccacatacacgcccatctaaacaaatacccacaccaactctccggcggcgaaaagcagcgttgtgccatagcccgtattctcgtaggttcgccggatattctaatgctagacgaaccttttgccgctttggacagccatttgcgttgggaattggaaacggagcttgccgctctgctaaagagtttcccaaatccggttttatatgtatcccacaacagagacgaagtatataggctcagcgacaatatagccgttatgaattgcggcaagaatgaaccaatttccgaaaagaaagccttgttcaaaaatcctgcaagtgttcaagctgcaaggcttacgggttgcaaaaatatcgccaaggcaactgccaaaggaacgcagatttccgtgccggactggggggtagaactagacataacacaaaacgatgtacaatatgtaggtattcgggcaaattacattgttcctgcttctgccgcaaacaaatccgatattgccgccgcatttccgtttgagatagtgaatgaaattgaagacactttcacaaatattcttatggtgcgaaaacagggaacaaatctgccgcccattcgctgggaaatgcccaaaaaagaccgcgccgctctgcgaaatcttccgcaggagcttgcacttttgcgtgagcatattttgtttttgaggtaa

SEQ ID NO: 64420 - protein, 344 aa, Unknown
  Obtained from environmental sample
  DOMAIN (23)...(206): ABC transporter
  misc_feature (1)..(344): Xaa is any amino acid
MLVCNIIKNLSGFALNVNIEAKAGVTALMGASGSGKSITLRCIAGISKPDSGHIELNGRVLFDSEKKINLPPQKRSTGFLFQDYALFPNMTVLQNIMTGIKNKTDREKQATEFAETFHIHAHLNKYPHQLSGGEKQRCAIARILVGSPDILMLDEPFAALDSHLRWELETELAALLKSFPNPVLYVSHNRDEVYRLSDNIAVMNCGKNEPISEKKALFKNPASVQAARLTGCKNIAKATAKGTQISVPDWGVELDITQNDVQYVGIRANYIVPASAANKSDIAAAFPFEIVNEIEDTFTNILMVRKQGTNLPPIRWEMPKKDRAALRNLPQELALLREHILFLR

SEQ ID NO: 64421 - DNA, 2211 bp, Unknown
  Obtained from environmental sample
  misc_feature (1)..(2211): n is a, c, g, or t
gtggtttggcaggttcagtcaattgacgattatcttaaagtcttgcgtccgtatattcaacaggcaaaaaaagacgagcgcaggcttgtctacttccggttcggcaatcacgcgccgttaatgacggacaacgagccttccgttacatacaattttgacacttccgaaggctttgagttattcgcgcttaaagtccacgacattatcgccaaagaaggtttaaaggctttttatgtgtttgactgcctcagcgacctgcttgaaagctggtgttccgacatgatggtaggcaatttttttcgcataacgtgtccctttctttttatacttgacactatcgcctacttcgcccttatccgcggagcgcacacccacgacacaatcgcgcgcatacgcgaaactacccagcttttacttgacgtgtacaatgtagacgataaattttatatccacccgctcaaagtatgggaacgttattcgccgacaatgttttttccgcacttaatcgacggcgataaagctatttcaatcacctcaagcgcggatgccgcgacattgttttcgcgcgtcacacgcggaggaaaccccagcgatcactggcatatcacttttgatcacgcgcgctccttccttacccgcgatgaanagtctcaggaagatatgaaaaaactccttgccggctggattatcggcaaggaattgcgcataacgagtttagttatgaagtattttacgcttagggacattcttgacattgcggagcgtgagataggaaccggatttatcggcggaaaaagcgtaggtatgcttcttgcgcgtaaaattcttgaaaaagacgccggagacattatacgaaaccactgggagccgcatgactcctattatcttggctctgatattttctacacgttcatcgtacacaacggattgtgggatttacgaatcaagcaaaaaacaacggaaggatattttacagtcgccaaagaattgcaggaaaaaatgcttcagggcaaattcccggataacataagggaacaatttatacaaatgctggaacattacggacaagcgccgattatcgtgcgttcaagttctttgcgcgaagataacttcggcaacgcgttcgcgggaaaatacgagagcgtcttctgcgcaaatcaggggacgccggacgagcgttacgcggcgtttgagcaggcggtacgcacagtctacgccagtaccatgaacgacgacgcgctggcgtaccgccaaagacgcggacttaccaatcaggacgaacaaatggcgattcttgtacagcgcgtatcgggcaaccactacgacgaattatttttcccgcacattgcgggcgtcggcaactccaccaatttgtatgtgtgggacaagtccatgaatccggaagccggtatgttaagacttgtattcggtcttggaacccgcgccgtggatcgcgtttccggcgattacgctaaaattgttccgctggattgcccgaacaagggaccgcccgtaagctacggcgatgaaaaaaagttttcccagcataaagccgatgtgcttgatttagccaacaataaattgacagacgcgcctcttgagaaacttgcggacggagatttaaaaaccgacaaagaaatattttttacgacagataccgaggcgataaaccgaatgcgcgaactaagaataaattccgcgtcaactccgcgaatccctgattttagaaaactgttaaacgaaacaggttttaccgaatttgtccgctccgcgcttttaacattacgcacggcttacaactaccctgtcgatattgaatttaccgccaactttacgcctgagggagaattcaggtttaatcttttgcagtgccgcccgttacagacaaagggaatcggaagagtcatggaagcccctcagccaagacaggagcatattttcttttcgtctacgggcgactttatgggcggcaatgtaaggctgtattttgattatgttgtttttgtaaaagccacagaataccttgatttaccggatcaggacaagtatcaggcggcgcggacagtcggttttatcaatcaggcattaaaagacaaaacggttttattgatgggaccgggtcgctggggaactacaacgccgtcgctgggcgtgcccgtccacttcagcgagttatgcaacatggcggcactgtgcgaagtatcgtactga

SEQ ID NO: 64422 - protein, 736 aa, Unknown
  Obtained from environmental sample
  misc_feature (1)..(736): Xaa is any amino acid
MVWQVQSIDDYLKVLRPYIQQAKKDERRLVYFRFGNHAPLMTDNEPSVTYNFDTSEGFELFALKVHDIIAKEGLKAFYVFDCLSDLLESWCSDMMVGNFFRITCPFLFILDTIAYFALIRGAHTHDTIARIRETTQLLLDVYNVDDKFYIHPLKVWERYSPTMFFPHLIDGDKAISITSSADAATLFSRVTRGGNPSDHWHITFDHARSFLTRDEXSQEDMKKLLAGWIIGKELRITSLVMKYFTLRDILDIAEREIGTGFIGGKSVGMLLARKILEKDAGDIIRNHWEPHDSYYLGSDIFYTFIVHNGLWDLRIKQKTTEGYFTVAKELQEKMLQGKFPDNIREQFIQMLEHYGQAPIIVRSSSLREDNFGNAFAGKYESVFCANQGTPDERYAAFEQAVRTVYASTMNDDALAYRQRRGLTNQDEQMAILVQRVSGNHYDELFFPHIAGVGNSTNLYVWDKSMNPEAGMLRLVFGLGTRAVDRVSGDYAKIVPLDCPNKGPPVSYGDEKKFSQHKADVLDLANNKLTDAPLEKLADGDLKTDKEIFFTTDTEAINRMRELRINSASTPRIPDFRKLLNETGFTEFVRSALLTLRTAYNYPVDIEFTANFTPEGEFRFNLLQCRPLQTKGIGRVMEAPQPRQEHIFFSSTGDFMGGNVRLYFDYVVFVKATEYLDLPDQDKYQAARTVGFINQALKDKTVLLMGPGRWGTTTPSLGVPVHFSELCNMAALCEVSY

SEQ ID NO: 64423 - DNA, 1104 bp, Unknown
  Obtained from environmental sample
  misc_feature (1)..(1104): n is a, c, g, or t
ttgatggcgaggtttgcagtttcccatgaacagttcaggatcgccttgtgtggatcggggggcaaggctatagccgagctgatccacgcgccttatatacaggaagttgtcgcgaattcaatcgcggtgcgtaacttttatccccaggcaagggtcgcggttgagttgggcggacaggacgcgaagatcgtcttcttctaccatgacagcgtcactaaccagctcgcggtaggcgatatgcgcatgaacggaagctgcgccggaggcaccggcgcgtttattgacgaaatagccgcgcttctccgtacccctgttgagaaatttgactcccttgccgccaacggcacgcaggtttatgacatctcgggacgctgtggtgtttttgccaaaactgatattcagccgcttttgaatcagggggcgattatcgaggatattgccctttccacatttcacgccatagcgaaacaaactataggcggactggcgcaggggctggagatacggccgcctgttgtttttgagggcgggcccatgacttttaatcctaccctgatccgcgttttcgcgcagcggcttggcctgaaagataccgatattatcgtaccccagaaagcggaactgtttatcgcctacggcacggcgcttgccataaacgaaaattttctggagcaggatggcgggcatgatcgtaatttcagtcccgaagcggcgcttacatcgcttgcgatgtacagggaaattgttcttggcaattccacattgcagaatattaattacttctcaaaccagacggagaaagaaaatttttatgcccgccacaaaatgcaggttataaatcatgaaatttccgcccaacgaggcgataccctgaaagtgtatcttggcattgacgccggatcgacaactaccaagtttgttttgattgatgaagatgaaaatgttattgacagtttttacaacccgaacaagggcgagccgctgaaggtaatcaaacaggccctgctggatatgtacgacaaatatcaggcggcaggcgttaagctggaaatcatcgccctgggaccacgggttacggggagcttttgtttgataaagcgttag

SEQ ID NO: 64424 - protein, 367 aa, Unknown
  Obtained from environmental sample
  DOMAIN (2)...(190): BadF/BadG/BcrA/BcrD ATPase family
  misc_feature (1)..(367): Xaa is any amino acid
MMARFAVSHEQFRIALCGSGGKAIAELIHAPYIQEVVANSIAVRNFYPQARVAVELGGQDAKIVFFYHDSVTNQLAVGDMRMNGSCAGGTGAFIDEIAALLRTPVEKFDSLAANGTQVYDISGRCGVFAKTDIQPLLNQGAIIEDIALSTFHAIAKQTIGGLAQGLEIRPPVVFEGGPMTFNPTLIRVFAQRLGLKDTDIIVPQKAELFIAYGTALAINENFLEQDGGHDRNFSPEAALTSLAMYREIVLGNSTLQNINYFSNQTEKENFYARHKMQVINHEISAQRGDTLKVYLGIDAGSTTTKFVLIDEDENVIDSFYNPNKGEPLKVIKQALLDMYDKYQAAGVKLEIIALGPRVTGSFCLIKR

SEQ ID NO: 64425 - DNA, 2352 bp, Unknown
  Obtained from environmental sample
  misc_feature (1)..(2352): n is a, c, g, or t
ttgtttgataaagcgttaggcgccgattatcataccgtggaaaccgtagcccacgccgcggcggcccagaaatacattcccgacgtgagcttcatacttgacatcggcggccaggacatgaaggctatcggcatttccaacggcattgtaacgaatataaccgtaaacgaagcctgttcctccggctgcggctccttcctggaaacatttgcggaaacgctgcatattcccgttaataaaatcgctgaaacggcgttcagcgcgagaagcccggcgaagcttggcagccgctgtactgtttttatgaacagcacgattatcacggagcaaaagaacgggaagcaggcggacgacattatggccggcctttgccgcgcgattgtggaaaatgtttttacaaaggtcgtgcgcatagccaatccggcgcgtcttggaaataaaatagtcgttcagggagggacgctcaggaacgacgcggtgctccgggcctttgaacaatacctgggaaaatttgtagtccgctcccccttccccggagagatgggggccatcggcatagcccttcttacaaagcgggaaatttccgaaaacggatactcttcgccacacggccccggcgaccgtacccgctttataggttttgaagagttaaaaacatttgattataaacaggaagcaaatttactctgccccttctgcgccaataattgcaaccgtaccctgctgcgtttttcaaacggccagacatgggttatcggcaaccgctgcgagcgcggagaggtggtaggcgatccgaatgatccggcagtccgcgaacagataaaaaatattacagggcttatgaacgccgcccctgacatgattaaagtcaggaacgagctgctttttaaggattacgggtatacgcagcttcttccctccaaagacattacaatcgggcttccgagagtgctggacttctggagaagcatgcctttctggaaagtgttctggtccgcgcttggttataaaataaaagtttcgaggaagagttccagacagttatacgaaaaaggcttgcagtatatcgcttccgatacggtctgctttccggcgaaactggttcacgggcatatacaggatctgattgaaagcaaggttgacaggattttctttccgcagattaacaggctgaaggcggataaccctgaaaaaaccggcacttttacatgccccgtattgaaagggtatcctctttcgatacggtgttcggacaatcctgaagaaaaacacggtatcccgcttgattcgcccgtatgccactggttttcagacagggatatgcggttccaactgagccgatatatgcaggagactttcaatatacccaaaaaggtcacccttgccgcgattaggcaaggggaaaaggccatggatgaattttacggcgctatggtggaaaaaggaaagaaagtccttgaggatgttgagagggagaaaaaaatcgccgtggttatcgccggacgctattatcagtatgacgaacagataaatcataacctgtcccattattttacaagcattggcatacccgttcttacgctggattcgcttcccaatcttggaaagattccgcttgccaaatcgcggattgaaattacgaatgacaaccacgcgaggcttcttgccggagctatcgccgccgcgcagcatccttcgctggaatatgtagatatctacagtttcggctgcgggcatgacgccgtttattccgatgaaataatccgcatcatggacgaaatttccggcaaggcccccctgatattaaagcttgatgaaagcgatattgccggaccgctgcggatcagggttcgctcgttcatcgagactgtaatgatacgccgcaaaagaaaaacgcataacgcaaagccgctgggggatccctacgcggtcaaatatacaaaaaaagagccaaagaaggttttgcttgttcccaacgtaagccgggcgttctgcatggttatgagcggcgcccttgccaatgaaggcgtgcttgtggatcaactgccgatgggcggtcttgaagctatcgcgatgggaaaaaaatacgtgcataacgatatgtgcctgcccgtgcagattgtagtgggagaggctcttctcgcattaaaaagcggaaaatacgatccggacaagactctggtcggcatggcgaaggtgttatgcgattgccgcctttccaactatatgcccctcgccagaaaggccctgacgaggcgggttatcctcaggttccgattattaccaccgatgtgtcggattccaaaaatgccccatccgggactggcgctttacaaatataacctacactaa

SEQ ID NO: 64426 - protein, 783 aa, Unknown
  Obtained from environmental sample
  DOMAIN (2)...(190): BadF/BadG/BcrA/BcrD ATPase family
  misc_feature (1)..(783): Xaa is any amino acid
MFDKALGADYHTVETVAHAAAAQKYIPDVSFILDIGGQDMKAIGISNGIVTNITVNEACSSGCGSFLETFAETLHIPVNKIAETAFSARSPAKLGSRCTVFMNSTIITEQKNGKQADDIMAGLCRAIVENVFTKVVRIANPARLGNKIVVQGGTLRNDAVLRAFEQYLGKFVVRSPFPGEMGAIGIALLTKREISENGYSSPHGPGDRTRFIGFEELKTFDYKQEANLLCPFCANNCNRTLLRFSNGQTWVIGNRCERGEVVGDPNDPAVREQIKNITGLMNAAPDMIKVRNELLFKDYGYTQLLPSKDITIGLPRVLDFWRSMPFWKVFWSALGYKIKVSRKSSRQLYEKGLQYIASDTVCFPAKLVHGHIQDLIESKVDRIFFPQINRLKADNPEKTGTFTCPVLKGYPLSIRCSDNPEEKHGIPLDSPVCHWFSDRDMRFQLSRYMQETFNIPKKVTLAAIRQGEKAMDEFYGAMVEKGKKVLEDVEREKKIAVVIAGRYYQYDEQINHNLSHYFTSIGIPVLTLDSLPNLGKIPLAKSRIEITNDNHARLLAGAIAAAQHPSLEYVDIYSFGCGHDAVYSDEIIRIMDEISGKAPLILKLDESDIAGPLRIRVRSFIETVMIRRKRKTHNAKPLGDPYAVKYTKKEPKKVLLVPNVSRAFCMVMSGALANEGVLVDQLPMGGLEAIAMGKKYVHNDMCLPVQIVVGEALLALKSGKYDPDKTLVGMAKVLCDCRLSNYMPLARKALTRRVILRFRLLPPMCRIPKMPHPGLALYKYNLH

SEQ ID NO: 64427 - DNA, 498 bp, Unknown
  Obtained from environmental sample
  misc_feature (1)..(498): n is a, c, g, or t
atggaagtgattatgcccagaatgaacaccgtctaccgtcatctgtttttacagcatacccttgccgagatggatgaattcaaagtgcgtcattctttgtatgacagtttatacgcccgggccggcaataaatttatggacatagccgagaattacgttaataaaatcgcctcgaagcatcctctgtacgagtctgagatttcgcttaaagaggcgtcaaaatacagcgatgatataatacatcattcgatattatcaggtgaatccttccttatcgccgctcatactttgcataacgccgagaaagggatccgttcgtttattatactccagcctttcggctgcctgccgaatcatatttgcgggcggggggtgataaaaagaatcaaggaaacgcaccctgatattcaaattctgccgcttgattacgagcccgacgtaagttttgctaatattgaaaacagaatacagatgctgttgatgaatgtgaaaaactga

SEQ ID NO: 64428 - protein, 165 aa, Unknown
  Obtained from environmental sample
  misc_feature (1)..(165): Xaa is any amino acid
MEVIMPRMNTVYRHLFLQHTLAEMDEFKVRHSLYDSLYARAGNKFMDIAENYVNKIASKHPLYESEISLKEASKYSDDIIHHSILSGESFLIAAHTLHNAEKGIRSFIILQPFGCLPNHICGRGVIKRIKETHPDIQILPLDYEPDVSFANIENRIQMLLMNVKN

SEQ ID NO: 64429 - DNA, 399 bp, Unknown
  Obtained from environmental sample
  misc_feature (1)..(399): n is a, c, g, or t
atgaaccggtttcccatcggctacggctttcgccctcgccttaggggccgacttaccctgggaagattgcctttacccaggaaaccttgggcttccggcggagggggatcccacccctcttttcgtctacttatacctgcattctctcttccgccccctccagcatacctcccggtacgccttcgtcggtccgcggaatgctcccctaccaaccgcgcattgctgcgcgattccgtggcttcggttgcatgcttagccccgttacattgtctgcgcgccgtgactcgaccagtgagctgttacgcactctttcaaggaatggctgcttctaagccaacctcctggctgtcctcgccagggcacatcatttcacactcagcatgctatccgggaccttag

SEQ ID NO: 64430 - protein, 132 aa, Unknown
  Obtained from environmental sample
  misc_feature (1)..(132): Xaa is any amino acid
MNRFPIGYGFRPRLRGRLTLGRLPLPRKPWASGGGGSHPSFRLLIPAFSLPPPPAYLPVRLRRSAECSPTNRALLRDSVASVACLAPLHCLRAVTRPVSCYALFQGMAASKPTSWLSSPGHIISHSACYPGP

SEQ ID NO: 64431 - DNA, 357 bp, Unknown
  Obtained from environmental sample
  misc_feature (1)..(357): n is a, c, g, or t
gtgtcgccgccggtaaccttattgctaaaaccaccaacggccgcacttctcccgaagttacgtgcgcattttgccgagttccttaacgcgagttctctcgtgcgccttagatttctcatcccgcccgcctgtgtcggtttgcggtacggtcttcctgaccttaaccagtggggattatttctcggcgccttgactacgcccgcttcgccttcccgtaggtcggctcgctgtcaccgctcgcctgaaggcgttttccccgcctccaatagctcgcggcttcgaccggggcaaccgtcgcccggccgggtttcgcctcacgcgtcatcccttgaaatcaggaacggtaccggaatatga

SEQ ID NO: 64432 - protein, 118 aa, Unknown
  Obtained from environmental sample
  misc_feature (1)..(118): Xaa is any amino acid
MSPPVTLLLKPPTAALLPKLRAHFAEFLNASSLVRLRFLIPPACVGLRYGLPDLNQWGLFLGALTTPASPSRRSARCHRSPEGVFPASNSSRLRPGQPSPGRVSPHASSLEIRNGTGI

SEQ ID NO: 64433 - DNA, 321 bp, Unknown
  Obtained from environmental sample
  misc_feature (1)..(321): n is a, c, g, or t
gtgacggcgcttccactcgctgccgccagatcactaagacccgctttcgcgcctgcccggcctgtcggcctcgcagtcaggcccccttgtgcctttacactcatacgccgatttccaaccggcgcgaggggaccgtcgcgcgcctccgttactgtttgggaggcgaccgccccagtcaaactgcccgcctaccgctgtccccgctccggtttcacggcgcgggttagaagcctagccaggaaagggtggtatttcaccgtcggctccgcgcaggctgacgcccacgcctcaatgcctcccacctatcctacacatgcctag

SEQ ID NO: 64434 - protein, 106 aa, Unknown
  Obtained from environmental sample
  misc_feature (1)..(106): Xaa is any amino acid
MTALPLAAARSLRPAFAPARPVGLAVRPPCAFTLIRRFPTGARGPSRASVTVWEATAPVKLPAYRCPRSGFTARVRSLARKGWYFTVGSAQADAHASMPPTYPTHA

SEQ ID NO: 64435 - DNA, 303 bp, Unknown
  Obtained from environmental sample
  misc_feature (1)..(303): n is a, c, g, or t
gtgccaaaccttcccgtcgatgtggactcttggggaagatcagcctgttatccccggagtaccttttatccgttaagtgacggcgcttccactcgctgccgccagatcactaagacccgctttcgcgcctgcccggcctgtcggcctcgcagtcaggcccccttgtgcctttacactcatacgccgatttccaaccggcgcgaggggaccgtcgcgcgcctccgttactgtttgggaggcgaccgccccagtcaaactgcccgcctaccgctgtccccgctccggtttcacggcgcgggttag

SEQ ID NO: 64436 - protein, 100 aa, Unknown
  Obtained from environmental sample
  misc_feature (1)..(100): Xaa is any amino acid
MPNLPVDVDSWGRSACYPRSTFYPLSDGASTRCRQITKTRFRACPACRPRSQAPLCLYTHTPISNRREGTVARLRYCLGGDRPSQTARLPLSPLRFHGAG

SEQ ID NO: 64437 - DNA, 369 bp, Unknown; identical to SEQ ID NO: 53641
  Obtained from environmental sample
  misc_feature (1)..(369): n is a, c, g, or t

SEQ ID NO: 64438 - protein, 122 aa, Unknown; identical to SEQ ID NO: 53642
  Obtained from environmental sample
  misc_feature (1)..(122): Xaa is any amino acid

SEQ ID NO: 64439 - DNA, 993 bp, Unknown
  Obtained from environmental sample
  misc_feature (1)..(993): n is a, c, g, or t
atgaaaaaccaaaaaaccataccaaaaacagccctgtcccgaatctactttattgacagggaaatcgccgccggaaactatcccaataccagacagcttgccgaagcctacgaaaccggaaccgccactatcagccgggacatcgaattcatgcgggacagtatgaacgcacccatcgaatacgactatacgcgcaagggctactactacaccgaaaaaactttccggcttcccgccgccttcgcctccgccaatgatatgctggctctgggcatggcgaaaaccctcctttcactttaccaaaacacccctatatatgacgcggcaaaagggcttatggaaagcgttaccgcacctcttgaaaacgacggaaactcgcggtggtacgaagaacgcgttatcgtgccgcctgttccggctgtgcaattttccccggaaatatggaacattgtctgtgaagctctgcggaaaaaccgcgtcctcaagtttgaataccgcagtacatggaaaagcggcttctctccccgccgtgtccgtccctatcagcttctttttgacaacggcgcgtggtatctctacgcgtattccatacatggcaagggcatgagaatgtactcccttccccgaatacggaatatcaatcttgaggatgagacctttactttaccggccgcctccgattatcgcgcccatgtagacggcagcttcctaggcgcgtattcaaccgaaaagaaacgccgcttccgtatcgcttttttcaacgacggagcgatgaggattaaagaacgcctgtgggcggcggatcagaagataaaagaaacagccgacggcgtaatcatcagtttttcaagcgcccagtacggcaaggttctggaactggttcttgctaacggacgcgacgcgcttccgcttgaacctgcggaacttgtcaaggattggcgggataatattcgggatatgaaaaagacagcgttattaacaaaaaaaatatga

SEQ ID NO: 64440 - protein, 330 aa, Unknown
  Obtained from environmental sample
  misc_feature (1)..(330): Xaa is any amino acid
MKNQKTIPKTALSRIYFIDREIAAGNYPNTRQLAEAYETGTATISRDIEFMRDSMNAPIEYDYTRKGYYYTEKTFRLPAAFASANDMLALGMAKTLLSLYQNTPIYDAAKGLMESVTAPLENDGNSRWYEERVIVPPVPAVQFSPEIWNIVCEALRKNRVLKFEYRSTWKSGFSPRRVRPYQLLFDNGAWYLYAYSIHGKGMRMYSLPRIRNINLEDETFTLPAASDYRAHVDGSFLGAYSTEKKRRFRIAFFNDGAMRIKERLWAADQKIKETADGVIISFSSAQYGKVLELVLANGRDALPLEPAELVKDWRDNIRDMKKTALLTKKI

SEQ ID NO: 64441 - DNA, 1011 bp, Unknown
  Obtained from environmental sample
  misc_feature (1)..(1011): n is a, c, g, or t
ttgagccagatagagaagcagcacggcaagggctcgattatgcggctcggcaccgcttcgcagcagggggatatccaggcgattccgaccggctccatttctttagacacggcgctgggcgtgggcggtttccctaaggggcgcatagtcgagatatacggaccggagtcctccggcaagaccaccgtggcgctccacgcgatagccaatatccagaaacagggcggggtggccgtgctcatagacgccgagtacgctttcgacgccgcgtatgccaagggtttgggcgtggacgtcgacaacctccttgtctcgcagccggataccggcgagcaggcgcttgagatcgccgacacgctggtgcgcagcggggctattgatttaatagttatagacagcgtggccgccctcgtgcccgccgccgagatagaaggcgacatgggcgacaaccacgtgggtttgcaggcccgcctcatgtcgcaggctctgcgcaaactgaccggcatactctcgaagtccaagacctgcctcatcttcatcaaccagctgcgtatgaagataggcgtcatgttcggcaatccggagacgaccaccggcggcaacgccctcaaattctacgcctcggtgcgggtcgacatccgccgcatcgcggctatcaaagacggcgaagaggtgataggcaaccgcacccgagccaaggtggtgaagaacaaggtcgccccgccgttcagggaggccgagttcgacatcttgtacggaagaggcatttcgttcgaaggagacgtgttggatttggccgtggagatgaagattgtggacaagagcggtgcgtggttcaactatgagggcgagcggctcggtcagggcagggagaaggcgagggactatttgaaagagaaccgggaggtgttggcgaagatagaggcgcaggtcagggcgcaggcggcgacaaagcgcgcaggcgctcagcaggagtccggggttgacgagggggcggaagagggagaatga

SEQ ID NO: 64442 - protein, 336 aa, Unknown
  Obtained from environmental sample
  DOMAIN (1)...(317): recA bacterial DNA recombination protein
  misc_feature (1)..(336): Xaa is any amino acid
MSQIEKQHGKGSIMRLGTASQQGDIQAIPTGSISLDTALGVGGFPKGRIVEIYGPESSGKTTVALHAIANIQKQGGVAVLIDAEYAFDAAYAKGLGVDVDNLLVSQPDTGEQALEIADTLVRSGAIDLIVIDSVAALVPAAEIEGDMGDNHVGLQARLMSQALRKLTGILSKSKTCLIFINQLRMKIGVMFGNPETTTGGNALKFYASVRVDIRRIAAIKDGEEVIGNRTRAKVVKNKVAPPFREAEFDILYGRGISFEGDVLDLAVEMKIVDKSGAWFNYEGERLGQGREKARDYLKENREVLAKIEAQVRAQAATKRAGAQQESGVDEGAEEGE

SEQ ID NO: 64443 - DNA, 570 bp, Unknown
  Obtained from environmental sample
  misc_feature (1)..(570): n is a, c, g, or t
gtgtatctccgaacacggcccgcacggcccggtctcgcccatctcccagaagttgctcttgtcgccgaagcgcattatccgctcgtgcgggatatcggtctcccgcttccaaatctcctccgcctcgtcgtcgctgtcgtggatggtggcgaagagacgggatttttcgagcccccaaacttcggtcaagagttcccaagcccaccggatcgcctctttcttgtagtaatcgccgaacgaccagttcccgagcatctcgaagaaggtatggtggtaatggtcgcgccccacctcctcaaggtcgttgtgcttcccggagacgcgcatacacttctgcgagttggcggcgcggcgcagtcccttggggttgtcgccgagaaatatagacttgaactgattcatacccgcgttggtaaagagcagcgtcgggtcgtcctgcgggacgacaggagcgctcgggacgaacgtgtgaccgcgatcggagaagaattttatgtattcgtcacggatagtattcgctgttttcattctccctcttccgccccctcgtcaaccccggactcctgctga

SEQ ID NO: 64444 - protein, 189 aa, Unknown
  Obtained from environmental sample
  misc_feature (1)..(189): Xaa is any amino acid
MYLRTRPARPGLAHLPEVALVAEAHYPLVRDIGLPLPNLLRLVVAVVDGGEETGFFEPPNFGQEFPSPPDRLFLVVIAERPVPEHLEEGMVVMVAPHLLKVVVLPGDAHTLLRVGGAAQSLGVVAEKYRLELIHTRVGKEQRRVVLRDDRSARDERVTAIGEEFYVFVTDSIRCFHSPSSAPSSTPDSC

SEQ ID NO: 64445 - DNA, 2460 bp, Unknown
  Obtained from environmental sample
  misc_feature (1)..(2460): n is a, c, g, or t
atgaaaacagcgaatactatccgtgacgaatacataaaattcttctccgatcgcggtcacacgttcgtcccgagcgctcctgtcgtcccgcaggacgacccgacgctgctctttaccaacgcgggtatgaatcagttcaagtctatatttctcggcgacaaccccaagggactgcgccgcgccgccaactcgcagaagtgtatgcgcgtctccgggaagcacaacgaccttgaggaggtggggcgcgaccattaccaccataccttcttcgagatgctcgggaactggtcgttcggcgattactacaagaaagaggcgatccggtgggcttgggaactcttgaccgaagtttgggggctcgaaaaatcccgtctcttcgccaccatccacgacagcgacgacgaggcggaggagatttggaagcgggagaccgatatcccgcacgagcggataatgcgcttcggcgacaagagcaacttctgggagatgggcgagaccgggccgtgcgggccgtgttcggagatacactacgatataggcggcgaggcgacgcgggcggccacctatagcgaccccgcgcagggcgtaaacggcgaaaacgcgcgttaccgcgagttatggaaccttgtgttcatccagtataaccgcgaaaaggacaagtcgctcagccccctcaaagcactgcacgtcgataccggaatgggcttcgagcgcatcgtctcggttatacagggggtcgattcaaattacgataccgatatattccagcccatcatcaaggcgttggcggataagacggggattgcatacgaccgcggcgaggcgggtacgccgtttcgcgtgatagccgaccatatccgctcgctcgtcttcgcggtgacggacggcgcgttcccgtccaacgaggggcgcggttacgtcttgcggcggctactgcggcgtgcttaccgctttgggcgcgagattgggttcaaggagccgtttttgtacaagctgacgcccgttgtgattgagcagatgggcggcgcctttccggagatcggccagcggcgcgcttatattgaagaggtgataaagtctgaggaggagcgcttcggcgccacgcttgagcagggcatagaaaagttcggcgcgatggtcgccggcacgcagagcggcggcggcaagacgcttgccggggcggacgtcttcgcgttgtacgatacctacggcttcccgatggacctgacccgcctcatggccgcggagaaggggctgagcgttgacgaggccggttacgataagttgatggagcggcagagggagcgcgccagagaggcccgcaaaggcgagagctcagacgggcttacgccggaggggtggactgaacttaggccgctttccggcactgaattcttggggtatgacaacgacagcgcggaggtaaacgtatgccgttacaagaagattgaagatgtcgacggtaacgcgtacctgctcatactcgacaagacgcccttctacgccgagtccggcggtcagacgggcgacaaggggacgatagccacatcgtgcggcgtcaatatcacggtgaaagacactgtcaagtggaatgactcggtaatccatcgcgtggaggtcaacggcgtgctgaccgacaaggatctgcgggcgcctatggccgcgacgatagacgcgaaattgcgtatggcgacccgcagaaaccacacggcgacgcacctcctgcaagccgcgctgcgaaaagtgctgggcgaccacgtccaacaatccggttcgcgcgtcgatccgttcggcctgcgcttcgacttcacccacttcaaagggcttgacggcgacgaaatagctaaagtcgagacgattgtcaaccaatggataatggataactaccgcgtggagactgtcgtaaaagacaccgccgcggccaaagccgagggggcgacggcgctcttcggcgagaaatacggcgacaaggtgagagtggtggggatagaccccgtctccaaagaactctgcggcggcacccacgtagccgcgaccgggcagataggcctcttccacatagtaggcgaggagagcgtctccgccggcgtccgccgcataaacgcggttacgggaacgacggcggtgcagtatgttatcaatatggaaaagacgtcgtccgagttggcgcttacgctgaaggtcagccaagataaactgcgggaacgcgtcttcgggttgatcgataccgcgaaagaactggagaacaaagtaaagacgctctcatcagccaaagccgccgatacggtcggatctatttttgacgaggcggcaaaatgcgcgtccaaacttaaattcgcagtcagcgacatgggagaacttgacaaagactccttcacccgcatagccgacgcgatctccgacagaatccgcgcagagaatttgtcaaccatcagtgatagcgataggcgcaataattga

SEQ ID NO: 64446 - protein, 819 aa, Unknown
  Obtained from environmental sample
  DOMAIN (658)...(701): Threonyl and Alanyl tRNA synthetase second additional domain
  misc_feature (1)..(819): Xaa is any amino acid
MKTANTIRDEYIKFFSDRGHTFVPSAPVVPQDDPTLLFTNAGMNQFKSIFLGDNPKGLRRAANSQKCMRVSGKHNDLEEVGRDHYHHTFFEMLGNWSFGDYYKKEAIRWAWELLTEVWGLEKSRLFATIHDSDDEAEEIWKRETDIPHERIMRFGDKSNFWEMGETGPCGPCSEIHYDIGGEATRAATYSDPAQGVNGENARYRELWNLVFIQYNREKDKSLSPLKALHVDTGMGFERIVSVIQGVDSNYDTDIFQPIIKALADKTGIAYDRGEAGTPFRVIADHIRSLVFAVTDGAFPSNEGRGYVLRRLLRRAYRFGREIGFKEPFLYKLTPVVIEQMGGAFPEIGQRRAYIEEVIKSEEERFGATLEQGIEKFGAMVAGTQSGGGKTLAGADVFALYDTYGFPMDLTRLMAAEKGLSVDEAGYDKLMERQRERAREARKGESSDGLTPEGWTELRPLSGTEFLGYDNDSAEVNVCRYKKIEDVDGNAYLLILDKTPFYAESGGQTGDKGTIATSCGVNITVKDTVKWNDSVIHRVEVNGVLTDKDLRAPMAATIDAKLRMATRRNHTATHLLQAALRKVLGDHVQQSGSRVDPFGLRFDFTHFKGLDGDEIAKVETIVNQWIMDNYRVETVVKDTAAAKAEGATALFGEKYGDKVRVVGIDPVSKELCGGTHVAATGQIGLFHIVGEESVSAGVRRINAVTGTTAVQYVINMEKTSSELALTLKVSQDKLRERVFGLIDTAKELENKVKTLSSAKAADTVGSIFDEAAKCASKLKFAVSDMGELDKDSFTRIADAISDRIRAENLSTISDSDRRNN

SEQ ID NO: 64447 - DNA, 2073 bp, Unknown
  Obtained from environmental sample
  misc_feature (1)..(2073): n is a, c, g, or t
atgactacttctcccctcaaaatcacattggcacttgccgtggcaatcataacttcctgttcttcaagcgatgaagacgaaagcaaactcaacgcagtgcaaaaagaaagagtaactggaatctcacagaaggggacttttgccagaggttccaaagttactatccatggactgaattcaaaatgggaaaaaacaaaaaaatcctccgaaggagaaaccgatgacaacggatattttgatataaaaataaaaaatggggaactggcttcgccatacattgttcttgaggtgaatggaaagtatttcaacgaggtgagcggcgaaataacaactacccccataactctgaatgccattgcggacgtgtccaacaaaagcaaagtcaacgtgaatattttgacgcatttggaatttgagagggttctggagcttgtcaagagcggcaagagttttttcacggcaaagaggcaagcccagagagaggttctggaagcgcttggcatagacatgggcgagcgtgggattatgaatagcgaaaacctggatatttttggcagtggcacaggcgatgccatgctgctggttgtttccattttgtttcaggggaacaggtctgtggaggagctttcaagtttgcttggcaaattcagcggggaaatcagggataaggggactagcgagaccatcattgacgaggtgaagaaggagcttgagaatgtggatatagacaaggtgagggattatgtatggaatcagaatcccgaagccaaggaacccgatttgtctccctatttgccacccaagccccccgaaattccgagcagttcgtccattgagccaagttcaaactcagcctctccctctccctcgctgccaggcggcaattcagggggagggggacagaggcgaagcagttcatccattgctgcgctgccaagctcaaactctgagcattcttcgtcaagcgaggataatagcagctcgtctcatacatcaagctcaagctctgaggaacattcatcgtctagcgaggagcatagcagttcgtcctttagaacattcacagatagccgagatagtaagtcttacaaatatgtgacgataggcgagcaagagtggatggctgaaaatctcaactatagtataggcggcgttggcaaatgctacgataatcagaaaagcaactgcacgacttacggcaggttgtataactgggaaacagctatgacggtatgtcccattggttggcatttgcctagagattggaaatggactgaattaatgaattttgctggtgctacggatgctggaaaaaaactgaaagctaccaatggctggggtgattcggacaatggcgaggacatctggggctttgcggctatgccgggcggtagaaccaataatgaaggtatctttgatagtaagggcggtagcggcttttggtggactgctacgaactctagtaatggtccctacatacggtttatgaactccaactacgatattgtcggcagagacttcgtctatgcgggtcgcttgtacagtgtccgttgcgtccaagacaaaacattcacagatacccgcgatggcaaaacttacaagtatgtaaaaataggtacacagacttggatggcggagaatctcaactacgatgcaacagatagtagatgctacaatgacaatcctaccaactgcacgacttacggcagattgtataatttggcaacggctaagacggcttgtcctgctggttggcatttgcctagcaatgacgaatggactacattaacgaattttattggtgctacgtatggtgttatatatgctggaaaatacctgaaagccaattctgatttgtggaatattaatacaggcacggacggttacggttttacggctctgcctggcggtggcttttattatggtacctggagagatgtcgaagaccgcggcttctggtggagctctaacgagagcggttacaacctgcgtatggacgacaaccaagatgatgcaatcttggaacccaccggtacgggtgacttgcttagtgttcgttgtgtgcagaactaa

SEQ ID NO: 64448 - protein, 690 aa, Unknown
  Obtained from environmental sample
  SIGNAL (1)...(23)
  misc_feature (1)..(690): Xaa is any amino acid
MTTSPLKITLALAVAIITSCSSSDEDESKLNAVQKERVTGISQKGTFARGSKVTIHGLNSKWEKTKKSSEGETDDNGYFDIKIKNGELASPYIVLEVNGKYFNEVSGEITTTPITLNAIADVSNKSKVNVNILTHLEFERVLELVKSGKSFFTAKRQAQREVLEALGIDMGERGIMNSENLDIFGSGTGDAMLLVVSILFQGNRSVEELSSLLGKFSGEIRDKGTSETIIDEVKKELENVDIDKVRDYVWNQNPEAKEPDLSPYLPPKPPEIPSSSSIEPSSNSASPSPSLPGGNSGGGGQRRSSSSIAALPSSNSEHSSSSEDNSSSSHTSSSSSEEHSSSSEEHSSSSFRTFTDSRDSKSYKYVTIGEQEWMAENLNYSIGGVGKCYDNQKSNCTTYGRLYNWETAMTVCPIGWHLPRDWKWTELMNFAGATDAGKKLKATNGWGDSDNGEDIWGFAAMPGGRTNNEGIFDSKGGSGFWWTATNSSNGPYIRFMNSNYDIVGRDFVYAGRLYSVRCVQDKTFTDTRDGKTYKYVKIGTQTWMAENLNYDATDSRCYNDNPTNCTTYGRLYNLATAKTACPAGWHLPSNDEWTTLTNFIGATYGVIYAGKYLKANSDLWNINTGTDGYGFTALPGGGFYYGTWRDVEDRGFWWSSNESGYNLRMDDNQDDAILEPTGTGDLLSVRCVQN

SEQ ID NO: 64449 - DNA, 948 bp, Unknown
  Obtained from environmental sample
  misc_feature (1)..(948): n is a, c, g, or t
atgatttttacaaatgtattaataaatcagttaaagggggataaatcccgcaaattaaacgcgagggaagagctttggcaagcccaggactcaagccttttttcccccggcggcgggtatataaggggcgatcttcgcaaagcggcgtacagttctcttttacgcgcggaaatgctgacccgtgaaaacggaaaatttattccgtcattaatacagtatgattttgattttgacggcgtaaaagaatttatttttcaggatgccatgattaactgttacattcagccgaagggagcctgtatttttgaacttgattatttacccaaggaatggaactatcttgactgcggttcaaacgattacggaaggcgagccgcttttgccgacgttctgctcccgtttgagacaaagaccgataaacctgaagatattattacggaaaattcaaggctttgttttattgagcaatatgaattgatagcgcaggataaaaaagggaaatcatgttttaggcttcccgccatgggcgatgatatgccgtttggggacatagaaataaataaatgtttttctattaaaaaagaggttcttacggtttcatataatttaaaaaataccggcaaagaaacgcgaaagtttaaatttagccccataatttatttttctttcgctaatgttacggatgagtatgtccgtttttacgccgttgacaataacgggaaggatatccatttacacggtaaatttgacgccggtaatttaaaaatccttgatgtaaaaaacgaagtgcagattttactcggttccataagaccgttttcaggatttcttactcctgttttaaacaacgatatttatcaggcgacaataatattgccggtgttttcaatttcccttaaaagtaatgaatcgtggatgaatgagtttagcttaaagttttcccattaa

SEQ ID NO: 64450 - protein, 315 aa, Unknown
  Obtained from environmental sample
  misc_feature (1)..(315): Xaa is any amino acid
MIFTNVLINQLKGDKSRKLNAREELWQAQDSSLFSPGGGYIRGDLRKAAYSSLLRAEMLTRENGKFIPSLIQYDFDFDGVKEFIFQDAMINCYIQPKGACIFELDYLPKEWNYLDCGSNDYGRRAAFADVLLPFETKTDKPEDIITENSRLCFIEQYELIAQDKKGKSCFRLPAMGDDMPFGDIEINKCFSIKKEVLTVSYNLKNTGKETRKFKFSPIIYFSFANVTDEYVRFYAVDNNGKDIHLHGKFDAGNLKILDVKNEVQILLGSIRPFSGFLTPVLNNDIYQATIILPVFSISLKSNESWMNEFSLKFSH

SEQ ID NO: 64451 - DNA, 1206 bp, Unknown
  Obtained from environmental sample
  misc_feature (1)..(1206): n is a, c, g, or t
ttgaacgtcccctttatgaacggcacagaagtttccaaagtgcaggattttctggaaagggaagtcccggaaacagatgccgcaaacataaaaataattgaatggcggccttcgatgaatctttacaaacaagcctatgtaaacttgctgtcttttaccgttgattttattaaacgcatggatgccgaaaaaagaacgacagccgctttcgggaaaaaatggattggtaattttttcagaaaccttaaatttttgcaaaaaattctcctttacaaatctatggatatgcccgtaatcattacaggctccggtccgaatctggaaaaatcgatacctgttattcaaaaagcacaggaagaatgtttaattattgccgcttcttcttctgtaatggcgctttcccattacaacattcaggcggatattgtaatgagtacggatggcggcagttgggcgctgcggcacatctatccttttttcagaaaatcatataacagcgtttttaacggcgttgataacggtgcgtcttttgccgtaaacctctgcgcggcgcttccctcccaatgcgcgggaaaccccatgttaataatgaacgacggaagtttctggcagaacattatactgcatgaactttctataccgtccgtaatcattgcgcagaaaggaactgttaccgcctgcgccgtagagctcgctcttacgcttacaagcggaaatatttaccttgcgggattggacctttgcgtcagggatatgagaagccatgtgcggccttatgcttttgatcatctgctttatgacaaagcaagccgacttacgccggtttattcgcaaagttttataaggtcaaaccaaattcaggaaggcggaagtcttgacatttacgcttcatggttcaagaaacagcttgcctcgtggccgaaacggatcttctctcttggcggcggaaatgaagtatttgaaaacgcgctttgcgaagaaaaggcaggtaagaaaaacacctgtgaatattttaaggcagaggacgtaaaagacaacaccgataattttcgcgaaagaagcgccgccgccctgattgccgctttgaataacggcgaatacgcggaaaatcttaaaaaagaactcggctccttgcttttcccgaatgaaaaagacgtgacagtaaatcaatttgaaaaagcaattaaagaggcggcttatgggtag

SEQ ID NO: 64452 - protein, 401 aa, Unknown
  Obtained from environmental sample
  DOMAIN (77)...(247): Protein of unknown function DUF115
  misc_feature (1)..(401): Xaa is any amino acid
MNVPFMNGTEVSKVQDFLEREVPETDAANIKIIEWRPSMNLYKQAYVNLLSFTVDFIKRMDAEKRTTAAFGKKWIGNFFRNLKFLQKILLYKSMDMPVIITGSGPNLEKSIPVIQKAQEECLIIAASSSVMALSHYNIQADIVMSTDGGSWALRHIYPFFRKSYNSVFNGVDNGASFAVNLCAALPSQCAGNPMLIMNDGSFWQNIILHELSIPSVIIAQKGTVTACAVELALTLTSGNIYLAGLDLCVRDMRSHVRPYAFDHLLYDKASRLTPVYSQSFIRSNQIQEGGSLDIYASWFKKQLASWPKRIFSLGGGNEVFENALCEEKAGKKNTCEYFKAEDVKDNTDNFRERSAAALIAALNNGEYAENLKKELGSLLFPNEKDVTVNQFEKAIKEAAYG

SEQ ID NO: 64453 - DNA, 1035 bp, Unknown
  Obtained from environmental sample
  misc_feature (1)..(1035): n is a, c, g, or t
ttggatgccgaatctacagtcacggatgaacagcctgacctttccgtaaacgcattggatgataatatcgaaataaacgttgacgcggaaaaagatcatgacgaacttgaagcgctgcgtgaaaatggcgttaccccggtaaccttccccccggaaaacagctcctatcttgaagaagacgatcacatcaatttagatctttccgaagcggtaattgacgagcctgaattatcaaccgaaggcattgatgaaccgcctataacggaaccttctttggacattgattctcttgatgatctcaatatttctgttgataactcagatttagcatctacagatttagcatctgcagacttgacgtctgaagatttagcatccgcggatgcgccatctgaagatatatcaatcgatgattcatctatcgatggttcatcatctatcgatgatgttgacattgatatcgccatgccattgggcgatgtaaaagatgacgagcaggacttgtcacttgacagcggatttcagagcggcggcgatatatctattgatgatcaaatgccggaaggttttgaagatgaacttcaggatgctcctgttccgcttgaagaagaagcggatatctcagacattaagtctacaaacattaagtctgcagacttaacatccgttgaagaagccgaacccgcggaaataaccgctcccgatgaatcagttgaagttattgataaagtagaagaaataggcgatatagacgacgttgacgaaattgttgatatagatgaaaagcccgcaaaagcggcaagcgcacctgcaagcgcgccatcaagcgtcccggcaagtatgccgtcaagcgcgcttgcgcaaaaggacggaaatttccagcttccttcggaattaaaaaaagaactcaagaatattctgggttacatggaccagcttcttgaatcattaccggaagaaaaaatcgaagaattcgcaaagtcggaatattttgattcctacaaaaaactcttcaaggaattggggctggtataa

SEQ ID NO: 64454 - protein, 344 aa, Unknown
  Obtained from environmental sample
  misc_feature (1)..(344): Xaa is any amino acid
MDAESTVTDEQPDLSVNALDDNIEINVDAEKDHDELEALRENGVTPVTFPPENSSYLEEDDHINLDLSEAVIDEPELSTEGIDEPPITEPSLDIDSLDDLNISVDNSDLASTDLASADLTSEDLASADAPSEDISIDDSSIDGSSSIDDVDIDIAMPLGDVKDDEQDLSLDSGFQSGGDISIDDQMPEGFEDELQDAPVPLEEEADISDIKSTNIKSADLTSVEEAEPAEITAPDESVEVIDKVEEIGDIDDVDEIVDIDEKPAKAASAPASAPSSVPASMPSSALAQKDGNFQLPSELKKELKNILGYMDQLLESLPEEKIEEFAKSEYFDSYKKLFKELGLV

SEQ ID NO: 64455 - DNA, 549 bp, Unknown
  Obtained from environmental sample
  misc_feature (1)..(549): n is a, c, g, or t
ttgggattgatcctgaaaggagacacatcgaagtgcgggggaacggttccgcccgcccctcaacctgcgccgcaacccgcaaaaccgcagcaaacatccgctcccgctccatccggcggcggagttacaattcccgcgcctatagccggtacgatactccgctatactgtgtctgaaggcgcgcaagtatacacgaatgataccatattaattattgagtccatgagaatggaactgaaaataaaagcgacttcgtcaggccccattcacttccttgttccacccggaacgcaggttgcggcccagcagcctgtcgcacaaatcggcggcggcggtggagttataattcccgcgcctgtaaaaggtacgatactccgctatactgtatctgaaggcgcgcaggtaaaaaagaaaaacaccatattaattcttaaacaccggtggggacaggaattggaaataagggcaatcacaaatggaaaagttcacttccttgctcccgttggaacagaagtctaccaacaatggcccgttgccgaaattatttaa

SEQ ID NO: 64456 - protein, 182 aa, Unknown
  Obtained from environmental sample
  DOMAIN (42)...(108): Biotin-requiring enzyme
  misc_feature (1)..(182): Xaa is any amino acid
MGLILKGDTSKCGGTVPPAPQPAPQPAKPQQTSAPAPSGGGVTIPAPIAGTILRYTVSEGAQVYTNDTILIIESMRMELKIKATSSGPIHFLVPPGTQVAAQQPVAQIGGGGGVIIPAPVKGTILRYTVSEGAQVKKKNTILILKHRWGQELEIRAITNGKVHFLAPVGTEVYQQWPVAEII

SEQ ID NO: 64457 - DNA, 825 bp, Unknown
  Obtained from environmental sample
  misc_feature (1)..(825): n is a, c, g, or t
atgaaattgtcaactaacaaaatatacaggtacagtcccgcaggaaaagacggggacatgatccttgaggcaatatcaagcggagccggcgggaactggtattttgtcgtccttccggagactgacgaacgggttgaaataagggatcagcttcccggctcttacaattcggggaatgtgcttgcggctgctcttaccgtttctcatcttttggatataccgataagggacattattccgcagataaaatttttaaaaccggtaaggggcagaatgacatccgtaggcggaaaacagccttttgaaattgtcgtagattacgcgcacacgccttcttcgtttcatacaatcttcccgcccattcgcaaaagaatggataaaacaggcggtaaaataatcagtcttttcggctcagcgggagagcgcgacacgcataaaagagccgaacagggaaaaatcgccgcccactacagcgattttataattcttaccgacgaagacccgcgcggggagagacccagggacattttgctggaaattgaaacaggcgtatgcaaagatcagggtttaaggattgtgaaagccgttgaacaccccgatatgataatcgatcaaaacagggcggtctttgagcgcgataaaaatcttttcctgataccagacagacccgccgcaatccgcaaggctctctctctcgcggacaagggcgatattgttctgcttctgggcaaaggacatgagaactccataatttacgcggatcgcgtcatgccttatgatgagatcacggagactgagaaggcgcttgcggagatggngttttaa

SEQ ID NO: 64458 - protein, 274 aa, Unknown
  Obtained from environmental sample
  DOMAIN (88)...(177): Mur ligase family, glutamate ligase domain
  misc_feature (1)..(274): Xaa is any amino acid
MKLSTNKIYRYSPAGKDGDMILEAISSGAGGNWYFVVLPETDERVEIRDQLPGSYNSGNVLAAALTVSHLLDIPIRDIIPQIKFLKPVRGRMTSVGGKQPFEIVVDYAHTPSSFHTIFPPIRKRMDKTGGKIISLFGSAGERDTHKRAEQGKIAAHYSDFIILTDEDPRGERPRDILLEIETGVCKDQGLRIVKAVEHPDMIIDQNRAVFERDKNLFLIPDRPAAIRKALSLADKGDIVLLLGKGHENSIIYADRVMPYDEITETEKALAEMXF

SEQ ID NO: 64459 - DNA, 873 bp, Unknown
  Obtained from environmental sample
  misc_feature (1)..(873): n is a, c, g, or t
gtggacggtatggtgcttctgatggagtcggagaagggctttagttgtaagatatccggcgccgacccgagtgatttccccggggtcccctcaatggacggcggaatagggttcagcgttgatgcgccgacccttcgagacatgatacgcaaaagctcgtttgctattgccaaagacgagtcgcgtggaagtctgtgcggagtgttgtgggaattgcagcctgataaaaccggcatggtgtcaacggacggccatagactcggttgctcttttattgacatgaacctcccggtcggagagaacattaatagaatcgtctcccagaagagtgtttcaacgttggttagaatcacggacacagataacgccgatgaaattttgaaggttattgtcggtgaaaagtatatatccttcagcacaccgtcgtttactatggtgtcgaaactcattgaaggtcaatatcctgaatacggcaaggttattccaaagaataatcccaaaatcgttatagcggatagagtgtctatattcgacgcggcgagacgtgtttcagtaatgtccaacgccaaaaacaatctcataaaactcactttcaagaacggggaaatggaagccgctgtcataaataaggaaatcggcggtgaggcgagggagagtgtggctgttgagtacgacggcgatgaacatatcgtcggctttaacggaaagtactttaccgagatattagacataatgaaaacggagaaagtacgtcttgaaatgaacacgcagataagcgcgtgcgtcgtctatccggtgtacgccgacgagaaagaaaaggtcagcgaagatttgtttttaataatgccgcttaggatactggatgaaatttga

SEQ ID NO: 64460 - protein, 290 aa, Unknown
  Obtained from environmental sample
  DOMAIN (39)...(156): DNA polymerase III beta subunit, central domain
  misc_feature (1)..(290): Xaa is any amino acid
MDGMVLLMESEKGFSCKISGADPSDFPGVPSMDGGIGFSVDAPTLRDMIRKSSFAIAKDESRGSLCGVLWELQPDKTGMVSTDGHRLGCSFIDMNLPVGENINRIVSQKSVSTLVRITDTDNADEILKVIVGEKYISFSTPSFTMVSKLIEGQYPEYGKVIPKNNPKIVIADRVSIFDAARRVSVMSNAKNNLIKLTFKNGEMEAAVINKEIGGEARESVAVEYDGDEHIVGFNGKYFTEILDIMKTEKVRLEMNTQISACVVYPVYADEKEKVSEDLFLIMPLRILDEI

SEQ ID NO: 64461 - DNA, 1176 bp, Unknown
  Obtained from environmental sample
  misc_feature (1)..(1176): n is a, c, g, or t
atggaataccctaaaaagtttttaggttcggatatcgaaatcgcccaatcagtgtttcccgaatatgccctgcatattgatgaggtggcaaaaagagcggaaattcctgaaaattatattgaacattacggaaaatacaaggcaaaaataaactacagccttcttaacgataataaagataaaaaagacggtaaattgatccttgtaacagccattaatcccactcccgccggagaaggcaaaacaaccacgacggtaggacttgcggacggtcttacattaaccgggaaaaaaacgatagcggctctaagggaaccttcgctggggccggtattcggcgttaagggcggagccgcaggcggcggatgggcgcaggtaattcctatggaagatatcaaccttcactttacaggtgattttcacgcaatctccacggcaaataatctgctgtcatcaattattgacaatcatatttttcagggtaataaacttaacattgatccgcgtaaaattatctggcgaagatgccttgacatgaatgacagacaactgcgttttattactacagggcttggaggaaaaccaaacggtttcccgcatgaagatggctttgacattacggcagcttctgaaataatggcgatactttgccttgcatccggcatagaagatttaaagaacagacttggccgcattattattggatatactttcggaaagcaaaacgataacacagaacagcctgttacggcagcgcagcttaaagcgcacggcgcaatggtggctcttctgaaagatgctttaaagccgaatttggcgcaaactcttgaaggcactcctgtttttattcacggaggaccgttcgcaaatattgcgcacggctgtaattcgataatggcaacccgctttgctctcaagtgcgccgactatgtggttaccgaagccggcttcggcgcagatttgggcgctgaaaaattccttgatatcaaatgccgttttgcgggattaaagccgtctgcggtaattattgtcgccactatccgagccttaaagtcacacggaggggcgcataaagctgatttggataaagaaaatcttgccgtacttgaagcggggctccaaatctcttacagcatgttgaaaacatcacaaaagtttacaaacttccggcggtag

SEQ ID NO: 64462 - protein, 391 aa, Unknown
  Obtained from environmental sample
  DOMAIN (8)...(389): Formate--tetrahydrofolate ligase
  misc_feature (1)..(391): Xaa is any amino acid
MEYPKKFLGSDIEIAQSVFPEYALHIDEVAKRAEIPENYIEHYGKYKAKINYSLLNDNKDKKDGKLILVTAINPTPAGEGKTTTTVGLADGLTLTGKKTIAALREPSLGPVFGVKGGAAGGGWAQVIPMEDINLHFTGDFHAISTANNLLSSIIDNHIFQGNKLNIDPRKIIWRRCLDMNDRQLRFITTGLGGKPNGFPHEDGFDITAASEIMAILCLASGIEDLKNRLGRIIIGYTFGKQNDNTEQPVTAAQLKAHGAMVALLKDALKPNLAQTLEGTPVFIHGGPFANIAHGCNSIMATRFALKCADYVVTEAGFGADLGAEKFLDIKCRFAGLKPSAVIIVATIRALKSHGGAHKADLDKENLAVLEAGLQISYSMLKTSQKFTNFRR

SEQ ID NO: 64463 - DNA, 360 bp, Unknown
  Obtained from environmental sample
  misc_feature (1)..(360): n is a, c, g, or t
ttgacggtatgcatcttttttcatgggcgtttgataattttaagacagtccgccctgaaaccgggcgatatagaaagaccgcgtctgtggaagggcagggcggactatgttgagcttaaacttgctgtagcgcctgattttacttctccgtttgaccgtgcgaatacgcttgtttttgaatatttgatacaggagccgttaatcgctccgcttaagcaggatgcggcagcgggatatcttgttatttctgacgaatacggtgaattgaaccgtgttcctttattaacggtgcgtgaatacgagaaaggaaatatctttaaaagaatttggcattcaatcctgcttttattcagaaaatga

SEQ ID NO: 64464 - protein, 119 aa, Unknown
  Obtained from environmental sample
  misc_feature (1)..(119): Xaa is any amino acid
MTVCIFFHGRLIILRQSALKPGDIERPRLWKGRADYVELKLAVAPDFTSPFDRANTLVFEYLIQEPLIAPLKQDAAAGYLVISDEYGELNRVPLLTVREYEKGNIFKRIWHSILLLFRK

SEQ ID NO: 64465 - DNA, 2934 bp, Unknown
  Obtained from environmental sample
  misc_feature (1)..(2934): n is a, c, g, or t
atgacggcaggcgtaaaggaaatcgccgacgtgttcaatctggacaggctttccatttggcgcaataaacccaggctcgacgccatgcacgtatcccagatataccgctgggacagggattccggcggcaccacggtggcgacaaaagagctggaagataccacctatgcccgcttcgcgccgcgatgggaaaaactttttgcctcaggcgaatccattaacagccccgtagggcttctgccggaagcggaaatgttgaaatcatttggctgtgtgtcggcgtttgtcacgccgatttttatcaataacgccgcatggggctttgcccttcttgaggatcgccataacgaacgcttttttgaagatgacagcgttgaaatgatgcgttcggcgatactcctgtgcgccaacaccgtcatacgcgccgacatggaacgtgaaataaccaacgctaacgattttaaccgcgtcatccttgacgcttcgcctttaggctttaccgtttttgacgaagatgcccgcgttattgactgcaatgatattgtttggaaaatattaaggactacaaagaaatactatattgaaaattttaacgaattttctcctgaataccaaagcgacggagtcttatccgcagataaggcggttgagataattaaacgggctattaacggcgaaaaactggtatttgagtggacacatcgttcgtctatgggggaacttattcccattgaagttacgacggtacgcgcgatgtataacggcagatatgtggcgatgagttatcaatacgacatgcgtaacataaaacaaatgacggaaagcatacgcgagcaaggcgaacagctcaaaatcaggctacngcaacaggaattaatttccgaaatttcaagaggctttatttcctcaggcgattcggaaacgctggtgaaagaagccattgccaaattgggcatcttccataaagtgtcggtggtgtatatcttcggcattgattatcagcgaaaaaatacttatctggcgtatcattggtcaaacgacgacaggccgccgcgcctaatccaggccgatttatacgctttaattacatccacctttccggagagactgccggattgttcggttgtgcctgtggtttcttttgacgatatcagcgacaattctgatcaggttttacgggagctcttttccatggatgtcagcgcgtttatctgtgcgccgttctatgttgaaggccaattatggggcttcatgagtgtgcagcagcgtcataagccccgcaagtggaccgaaaatgaaaagcggtttgtagccatgacggcgagtaccatcgccggcatcattatgcgcgacatttacaacacaaagctcaaagacgcgctttacaaggcaaccgaagcaagcagggcgaaaggagaattcctttccaacattagccacgaaatgcgaacgcccttgaacgcgataatcggtatgacggaaatcggcaagaactcaggcgatcttgcgagaaaaaaccatgcgtttggcaggattcaggacgcgtcaacgcatcttttgggcataataaacgacgtacttgatatgtcaaagattgaggcgaacaagctggaattgtcgtttattgaatttaacttcgagaagatgctcaagcgcgtagaaaatgttgtcagctttcgcgtggaagaaagacagcaaaagctttcgataaacatcgacagggatattcctgaaacctttataggcgacgaccagcggctggcgcaggttatcgcgaacatccttggaaacgcggttaagttcacgccggagaaaggttctataggcattgacgcgcatctggaaaaagaagaagacggcctttgtaccatacaaatttcggtaagcgacacaggaatcggtataagcgacgagcagcagaaaaatctgttccagtcctttcagcaggccgaaagcaatacgtcgcgaaaatacgggggtacagggttgggccttgcgatttccaaaaatattgtagagatgatgggcggcaggatatgggtagaatccgagctggggaaaggctctacgtttacctttacggtgaacctaaaacggggtgagagtaaaaaacaggaatttggtggacggctggtaaacaggaacgatgtacgcgttttggtagtggatgacagccaggttattttggactatttcagggtagtctcaaggaagctcggcgtatattgcgataccgcaataagcggggaagacgcgcttgcccttgtggagaaggataacaattaccatatctattttatagatctgcagatgccgggtattgacggcatacagatttcgcgcgaactgaaaacactggcatctgaaaactccgtagtggttataatgaccgccgatgaatggactaccaatgcggatgaagccaaagaggcgggagttgataaattcatggccaaacccctgtttccgcctgctattgaggaagttataaatgagtatctcggcgcagcagggcaggaagcagcggatgaacaacaggccgacgggttgttcgcgggccgccggatattgcttgtggaagatgtggatataaaccgtgaaatagtagtgacgctgcttgagcctacgcttttggaaatagactgcgctgaaaacggaaaagaggcggttcgcatgttttccgaagcgccggaaaagtacgatatgatttttatggatgttcaaatgcccgaaatggacggttatgaagccacgcggcgcatcagggcgcttgatattccggcggcaaaaaaaattccgattgtcgccatgaccgccaatgtattccgtgaagatatagaaaaatgcctggaagttggtatgaacagccatatcggtaaaccgtttgatttcaatgaggttatagataaactgcgcagatatttgcctaaatga

SEQ ID NO: 64466 - protein, 977 aa, Unknown
  Obtained from environmental sample
  DOMAIN (305)...(448): GAF domain
  misc_feature (1)..(977): Xaa is any amino acid
MTAGVKEIADVFNLDRLSIWRNKPRLDAMHVSQIYRWDRDSGGTTVATKELEDTTYARFAPRWEKLFASGESINSPVGLLPEAEMLKSFGCVSAFVTPIFINNAAWGFALLEDRHNERFFEDDSVEMMRSAILLCANTVIRADMEREITNANDFNRVILDASPLGFTVFDEDARVIDCNDIVWKILRTTKKYYIENFNEFSPEYQSDGVLSADKAVEIIKRAINGEKLVFEWTHRSSMGELIPIEVTTVRAMYNGRYVAMSYQYDMRNIKQMTESIREQGEQLKIRLXQQELISEISRGFISSGDSETLVKEAIAKLGIFHKVSVVYIFGIDYQRKNTYLAYHWSNDDRPPRLIQADLYALITSTFPERLPDCSVVPVVSFDDISDNSDQVLRELFSMDVSAFICAPFYVEGQLWGFMSVQQRHKPRKWTENEKRFVAMTASTIAGIIMRDIYNTKLKDALYKATEASRAKGEFLSNISHEMRTPLNAIIGMTEIGKNSGDLARKNHAFGRIQDASTHLLGIINDVLDMSKIEANKLELSFIEFNFEKMLKRVENVVSFRVEERQQKLSINIDRDIPETFIGDDQRLAQVIANILGNAVKFTPEKGSIGIDAHLEKEEDGLCTIQISVSDTGIGISDEQQKNLFQSFQQAESNTSRKYGGTGLGLAISKNIVEMMGGRIWVESELGKGSTFTFTVNLKRGESKKQEFGGRLVNRNDVRVLVVDDSQVILDYFRVVSRKLGVYCDTAISGEDALALVEKDNNYHIYFIDLQMPGIDGIQISRELKTLASENSVVVIMTADEWTTNADEAKEAGVDKFMAKPLFPPAIEEVINEYLGAAGQEAADEQQADGLFAGRRILLVEDVDINREIVVTLLEPTLLEIDCAENGKEAVRMFSEAPEKYDMIFMDVQMPEMDGYEATRRIRALDIPAAKKIPIVAMTANVFREDIEKCLEVGMNSHIGKPFDFNEVIDKLRRYLPK

SEQ ID NO: 64467 - DNA, 1233 bp, Unknown
  Obtained from environmental sample
  misc_feature (1)..(1233): n is a, c, g, or t
atgattatttttaatgacaatgctctcattctacagaccgaaaacacaagttatatatttcgcataacaaaacacggccaccttgaacatgtttattacggagacaaattggctgatgatatctccgtttccgatattgaagcgcttgcgcccaaacgtacagcgcgggcaggctcaaccgtcgtttatgacagagaagacaatctctactgcctggatacaatgtgctttgagtggtccggtatcggcaggggcgattaccgactttcacctgcggaaattaaaatgccggacggcggttttataagcgactttatttacgaaagccacagtattaaaaagggaattatccccatgaaggaactgccggcggaactgccggcttcacacggcgcggaaaacgagtgcgattcccttgaaatacttcttcgcgacaaagtttgcaatgttacgctgaaattgctctatactgtttatgaaaaaaccaactgtattacgcggcgtgtagtacttgaaaataacggcgctcctcttgtgattcgccgcctgttaagtttgtcccttgatatgccaaacacaggtctcagtctggttacatttgacggcgactgggcaagagaagcgcacagacatgaccggcttttacaatacggaatttatgtaaacgagagcaggacgggagcaagcggaaacaagcacaacccgggttttttgttatacgaaaacggaacggcggaggatcacggcagggtgtacggttttaatctgatttactcaggcaatcattttggttttgcggaattaaacagccacgatcttgtccgtgccggaatcggaataagtccgcattgttttgagtggacgcttggcacaggagaaagttttgaaacgccggaagctgtaatgactttcagcggcggcggatttaacggcttgagccgcaattttcatttatttgtaaacagccacattgttccggaagcatggcagggcaaagagcggcctgtcctttacaattcatgggaaccatgttttttcaaatttaatcaaagtaaactgatgagccttgcccgcctgtcaaaaaaactaggaatggagctttttgttcttgatgacggctggtttgaagggcgcaacagcgataccgcaggtctaggcgattatacgcctaaccgccgcagtttccgcaggggcttggaaaatttgccccgcagatacgcgcacttggactga

SEQ ID NO: 64468 - protein, 410 aa, Unknown
  Obtained from environmental sample
  misc_feature (1)..(410): Xaa is any amino acid
MIIFNDNALILQTENTSYIFRITKHGHLEHVYYGDKLADDISVSDIEALAPKRTARAGSTVVYDREDNLYCLDTMCFEWSGIGRGDYRLSPAEIKMPDGGFISDFIYESHSIKKGIIPMKELPAELPASHGAENECDSLEILLRDKVCNVTLKLLYTVYEKTNCITRRVVLENNGAPLVIRRLLSLSLDMPNTGLSLVTFDGDWAREAHRHDRLLQYGIYVNESRTGASGNKHNPGFLLYENGTAEDHGRVYGFNLIYSGNHFGFAELNSHDLVRAGIGISPHCFEWTLGTGESFETPEAVMTFSGGGFNGLSRNFHLFVNSHIVPEAWQGKERPVLYNSWEPCFFKFNQSKLMSLARLSKKLGMELFVLDDGWFEGRNSDTAGLGDYTPNRRSFRRGLENLPRRYAHLD

SEQ ID NO: 64469 - DNA, 423 bp, Unknown
  Obtained from environmental sample
  misc_feature (1)..(423): n is a, c, g, or t
atgttaagtaaacaggaagccgaaagaatggtaaaaaacaatattcttccgttctggcagggaatggctgacaggggaaacggcggttattacggtgaggcggattttcacggcaaaataaataaatccgcagccaagggctgcatattaaattcacgtattttatggacattttcagcagccttccggttgtttaaagacgatacatacaaggaatgcgccgctcttgcaaaagattttctgacagccgcatttctggacaaggagcatggcggactttattggcttgttgaccataccggcaaaccgcttgacacaaggaaacaattctacaatatcgcctttggcatttatgcgttaagcgaacattatcttgcctcaagagagcaatcttcgctggaacttgcgatgaatcttttttga

SEQ ID NO: 64470 - protein, 140 aa, Unknown
  Obtained from environmental sample
  misc_feature (1)..(140): Xaa is any amino acid
MLSKQEAERMVKNNILPFWQGMADRGNGGYYGEADFHGKINKSAAKGCILNSRILWTFSAAFRLFKDDTYKECAALAKDFLTAAFLDKEHGGLYWLVDHTGKPLDTRKQFYNIAFGIYALSEHYLASREQSSLELAMNLF

SEQ ID NO: 64471 - DNA, 387 bp, Unknown
  Obtained from environmental sample
  misc_feature (1)..(387): n is a, c, g, or t
atggcgcgttacaaaggaatattgaagagcgcggcagaagcggcaaaaatactggataccatacaagacggcgataaaatacttatttcggaaggctgtacgcatcacagacagtgcgatgatataggaacagttaaattacccaaatggattaaacagcataccggaaaagaacctgtgtttgaattttcttcggggactgaattccccggcgatctttccggctataaattgattatccattgcggcggttgtatgctaaatcgccgcgaaatgatctctcgcgctaattcggcgcataaagccggcatacccatgactaattacggcgtggcaataagctttatgcagggaatcctggagcggtgtcttaaacccataccttaa

SEQ ID NO: 64472 - protein, 128 aa, Unknown
  Obtained from environmental sample
  misc_feature (1)..(128): Xaa is any amino acid
MARYKGILKSAAEAAKILDTIQDGDKILISEGCTHHRQCDDIGTVKLPKWIKQHTGKEPVFEFSSGTEFPGDLSGYKLIIHCGGCMLNRREMISRANSAHKAGIPMTNYGVAISFMQGILERCLKPIP

SEQ ID NO: 64473 - DNA, 1854 bp, Unknown
  Obtained from environmental sample
  misc_feature (1)..(1854): n is a, c, g, or t
gtgatggccngcattgtattcgtttgccctgtcgcttctattattctgctttttttctcaggcttggaaacagatatcggtctattcttaaaatattccgtcgccggcgtaataattggtttaggcggagtgttattctcctttgtgattggagatttttgcggcgttatgcttcttaatacttcattttttgatacgcgatgtttatttttaggcgtgctttcaacggcaacttccgtaggcattaccgcaagaattctaagcgatagaaaaaagatggattcgccggagggtgttaccattcttgccgccgcggtattcgacgacgtattgggcattattattcttgccgtggtgcttggtgtggtcgccatgtttgccggacacgcggaagcggaaggcaatttttccgctatggcgattcttggtattgcggggaaggcgttcggtatctggcttggttttacggcgttaggtttgtttttttcgcgccagcttgcttcgtttttaaaaatatttaaaaacagttctgatttttccatacttgcgcttggtatcgctcttattcttgccggtttctttgaacacggcggacttgcaatgataatcggcgcttatatcgcggggctttcgctttccaaaacagatattgccgcggtaatacagggaaggcttcagggactttatgatttttttgtccccgtattttttgccgttatgggaatgatggtgaatgtacgcgaaataacttcgccgcccgttctaattttcggcggaatatacacattggcggctattttcgcgaagataatcgggtgcggcggtcccgcgcttttacttggttttaatgttaaaggagcgctgcgaatcggagtaggcatggttcctcgcggcgaggttgcgctcatcattgccggtattggattggcaatgggcattcttgacaaccagcttttttcgattgtaattttactgaccttaatttccactatcgtggctccgccgcttttaaacgcgtcgttaaaaattaaagggcagggaacaagaaaatttgtcaatgatgaaaatatcacatatttaaaatgggactttggttctcatgatgtcgcaaggcttatgttggacagattattaattgatattagagccgagggtttttatgttcaagtaatgaaccttgataataacgtcgctctggcgcgtaaagatgatatttccgtttcgataagccgcgagggaaggtccgttatcatagagacctcaagctcggatttgccgtttgtaaataatgttgtttatgaagatataattaatctttcggaagccatgcaaaaattaaaagactcaatgaacacaacggctatgaagaaagaattgtttgatcgcagaggaaggacaactaacagtctgctttccgtaatagaggctaactcaatagtccttgatgttaaaggtgaaaacatagaagaaataatcagagaacttgttgaaacgcttaacaagcagaaaaaactgctgaataaagaacttgttttaactgatgtatttgaacgtgaaaaaataatgagtaccaatatgggctatggaatagtattaccccacgcgaagagcgacggagtaaaagaaaccgttgtcgcggtaggcataaaaaaagaaggtattattcttgatccctctgataaccaaccggctcgtatttttgtaatggaaatttccccccgaaaagacggtcctcatttacaattccttgccgcgttaggtgctgtactgagagatgaaacaatacgccaaaagctgattaactcctcttcccctgcggaagttgctgaaatactgcataacaacagaagataa

SEQ ID NO: 64474 - protein, 617 aa, Unknown
  Obtained from environmental sample
  DOMAIN (472)...(615): Phosphoenolpyruvate-dependent sugar phosphotransferase system, EIIA 2
  misc_feature (1)..(617): Xaa is any amino acid
MMAXIVFVCPVASIILLFFSGLETDIGLFLKYSVAGVIIGLGGVLFSFVIGDFCGVMLLNTSFFDTRCLFLGVLSTATSVGITARILSDRKKMDSPEGVTILAAAVFDDVLGIIILAVVLGVVAMFAGHAEAEGNFSAMAILGIAGKAFGIWLGFTALGLFFSRQLASFLKIFKNSSDFSILALGIALILAGFFEHGGLAMIIGAYIAGLSLSKTDIAAVIQGRLQGLYDFFVPVFFAVMGMMVNVREITSPPVLIFGGIYTLAAIFAKIIGCGGPALLLGFNVKGALRIGVGMVPRGEVALIIAGIGLAMGILDNQLFSIVILLTLISTIVAPPLLNASLKIKGQGTRKFVNDENITYLKWDFGSHDVARLMLDRLLIDIRAEGFYVQVMNLDNNVALARKDDISVSISREGRSVIIETSSSDLPFVNNVVYEDIINLSEAMQKLKDSMNTTAMKKELFDRRGRTTNSLLSVIEANSIVLDVKGENIEEIIRELVETLNKQKKLLNKELVLTDVFEREKIMSTNMGYGIVLPHAKSDGVKETVVAVGIKKEGIILDPSDNQPARIFVMEISPRKDGPHLQFLAALGAVLRDETIRQKLINSSSPAEVAEILHNNRR

SEQ ID NO: 64475 - DNA, 753 bp, Unknown
  Obtained from environmental sample
  misc_feature (1)..(753): n is a, c, g, or t
ttggaaacaagtttttcaaaaataaacttaaaatttataatgcccatgtttacaggggcattatgttctatgcttgtttgcgcgttaataggcgtttcatccggttatcttaaaagaccggcgtccccaagtattattgaagacgaaatcgaagaagaagattttaccacgcttttcgctccgtcagaccatattgcggattctgttttggaatactaccgtaaatttgaatacaaagaatgggtcattgatttttttaccgctatatgcaaaaacagggaaattgcgtggtctattttgaacagttccgatgaatttgacgttccgcccgcgttggcttttgcgttatgctgggaagaaagcagatttaaccccaacgcgataaacaggcaaaaccgcgacggaagcatagatcgcggattgtttcagttaaataacaaatcttttccttatttggatatttcaactttttacggtattaattccaacgcgcgttacggagtgggtcatcttagatattgcctgaatgtaggcggcagtgagatttccgcccttgccatgtacaacgccggcgcgggaagggtaagatcgacgggcgctcccgaaatcactcttaattatgtaagcagaattttggaaaaccgcggaaaaatagaaagccgttttcataccaagttaattaaggaagaagaaaacagacttgccgaaaacgccgaaggctcatcaagcggattattcagccgcgtattttaa

SEQ ID NO: 64476 - protein, 250 aa, Unknown
  Obtained from environmental sample
  SIGNAL (1)...(28)
  DOMAIN (97)...(211): Transglycosylase SLT domain
  misc_feature (1)..(250): Xaa is any amino acid
METSFSKINLKFIMPMFTGALCSMLVCALIGVSSGYLKRPASPSIIEDEIEEEDFTTLFAPSDHIADSVLEYYRKFEYKEWVIDFFTAICKNREIAWSILNSSDEFDVPPALAFALCWEESRFNPNAINRQNRDGSIDRGLFQLNNKSFPYLDISTFYGINSNARYGVGHLRYCLNVGGSEISALAMYNAGAGRVRSTGAPEITLNYVSRILENRGKIESRFHTKLIKEEENRLAENAEGSSSGLFSRVF

SEQ ID NO: 64477 - DNA, 1059 bp, Unknown
  Obtained from environmental sample
  misc_feature (1)..(1059): n is a, c, g, or t
atgtttcgtatacagacactaaataaaatctctccccttgggttggatcttttccctagggataaatacgaggttgcgagcgacattcccaaccctgacgcaatattggtgcgaagcgccgacatgaacggttcggaaataccgtcttccgtgcttgcgattgcaagggcgggcgcgggatacaataatattcccgttcagaaatgcagtgacagcggagtggtagtttttaacactcccggcgcgaacgccaacgctgtcaaggaacttacacttgcgtctctgcttctttcatcgcgcaacattatcggcggcgttaactggactttgtcggaagccggcaagcccgatatagccgagcttgttgaaaaagaaaagtccaaatttacaggaccggaaattaaaggcaagactttaggcgttgtgggactcggcgctatcggcgtaatggtcgcaaacgacgccatcgcgctgggtatgaatgttatcggctatgacccgtatatttccgtagacgccgcttggaatctatcccgcgaagttgtccgcgcggacactcttgagggacttctcgctaaatcggattatatcactctgcacattccgcttggcgaaaacactaaaggtttgctggacgcggaaaaattccgtttaatgaaaaaggacgcgcgcgttatcaacttttcacgtaacgcgctggtaaaggataaggacataatagaagcgctagacgcaggaaaaatcagcgtttatgttacagacttcccctctcaggatctcctggcttgcaaaaaagtcatcggtattccgcaccttggcgcgtcaactcccgaagccgaagataactgcgcgataatggcggttaagcagatcatggattatcttgagaccggggcaatccgcaattccgtaaactttccgcgctgcaaacttgaacagcataccgcttacagactgcttgtagtaaacaaaaatatccccaacatgattgggcagattactacaatccttgccggttcaaacatcaatattacagacttaatcaaccacccaccgtga

SEQ ID NO: 64478 - protein, 352 aa, Unknown
  Obtained from environmental sample
  DOMAIN (4)...(305): D-isomer specific 2-hydroxyacid dehydrogenase, catalytic domain
  misc_feature (1)..(352): Xaa is any amino acid
MFRIQTLNKISPLGLDLFPRDKYEVASDIPNPDAILVRSADMNGSEIPSSVLAIARAGAGYNNIPVQKCSDSGVVVFNTPGANANAVKELTLASLLLSSRNIIGGVNWTLSEAGKPDIAELVEKEKSKFTGPEIKGKTLGVVGLGAIGVMVANDAIALGMNVIGYDPYISVDAAWNLSREVVRADTLEGLLAKSDYITLHIPLGENTKGLLDAEKFRLMKKDARVINFSRNALVKDKDIIEALDAGKISVYVTDFPSQDLLACKKVIGIPHLGASTPEAEDNCAIMAVKQIMDYLETGAIRNSVNFPRCKLEQHTAYRLLVVNKNIPNMIGQITTILAGSNINITDLINHPP

SEQ ID NO: 64479 - DNA, 1056 bp, Unknown
  Obtained from environmental sample
  misc_feature (1)..(1056): n is a, c, g, or t
ttgccggttttggaaaaagcggcggctgaaatgacggacactaacggctccggtcaatctgtaatggagatgagccatcgttcaaaggattttaagcctattatcgaaaaaacagaatcccttttaagggaattaatgtgtattccgagcaattataaggtgctctttttgcagggcggcgcgtcccttcaattttcaatgattccccttaactttgcggcgggcgacgctcccggacagggtaaaaaggtctcatatgttgatacaggcatttggtcggataaagcgataaaagaagcctcaaaatacgccaaggtggaagtaaaggcaagttccaaagacaaggcttatacatacattcccgacgctcccgctccttcctcggacgacgcctattatcacataaccttgaacaacacgattgtcggaaccaagtgggacaaacttcccgatacaggctccgtgcctcttgttacggacgcttccagctgtatcctctcagagccgcttgatgtaagcaagtttgggttgatctacgccggcgctcagaaaaacttaggtcccgccggtactacccttgtaattatccgcgaagacttggtaaaaaagactcctgattgggttccggtcatgctcaggtacgatacccatgtcggcgaaggctccatgtacaatactccgccatgctacggcatttacatcatcgggctggtattggaatggctgaaaaacctcggcggcgttgaggctatcggaaaattaaaccgtgaaaaagccaaactcttttatgattatcttgattcatcggatttatttcattctcccgttcaaaaagaatcccgcagtttgatgaacattccgtttgtaacaaaagagcaggacgaagccaagaagacagagattgaaacccgctttgtaaaagaagcggcggcggcgggacttataaatcttgcgggacacaggcttgtaggcggtatgagggcaagtatttacaacgcaatgccaatcgaaggcgtaaaagcgttgataagtttcatggacaaattcaagaaataa

SEQ ID NO: 64480 - protein, 351 aa, Unknown
  Obtained from environmental sample
  DOMAIN (2)...(342): Aminotransferase class-V
  misc_feature (1)..(351): Xaa is any amino acid
MPVLEKAAAEMTDTNGSGQSVMEMSHRSKDFKPIIEKTESLLRELMCIPSNYKVLFLQGGASLQFSMIPLNFAAGDAPGQGKKVSYVDTGIWSDKAIKEASKYAKVEVKASSKDKAYTYIPDAPAPSSDDAYYHITLNNTIVGTKWDKLPDTGSVPLVTDASSCILSEPLDVSKFGLIYAGAQKNLGPAGTTLVIIREDLVKKTPDWVPVMLRYDTHVGEGSMYNTPPCYGIYIIGLVLEWLKNLGGVEAIGKLNREKAKLFYDYLDSSDLFHSPVQKESRSLMNIPFVTKEQDEAKKTEIETRFVKEAAAAGLINLAGHRLVGGMRASIYNAMPIEGVKALISFMDKFKK

SEQ ID NO: 64481 - DNA, 543 bp, Unknown
  Obtained from environmental sample
  misc_feature (1)..(543): n is a, c, g, or t
atgagcctttgtatggaaaaacgcggcatccagaccaacatgacctatcttgacgaaaagcgtgtggagcttgtttacgacatgccgctttcggaagtgctatttgatttttacgaccgccttaaaagcacaagccggggctacgcttcatttgattatgacatcacaggctacaaacctacggagctggtcaagctggacattctgttaaacggcaaggccgtagacgcccttgcccagctcgtgttcaagaacaacgcctacgaccgtgccagaattgtctgcgaacggctggtagatgaaatacccaggcagcagtttaaaatcccgatacagggggcaatcggcagccaaattatcgcaagggaaacggtcaacccgctacgaaaagatgtccttgccaagtgctacggcggcgacatcacccgcaagcgcaagctcctggaaaagcagaaagaagggaaaaaacgtatgcgtatggtgggagacgtggaacttccccagagcgcgtttctcgcggtgctgaagacgaaagacgagtaa

SEQ ID NO: 64482 - protein, 180 aa, Unknown
  Obtained from environmental sample
  DOMAIN (1)...(69): Elongation factor G C-terminus
  misc_feature (1)..(180): Xaa is any amino acid
MSLCMEKRGIQTNMTYLDEKRVELVYDMPLSEVLFDFYDRLKSTSRGYASFDYDITGYKPTELVKLDILLNGKAVDALAQLVFKNNAYDRARIVCERLVDEIPRQQFKIPIQGAIGSQIIARETVNPLRKDVLAKCYGGDITRKRKLLEKQKEGKKRMRMVGDVELPQSAFLAVLKTKDE

SEQ ID NO: 64483 - DNA, 1278 bp, Unknown
  Obtained from environmental sample
  misc_feature (1)..(1278): n is a, c, g, or t
gtggcaagcggcgcccgcctgatggaaaacatacgcaacttttgcataatcgcccacatcgatcacggaaagtcaacgcttgccgacaggcttattcaaaaaggccgtcttgtggacgacagggatttccagaaccagattttggacaacatggacattgaaagggagcgcggcatcaccatcaagagccaggcggtttgcattccgtacaccgcgcttgacggcattgaatacaagctcaacctggtggacacgccaggccatgtggactttagttacgaagtttcaagggcgataaattcctgcgaaggggcgctgctccttgttgatgcgacccagggcgttcaggcacagaccctttccaatatgtacctggccctggaacacaatctggaaatcattccgggtattaacaagatcgatatgcaggcagctgacattcccgaagcaaaagcccagatagacaaggatctggggcttgattcttccgaagctgtcctggtttccgcaaaaacaggcgcgggtgtggacgagctttttgaggccattgtaaagcgcctgccctccccttccggcagcgttaatgcgccgctcagagcgcttatttttgactgccactacgacccgtacaggggagttgtgattcacctgcgcctgtttgacggggcgattaaaagagggatgatgatccgttttatgtccaatggcgcggaatatgaggtagagactgtcggtgtttttaaactggcgctggtcgagacagcggagctgtcggcgggtgaggttgggtacttcatcgggggaataaaaaccgtaagcgatgtgcgggtgggcgacacggtaacaggcgctctttccccgtgcgacaaaccgctacccggctttcgcgaggtaaagccagttgtcttctcttcgatatatccggtcgattccaacgactacgaagaactaaaggcaagcatcgacaagctgaaactaaacgacgcttccctggtttacgaaaaggattcgtcagcggctttgggctttggtttccgctgcggctttttaggactgttgcaccttgaggtgatccaggaaaggctggaaagggaattcgatcagtcggtgatcttcaccgccccttcggttaaatacaaagtccgcctgcgctccggcgaagaaattatggtggacaatcccatcgactacccggaagagggtcttatgaaagcgccgaagaaccttacatcagagccgcgattattacacccgcgaccttcctgggaaacatcatga

SEQ ID NO: 64484 - protein, 425 aa, Unknown
  Obtained from environmental sample
  DOMAIN (23)...(189): Ras family
  misc_feature (1)..(425): Xaa is any amino acid
MASGARLMENIRNFCIIAHIDHGKSTLADRLIQKGRLVDDRDFQNQILDNMDIERERGITIKSQAVCIPYTALDGIEYKLNLVDTPGHVDFSYEVSRAINSCEGALLLVDATQGVQAQTLSNMYLALEHNLEIIPGINKIDMQAADIPEAKAQIDKDLGLDSSEAVLVSAKTGAGVDELFEAIVKRLPSPSGSVNAPLRALIFDCHYDPYRGVVIHLRLFDGAIKRGMMIRFMSNGAEYEVETVGVFKLALVETAELSAGEVGYFIGGIKTVSDVRVGDTVTGALSPCDKPLPGFREVKPVVFSSIYPVDSNDYEELKASIDKLKLNDASLVYEKDSSAALGFGFRCGFLGLLHLEVIQERLEREFDQSVIFTAPSVKYKVRLRSGEEIMVDNPIDYPEEGLMKAPKNLTSEPRLLHPRPSWETS

SEQ ID NO: 64485 - DNA, 441 bp, Unknown
  Obtained from environmental sample
  misc_feature (1)..(441): n is a, c, g, or t
ttgctgatggagttgtcaacgcagttcgccaactggcttaaaggcaaaccatgccgggtgtttgccgccccgctggacgtgcgcctgttcccaaaagaagataattctgatgacacggttgtacagcctgatctgcttgttgtgtgcgataaagaaaatctcggcaagggctgcgtaaacggcccgccggatctggtggccgagattgtgtcgcctttaagtacatattgtgagtttttcctgaaatttcatgattaccttgaagccggagtaagggaatattgggtgattgaccctgaagaaaaaaggatactggttcatatttacgaaaacggccattttatcagctccgtccataaaggggatggcagcattccggttaacatcctgcctggcctgaatatttctcttgggaacctgtggcaagcggcgcccgcctga

SEQ ID NO: 64486 - protein, 146 aa, Unknown
  Obtained from environmental sample
  DOMAIN (2)...(108): Protein of unknown function (DUF820)
  misc_feature (1)..(146): Xaa is any amino acid
MLMELSTQFANWLKGKPCRVFAAPLDVRLFPKEDNSDDTVVQPDLLVVCDKENLGKGCVNGPPDLVAEIVSPLSTYCEFFLKFHDYLEAGVREYWVIDPEEKRILVHIYENGHFISSVHKGDGSIPVNILPGLNISLGNLWQAAPA

SEQ ID NO: 64487 - DNA, 2565 bp, Unknown
  Obtained from environmental sample
  misc_feature (1)..(2565): n is a, c, g, or t
atgcctctggatagaagagtcagcaccggaatgcccggtttggatcaggccatcgacctgctgcggttgggtgataatgtggtttggcaggtgcagtccattgatgattacctcagggttctgcgtccgtatatccagcaggccatacaggacgaacgcaggcttgtttactttcgattcggcaaccacgcgccgttgatggcggataacgaaccttctgttatatatcaactggacacttccgagggatttgagttatttgccctgaaagttcatgccattattgaacgcgaggggctcaaggctttttatgtgtttgactgcctgagcgacctgctggaaagctggtgttccgacatgatggtcggcaactttttccgcataacctgtccttttctgtttgtgcttgataccatcgcctatttcgcccttatccgaggcgcccacacccacgataccatcgcccgcatacgcgaaaccacccagctcttgctggatgtgtaccacgttgacgataaattttatattcatccgcttaaagtatgggagcgatattcgcctacgatgttttttccgcatttgattgacggcgacaaggcttattcaattacctcaagcgcggacgccgcgactttgttctcgcgggtaagcaggggaggacaccccagggatcactggcatatcaccttcgatcacgcgcgttcatttttaacacgcgacgaaaaatcacaggaagagatgaaacagctccttataggctggcttataggcaaggaattgcgcataactgaccttattatgaagtatttttcgcttatggatattcttgatatagcggaaagggaaatagggacgggctttatcggcggtaaaagcgtaggaatgcttcttgccagaaaaattctggaaaaggaagctggggacgttatgcggaaccattgggagccgcatgactcttattatcttggctcggatgttttctatacttacattgttcataacgggctgtgggatttgcgtataaaacaaaaaacgaccgaagggtattttaccgtagcgaaagaactgcaggagaagatgaggaacggcaaattccccgacacaatcagggaacagtttatacagatgctggaacatttcgggcagtcgcccattatcgtccgctcaagctccctgcgggaggacaatttcggcaacgcgtttgcgggaaagtacgaaagcgttttttgcgccaatcaaggaacccccgaagagcgctatgcggcgtttgagcaggcagtccgcactgtctacgccagcaccatgaacgacgacgccctcgcgtacaggcagcgccgcgggcttaccaatcaggacgagcagatggcgattcttgtccagcgcgtttccggcaaccactacgacgagttatttttcccgcatatcgcgggcgttgggaaatccatcaatctgtatgtgtgggacaaatcaatgaatccggaagccggtatgcttcgtgttgtattcggtcttggaactcgcgccgtggaccgcgtttcaggagattacgcgaaaataattcccttagactgtccaaacagggggccgcctgtcagttacggcgatgaaaaaaagttttcccagcataaagccgacgtgcttgacttgttcaataataaattggcggaagtgcctcttgagaaacttgcggacggcgatttaaaaaccgataaaaatattttctttactacagataacgccgcgattaaccgcatgcgcgaacttagaattaactatacctatactcccagaataccggattttaaaaagctgctgacggaaacaggttttcccgaatttgtccgcactgtgctttcaacattaagcacggcatataactatcctgttgatattgagtttacagctaactttgatccaaacggcgagttccgtttcaaccttctgcaatgccgccctctgcagacaaaagggcttggcagggttattgaagccccgcagcctaaaagtgagcgtatctttttctcatccgcgggcgattttatgggcggcaatatccggctgcattttgattatgttgtttttgtcagggcgacggaatatcttgagctgacagatcaggataaataccaggcggcgcggacggtcggcgttattaatcaaaagttaaaagacaaaacggttttattgatggggccgggacggtgggggacaactacgccgtcgcttggggttcccgttcatttcagcgagttatgcaacatggccgccctctgcgaagtatcgtatccaaaagcgggcatcgtgccggaattgtcttttgggagtcatttttttcaggacatcgtggaatctgacattttttacgccgctgtttttgacggggaaccgggcatcgtattctgtcccgatcaaattctaacgcgggaaaatctgctgacggaaatgtacgacggagaaaaaaaatgggattcggtgatacacgtagcacagacgcccggtttgatattacattcggatattaccaatcaaaaattgcttatttattgggatcaggacgctgtataa

SEQ ID NO: 64488 - protein, 854 aa, Unknown
  Obtained from environmental sample
  misc_feature (1)..(854): Xaa is any amino acid
MPLDRRVSTGMPGLDQAIDLLRLGDNVVWQVQSIDDYLRVLRPYIQQAIQDERRLVYFRFGNHAPLMADNEPSVIYQLDTSEGFELFALKVHAIIEREGLKAFYVFDCLSDLLESWCSDMMVGNFFRITCPFLFVLDTIAYFALIRGAHTHDTIARIRETTQLLLDVYHVDDKFYIHPLKVWERYSPTMFFPHLIDGDKAYSITSSADAATLFSRVSRGGHPRDHWHITFDHARSFLTRDEKSQEEMKQLLIGWLIGKELRITDLIMKYFSLMDILDIAEREIGTGFIGGKSVGMLLARKILEKEAGDVMRNHWEPHDSYYLGSDVFYTYIVHNGLWDLRIKQKTTEGYFTVAKELQEKMRNGKFPDTIREQFIQMLEHFGQSPIIVRSSSLREDNFGNAFAGKYESVFCANQGTPEERYAAFEQAVRTVYASTMNDDALAYRQRRGLTNQDEQMAILVQRVSGNHYDELFFPHIAGVGKSINLYVWDKSMNPEAGMLRVVFGLGTRAVDRVSGDYAKIIPLDCPNRGPPVSYGDEKKFSQHKADVLDLFNNKLAEVPLEKLADGDLKTDKNIFFTTDNAAINRMRELRINYTYTPRIPDFKKLLTETGFPEFVRTVLSTLSTAYNYPVDIEFTANFDPNGEFRFNLLQCRPLQTKGLGRVIEAPQPKSERIFFSSAGDFMGGNIRLHFDYVVFVRATEYLELTDQDKYQAARTVGVINQKLKDKTVLLMGPGRWGTTTPSLGVPVHFSELCNMAALCEVSYPKAGIVPELSFGSHFFQDIVESDIFYAAVFDGEPGIVFCPDQILTRENLLTEMYDGEKKWDSVIHVAQTPGLILHSDITNQKLLIYWDQDAV

SEQ ID NO: 64489 - DNA, 954 bp, Unknown
  Obtained from environmental sample
  misc_feature (1)..(954): n is a, c, g, or t
ttggcttggctcatgcgctatgcggacaaaccggaagagatgataactttacagcttgccaaggaattcaacattccaaatgacaggttggttatagaaatttcggaagatgagtttaacgcgagcgaagaatatatccgttccatagtccattacaaaaaagctggatgccgcattgcgcttgacgattacggaaggagagccagcaatattgagcggctggcaaaacttcaaccggacattataaaaatcaatattgattatattcataacagcgaaacgtcttatcattatcgtgagtatttacgctctattgccgcttttgccgattccgttggcatcgaagtgctgtatgaaggcgtggagacggagcgtcagcttgatatttgcatttcctcaaagggaaggttttatcagggatttttgattgccgttccccaaccatccatgctctcggctattaaccagtctgttttttccgcgtcaatcgaaaccgcttatatggcaatacaaaagaaggccatcgatgcagaatccattaaacaatccctggatctcaaaattgaacgcttcctgcttcaaaacccgtttgatcgcgaaaaagaagctgacggcgacatgtaccttatgagacttttccgtgaattgccggagctgagacgtatttatctgtgcaacagaaaaggcgatcagctttccgataatattgaacggcaatcggataaaattatatcccgcgattataaaaacaagaattgggcgtggcgcggatattttcatgaaataataaaggcttttatcagaggcagaaaaagctgcctgacaaacccgtaccgcgatttttcaacaaaagaaaagatatgtacttattcttacgttatcagggaaaatgtgtttttattggcggatcttgtaagggaacaggaaaggataaacgataatgcctctggatag

SEQ ID NO: 64490 - protein, 317 aa, Unknown
  Obtained from environmental sample
  DOMAIN (1)...(146): EAL domain
  misc_feature (1)..(317): Xaa is any amino acid
MAWLMRYADKPEEMITLQLAKEFNIPNDRLVIEISEDEFNASEEYIRSIVHYKKAGCRIALDDYGRRASNIERLAKLQPDIIKINIDYIHNSETSYHYREYLRSIAAFADSVGIEVLYEGVETERQLDICISSKGRFYQGFLIAVPQPSMLSAINQSVFSASIETAYMAIQKKAIDAESIKQSLDLKIERFLLQNPFDREKEADGDMYLMRLFRELPELRRIYLCNRKGDQLSDNIERQSDKIISRDYKNKNWAWRGYFHEIIKAFIRGRKSCLTNPYRDFSTKEKICTYSYVIRENVFLLADLVREQERINDNASG

SEQ ID NO: 64491 - DNA, 360 bp, Unknown
  Obtained from environmental sample
  misc_feature (1)..(360): n is a, c, g, or t
atgctcggagaagtcggccttttgggaaactgcgatgacaacgccgtgtcactgccctatggcaaacagcgccgccttgagattgtccgcgcgctggcgaccggcccaaagctccttctgcttgacgagcctgccgcggggatgaacccgcaggaatcctacgaacttatggacttcatcgtctcggttcgtgacaaattcaaaatttccgtgctgcttatcgaacaccacatgcaggtggtaatgggtatctgcacacggctgtacgtgcttgattatggcattaccattgccgagggaaccccgcatgagattcgtaaaaaccagaaagttattgacgcctacctgggggttgagtga

SEQ ID NO: 64492 - protein, 119 aa, Unknown
  Obtained from environmental sample
  DOMAIN (1)...(94): ABC transporter
  misc_feature (1)..(119): Xaa is any amino acid
MLGEVGLLGNCDDNAVSLPYGKQRRLEIVRALATGPKLLLLDEPAAGMNPQESYELMDFIVSVRDKFKISVLLIEHHMQVVMGICTRLYVLDYGITIAEGTPHEIRKNQKVIDAYLGVE

SEQ ID NO: 64493 - DNA, 480 bp, Unknown
  Obtained from environmental sample
  misc_feature (1)..(480): n is a, c, g, or t
gtgatgttaaaactcgaaggcctctcggtattttacggcggtattcacgccctgcgcggtatagacatggaagtccctgatggtaaaatcatcaccttaatcggcgctaacggcgccggaaaaagcactatgttaaattcgattgtcggcctggtgaaacctgagtcgggaaaaattacctggaacggcaaggatataacgcgcggcgatcccagggacattgtttctggcggcctggtgatgatacctgagggccggcgcatttttcccaatcttaccgttgacgaaaatctttccctgggcgcgtatgcccgcagcgataaagagggtataaaacaggaccgccagcgctgttttgaacttttcccgcgtcttaaagaacgccgccgccagcacgggggcactctctcaggcggcgagcagcagatgcttgccgttgccccgcggccttatgtcacgcccgaagatgctcatgcttga

SEQ ID NO: 64494 - protein, 159 aa, Unknown
  Obtained from environmental sample
  DOMAIN (28)...(159): ABC transporter
  misc_feature (1)..(159): Xaa is any amino acid
MMLKLEGLSVFYGGIHALRGIDMEVPDGKIITLIGANGAGKSTMLNSIVGLVKPESGKITWNGKDITRGDPRDIVSGGLVMIPEGRRIFPNLTVDENLSLGAYARSDKEGIKQDRQRCFELFPRLKERRRQHGGTLSGGEQQMLAVAPRPYVTPEDAHA

SEQ ID NO: 64495 - DNA, 360 bp, Unknown
  Obtained from environmental sample
  misc_feature (1)..(360): n is a, c, g, or t
gtgcccccgtgctggcggcggcgttctttaagacgcgggaaaagttcaaaacagcgctggcggtcctgttttataccctctttatcgctgcgggcatacgcgcccagggaaagattttcgtcaacggtaagattgggaaaaatgcgccggccctcaggtatcatcaccaggccgccagaaacaatgtccctgggatcgccgcgcgttatatccttgccgttccaggtaatttttcccgactcaggtttcaccaggccgacaatcgaatttaacatagtgctttttccggcgccgttagcgccgattaaggtgatgattttaccatcagggacttccatgtctataccgcgcagggcgtga

SEQ ID NO: 64496 - protein, 119 aa, Unknown
  Obtained from environmental sample
  misc_feature (1)..(119): Xaa is any amino acid
MPPCWRRRSLRRGKSSKQRWRSCFIPSLSLRAYAPRERFSSTVRLGKMRRPSGIITRPPETMSLGSPRVISLPFQVIFPDSGFTRPTIEFNIVLFPAPLAPIKVMILPSGTSMSIPRRA

SEQ ID NO: 64497 - DNA, 786 bp, Unknown
  Obtained from environmental sample
  misc_feature (1)..(786): n is a, c, g, or t
gtgaagaagccaatgttagacgcaatcacattcgccgcgcaaaaagcctcggagggcaaaaaggtcgcgcttgtcaccgtaacggaaacgacggggagttcaccggcgagcgtggggcagatgattgcagttcttgcagacggctcaagcgtcgggacggtaggaggcggcgcgtcggaacaccggatcatccagcaggctttggaagccataaaaaacggggagcgcgttttcaaattttcttttgaccacggcgaattcggaatgatctgcgggggaagcatggccgggttcggaaatgttttgggtaacgggcccagcctctgcgttttcggcggcggccacatttcccaatgccttgcgcggctggcagttaacgcagggttttccgttaccgtagtggaagaccggcccgaattcgccccgaattttgaatccgcgcgttatgtgctatgcaatcccgaggagtatgaaaaaaacgatccggcctcaaattcggattacgcggttatatgcacgcgggggcacaagaccgacgccgaggcgcttcgttactgccttacaaaaaagtttgaatatctcggcatgatcggcagcgagaataaagtcaccgcggtttttgacagtctgcgcgccgaaggcgtggagcaggcggaactagaccgtgtctacgcccccatcgggcttgatattgccgacgccctgcccgccgaaatagcggtcgcgatactcgcggaaattttattggtaaaaaacaagggcacgttacggcataagaaaagatag

SEQ ID NO: 64498 - protein, 261 aa, Unknown
  Obtained from environmental sample
  DOMAIN (13)...(84): XdhC and CoxI family
  misc_feature (1)..(261): Xaa is any amino acid
MKKPMLDAITFAAQKASEGKKVALVTVTETTGSSPASVGQMIAVLADGSSVGTVGGGASEHRIIQQALEAIKNGERVFKFSFDHGEFGMICGGSMAGFGNVLGNGPSLCVFGGGHISQCLARLAVNAGFSVTVVEDRPEFAPNFESARYVLCNPEEYEKNDPASNSDYAVICTRGHKTDAEALRYCLTKKFEYLGMIGSENKVTAVFDSLRAEGVEQAELDRVYAPIGLDIADALPAEIAVAILAEILLVKNKGTLRHKKR

SEQ ID NO: 64499 - DNA, 882 bp, Unknown
  Obtained from environmental sample
  misc_feature (1)..(882): n is a, c, g, or t
atgggagattcctcccaaattacaagagactacttcgattccctcctggtggaaatgaggcacatagacggggttctgccttccacaaaaatggaattattcggagaaaaattttctactcctattatgctggcggcgttgtcccatttaaatgagacgcaccctaacggcatgtttgaagttgcaaggggagttaaggctgtgggagcggtaatgtgggccgggatgggcgatgaggcggaacttgaagccattacggctacaggagcgaaaacaatcaagatcatcaaaccttactcggataacaagctgatatttaaaaaaattgaacacgcggttaaatgcggatgtatcgcggtgggtatggatattgatcacgccttcaataagaaagggaaatacgatactgtccataatcttgagatgaggccgaaaagcctcgatgaaataagggaatttgtaaaggcggcgaaagtgccttttattgttaagggagttttaagcgaacaggacatgcataaatgtttggacgccggtgtgcgcggtatcgtggtatctcatcatcacggacatattgattacgctctgcctccgcttcgtattcttaccgacattgccaggatcgtgagaaaacagattcctgtttttgtggactgcggcattgagcggggaatggacgctttcaaagctttggcgctcggcgcggacgctgtttctctcggacgcgttattttgccgccgttgaaagctgaaggctctgaaggagtacggaaactatttacggaaatgacggaagaactcgccggcgtaatggcggcgacaggcagccgggatattcagcacatcgatccttccctgatttggccatctgaacgtaaatag

SEQ ID NO: 64500 - protein, 293 aa, Unknown
  Obtained from environmental sample
  DOMAIN (4)...(289): FMN-dependent dehydrogenase
  misc_feature (1)..(293): Xaa is any amino acid
MGDSSQITRDYFDSLLVEMRHIDGVLPSTKMELFGEKFSTPIMLAALSHLNETHPNGMFEVARGVKAVGAVMWAGMGDEAELEAITATGAKTIKIIKPYSDNKLIFKKIEHAVKCGCIAVGMDIDHAFNKKGKYDTVHNLEMRPKSLDEIREFVKAAKVPFIVKGVLSEQDMHKCLDAGVRGIVVSHHHGHIDYALPPLRILTDIARIVRKQIPVFVDCGIERGMDAFKALALGADAVSLGRVILPPLKAEGSEGVRKLFTEMTEELAGVMAATGSRDIQHIDPSLIWPSERK

SEQ ID NO: 64501 - DNA, 1119 bp, Unknown
  Obtained from environmental sample
  misc_feature (1)..(1119): n is a, c, g, or t
atgctacaattccacatggcgttaaactgcggtatattaggactgcccaatgtgggcaaatccactattttttcagcgttatgttccgtccccgccgaggcggctaattatccgttcagcacggtcaaggcaaataccggaatcatcaacgtgcccgattcgcgccttgataaattatccgctatttttgtgcccgataggacaatacccgcgaccgtcgaatttgtcgatatcgccggactggtaaaaggcgcgtccaggggagaggggcttggcaaccaattcctttcacacatccgcgacgcttcggtttacgcccatgttgtccgctgttttgaaaacgccgatgtaatccacgtaagcgacaaactcgatcccgcgtccgatatcgaaacaatcgacattgaactggctcttgccgacatgcagacactcgctaaacggcgcgagcgcgcggagaagactttaaaaaatcaagccgaaaagaaaaactccgagtttgtcatttccatacttgataagatcggacccgctctggaaaacgcgcagcctatccgctcgcttggtttaaacgatgaagaaaaagccgcaatttacgactgccattttatcaccgcaaagccccagctttatgtttgcaatgttgatgaagcgggcattaaatccggcaacgccttgaccgaagttgtaaaaaaacgcgcgcaaagcgaaggaacagaagcggtatgcatctgcggaaaatttgaatcggatctttgcggcatagaaagcccggaagaaaaaaaagccttccttgaagatttaggactggaagaaacagggctgtccacccttattcacagcgcgtacaaattacttggattaagaactttttttacgtcggggaaagacgagtgcagagcgtggacaatacgcgcaggggataccgcaccgaaggcggcgggagttattcacactgattttgaaaagggctttataaaagccgaagtatacacttgcgaagatattttcaaatacggaacagaagccaaaattaaggaagcgggaaaataccgtcttgaaggcagagaatatgtcgttcaggacggagacgtgatcttctttaaatttaacgtttga

SEQ ID NO: 64502 - protein, 372 aa, Unknown
  Obtained from environmental sample
  DOMAIN (8)...(173): GTPase of unknown function
  misc_feature (1)..(372): Xaa is any amino acid
MLQFHMALNCGILGLPNVGKSTIFSALCSVPAEAANYPFSTVKANTGIINVPDSRLDKLSAIFVPDRTIPATVEFVDIAGLVKGASRGEGLGNQFLSHIRDASVYAHVVRCFENADVIHVSDKLDPASDIETIDIELALADMQTLAKRRERAEKTLKNQAEKKNSEFVISILDKIGPALENAQPIRSLGLNDEEKAAIYDCHFITAKPQLYVCNVDEAGIKSGNALTEVVKKRAQSEGTEAVCICGKFESDLCGIESPEEKKAFLEDLGLEETGLSTLIHSAYKLLGLRTFFTSGKDECRAWTIRAGDTAPKAAGVIHTDFEKGFIKAEVYTCEDIFKYGTEAKIKEAGKYRLEGREYVVQDGDVIFFKFNV

SEQ ID NO: 64503 - DNA, 618 bp, Unknown
  Obtained from environmental sample
  misc_feature (1)..(618): n is a, c, g, or t
atggacaaattatcaatactcagggaaagattcggctactccgctttccgcccggggcaggaagaagtgatcgacgctattcttgccgggaaggacgcgcttgcggtaatgcctacgggagcgggaaaatccctctgctaccagattccggctcttttgcttgaggggatgacaatcgttatctctccgcttatttccctgatgaaggatcaggtgagcgcgttaaaagaagccggatgcggcgcggctttcctgaacagctctttaagcggcagggaatacatggagacaatggatgatatatcaagcggagaaattaaactgctctatatagcgcccgaacgtttgcaaaggacggatttgcctgaacttgagattaacagcgttccgcttgtggtcgttgacgaggcgcactgcgtgtcccagtgggggcatgatttcagaacgagttatctgcagatagcggattttatcagaactataaaaccgcgtcctgtagtcgcggcttttacggcgaccgctaccgttaacgtgagagaggacatacgcaagcttctggctctgcgcgatcccctggtcgtaaacacaggctttgacaggcccaaatctttattttga

SEQ ID NO: 64504 - protein, 205 aa, Unknown
  Obtained from environmental sample
  DOMAIN (13)...(176): Type III restriction enzyme, res subunit
  misc_feature (1)..(205): Xaa is any amino acid
MDKLSILRERFGYSAFRPGQEEVIDAILAGKDALAVMPTGAGKSLCYQIPALLLEGMTIVISPLISLMKDQVSALKEAGCGAAFLNSSLSGREYMETMDDISSGEIKLLYIAPERLQRTDLPELEINSVPLVVVDEAHCVSQWGHDFRTSYLQIADFIRTIKPRPVVAAFTATATVNVREDIRKLLALRDPLVVNTGFDRPKSLF

SEQ ID NO: 64505 - DNA, 1830 bp, Unknown
  Obtained from environmental sample
  misc_feature (1)..(1830): n is a, c, g, or t
atggatgaaatctttccgggccttgccagaaacggaattaaacttgtaagccccgattcctacaccgtcccgcagatggactatctggaatctttctttatcagggaaatatacccggttctcacccccctgcgtattgaggatgacaaacctctgcctttttttgaaagccgctgcataaacgccgctttcctgttaataccggatgattcctccgacacggaacaggaacgcattgtcatggtgcagattccctcctcgctcagccggatcgtctggctgcccgcagagggggacatgctccgctgggcgcttctggacgatattatgcttacatggggggggtacctgttccccggttatgatgtcaaggaaagtatgttattcaaggtaaatcgtgacgctgatttttccgttgacgaacgcagggacgaggatttcattgaagcaatggaggaggtaattgaaggcagggaaaaatcgtcgcctgtcaacatgattttttctccgggcagcggcagattaagggacgagttggcaaagcggttctccctggaaagcaatgacctgtacgagcttgaggggcctttcaaccccagcggtctggctgaattggcgggcgtcgccggtttcgaggaactgcatgaaaaagcctggaaaatacatccggctcccggctttaccgacgaagtatcagtctgggaccgcctcagccagggcgacttgatgctccattttccctaccagtcatttgatccggtaatccgtttcttccaggaggctgcgacggatccccaggttatttcaattaaaacggcgttgtaccgcacaggcgggggcacggggacttcccagcaggtttcgcctattgtgcgcgcccttgaacaggcggcccttaacggcaaacatgtgacggcgctggtggaactcaaagcccgttttgacgaggaacgcaacatatcatgggcgaaccgcctggaaaaagccggggttatagtggtgtacgggctctcgcagcttaaagtgcacgcgaaagtgacaatggtactgcggcgcgaatatgaacgcatcaggcgttatgtacatctttccaccggcaattacaatgacaagacggcaaaattatacgaagacatctgcctttttacctgtcgtgatgaaatcgcgtatgatgcaggagtgctgtttaacatgatcaccggttattcgctgagacaggcaatgcggcatctggtaatcgccccgtacagcctgaaaccgaaatttcttgaactggtggaacgcgaggcgacgcgttcaaatcaccagtattcaggcaagataatgataaaatgcaattccattacagataacgatacgattaacgccctgtaccgcgcttcccgcgcgggggtgaagattctcatttgcgtcaggggggtatgcgccctggtccccggcgttccggggctttcggaaaacatacgggttatcagcgttatagactattaccttgaacattccagaatctactactttgccaacggcggggccggggaactgtacctgtccagcgccgaccttatgcaccgcaaccttgaacgccgcgttgaaattatgtttcccgtccaggatgaaaagatacgggacgagcttcttgacgtattaaacgcgtatttcacggataattgccaggcgagggttcttgattccgcaggaacatggaaacagctcagcccgtcccgggatgaaaaaccgttccgcgtccagaaagacatgctttcccgcgccgcaagggattccgacagccccgtggcggttaagcaggaatttaccgtaagaagggcctaa

SEQ ID NO: 64506 - protein, 609 aa, Unknown
  Obtained from environmental sample
  DOMAIN (1)...(592): Polyphosphate kinase
  misc_feature (1)..(609): Xaa is any amino acid
MDEIFPGLARNGIKLVSPDSYTVPQMDYLESFFIREIYPVLTPLRIEDDKPLPFFESRCINAAFLLIPDDSSDTEQERIVMVQIPSSLSRIVWLPAEGDMLRWALLDDIMLTWGGYLFPGYDVKESMLFKVNRDADFSVDERRDEDFIEAMEEVIEGREKSSPVNMIFSPGSGRLRDELAKRFSLESNDLYELEGPFNPSGLAELAGVAGFEELHEKAWKIHPAPGFTDEVSVWDRLSQGDLMLHFPYQSFDPVIRFFQEAATDPQVISIKTALYRTGGGTGTSQQVSPIVRALEQAALNGKHVTALVELKARFDEERNISWANRLEKAGVIVVYGLSQLKVHAKVTMVLRREYERIRRYVHLSTGNYNDKTAKLYEDICLFTCRDEIAYDAGVLFNMITGYSLRQAMRHLVIAPYSLKPKFLELVEREATRSNHQYSGKIMIKCNSITDNDTINALYRASRAGVKILICVRGVCALVPGVPGLSENIRVISVIDYYLEHSRIYYFANGGAGELYLSSADLMHRNLERRVEIMFPVQDEKIRDELLDVLNAYFTDNCQARVLDSAGTWKQLSPSRDEKPFRVQKDMLSRAARDSDSPVAVKQEFTVRRA

SEQ ID NO: 64507 - DNA, 1029 bp, Unknown
  Obtained from environmental sample
  misc_feature (1)..(1029): n is a, c, g, or t
atgtttatacgttctcaattcacaccgtttaaggcgatttttcttttcttcctcaccagtttatggggatatgcgacgcctcttgtctcaatggaaaccgggggccagtctgtttggaaaggcaatggcgggtattttccccggatctactttaccgaagtgattgacgcagtcaggaaggccgaggattccatcccgtactgggcgaatacccaggccgagcaggaagccataaaccgtatcacgaccgattatacctccctgcttctgaataatgatatactcgcgttttacggacatccccgttctacgataatgggcattcttggccgtttcccgatagaagagcttgataaaaaactcaccgctcttgccgccgaatacaagtcggcgaacggcggcagaaacataataaaggcgttttatattatttttggcaccgtatggcccgaaggcgagattggcattatcaacgcggagcttcttacccgctggattgaatacgcccgggaccataatatgcttgtttttattgatcaccagattggccgttacgatcctgtcgcctccctcaagcgcatgctgccctggctgaaataccccaatgtccacctggcccttgatcccgaatggcgcacattaaagcccntggtagaaatagggtcagtaaccgcggaagaaattaacacagcgcagcaggttatggaagattatattattaaaaacaacattcccggcgagcgcatgcttgttatacaccaatttaattataaaatgatagaaaaccgaagagcggtaaaagccgatttcagcagggtgcgtcttgttcactgcgccgacggcttcggccagcccggaatgaagcgcgatacttacgcctttaacgcgcttgcgtctaacatgccggttaaagggtttaaattgttttataattttaatattcccggcgcggggtatgatgatccgattatgacgccgaaacaggtttatgaattaaatccgcggccttatgtgattatgtatcagtag

SEQ ID NO: 64508 - protein, 342 aa, Unknown
  Obtained from environmental sample
  SIGNAL (1)...(25)
  misc_feature (1)..(342): Xaa is any amino acid
MFIRSQFTPFKAIFLFFLTSLWGYATPLVSMETGGQSVWKGNGGYFPRIYFTEVIDAVRKAEDSIPYWANTQAEQEAINRITTDYTSLLLNNDILAFYGHPRSTIMGILGRFPIEELDKKLTALAAEYKSANGGRNIIKAFYIIFGTVWPEGEIGIINAELLTRWIEYARDHNMLVFIDHQIGRYDPVASLKRMLPWLKYPNVHLALDPEWRTLKPXVEIGSVTAEEINTAQQVMEDYIIKNNIPGERMLVIHQFNYKMIENRRAVKADFSRVRLVHCADGFGQPGMKRDTYAFNALASNMPVKGFKLFYNFNIPGAGYDDPIMTPKQVYELNPRPYVIMYQ

SEQ ID NO: 64509 - DNA, 567 bp, Unknown
  Obtained from environmental sample
  misc_feature (1)..(567): n is a, c, g, or t
atggaagaattggtggaatggacgcgtaaaaatcttgaagatccttttctgcatccgctgatagtgattggcgtgtttatagtacattttctggctattcacccttttcaggacggtaacggccgcctgtcgcgcgctttaaccacaatgctgcttttgaaaaaaggctatgcttatgttccgtatagttctgtcgagtcgataattgaatccgcaaaggaaggctattatcgctcgctccgccggacacaaaaaaacatccggaaaaacaaggtagattacgaaccgtggctgtcattctttttgacaactttgcaaaaacagaaaagacatcttgaagaaaagatcgccgcgataacaacagacgacacaaaactctccagaaaccagcgctcaattttggaattatttaacaaaaaacctgaatggacttccgctgaaatatccgccaagttggatataaacacagaaacagcgaagaaaagcctgcaagcattaaccgcgtacggttatcttgccaaacaaggtacgactaaaggcgcgtggtatgagcgcgtaaaacattaa

SEQ ID NO: 64510 - protein, 188 aa, Unknown
  Obtained from environmental sample
  DOMAIN (129)...(183): HTH domain
  misc_feature (1)..(188): Xaa is any amino acid
MEELVEWTRKNLEDPFLHPLIVIGVFIVHFLAIHPFQDGNGRLSRALTTMLLLKKGYAYVPYSSVESIIESAKEGYYRSLRRTQKNIRKNKVDYEPWLSFFLTTLQKQKRHLEEKIAAITTDDTKLSRNQRSILELFNKKPEWTSAEISAKLDINTETAKKSLQALTAYGYLAKQGTTKGAWYERVKH

SEQ ID NO: 64511 - DNA, 804 bp, Unknown
  Obtained from environmental sample
  misc_feature (1)..(804): n is a, c, g, or t
atgacagattcggccgagatgattgagtcggcggaaaaaagcggcaagataacaaaggatacggtgcttatcgagccgacaagcggcaatacgggcattgggcttgcgtttgtcgccgcctcaaaagggtacaagttgattttgaccatgccggaaacgatgagcgtggagcggcgcaatttattaaaagcgcttggcgcggaaattgcgcttaccccgggcaaggacggaatgaagggagcgatacgaaaagccgaggagctttcttcgcagtttgaaaacgcttttattcctcagcagtttgaaaatccggcgaatcctgaaatacacaaaaaaactacggcggaagaaatttggaaagataccgacggtcaagtggcggcgtttgtttcgggcgtgggaacgggaggaacaataacaggtgtcggcgaattcttaaaaagcaaaaacaaagacattaaaataatcgccgttgaaccttacgactctgcggtgctgtcgggcaatccgcctgctccccacaaaatacagggaattggagcgggatttgttccgtctgttttgaataccggaattatcgacgagatatacaaagtaagaaacgaagaagcgtttgaagcttcccaaaatcttgcgagaacggaaggtttgctcgtgggcatatcgtcgggagcggcggcttttgccggaacgcagatagcaaagcgtcccgagttcaaaggaaaaattgtcgtgaccattctgccggatacaggcgagagatacctttctaccgccttatacgacagcttggaaaggaaatag

SEQ ID NO: 64512 - protein, 267 aa, Unknown
  Obtained from environmental sample
  DOMAIN (1)...(251): Pyridoxal-phosphate dependent enzyme
  misc_feature (1)..(267): Xaa is any amino acid
MTDSAEMIESAEKSGKITKDTVLIEPTSGNTGIGLAFVAASKGYKLILTMPETMSVERRNLLKALGAEIALTPGKDGMKGAIRKAEELSSQFENAFIPQQFENPANPEIHKKTTAEEIWKDTDGQVAAFVSGVGTGGTITGVGEFLKSKNKDIKIIAVEPYDSAVLSGNPPAPHKIQGIGAGFVPSVLNTGIIDEIYKVRNEEAFEASQNLARTEGLLVGISSGAAAFAGTQIAKRPEFKGKIVVTILPDTGERYLSTALYDSLERK

SEQ ID NO: 64513 - DNA, 1341 bp, Unknown
  Obtained from environmental sample
  misc_feature (1)..(1341): n is a, c, g, or t
gtgagtagttttattgacagaccgcgttatgcctgttctatgggcggcgcgcttgcgacattaagagcgatacccagagcgataccgatcgtgcacgcttcggcgggatgcggacaaaatctttacatagcttacagcaacggcggagcgtatttcggcggcggatactgcggaggcaacgctatcccaagcagtaacgtaattgaacgcgacattgtattcggcggcgaagacagattacgcgaacaaatacaaaccacccttgaagttatcgacggcgatttatacatcgttctttcaggctgtatggtggaaatgataggcgacgatcttgacgctgttgtttcggaattcgccgaagaagaaaaacccgtccttgccgtgcatactcccagctttaggggaaactcttatttgggatacgatcttgtattaagcgggcttgcaaaaaaatatatcgccaaacaaacaaataaaaaggcgctcaaagtcaatgtattggggcttgttccgtctttggatgttttttgggaaggcaacttaaaagaaataaaacgcctgcttacccgtcttgggctggaagttaataccttcttcggcgaaggcgaaactttgcaagacataaaaaattcaggcgacgcctctcttaatattgtgctctccggcgtgtacggcgtacaaaccgcgcaggtctttgaagaactgcatgacattccgtacataacaacggacttgccgataggcgctcacgccacggaagattttctaaagaaggtcgccgcaaaactgaacattaaggcggacgttacaaacgaagtgataaaaagcgaaaagaaattattttacagttatatggaacgagttgcggacatttacaacgacattgatctgcaaaggtacgcgataatcgtaggcgacagcaactatgctccggcattcacaaggtttttgtccgacgagcttggctggcttcccgaattaacggttattacagatatgcttgaagacgatcaaaaagcgaaaatcgtgtcggggctggacggattaaaatccggcttaaaggcaaatgtcaaattcgatttacatacatcgtcggtaaaaagatatatcgccgaggtttgggaacgcaatcacaacgaacggtattacgactcaatgtctccggcgtttcttatcggcagtgtgttcgacagggatttggcggcgcaatttcatttcccgctgttaacggcttcgtttccggtaacaaacagggttgtgatgaataccgcttatgcgggaataaacggcggcttgcggcttacggaagacatcctaagcatactggtcgcaggaagatag

SEQ ID NO: 64514 - protein, 446 aa, Unknown
  Obtained from environmental sample
  DOMAIN (8)...(444): Nitrogenase component 1 type Oxidoreductase
  misc_feature (1)..(446): Xaa is any amino acid
MSSFIDRPRYACSMGGALATLRAIPRAIPIVHASAGCGQNLYIAYSNGGAYFGGGYCGGNAIPSSNVIERDIVFGGEDRLREQIQTTLEVIDGDLYIVLSGCMVEMIGDDLDAVVSEFAEEEKPVLAVHTPSFRGNSYLGYDLVLSGLAKKYIAKQTNKKALKVNVLGLVPSLDVFWEGNLKEIKRLLTRLGLEVNTFFGEGETLQDIKNSGDASLNIVLSGVYGVQTAQVFEELHDIPYITTDLPIGAHATEDFLKKVAAKLNIKADVTNEVIKSEKKLFYSYMERVADIYNDIDLQRYAIIVGDSNYAPAFTRFLSDELGWLPELTVITDMLEDDQKAKIVSGLDGLKSGLKANVKFDLHTSSVKRYIAEVWERNHNERYYDSMSPAFLIGSVFDRDLAAQFHFPLLTASFPVTNRVVMNTAYAGINGGLRLTEDILSILVAGR

SEQ ID NO: 64515 - DNA, 1749 bp, Unknown
  Obtained from environmental sample
  misc_feature (1)..(1749): n is a, c, g, or t
ttgggaacgcaatcacaacgaacggtattacgactcaatgtctccggcgtttcttatcggcagtgtgttcgacagggatttggcggcgcaatttcatttcccgctgttaacggcttcgtttccggtaacaaacagggttgtgatgaataccgcttatgcgggaataaacggcggcttgcggcttacggaagacatcctaagcatactggtcgcaggaagataggaggatatgtcatgaattacttaaacgcaaaatcggctcccgcgagggaagatcgtcataaaacaaatatcgctttcggcggaactgcggcaaagatgaaaagctgtctgcaaaaagattgcttcggaaaagaaggatgccttaatctttccagaagaagctttactcagacgcatggctgtcagtttacgttaagtcttgccatcataaatacaatccgcaatgcggttattgttatgcacgctcctgtcggctgcggtatttgcagtatcggaaacgtgggcgtgaataaatcatacaaacaattgcgagatccgaatgcggaaggcgttatctggctcagtacaaaccttgacgagtccgacgtaatcggcggcggcgagaaaaaattgcgcgaggcggttttatacgccgacaaggaattaagacccgacacgataatcgtggcaaacggatgcgttcccgctcttatcggcgacgacgttgacagtatactgtccgatttacaggaacaaactgcggcgattatagtgcccgtccactgcgaaggcttcaaaacaaaagtcatggcgacagcttacgacgctgtataccacggtatcctgaaaaattatatgcgccatcccaaccgtgaaaaatatatcgtagaacgcgatcttgaagaaatggtacggcagtacaagataagcaggaatgtaaatgttctgaatgtaggctcaatgagcagacccgacgaattggaacttgaaaggatactcacaggcataggactgaacgtccgttttattccatgttacgccgagcctgaagattttgaatattctcttgaaacttcgctcaatgtaagtatctgcggcactcacgacgactactttgtagagcacatcaaagagaagtacaatatcccgttccttatcgatacaatcccgattggcagaaaaaacaccgaccgctggattttgaaaatagccaaacacttcgaccttgaaaaagaagcgcagaggtatatcgagaacgaaaataaaattcttgacgcaagccttgaaaaataccgcagtgctctgaaaggcaagaaagcttttatagcgggcggagaggtgcgcattttggcgacagcggagataattcaggatctgggaatggaaatacaggggttaaaactgcatcactttgatcaatttgttgagccgatattcgacgctcttaaaaacatagacgatgtagttgtaggcgttgcgaccaatcagccgtttgaacaagcgaacctgataaaccgtcttaaacccgacgttttaattacccacacgggcggaaacaatatagcggcgaaacacggactgcctttgttcccgttattcggcccttcgtataattatatggggtattccggtgttttcgaagtagcaaggcgtcttaatcgtattttcaaaaataaccaattcaataaaaaccttgcggaaaataccgacttgcctttcaaaaaagaatggtacgccaaagacccgtttgcgtacataaaggagtaa

SEQ ID NO: 64516 - protein, 582 aa, Unknown
  Obtained from environmental sample
  DOMAIN (131)...(552): Nitrogenase component 1 type Oxidoreductase
  misc_feature (1)..(582): Xaa is any amino acid
MGTQSQRTVLRLNVSGVSYRQCVRQGFGGAISFPAVNGFVSGNKQGCDEYRLCGNKRRLAAYGRHPKHTGRRKIGGYVMNYLNAKSAPAREDRHKTNIAFGGTAAKMKSCLQKDCFGKEGCLNLSRRSFTQTHGCQFTLSLAIINTIRNAVIVMHAPVGCGICSIGNVGVNKSYKQLRDPNAEGVIWLSTNLDESDVIGGGEKKLREAVLYADKELRPDTIIVANGCVPALIGDDVDSILSDLQEQTAAIIVPVHCEGFKTKVMATAYDAVYHGILKNYMRHPNREKYIVERDLEEMVRQYKISRNVNVLNVGSMSRPDELELERILTGIGLNVRFIPCYAEPEDFEYSLETSLNVSICGTHDDYFVEHIKEKYNIPFLIDTIPIGRKNTDRWILKIAKHFDLEKEAQRYIENENKILDASLEKYRSALKGKKAFIAGGEVRILATAEIIQDLGMEIQGLKLHHFDQFVEPIFDALKNIDDVVVGVATNQPFEQANLINRLKPDVLITHTGGNNIAAKHGLPLFPLFGPSYNYMGYSGVFEVARRLNRIFKNNQFNKNLAENTDLPFKKEWYAKDPFAYIKE

SEQ ID NO: 64517 - DNA, 1323 bp, Unknown
  Obtained from environmental sample
  misc_feature (1)..(1323): n is a, c, g, or t
atggaaaagagaaaagttaagcgcgccgcggttttttatccatgtacaatgggcgtgtttatcctattgataattatcctttcttttacagcgggggcgatcaggcgcgagcttgttcttacgcttacaggcgcggtagttctggcgatatgggcatactgccttgttatgactttgcttctcgcgcttatgcaccgccaacgcgcgaaaaatatttttatccgccttgagcctgaaaagattgtacgcggcggttcgacaaacgcggtatacacggagaacaacccttcatacgccggaaaaaatatttttcagtttccgggtattcttgtccgtttaaggataattttaaaaacaaaagacggacggcgcgtaatttatgattttaaaccggaaaataaaaacaacacgcggcaaaattttcaggtaaaaaaacggggggcgtatttttccgcttatgatgaattcgccgtttttgacattttggggtttttccgtttcgcgtaccgcatacctactgttggtatcgcaagcaatgtcacaggaagcagtgtcacagcaagcagtgtcacagaaggcgcggcccgcctgcttgtcagcccggacgcgtgcgccgggtctttgcctgtcagggcgaagggcggagagacgaacaggcaggattcgcctacgcttgaaagaaccgataacctgattgagcatcggccctatgtgccgggcgatgatccgaggcgcattaactggaagctttacagccatgtcgcgtcaggggagctttttgtacgcgagggcgaaagcgagccgccgccctgttcctgcctactcattctgattgacacggaagttgacagctcgctttattctattgacgaaggacgccgggcagtagacttattatgcgaaagtgctttggcatcggcgttaggattctcttccagagacatggacgtgcttatcggctacaccggcggcggaatctttggcggcgacgaagaaagcgctcctttggattccgctcagcttgccgccgcgttggcctggcctgccgcgataaacctgcctgcttcttcctgcgagctgcctcaggctccgggcgaaacaggcgtccttgtccttgcccttccccgaaaagtaacgggcgaaacatcctcttcccaatccgctttgaacaggtttcttaacaagcggcaacaggaaactgacattgtttttgtttacaacacagatggcagaaaagcggcagaaatagaacaagaggccgcccgctgtatcagtttctattccggcaaatccggtgtacacgctactggggcaattagatga

SEQ ID NO: 64518 - protein, 440 aa, Unknown
  Obtained from environmental sample
  DOMAIN (169)...(267): Protein of unknown function DUF58
  misc_feature (1)..(440): Xaa is any amino acid
MEKRKVKRAAVFYPCTMGVFILLIIILSFTAGAIRRELVLTLTGAVVLAIWAYCLVMTLLLALMHRQRAKNIFIRLEPEKIVRGGSTNAVYTENNPSYAGKNIFQFPGILVRLRIILKTKDGRRVIYDFKPENKNNTRQNFQVKKRGAYFSAYDEFAVFDILGFFRFAYRIPTVGIASNVTGSSVTASSVTEGAARLLVSPDACAGSLPVRAKGGETNRQDSPTLERTDNLIEHRPYVPGDDPRRINWKLYSHVASGELFVREGESEPPPCSCLLILIDTEVDSSLYSIDEGRRAVDLLCESALASALGFSSRDMDVLIGYTGGGIFGGDEESAPLDSAQLAAALAWPAAINLPASSCELPQAPGETGVLVLALPRKVTGETSSSQSALNRFLNKRQQETDIVFVYNTDGRKAAEIEQEAARCISFYSGKSGVHATGAIR

SEQ ID NO: 64519 - DNA, 747 bp, Unknown
  Obtained from environmental sample
  misc_feature (1)..(747): n is a, c, g, or t
gtgtataaacgcttgctgttggtcttatttgccgggcttttgcttaacgtacatgtatttgcccaaagggtttatgatgccggcgcttccgactcaagtgtttttataaatccggggggtgaaggccagtctgagcaaagactgacaccgcccaattcaccgcctataaatttatatttctacaataatgtgcagaatcctcgtcctcctgtgcagcccgctgaaccgcccccccgtgaaccggagcctgttattgaatacaggtacatcctgccgcctgcgcctgagcccgtttacattccgctgcccccggttgaatacatgtacatcccgccgcctgcgcctgagcccgtttacattccgctgcccccggttgaatacatgtacatcccgccgcttgcgcctgagcccgtttacattccgctgcccccggttgaatacaggtatattccgccgcctccggctgaacccgtatatgttccggcgcccacgcaaatccgtgttattccgggtttaccgaatccggacagtcccaaaatataccgtttgcaagtaggttcttataccgtgcataatgccgcggatatagtggcgcagcgcataatggcggcgggtttacaggccggtattgaatattacaattcatcgaagcgggtgttcgtaccgggcgttcgcgcggaagacgcgcaaacaatagtgcaaaagcttgaattattggggtttacggaagtttggataagggattaa

SEQ ID NO: 64520 - protein, 248 aa, Unknown
  Obtained from environmental sample
  SIGNAL (1)...(21)
  misc_feature (1)..(248): Xaa is any amino acid
MYKRLLLVLFAGLLLNVHVFAQRVYDAGASDSSVFINPGGEGQSEQRLTPPNSPPINLYFYNNVQNPRPPVQPAEPPPREPEPVIEYRYILPPAPEPVYIPLPPVEYMYIPPPAPEPVYIPLPPVEYMYIPPLAPEPVYIPLPPVEYRYIPPPPAEPVYVPAPTQIRVIPGLPNPDSPKIYRLQVGSYTVHNAADIVAQRIMAAGLQAGIEYYNSSKRVFVPGVRAEDAQTIVQKLELLGFTEVWIRD

SEQ ID NO: 64521 - DNA, 1005 bp, Unknown
  Obtained from environmental sample
  misc_feature (1)..(1005): n is a, c, g, or t
atgcaggccgtccgaataacgcctgccgtgcaaaatgcgcccggtaaattcatcgacaatctgcacctgtccgtcctgtacaacataatcaacatcaaggtgaaaaagtttgtgggctttcagcgcctgggtaaaatagtgtatgtattcaaaatttccctcgtcaacaattgccccctggataagtccccgcttctgcagaataccctcaatggctgcaaggccctgattgctgaaagaaatgtttttatttttctcgttgatcttgtaatcgccgacaacctgttcgccctgggtttcatcggggtattcgccgttttcctttttctcgacttctttcaggttgcccaaaagtttgtcaacctcggcgaatttgaaggtatcgtcctcggcggcgccggagatgatcagcggggtgcgggcctcgtctataagtatggaatctatctcgtcaacaatacagtagttatgcccgcgctgcacccttctttccatttcgcggtgcatattgtcgcgcaggtagtcaaagccgaattcgttgttggtgccgtaggtaatgtcgcaggcgtaattttccttgcgcctgtcattgtccatatcggaaagaatcgtccctacagtcatgcccaaatagctgaaaataggcctcatccattcagcgtcgcggcttgcaaggtaatcattgaccgtgacaatatgtatacccttgccgggtatggcgttcaaataggccgcggcgacggacatcaatgtcttgccctcgcctgttttcatttcaacgatcttgccctggtgcagaacaatggaacccatcacctgcacgtcgtacgggcgctcgccgagattccgccttgccgcttcacgggccagggcaaaagcctccggcaaaagaatatccaggctttcgcctttttcgtaacgcccgcgcagtttttcagtctgtttcggaaattcatcggcgggcaaagccgccgcccaggactctttttcattgacagaatgtaa

SEQ ID NO: 64522 - protein, 334 aa, Unknown
  Obtained from environmental sample
  misc_feature (1)..(334): Xaa is any amino acid
MQAVRITPAVQNAPGKFIDNLHLSVLYNIINIKVKKFVGFQRLGKIVYVFKISLVNNCPLDKSPLLQNTLNGCKALIAERNVFIFLVDLVIADNLFALGFIGVFAVFLFLDFFQVAQKFVNLGEFEGIVLGGAGDDQRGAGLVYKYGIYLVNNTVVMPALHPSFHFAVHIVAQVVKAEFVVGAVGNVAGVIFLAPVIVHIGKNRPYSHAQIAENRPHPFSVAACKVIIDRDNMYTLAGYGVQIGRGDGHQCLALACFHFNDLALVQNNGTHHLHVVRALAEIPPCRFTGQGKSLRQKNIQAFAFFVTPAQFFSLFRKFIGGQSRRPGLFFIDRM

SEQ ID NO: 64523 - DNA, 738 bp, Unknown
  Obtained from environmental sample
  misc_feature (1)..(738): n is a, c, g, or t
atggcgctgttctcggttgaattcgtcaatcaattcccccacaaggccggcggtggcgtcgttcacccgatttttcaaatccttgtcaagcagaatcgcgtcacgctgttcgtaaataaattttcgctgctggttcagcacgtcgtcgtaatccagaagatgcttgcgaatctcgaagttccgttcctcgacttttttctgggcgttctctatgcttttgttcagccagggatggtaaatgggctcgccggcttccatgcctatcctcgacatgacgcccttcattttctcgccgccgaacagcctcatcaactcatcgtccatggagatgaagaatttactcctgccgggatccccctgcctgcccgaacggccccgaagctgattgtcaatacggcggctttcgtgccgctcggtgcctatgacgtacagcccgccgagcgattttacttcttcataatcctttttccatttctcgtattcttcattgtagatggcggcgtattgttcagggcttgcctgggttccggcgcgtcttctggcgcgggattcggggctgccgcccagctttatgtccgtgcctcggcccgccatattggtggcgattgtaaccgcgcccttcgcccctgcctccgcgattatcagcgcctcgcgcgcgtggttcttcgcgttcaacacctcgtggcgcacgccgcgccttgtgagcagcgtggaaatcctctccgatttttcgattga

SEQ ID NO: 64524 - protein, 245 aa, Unknown
  Obtained from environmental sample
  misc_feature (1)..(245): Xaa is any amino acid
MALFSVEFVNQFPHKAGGGVVHPIFQILVKQNRVTLFVNKFSLLVQHVVVIQKMLANLEVPFLDFFLGVLYAFVQPGMVNGLAGFHAYPRHDALHFLAAEQPHQLIVHGDEEFTPAGIPLPARTAPKLIVNTAAFVPLGAYDVQPAERFYFFIILFPFLVFFIVDGGVLFRACLGSGASSGAGFGAAAQLYVRASARHIGGDCNRALRPCLRDYQRLARVVLRVQHLVAHAAPCEQRGNPLRFFD

SEQ ID NO: 64525 - DNA, 528 bp, Unknown
  Obtained from environmental sample
  misc_feature (1)..(528): n is a, c, g, or t
atggtcgctgaactaactgaaagggagcgggtaatactggaccggctttccacggacggctcggtttcggtgggcgttctagcccgggatttggggctttcggaagttaccatcaggggcgattttaaagtcctggaagaaaagggctggatcaaccgcaaatggggcggagccgctcccgccctgcacagggatattctggaaaggcagaaggtttgccaggagcagaaaaacacgatagcaaaggccgcggcggagcttgtccgggacggggacgttatcatgatcgaagcgggcacaaccacggcgttgattgcccgctacctatccggaaagcgggacattcacatcgttacgaattcaaccctggtgttttcctatgccaggatgtttcccaatttacaaattaccatgacaggcggcgagttccgcagaagcaccgagtccatggtcggccccatagcacttgaaaccctcaaccgcctgaacgtgcggttggcctttgtcgggacagacggctttcaatag

SEQ ID NO: 64526 - protein, 175 aa, Unknown
  Obtained from environmental sample
  DOMAIN (8)...(59): HTH domain
  misc_feature (1)..(175): Xaa is any amino acid
MVAELTERERVILDRLSTDGSVSVGVLARDLGLSEVTIRGDFKVLEEKGWINRKWGGAAPALHRDILERQKVCQEQKNTIAKAAAELVRDGDVIMIEAGTTTALIARYLSGKRDIHIVTNSTLVFSYARMFPNLQITMTGGEFRRSTESMVGPIALETLNRLNVRLAFVGTDGFQ

SEQ ID NO: 64527 - DNA, 1266 bp, Unknown
  Obtained from environmental sample
  misc_feature (1)..(1266): n is a, c, g, or t
atgaaatggattgtccttgttactgccgtactcatgtacggatttatcattgtttttccggaacggaaatcgtgggcctcacttggcgcggcggttttgatgctgataatacgggcgcttactcctgtcgaagcgttggaaaatgtcaactgggttgtgctcatgatatttgtgggcagtctggttttggccgacctttttatctactcgcgggttcccgcttttattgccgattccatagtgcttcattcgccaaacgtaggctttgcaatcgtggcggttcttataatgacagggataatctcggcctttgtcgagaatgtcgccaccgtgctggtcatggcccccattgccctggccttctgccagaaactcaaactctccccaaaaatgtttatggtgggccttgcggtgatggcaaaccttcagggcacggcaacgcttgtaggcgatccgccctcgatgatctttgccgattactcaggctttaatttcaataattttttcttttatgacggcaggccctcaattttcttcgcggttcaaatcggcatgattgccggggcggtgtttttctactgcttttttgcgaaggcgggaaaggaaaaagctcaaattgaaaaggagaaaattctttctatcgttccttccattctgttgatactgatgatcgtaggacttgccgccttctcgtttgtatttaaagggctcaccctggcttcgggtatcctggtagtagcgctgggcataatcggttttatttggtttgctccccgggaggggattgccaaatcatggaagatggtgaaggaacttgactgggacacggtgttgttccttgtcgggatttttgtggttataggcgcggtcgctcaaacgggcctgctggaagaattcgcggttttcctgtcgcgtatagtcggcaataatgtgctcctgggctttttgctgatcatagcggtttccgtgttcatttccggctttgttgacaatgtgccttacatcatcgccatgttgccggttgcggcaactttggccagggagcttgccctaaagccggaactctacatgtttgcccttctgattggctcctgccttggcggaaacctaacccccttcggcgcttcggcaaacgtggtcgcggtgggcatactccgcaagcagggtgtgtcgatgaatttcggtcaatggctgaaaatcggcattcctttcaccttaatcaccaccgctgcttctgctgtctttctctggctggtgtggcgttag

SEQ ID NO: 64528 - protein, 421 aa, Unknown
  Obtained from environmental sample
  DOMAIN (28)...(420): DctM-like transporters
  misc_feature (1)..(421): Xaa is any amino acid
MKWIVLVTAVLMYGFIIVFPERKSWASLGAAVLMLIIRALTPVEALENVNWVVLMIFVGSLVLADLFIYSRVPAFIADSIVLHSPNVGFAIVAVLIMTGIISAFVENVATVLVMAPIALAFCQKLKLSPKMFMVGLAVMANLQGTATLVGDPPSMIFADYSGFNFNNFFFYDGRPSIFFAVQIGMIAGAVFFYCFFAKAGKEKAQIEKEKILSIVPSILLILMIVGLAAFSFVFKGLTLASGILVVALGIIGFIWFAPREGIAKSWKMVKELDWDTVLFLVGIFVVIGAVAQTGLLEEFAVFLSRIVGNNVLLGFLLIIAVSVFISGFVDNVPYIIAMLPVAATLARELALKPELYMFALLIGSCLGGNLTPFGASANVVAVGILRKQGVSMNFGQWLKIGIPFTLITTAASAVFLWLVWR

SEQ ID NO: 64529 - DNA, 1386 bp, Unknown
  Obtained from environmental sample
  misc_feature (1)..(1386): n is a, c, g, or t
atgagcacaacccagttgacattttccaacgcttcgacaggagtaagcgcccgtattatcagcatcaaaaccgccgcgccaagtgaggcccacgatttccgttccggaaaaacaatgataaatccgtacatgagtacggcagtaacaaggacaatccatttcatatatttaaattatcataaaatcatttataatgaaatacgcatgaaagattacccaacagctatcaacagtcctattgtagacaaatctgaccgccttaccgccctggactctctggcggcggaatctccaaaaggtcttttccgcgatttccagcaatctaccgctgagataaacaaccacattcacacgatctacagttttagcccctatagccccagcatggcggccctgctggcaaagaaagcggggcttggcgcggcaggttcagttgaccacgactccatagctgccgcggaggagatgcttgccgcctgcgcgatactgggcatcggaggctgcgcgggctttgaggtcagggtgagtttcaaaaccggcgcggatgggaaaaccagccccttcgcgtcaaggaaaatcaacaacccggattcagcgggatacgcctatatgaccgtgcagggcattccgaggcaggcgattaaaaaggcggctgaattccttgcgcccatcagggtaaaacgcctcgaacgcacaaaagcgatggccaattctgccaactccctgctattggagtcggggctttccaatattgattttgaggcggatgttttagcccaatcaaaatacgatgaggggggagaaataaccgagcgccatcttttaaaggcagtcgccgataaaatcattctgaaattcggaaaagggccggaactttgcgagggagttaagtcaaaaatgggaattacaattcctccaagacaaattgccatgttcgctgacgcaaacaatccccattacatatacgatttattgggaattttaaaaaccgaatttctcccccaaatatttatccagcctgatgaagaggagtgcattcccgcgacacaggttaccgcctttgcccaatccattgccgccattccggcctatgcgtaccttggcgatgtgggcgaatcccccacaggagataaaaaggcggagaaattcgaggacgattatattgaagaactctttgccgaaatttccaggcttggcttcagagcagttacatacatgcccccaagaaacaccagggagcagttacgcaatttaagacggctttcagccgaatggggttttatggaaatctccggtgtagatataaacagttcccgccagtcctttaactgccccgaagttttaaaaacgagttccgccatcttttggataccacctgggccatga

SEQ ID NO: 64530 - protein, 461 aa, Unknown
  Obtained from environmental sample
  misc_feature (1)..(461): Xaa is any amino acid
MSTTQLTFSNASTGVSARIISIKTAAPSEAHDFRSGKTMINPYMSTAVTRTIHFIYLNYHKIIYNEIRMKDYPTAINSPIVDKSDRLTALDSLAAESPKGLFRDFQQSTAEINNHIHTIYSFSPYSPSMAALLAKKAGLGAAGSVDHDSIAAAEEMLAACAILGIGGCAGFEVRVSFKTGADGKTSPFASRKINNPDSAGYAYMTVQGIPRQAIKKAAEFLAPIRVKRLERTKAMANSANSLLLESGLSNIDFEADVLAQSKYDEGGEITERHLLKAVADKIILKFGKGPELCEGVKSKMGITIPPRQIAMFADANNPHYIYDLLGILKTEFLPQIFIQPDEEECIPATQVTAFAQSIAAIPAYAYLGDVGESPTGDKKAEKFEDDYIEELFAEISRLGFRAVTYMPPRNTREQLRNLRRLSAEWGFMEISGVDINSSRQSFNCPEVLKTSSAIFWIPPGP

SEQ ID NO: 64531 - DNA, 1218 bp, Unknown
  Obtained from environmental sample
  misc_feature (1)..(1218): n is a, c, g, or t
atggaaaaagaaaaatttgcattacttgttagagggttctgcgttaatttatcgaaaaggccgcaaacggtaattatggattcggctgcggaagggaatatccccgctgccgccatgaaggtagaaattgaaaacagtgaagacgaagcagtcgccgcaggcatcattcaaaggacttatgaagcgtggaaaaaattaaatgcgtcatgctgcgacgacaagatcctgcttccttcctgcgtcgcgttatgcgttaaagaaagaccggaagcgctgtactggattggcccggatcttgattccgcgcgcaaacggctttccggaaaagacgcaacaccggaaattatacctgcctgtaaagcgggtgtaacagtagatcccgcagaaagggcattggttgttaaaaacaagatcgcgcttgttacaggcggagcgcagggcattggggaagaaattgtcaaaaaccttgcggcggctggtgcgcttgttttcattgctgacttaaatcttgatggcgctctaaaactggcggacacgataaatatcgaagaaggcagaaccgccgctcttgcaatcaaagtgaacgtctgcgacgaaacttccgtcgaggcaatgtttaagacaattgccgaaacagcgggcggcctggatctatgcgtcagcaacgccggagtgcttaaggccggcagtgtacttgaacagccgctctctgattttaaatttgttacggatataaactacacgggcttttttattgtctgcaagtacgccggccgccttctgcgaacccagcaccttacagcgcccgactggaaaacagacatagtccagatcaattcaaagtccggcattgaaggttcaaacaggaacggcgcttactcaggcggcaaattcggcggcttgggcctggtggcgagctttgccctggaattggttgactacaatataaaagtaaacgccatttgtccgggtaacttcctggacggccccctctggtcggatcctgaaaaggggctttttgttcaataccttaaaacaggcaaagtgccaggagccaaaaccgttgctgatgtccgttccttttacgagtcaaaggttccgatgaaaaggggctgtaccggcaaagacctgatccgctcactcttttacatcgtggaacaggaatacgaaaccgggcaggctgttcctgtaacaggagggcaagtaatgcttcactga

SEQ ID NO: 64532 - protein, 405 aa, Unknown
  Obtained from environmental sample
  DOMAIN (137)...(312): short chain dehydrogenase
  misc_feature (1)..(405): Xaa is any amino acid
MEKEKFALLVRGFCVNLSKRPQTVIMDSAAEGNIPAAAMKVEIENSEDEAVAAGIIQRTYEAWKKLNASCCDDKILLPSCVALCVKERPEALYWIGPDLDSARKRLSGKDATPEIIPACKAGVTVDPAERALVVKNKIALVTGGAQGIGEEIVKNLAAAGALVFIADLNLDGALKLADTINIEEGRTAALAIKVNVCDETSVEAMFKTIAETAGGLDLCVSNAGVLKAGSVLEQPLSDFKFVTDINYTGFFIVCKYAGRLLRTQHLTAPDWKTDIVQINSKSGIEGSNRNGAYSGGKFGGLGLVASFALELVDYNIKVNAICPGNFLDGPLWSDPEKGLFVQYLKTGKVPGAKTVADVRSFYESKVPMKRGCTGKDLIRSLFYIVEQEYETGQAVPVTGGQVMLH

SEQ ID NO: 64533 - DNA, 489 bp, Unknown
  Obtained from environmental sample
  misc_feature (1)..(489): n is a, c, g, or t
ttgctgacgcatagatccaggccgcccgctgtttcggcaattgtcttaaacattgcctcgacggaagtttcgtcgcagacgttcactttgattgcaagagcggcggttctgccttcttcgatatttatcgtgtccgccagttttagagcgccatcaagatttaagtcagcaatgaaaacaagcgcaccagccgccgcaaggtttttgacaatttcttccccaatgccctgcgctccgcctgtaacaagcgcgatcttgtttttaacaaccaatgccctttctgcgggatctactgttacacccgctttacaggcaggtataatttccggtgttgcgtcttttccggaaagccgtttgcgcgcggaatcaagatccgggccaatccagtacagcgcttccggtctttctttaacgcataacgcgacgcaggaaggaagcaggatcttgtcgtcgcagcatgacgcatttaattttttccacgcttcataa

SEQ ID NO: 64534 - protein, 162 aa, Unknown
  Obtained from environmental sample
  SIGNAL (1)...(25)
  misc_feature (1)..(162): Xaa is any amino acid
MLTHRSRPPAVSAIVLNIASTEVSSQTFTLIARAAVLPSSIFIVSASFRAPSRFKSAMKTSAPAAARFLTISSPMPCAPPVTSAILFLTTNALSAGSTVTPALQAGIISGVASFPESRLRAESRSGPIQYSASGLSLTHNATQEGSRILSSQHDAFNFFHAS

SEQ ID NO: 64535 - DNA, 519 bp, Unknown
  Obtained from environmental sample
  misc_feature (1)..(519): n is a, c, g, or t
atgaaaacaatatttgaaactgacagattatacttacgcgaatttattgatggtgattataatgatctatgtgaaattctatgcgacgaagatgttatgtatgcgtatgagcatccgttttcggatgatgaggttaaaggctggtacaataaactaattgttgggcattatgcacaatatgggtttgggttatgggccgtaatacaaaaaggaacaaatgaatttttagggcaatgcggtttaacaattcaggatctaaccgggaatggatatttggaaataggatacttgtttaaaaagaaacattggcataaaggttatgctgtggaagctgcgcttggctgtaaaaaatatgcttttgagaaattaaatgccaggagcgtgtattcaataatcagagaaagcaatatagcttcgcaaaatgtggcaaaaaaaataggaatgaaaaaaacaagtgagataatgaaacaatattacaatatggatatattgcattacatatttgaagtatctcagtga

SEQ ID NO: 64536 - protein, 172 aa, Unknown
  Obtained from environmental sample
  DOMAIN (67)...(149): Acetyltransferase (GNAT) family
  misc_feature (1)..(172): Xaa is any amino acid
MKTIFETDRLYLREFIDGDYNDLCEILCDEDVMYAYEHPFSDDEVKGWYNKLIVGHYAQYGFGLWAVIQKGTNEFLGQCGLTIQDLTGNGYLEIGYLFKKKHWHKGYAVEAALGCKKYAFEKLNARSVYSIIRESNIASQNVAKKIGMKKTSEIMKQYYNMDILHYIFEVSQ

SEQ ID NO: 64537 - DNA, 1719 bp, Unknown
  Obtained from environmental sample
  misc_feature (1)..(1719): n is a, c, g, or t
atgtcggatattaagaaattttcaggctcggatattgaaatcgcccaggcggtgtatcctgaacacgcgcttcatataaaagaccttgcgaaaaaggcgggcatccccgatgaatttatcgaataccacggaaaatataaagcaaaaatagattacggctttctaaaacaaaatcaaaacaaaaaagacggaaaacttattttggttaccgccataaatcccactcccgccggagagggaaagaccacgacgaccgtgggaatcgcggacagcctttccctaatcggcaagaaaactatggtcgctctcagggaaccttctctcgggccggtgttcggcgttaaaggcggggccgccggcggcggatgggcgcaggtaatccctatggaagacatcaacctgcactttaccggcgattttcacgctataggggcggcgaacaatctgcttgccgcaatgattgacaaccatatttatcagggtaattcgctcaacattgatccgcgaaaaattgtctggcgaagatgcatagacatgaacgaccgccagcttcgttttgtgattgacggcgtcggaggcgggactaacggcttcccgcgcgaagacggtttcgacattaccgccgcttcggaagtaatggccatcctctgcctttcttcagatatagacgatcttaaaagccgtcttgggcggattatcgtaggctatacttacggaaaaaaaaccgacaacagcgaacagcctgtaacggcggcccagcttagcgcccacggggctatggccgctcttcttaaagacgcgctaaaacctaatctcgcgcaaacgcttgaggggaatcccgccctgattcacggcgggccttttgccaatatcgctcacgggtgcaactcaatcatggcgacgcggctcgcgcttaaatgcgccgactatgtcgtaacggaagcaggcttcggggcggatttgggcgcggaaaaatttttggacatcaaatgccgctttgggggatttaaaccttcggcggtaataattgtcgcaaccatccgcgcccttaaactgcacggaggagcgggcaagaccgaacttgataaagaaaatttagacctgctggaaaaagggcttcccaatcttttacagcatgttgaaaacatcacgcaggtttacaaacttcccgccattgtcgccataaacgcctttccaaaagacacaaaggcggaactggaactggtagaaaagaaatgcagacagttaggcgtcaacgcggaaatctcggaagtttgggctaaaggcggcgagggcggaattaaacttgccgaagaagtcgtccgtctttgtgaacagccggataattttgaatttgcatacgacgtaaaccttcccatagaagaaaaaattgaggctgtcgctaaaaaaatctaccgcgccgacaatgtcgttatattgcgtgatgcgcaaaaacgcattaaacagattgaaaaactgggccttgataaagttccaatctgcatggcaaagacccagtacagtttttcagacgacgcgcttttattgggcgctccaaaaggatggcgtttaaccgtaagagacataaaaatttccgcgggggcgggatttatcgtggtatttacgggggaaatcatgaccatgccggggcttcctcctgttccgtcagcggaaaaaatcgacatagacagtacgggaaaaatttctgggcttttttaa

SEQ ID NO: 64538 - protein, 572 aa, Unknown
  Obtained from environmental sample
  DOMAIN (10)...(572): Formate--tetrahydrofolate ligase
  misc_feature (1)..(572): Xaa is any amino acid
MSDIKKFSGSDIEIAQAVYPEHALHIKDLAKKAGIPDEFIEYHGKYKAKIDYGFLKQNQNKKDGKLILVTAINPTPAGEGKTTTTVGIADSLSLIGKKTMVALREPSLGPVFGVKGGAAGGGWAQVIPMEDINLHFTGDFHAIGAANNLLAAMIDNHIYQGNSLNIDPRKIVWRRCIDMNDRQLRFVIDGVGGGTNGFPREDGFDITAASEVMAILCLSSDIDDLKSRLGRIIVGYTYGKKTDNSEQPVTAAQLSAHGAMAALLKDALKPNLAQTLEGNPALIHGGPFANIAHGCNSIMATRLALKCADYVVTEAGFGADLGAEKFLDIKCRFGGFKPSAVIIVATIRALKLHGGAGKTELDKENLDLLEKGLPNLLQHVENITQVYKLPAIVAINAFPKDTKAELELVEKKCRQLGVNAEISEVWAKGGEGGIKLAEEVVRLCEQPDNFEFAYDVNLPIEEKIEAVAKKIYRADNVVILRDAQKRIKQIEKLGLDKVPICMAKTQYSFSDDALLLGAPKGWRLTVRDIKISAGAGFIVVFTGEIMTMPGLPPVPSAEKIDIDSTGKISGLF

SEQ ID NO: 64539 - DNA, 3123 bp, Unknown
  Obtained from environmental sample
  misc_feature (1)..(3123): n is a, c, g, or t
gtggggacaacttactttgacaaagaagtggaaactatttttgaaattggcggtcaggacgcgaagtatgttctgcttaaaaacggagtgccgattgattacgcgatgaacgaagcctgttccgcgggaaccggctcctttttggaagagtccgcctccggcgacctttccattcacagcgcaaaggatataggccccattgcgttagatgcaaatgcgccgtgtaaattcggcgaacattgctctgcgtttatcaacagcgatatccgcaaggcggtacaacagggcgcgggaagggaaaatattaccgcagggatcgtctgttccatagtggcaaattatcttaaccgcgttgtaggaaaccgcaccataggcgcgaaaatatttttgcagggcggggttgcaaaaaacccggcggttcctctcgcgtttgcgatgcttttggacaaggaaatccttgttcctccttcgccagaattaatggggtgttttggggtagctcttcttgcaaaacgaaaaaacgcagacggcctgcttgcggaaaagagcatagttatagacgacattattaaccgcgagatcggttacgagagggtttttaaatgccagtcttgcgaaaatttctgctcaattcaggtgttaaacgtaaacaacaacaagtatatgtttggcggtcgctgtaacaaatataccaatatgcgcaaaaaggttgtggatgtgcctgtttttgattatgttgaaaaacggcagaagatgttgtttgatgaatatgccgctcctaaaacttcgccttccggtttttctaaaaatttctccgtaggtattccgcgcgctctttccacgcatacgctgtatccgctctattcatggtttttccacgagcttggaattaaaacgtttctttctaccgaagtggcgcatgagggggttgcgcgggcggaatcgacttactgcttccccgctgaaatcgcccacggcgcggtgcaggattgtcttgataaaaatgttgactatgttctcttgccgcacttcagggatatgccgagttatgaggagaaagtacacgccaacttctgcccgattacgcaggggcttccgtattatattgaaaaggcgtttcctgatgtagacaaaaaacgctggcttccgctggttgtaagttttaagtacggcgaggcaaaagcgctggaactgttctgcgaaatgacaaagcgccttggcattggcgaagatgaaacaaagaccgcctttgataaagcgtgggcaaaacagcagaaatattttgacgctgtgcaaaaaatgggagtggaggcgctgcaagaggcgcgcaaagccaaccgtccggttatttgtactttgggaaggccttacaatgcgtttacaccggaagcaaacatgggtattccgcgtaaatttacaacgcggggttactcgatcattccgtttgacattctgccgttccacgatgaggagattttccccaatatgtactggtattacggccagcaggacatgaaagcctccgaattgcttaaaaaagaagataatatttaccttgcgtttattaccaacttttcatgcgcgcccgattcatttattcttcactatgttaaatggctgatggggcaaaaaccattccttgtgctggaactggattcacactcggcggacgcgggaattgatacgcgcgttgaggcgttccttgatattatcgacggctaccgcgcgaagaagaacgagatagagaccgagcgttatgataacggttggcgctttgttacggagaaactggcgaccggaaaatttgatttgcgcatagacaatattaagacaggtgaaaaagtgcctattgtaggaaacaagcgcgtaaaagttctgctttccaatatgggaaatatctccaccgagtacatgggagcggcggttcgtagccttggcattaacgctgaagctttccctgtcgcaaccagcaaaaccgttcagattgcccgcgcccacgcgtccggaaaagaatgcgtgcccagccatcttgttcttggaagcgctttggaattcttcttcagcgaaaaataccgcaaggatgaattgtacctgctgtttgtgccgataactacagggccgtgcagaacagggcagtattatgtgtattatgaaaatcttttccgcgatttacacctggaaaatgtcgtgatctttattttatcttcggataattcatatacggagttaggttcggaattttcaaagcaaatgtggataggacttgtgttatccgattatcttaaagatattcaatgctcactcaaggcatgcgccgtagatccggcaaaagcccaagaggaatatgaaaaatcatggcgaagggttatgcatgccgtagagcacaatccaaaaaatcttgggaaagaactaaaacacgtcgcaagggatgtaaaaagaattccgttaaagaggaatgttcacgactgtccgcgcgttcttgtggtaggggagatttatgtgcgccgcgacgattttgccgtcggcgaacttattgatcttatgagcgaacgcggcattgtcgtaaaagttgcgggaatcagcgaatggatacattatctggattatatgcgcgagtattcacttaacaagctgattaatctgcgtccgcgcggaaaaaaattgttctccgatccgtggaaaaaacttaaaattcttcagattgaaaaattgtggaaacatcatatcgagaaaaaaacgcttgctatattaaagccgacaaaactaatacctgaaacacctcacgatatgcgccatataatgacgtttacgagggagcattttgtaaatcttgaacttaattcagagatagcggtttcctcaggttcggcggcggcggcgatggacgcgggatattcgggcattgtaaacatcagtccgtttgcctgtcttatcgggcgcgtaattgaaggtctgttcactccgtgggcgcgcgagcgcaattacccgattttatctgtggaagtagacggcaaccttctgccgccgaacattgtaaacaaacttaacatttttatggttaatgttctgcgttttaagggaggaagcgatctttcttccctggtagacggggcatcttcatga

SEQ ID NO: 64540 - protein, 1040 aa, Unknown
  Obtained from environmental sample
  DOMAIN (2)...(170): BadF/BadG/BcrA/BcrD ATPase family
  misc_feature (1)..(1040): Xaa is any amino acid
MGTTYFDKEVETIFEIGGQDAKYVLLKNGVPIDYAMNEACSAGTGSFLEESASGDLSIHSAKDIGPIALDANAPCKFGEHCSAFINSDIRKAVQQGAGRENITAGIVCSIVANYLNRVVGNRTIGAKIFLQGGVAKNPAVPLAFAMLLDKEILVPPSPELMGCFGVALLAKRKNADGLLAEKSIVIDDIINREIGYERVFKCQSCENFCSIQVLNVNNNKYMFGGRCNKYTNMRKKVVDVPVFDYVEKRQKMLFDEYAAPKTSPSGFSKNFSVGIPRALSTHTLYPLYSWFFHELGIKTFLSTEVAHEGVARAESTYCFPAEIAHGAVQDCLDKNVDYVLLPHFRDMPSYEEKVHANFCPITQGLPYYIEKAFPDVDKKRWLPLVVSFKYGEAKALELFCEMTKRLGIGEDETKTAFDKAWAKQQKYFDAVQKMGVEALQEARKANRPVICTLGRPYNAFTPEANMGIPRKFTTRGYSIIPFDILPFHDEEIFPNMYWYYGQQDMKASELLKKEDNIYLAFITNFSCAPDSFILHYVKWLMGQKPFLVLELDSHSADAGIDTRVEAFLDIIDGYRAKKNEIETERYDNGWRFVTEKLATGKFDLRIDNIKTGEKVPIVGNKRVKVLLSNMGNISTEYMGAAVRSLGINAEAFPVATSKTVQIARAHASGKECVPSHLVLGSALEFFFSEKYRKDELYLLFVPITTGPCRTGQYYVYYENLFRDLHLENVVIFILSSDNSYTELGSEFSKQMWIGLVLSDYLKDIQCSLKACAVDPAKAQEEYEKSWRRVMHAVEHNPKNLGKELKHVARDVKRIPLKRNVHDCPRVLVVGEIYVRRDDFAVGELIDLMSERGIVVKVAGISEWIHYLDYMREYSLNKLINLRPRGKKLFSDPWKKLKILQIEKLWKHHIEKKTLAILKPTKLIPETPHDMRHIMTFTREHFVNLELNSEIAVSSGSAAAAMDAGYSGIVNISPFACLIGRVIEGLFTPWARERNYPILSVEVDGNLLPPNIVNKLNIFMVNVLRFKGGSDLSSLVDGASS

SEQ ID NO: 64541 - DNA, 1098 bp, Unknown
  Obtained from environmental sample
  misc_feature (1)..(1098): n is a, c, g, or t
atgaatttcatgcaacaagaggtgcttcttaaagaaatatcaatagctcaggaaattatatcatcaaaaaacgctattttaatattgtcaaatatttatcttgaagccttaaaagataaattaattataaaagccaaagatatgaaggtaaatttttataccgaagttcctgttacagttatagaagaaggatcgacaacagtttacagcgataaatttttcggaataataagcacttttccttatgatgaaattgaattttatcaaaaagaaaatacggttattgtaaaacctgtaactcaaaaaaaacctgaatacaaacttaaatgtattgcgtcggataaatttcccgaacttcccgtttcatcggaatcgttttttgaaatgcccattaaagattttaaagacatgatacaacaaagtatttttgcagtttctgatgatgaaactcgttattttatgaacggcgttttattggaaaaaaatgaaggtaaaataaacatggtagcgacagacggaagacgtttggcttttatcggaaaaaacgcaggtaaaaaaataaatgatttttcgggagttattattccgccgaaaattctttctacagttataaaaagatcgggcgatgaaggacttataagcatttccataagcgataaaatgatatttatcaattttgcgtcttatcaattttcttcggttttaatagaaggaacattccccaactacagaaaggttatccccgaaaatcaggaattttccctttctgttaaacgcaatgaaatgttagacgctttacaccgggtttccctcatggtggaaaaaaagtcccacagaatttacctcggcatttcgcccggaagaatgtctgtttactccgaagaaagcgaaatcggagcggtagaagatgaaatcccgtgcaaatacgacggcgaaaacataacaatcgctcttaattaccgctatttggaagaaccttttaaagtgatgacagaagacgaaattaaaattcgctttagcaacgcaacaaaggcgataacgattgaaccggtcccggaaaaagactttttccacatagtaatgccgatgcagtcataa

SEQ ID NO: 64542 - protein, 365 aa, Unknown
  Obtained from environmental sample
  DOMAIN (1)...(120): DNA polymerase III beta subunit, N-terminal domain
  misc_feature (1)..(365): Xaa is any amino acid
MNFMQQEVLLKEISIAQEIISSKNAILILSNIYLEALKDKLIIKAKDMKVNFYTEVPVTVIEEGSTTVYSDKFFGIISTFPYDEIEFYQKENTVIVKPVTQKKPEYKLKCIASDKFPELPVSSESFFEMPIKDFKDMIQQSIFAVSDDETRYFMNGVLLEKNEGKINMVATDGRRLAFIGKNAGKKINDFSGVIIPPKILSTVIKRSGDEGLISISISDKMIFINFASYQFSSVLIEGTFPNYRKVIPENQEFSLSVKRNEMLDALHRVSLMVEKKSHRIYLGISPGRMSVYSEESEIGAVEDEIPCKYDGENITIALNYRYLEEPFKVMTEDEIKIRFSNATKAITIEPVPEKDFFHIVMPMQS

SEQ ID NO: 64543 - DNA, 579 bp, Unknown
  Obtained from environmental sample
  misc_feature (1)..(579): n is a, c, g, or t
atgtttttttcttctctgcggacagcgtcattcagaaatctcgccgacactgaaattcccgtaaacgccaaagatgtttttcttgtcggcgaaaacggtcagggtaaaaccaattttttggaagcgttatatttctgcgcctacgcttcgtctttccgcgccgtccacgatgcggaattggcgcgcaacggagaaaaagatttttccgccgaagtaaaactttccgattcggtaaacgaccgaatacttgtcaaatccgaaaacggaaaaaaaacagtcttcataaacggtaaaaaagccgaagaccgcaaagaacttctttccatcgctccaagcatagttttttgccacgaagacatggagtttgtcagcggaaaccacgaaagacgccgctggttttttgatcaaactttaagcctttacgaccccgtataccttgaagacctgcgccgtttccgccgagtgttaaaatcacggaacacggtactgcgggattacgcccagaaaaaacagcaggcggacagcgcaatctccgttttagacgccctcgatccgcagtttacggagtaccggacttaa

SEQ ID NO: 64544 - protein, 192 aa, Unknown
  Obtained from environmental sample
  DOMAIN (2)...(164): RecF/RecN/SMC N terminal domain
  misc_feature (1)..(192): Xaa is any amino acid
MFFSSLRTASFRNLADTEIPVNAKDVFLVGENGQGKTNFLEALYFCAYASSFRAVHDAELARNGEKDFSAEVKLSDSVNDRILVKSENGKKTVFINGKKAEDRKELLSIAPSIVFCHEDMEFVSGNHERRRWFFDQTLSLYDPVYLEDLRRFRRVLKSRNTVLRDYAQKKQQADSAISVLDALDPQFTEYRT

SEQ ID NO: 64545 - DNA, 507 bp, Unknown
  Obtained from environmental sample
  misc_feature (1)..(507): n is a, c, g, or t
ttgatggaaaaaagggaacccgccgcaaaagatttttccgtaattttcagcacgctctacgaagaagtatcgggcatttgcggcatcacagtccgctacataccgtcatggaaaagcggcagccctttttcccacttgcaagaaaggcggtctgccgaaatgtcggcggggctttcgctttcaggaccgcaccgggaccgctatcaatttacacataacggcgaagattttacgataaaagcctccacaggacaaaggcggcttttagccctattactgcggacagctcaagccctccgctattcccaagaaacccgccttaaccccatactattattggacgacgttcttttagaaatggacggcgaaaaaagacgcaagttcctatcggcgctcccctcgtatgatcaagccttttacacctttctccccgaagaaccctaccagcgttataaaaaagaggatacccttatttacaatgtaaaagaaggcggattattttgttaa

SEQ ID NO: 64546 - protein, 168 aa, Unknown
  Obtained from environmental sample
  misc_feature (1)..(168): Xaa is any amino acid
MMEKREPAAKDFSVIFSTLYEEVSGICGITVRYIPSWKSGSPFSHLQERRSAEMSAGLSLSGPHRDRYQFTHNGEDFTIKASTGQRRLLALLLRTAQALRYSQETRLNPILLLDDVLLEMDGEKRRKFLSALPSYDQAFYTFLPEEPYQRYKKEDTLIYNVKEGGLFC

SEQ ID NO: 64547 - DNA, 741 bp, Unknown
  Obtained from environmental sample
  misc_feature (1)..(741): n is a, c, g, or t
atgaatgaaatggtattgtctgaagaaaacgtaaaaacaggtctaacatcaaacgcattaaaaataatcgctattattgcgatgacaatagatcataccgccaccattctttttccccgttatagcttggatataccggcgctgtttatgcacgttatcggaagattaaccgctccaataatgatgtttcttattgtagaaggatatcatcatacaagaaatttaaaaaaatacatttttagattgtttgttttggcaattatttcacattttgcctatgcgttttgttttgataaacatttcgatacagtatttgatcaaaccagcgttatttgggcatatatgttaggtttattagcgttggtaataagagaaaatgacaaattaaaaacctggcaaaaacatttaatactttttcctgttatgtggctggcttttcccgctgattggagcactcccgccgcttttgcaattttgtatatgggattaaattacggaaattttaaaaaacaaatgatttctcttgttatntgcgtgtcggtttacgcaataatatacgcaatttttctaaattttgttcatggcttaattcaaatattgatcgtattggctattcccttattataccaatataacggtcaaagagggacatggaaaggaatgaaatggtttttttatatttattatccggcacatttggcatttttagggcttattaggatatatgttttacataaataa

SEQ ID NO: 64548 - protein, 246 aa, Unknown
  Obtained from environmental sample
  DOMAIN (12)...(150): TraX protein
  misc_feature (1)..(246): Xaa is any amino acid
MNEMVLSEENVKTGLTSNALKIIAIIAMTIDHTATILFPRYSLDIPALFMHVIGRLTAPIMMFLIVEGYHHTRNLKKYIFRLFVLAIISHFAYAFCFDKHFDTVFDQTSVIWAYMLGLLALVIRENDKLKTWQKHLILFPVMWLAFPADWSTPAAFAILYMGLNYGNFKKQMISLVXCVSVYAIIYAIFLNFVHGLIQILIVLAIPLLYQYNGQRGTWKGMKWFFYIYYPAHLAFLGLIRIYVLHK

SEQ ID NO: 64549 - DNA, 453 bp, Unknown
  Obtained from environmental sample
  misc_feature (1)..(453): n is a, c, g, or t
atgactctaaatcttgaacatagaaatatgcataaagatattgaagtaacaattatatacccggtaaaaaacaaaaccgttgaaaaacttatctcatttgtcaattcactcagtcttaaaatagaaggttatacagaagatggtataaagcagataaatgtgccggatatttattatattgaaagtgaagataaagtagctgtgattttctgtgaaaaagaatattacaaaactaaataccgcctgtatcaaattagtgaaaaattggcaggatttggctttgttcaaatcagcaaatattgcctgataaatataaacaaacttgataaaataataccgttatccaacagacgtatggaagcgataatgaaaaacgggaaacgggtttttattaccagaaaatatctttatgatataaaaagagctttacaggagaatcttgatgaaaagtga

SEQ ID NO: 64550 - protein, 150 aa, Unknown
  Obtained from environmental sample
  DOMAIN (47)...(144): LytTr DNA-binding domain
  misc_feature (1)..(150): Xaa is any amino acid
MTLNLEHRNMHKDIEVTIIYPVKNKTVEKLISFVNSLSLKIEGYTEDGIKQINVPDIYYIESEDKVAVIFCEKEYYKTKYRLYQISEKLAGFGFVQISKYCLININKLDKIIPLSNRRMEAIMKNGKRVFITRKYLYDIKRALQENLDEK

SEQ ID NO: 64551 - DNA, 1143 bp, Unknown
  Obtained from environmental sample
  misc_feature (1)..(1143): n is a, c, g, or t
atgagacccaatgacggacgcagttttattccttcctatgtgctgaactttacggcttttgccgttattacgccgtatctttcaatcatggtgcgggatttgggatacagtccggcttgggtggggatactgcttggcatttttgaaggttccgccatagcccgtccttttttatttggctattgggcggacaaacccggtaatttccgtcccccgataattgtttcntgcatactcccggccctcaccgcaattcccattgtgttatggatacatcccgttatcagcgcaattctgcttgccgttctggcctttggtttccgttccacatcctcgctgctggacgcgataactaccgttagaatcggaaaaagcggcgactacggaaagatacgggcattcggctctatatgttttatcatttttgtgctttttcttcagtggactcctgtccttacacctaacagcgcgaaacatatcgctttttggatagttataacttcgcttgccgccataatatacctgttttttcttccgcgctcctcgtttgccgctgttgaacacgaacatgaaaaaaaaggcacggaaaaggggatgccgcttctttcggtttattttatcggaggcttcgcgattatttttctgtgccgttttgccatgtcatcggtctatacattttttcccctgtacctgaccgagacgctgcgctggaacgcggttgggcttatgttcgctttatcttcggcatcggaagttccgtttatgtttttgtccgtaatcctgctccgccgttttggcgcgcttccgcttctcgctttttccgccggaggaatcgccctgcggcttttattgtgggcgcttttcccttacaagcccgtcatcatcgcggcgcagcttctccattccctgtgctatggaatctatcaccctgccgcgattcaatttatatcatcggtcttccccgccgaaaaacgcggcataggaatgcccgtatacctcgcccttgggtcagggatcccctcgcttctcggcaacatgataggcggcgttatgtggagtcaatcggataccgaccgttattgtcatttacgcgggtaccgcggcgctgggtgtgctgatntttggcgttatggggaaaaatag

SEQ ID NO: 64552 - protein, 380 aa, Unknown
  Obtained from environmental sample
  DOMAIN (13)...(363): Nucleoside H+ symporter
  misc_feature (1)..(380): Xaa is any amino acid
MRPNDGRSFIPSYVLNFTAFAVITPYLSIMVRDLGYSPAWVGILLGIFEGSAIARPFLFGYWADKPGNFRPPIIVSCILPALTAIPIVLWIHPVISAILLAVLAFGFRSTSSLLDAITTVRIGKSGDYGKIRAFGSICFIIFVLFLQWTPVLTPNSAKHIAFWIVITSLAAIIYLFFLPRSSFAAVEHEHEKKGTEKGMPLLSVYFIGGFAIIFLCRFAMSSVYTFFPLYLTETLRWNAVGLMFALSSASEVPFMFLSVILLRRFGALPLLAFSAGGIALRLLLWALFPYKPVIIAAQLLHSLCYGIYHPAAIQFISSVFPAEKRGIGMPVYLALGSGIPSLLGNMIGGVMWSQSDTDRYCHLRGYRGAGCADXWRYGEK

SEQ ID NO: 64553 - DNA, 594 bp, Unknown
  Obtained from environmental sample
  misc_feature (1)..(594): n is a, c, g, or t
atgcctgattggctttattcggatactgtcaaggagcattttaccaatccccgaaacgtccttttggaaagcgaggatactttttcgtataacgcaaggggacaaacaggaaacatcaaatgcggagatcagatgctgatgctccttaaaattgataatgatgttatcaccgatgtacgctggagaacctacggatgcgccagcgccatcgcgtcaacaagcatgttgtcggaagtaataaagggcatgaagatagaggatgcctacaaagtaaaaccggaagaccttgttgaaaaactgggcggtctgccttcatacaagatccactgttccgtgttaggtgacaaggccctccgcgccgccattgacgactatctcgccaaaaccggcaggccgggaatgttacaggaagctgtcaccgaaatttgtcactgcctgggcataaccgacaaagacattgaaaataaattccaaaacggcgcccgcagttgggaggctttacagcaggcaaccaagatcggcactgtctgcggaagctgcaaagagaaagcgctggaactgctgcacggcctggaacacatctacgggatgtaa

SEQ ID NO: 64554 - protein, 197 aa, Unknown
  Obtained from environmental sample
  DOMAIN (140)...(192): BFD-like [2Fe-2S] binding domain
  misc_feature (1)..(197): Xaa is any amino acid
MPDWLYSDTVKEHFTNPRNVLLESEDTFSYNARGQTGNIKCGDQMLMLLKIDNDVITDVRWRTYGCASAIASTSMLSEVIKGMKIEDAYKVKPEDLVEKLGGLPSYKIHCSVLGDKALRAAIDDYLAKTGRPGMLQEAVTEICHCLGITDKDIENKFQNGARSWEALQQATKIGTVCGSCKEKALELLHGLEHIYGM

SEQ ID NO: 64555 - DNA, 1182 bp, Unknown
  Obtained from environmental sample
  misc_feature (1)..(1182): n is a, c, g, or t
atgacgcgaaaagtctacgttgattacaatgccaccactcccctcagaccggaagtaaaagccgccattacagaagatctggctatcttcggaaacgcttccagcatgcacgcgtccgggcggctcgcccattcgcgggtggaagaagccagaatctgcgtggaaaaactgatgggggcgcagccgcgtaccgttttttttacatccggaggctctgaatcaaataacaccgtgtttcagacgatgagacagcttacttcagcgcctaacggcagtccgatgaaagagggccgctgcgagttcatcaccagctctattgagcatccctgcgtgcttaactccgcgaaaaacctgcaaagccttggctttaaggttaattttatacaggttgacggttacggcaaaattgacatggacgctttcaaaaaagcgttaagcgataacacccttcttgtatctgtaatgatggctaacaacgaaatagggactatacaggacattaaggaaatcgcctctcttacaaaggccgccggagcatggatgcacaccgacgcggtacaggcgctgggcaagatacccgtcaatgttgatgatcttggagtggattaccttaccgtgtcggcgcataaaatttatggaccaaagggcattggcgcgctgtatgtacggaaaggctcgccactgttccccctgatccacggcgggcatcaggaagatggcctgagggccggaacctacaacaacatcggcattcttgggtttggcaaagcggcaaaaatcgctttagacgagattgataaatatggaagggaaatcgcacttctgcgaaaccgcctgcgcgatggtcttgtaaaagcgattcccaatataaagataaacggccatcctgtggatgtgctgccaaatacattaaatgtttcatttcccggcgcggaaggtgaggcaatcctcctctccatggatctaatcggaatagaagcgtcaaccggatcggcctgcgcctcaggcagccttgagccctcccacgtgcttatggctaccggtgtggggccggaactggcccacggctcgatccgtttcagcctgggctgggggatcactgtggaagatgttgattatataatagaaacattgccgcctataatcgcccggcttagagcaatgggaggaatttatgcctga

SEQ ID NO: 64556 - protein, 393 aa, Unknown
  Obtained from environmental sample
  DOMAIN (5)...(374): Aminotransferase class-V
  misc_feature (1)..(393): Xaa is any amino acid
MTRKVYVDYNATTPLRPEVKAAITEDLAIFGNASSMHASGRLAHSRVEEARICVEKLMGAQPRTVFFTSGGSESNNTVFQTMRQLTSAPNGSPMKEGRCEFITSSIEHPCVLNSAKNLQSLGFKVNFIQVDGYGKIDMDAFKKALSDNTLLVSVMMANNEIGTIQDIKEIASLTKAAGAWMHTDAVQALGKIPVNVDDLGVDYLTVSAHKIYGPKGIGALYVRKGSPLFPLIHGGHQEDGLRAGTYNNIGILGFGKAAKIALDEIDKYGREIALLRNRLRDGLVKAIPNIKINGHPVDVLPNTLNVSFPGAEGEAILLSMDLIGIEASTGSACASGSLEPSHVLMATGVGPELAHGSIRFSLGWGITVEDVDYIIETLPPIIARLRAMGGIYA

SEQ ID NO: 64557 - DNA, 327 bp, Unknown
  Obtained from environmental sample
  misc_feature (1)..(327): n is a, c, g, or t
ttggcttgtctgcccgtgttgaacaactcccttttgaccggcattattacagacactgatattttccatttttttattaacgcttacggggctcgccacaagggtattcgcataacaattaatttcaaagacaaactcggccagtntgccgcgtttgccggcgcgttagccgcaaagggaggcaatatcgtcgcctttgtcacctccgagggtgacgatgtcgcccaccgccgcgcgaccatcaagattaccggcatcagccgcgccgccgttgaggaaatcgccgccactttggacggcgcggaaattgaggatatacgggaataa

SEQ ID NO: 64558 - protein, 108 aa, Unknown
  Obtained from environmental sample
  misc_feature (1)..(108): Xaa is any amino acid
MACLPVLNNSLLTGIITDTDIFHFFINAYGARHKGIRITINFKDKLGQXAAFAGALAAKGGNIVAFVTSEGDDVAHRRATIKITGISRAAVEEIAATLDGAEIEDIRE

SEQ ID NO: 64559 - DNA, 792 bp, Unknown
  Obtained from environmental sample
  misc_feature (1)..(792): n is a, c, g, or t
atggataacggaatcggaagcgcggtaaagtatcatttttcccggttccggggctatctgaatttcctgaaaatagacaagaaactcctggcagtttgcattctttcgcttctggtgccgattacgctcagcggaatttatttcttatccagctttataaaattaatcagagaaaacgaattccggcaggcgcagagcaatgtcgacagaatggaaaatcaactgattgacgtgctgggaaaagcggcggatattgctaacaggatatatgttaatccgcaaattcaaaaaaccgtaatccgggaatataaaagtttacttgagatatacaaagcttataatgacattaatctatttgacgattatctgcgttcatacaaggaaattgccggtatccgcctgtatgttgagaatccgacaatgatagataactcgtattttattgccgccgacgataacatccgcggcgaaaactggtataaaaccgccaaaaccctggacggcaggatgttttggaattaccgccttgattcggtacgcaggctggaatatgtttctctgatacgccagatacgggatacagttacaggtatgtatgtggggatactctgtgttaatcttgatatgggaagcatagaacaaatttgtaccgcggaattgcatgatacttttatttctctgaacggcagggtaatatatccggtaaataaaaacatggataatataaaagagacaggcagttggattattacaaattattttacgccgaagcaaaccttgaaagcattttga

SEQ ID NO: 64560 - protein, 263 aa, Unknown
  Obtained from environmental sample
  misc_feature (1)..(263): Xaa is any amino acid
MDNGIGSAVKYHFSRFRGYLNFLKIDKKLLAVCILSLLVPITLSGIYFLSSFIKLIRENEFRQAQSNVDRMENQLIDVLGKAADIANRIYVNPQIQKTVIREYKSLLEIYKAYNDINLFDDYLRSYKEIAGIRLYVENPTMIDNSYFIAADDNIRGENWYKTAKTLDGRMFWNYRLDSVRRLEYVSLIRQIRDTVTGMYVGILCVNLDMGSIEQICTAELHDTFISLNGRVIYPVNKNMDNIKETGSWIITNYFTPKQTLKAF

SEQ ID NO: 64561 - DNA, 1014 bp, Unknown
  Obtained from environmental sample
  misc_feature (1)..(1014): n is a, c, g, or t
atggttttcatactgaattctaacgcgcccaaggaaaagatcgataaatttatctcggactgggaaagtaaaggtttttctactatatatagcgtcgggacagaacataccgccgtctgcctgattggaaatacagccgaagttgacatggatcatattgtgcagacaaatgaaatcgtgtcctacggcaagcgcattacggagcagtacaaggcggtcaacaggtcggtacacgaggccagtaccattatccgcgttggtggcgctgtcgtaggcgaggggtattttaccgtcatttccgggccttgctcggtggaaaacagtgagcagatttccgagattgcccgcagcgtgaaagaaagcggggcgaaaatccttcgcggcggggcgtttaagcccagaacctcgccttacgcttttcagggcaggcaggaggaagggcttgaaatgctgcgcgccgcaaaaaaagaaaccggtcttcccgttgtctccgaaattatgaatcagacgcagattgatctgtttgaggatatagacattgtgcaggtgggcgcgaggaatatgcagaactttgatttgctgaaagaggtcggcaagtcaaaaaagcccgttcttcttaaacgaggacttgcaaacacaatcgaagaacttttgatgagcgccgaatacattgtctcggcggggaacaatcaagtcattctatgcgagcgcggcatccgcacttttgaaaccatgacacgtaatacgctggatatttccgccgttgttcttctcaagcaaaagacccatcttcccgtcattgtagacccaagccacgccgccggcgcaaggagccttgttccgccgctttcaaaagcggccttagcggcaggcgctgacggattaatgatagaagcgcataataacccggcgaaggcgttatgcgatggggcgcaatctcttgatctggagcagtttagctctctcatggaagagttaaaaaaacgcgccgtattggaaaataaaattatttaa

SEQ ID NO: 64562 - protein, 337 aa, Unknown
  Obtained from environmental sample
  DOMAIN (81)...(332): DAHP synthetase I family
  misc_feature (1)..(337): Xaa is any amino acid
MVFILNSNAPKEKIDKFISDWESKGFSTIYSVGTEHTAVCLIGNTAEVDMDHIVQTNEIVSYGKRITEQYKAVNRSVHEASTIIRVGGAVVGEGYFTVISGPCSVENSEQISEIARSVKESGAKILRGGAFKPRTSPYAFQGRQEEGLEMLRAAKKETGLPVVSEIMNQTQIDLFEDIDIVQVGARNMQNFDLLKEVGKSKKPVLLKRGLANTIEELLMSAEYIVSAGNNQVILCERGIRTFETMTRNTLDISAVVLLKQKTHLPVIVDPSHAAGARSLVPPLSKAALAAGADGLMIEAHNNPAKALCDGAQSLDLEQFSSLMEELKKRAVLENKII

SEQ ID NO: 64563 - DNA, 1416 bp, Unknown
  Obtained from environmental sample
  misc_feature (1)..(1416): n is a, c, g, or t
atgataaaaccatcactggaagaaataaaacaaatagccgaaacggggcaatacaacataatacctatgagcatggaattgtactccgatatgtttacgccgattgatatttttaaaaagctaaaaagtgtcagcggtcactgctttattcttgaaagcgcggaggacacaaaaacatggggcagatacactttcctgggatttgatccaacaatggagatcacctgtcttaacggtttgatgaatattaattcaaacgaaacaaaatctttcaagacggacaatccgaacaagcagattcaggaaattttaagcctttacaacagcgtaaaatttgactatctgcctccttttacagggggacttgtcggttactttgcctacgattacgcgaaatactgcgaaccgtcgctgaagcttgacgcctatgatgaagagtgttttaacgatgtagatttaatgctctttgacaaattaatttgttttgatcattacaaacagaaagtaattttaatcgttaacataaaaaccgataatccgcaagtccaatatgaaaaaggaaaattgaagctggaatatataaataatttaataagaacgggagcccatgaagatactccggccgcttctttaaagtctgattttaaagcgttgttttccaaagatgaatactgcaaaatggtaaacaaggcgaaagatcacataaaagaaggcgatatttttcaggttgtgctatccaatcgctatgaagcggattttgagggaagtatttttaacacataccgagtactgcggacaattaacccctcgccgtatatgttttatttcagcggaagcaatttggaaatcgccggagcgtcgcctgaaactcttgtaaaattgcataacggcagactgtttactttcccgcttgcgggaacacggcgcagaggcgcagacgaagaagaagacaccgcgcttgaaaaagaacttattgcggacgaaaaagaactcgcggaacacaatatgctggtagacctgggtagaaatgatttaggcagaatcagtaactttggatcggttgtcgtagaaaaacacatgtctatcctgcgcttttcccatgttatgcatattggctctactgtttcatcgcaaatccgcgaagacaaaacaggattggacgcggtaaattcagttcttcccgccggaacgctttccggcgcgccgaaaaatcgcgcgatgcaaattatcaacgaacaggaaaaaaacaagcgcggtatttacggcggggcaatcggataccttgatttcacaggcaacatggacacctgcatagcgattagaattgtgtacagaagaaacaccaaagtattattagaagcggggcccggaatgtcgcagacagcaatcctgaatctgagtatcaggaatgtataa

SEQ ID NO: 64564 - protein, 471 aa, Unknown
  Obtained from environmental sample
  DOMAIN (23)...(171): Anthranilate synthase component I, N terminal region
  misc_feature (1)..(471): Xaa is any amino acid
MIKPSLEEIKQIAETGQYNIIPMSMELYSDMFTPIDIFKKLKSVSGHCFILESAEDTKTWGRYTFLGFDPTMEITCLNGLMNINSNETKSFKTDNPNKQIQEILSLYNSVKFDYLPPFTGGLVGYFAYDYAKYCEPSLKLDAYDEECFNDVDLMLFDKLICFDHYKQKVILIVNIKTDNPQVQYEKGKLKLEYINNLIRTGAHEDTPAASLKSDFKALFSKDEYCKMVNKAKDHIKEGDIFQVVLSNRYEADFEGSIFNTYRVLRTINPSPYMFYFSGSNLEIAGASPETLVKLHNGRLFTFPLAGTRRRGADEEEDTALEKELIADEKELAEHNMLVDLGRNDLGRISNFGSVVVEKHMSILRFSHVMHIGSTVSSQIREDKTGLDAVNSVLPAGTLSGAPKNRAMQIINEQEKNKRGIYGGAIGYLDFTGNMDTCIAIRIVYRRNTKVLLEAGPGMSQTAILNLSIRNV

SEQ ID NO: 64565 - DNA, 429 bp, Unknown
  Obtained from environmental sample
  misc_feature (1)..(429): n is a, c, g, or t
ttgtttttttcctgttcgttgataatttgcatcgcgcgatttttcggcgcgccggaaagcgttccggcgggaagaactgaatttaccgcgtccaatcctgttttgtcttcgcggatttgcgatgaaacagtagagccaatatgcataacatgggaaaagcgcaggatagacatgtgtttttctacgacaaccgatccaaagttactgattctgcctaaatcatttctacccaggtctaccagcatattgtgttccgcgagttctttttcgtccgcaataagttctttttcaagcgcggtgtcttcttcttcgtctgcgcctctgcgccgtgttcccgcaagcgggaaagtaaacagtctgccgttatgcaattttacaagagtttcaggcgacgctccggcgatttccaaattgcttccgctgaaataa

SEQ ID NO: 64566 - protein, 142 aa, Unknown
  Obtained from environmental sample
  misc_feature (1)..(142): Xaa is any amino acid
MFFSCSLIICIARFFGAPESVPAGRTEFTASNPVLSSRICDETVEPICITWEKRRIDMCFSTTTDPKLLILPKSFLPRSTSILCSASSFSSAISSFSSAVSSSSSAPLRRVPASGKVNSLPLCNFTRVSGDAPAISKLLPLK

SEQ ID NO: 64567 - DNA, 573 bp, Unknown
  Obtained from environmental sample
  misc_feature (1)..(573): n is a, c, g, or t
atgattttattaatcgacaattacgacagtttttcatataacctttaccaacttctgggatcgataaacccaaatatagaagttgtgcgtaacgacgcgttaagcgtggatgaaatagcgaaaatggctcctgaatacattgtaatctctcctggtccgggaaaaccttcagacgctggaatttgtatcgatcttataaaaagtcttcattcgacaattccgattcttggaatctgcctcggtcatcaggcgatttttgaggcttttggcggtacggtatcatacgcaagcaagttaatgcatggtaaatcttcacaggtaaccgtggataacaacgacactttgtttaaaggacttccacagattatacaggcggcgcgttatcattcgcttgcgggaataaaatcgacattgcctgattcgttaaaaattacggcatggacgcaagacgatgaaattatggcggtgtgccacaataaatatcccgtatacggcgtacaattccaccctgagtcgatacttacacctaacgggaaaataatagcggaaaattttttaagagtgagaaggtga

SEQ ID NO: 64568 - protein, 190 aa, Unknown
  Obtained from environmental sample
  DOMAIN (22)...(171): Peptidase C26
  misc_feature (1)..(190): Xaa is any amino acid
MILLIDNYDSFSYNLYQLLGSINPNIEVVRNDALSVDEIAKMAPEYIVISPGPGKPSDAGICIDLIKSLHSTIPILGICLGHQAIFEAFGGTVSYASKLMHGKSSQVTVDNNDTLFKGLPQIIQAARYHSLAGIKSTLPDSLKITAWTQDDEIMAVCHNKYPVYGVQFHPESILTPNGKIIAENFLRVRR

SEQ ID NO: 64569 - DNA, 2778 bp, Unknown
  Obtained from environmental sample
  misc_feature (1)..(2778): n is a, c, g, or t
atgaaaacgttaggaatctgttttggcgccaccacggtgcagtatgtgaagttgaacgcctctgatgccgccgccggcgccgctatagaggccaccggacgcgtcgcccacgagggcgaccccaagggcatcgcgcttaagttgttgtcagaccccgcgttggcggacgtcgaccgcgtcgccgtcacggggcgagccttccgcgccagcgtcgacctctccgccatctccgagccggaggccgtggagtgcgccctgcgccgaatctaccaagagggcggctgcccgcacctcgtgataagctcaggcggcgagacgcagctcgtctacgtcatcaactccaagggcggggtgagttccgtccactccggcaacaagtgcgcctccggtacgggcgagttcttcctgcagcagatacgccggatggacctcacgctggaggaggcggtcgagcttgccaagcgcggcacgccccacaagatcgccgggcggtgcagcgttttctgcaagagcgactgcacccacgcgctgaacaagggcgagcctagggccaatatcgcggcggggctatgcttgatgatggcggacaagatatgcgaactcgtcaaggacatgaggggcggcaagtcggccctcatcggcggcgggtcgctcaatacggcaatggtcaacatactcaaggagcggcttggggaactggacgtccccgacaccgccgcggtgttcgaggcgtacggggcggcgctttgggccgttgataatgaatgtgtcccgcttccgaagaatctctccgatgccatccacgacgcgccgacctccttcgggcgccacgcgccgctttcggaggcgctgccgctcgtctcgttcaaagagatgaagaaggataccgtgaaagcgggcgacgagtgcgtgctggggttagacgtgggatcgaccaccactaaggcggtgctgatgaggcggaaagacaaggccgtagtagcctccatctacctgagaaccaacggcgaccccataggcgcctcgcgcaactgctacaaggccgtccgcgagcaggtcggtagcgtgaagttcgacattaccgggcttggggtcacggggtcgggtcggcagatcgccgcgctacacgcgcttaccgacaacgtcataaacgagatcatcgcccacgccaccgcggcggcttattttgacaaggacgtcgataccatatttgaaataggcgggcaggacgcgaagtacacttatctgacgggcggggtgccgtcggattacgcgatgaacgaggcctgcagcgccggcacggggtcgtttttggaagaatccgctcgcgagtctttgaacgtcaagacggaggaaatcggcgaacgggcgctcttgggcaaacagccgccaaacttcaccgaccagtgttctgcgttcatatcaagcgacatcaaaaccgccggacaggagggtatcggcaaggacgatattctggccggcctcgtctactccgtctgcctcaactacctaaaccgcgtgaaaggctcgcggcaggtgggcaggaagatattcatgcagggcggcgtgtgctacaataaggctgtgcctgtggctatggcgtcgctcatgaagcacgagatagtcgttccgcccgaacccggcctgatgggggctttcggcgtcgcaatggagactgcaaacagaatggacatcggtctgagcgcggtctccaagttcgatctcgacgaactttctaaccgcgaggcaacgcgtgagagcagttttgtctgcgccggcggcaaagagaagtgcgaccgcaagtgcgagatctcgcggatacgcgtgaacgacaaactctacccattcggcggcgtctgcaacaaatactacaacctgcgcctgcataaagaggtggacgtcgaagacctcgaccttgtggcagtccgcaacaaactcttgtttgagcaattcggcgtcatggaggggttggcgcataaaggtcacgccaagactgccgacggacacggggcgcacccgaagagtgttgggataatgcgcacattcttaacgcacgccctctacccgctctactcgaacttcttccgcgagatgggttttagggtcgtgcttgccgacgcgattgacccggagggaatcgcccgcatcgaggcggcattctgtctgccggcggaacttacgcacggcagcttcctcaacttgctcaaaaagaaaccggactacatattcctgccgcacgtctcccagatacccgtgaagaacccgtcaacccacagcaagacctgcgtctttgttcagggcgaggcctactacctgaagacgacgtttaggcacgagatagaggaggcgcggacggccatcctatcgccggtactatcctttgaacgcgactatgatcgcgcccgcgcccgccacgagttgatcaacatggcggtgtcggcaatgcacatatcccaaaagaccgccgaggccgcgttccatagggctgtggaacggcagcacgcgttcgacaacgaattgcagacctacggcaggcgggcgctagaatacttagaggccaaccccgacaccttcgggcttgtcatcttcggccgcccgtacaacagtttcgccgccgacgccaacatgggcatcccccacaaggcggcatcgcgcggctacatagtaattcccttcgacatgctccccgccggcgactacatggccgacagcaagatgtattgggggcatggggcaaaagatcatgaaagcggcgcagtttgtcaagaaaagggataa

SEQ ID NO: 64570 - protein, 925 aa, Unknown
  Obtained from environmental sample
  DOMAIN (4)...(251): BadF/BadG/BcrA/BcrD ATPase family
  misc_feature (1)..(925): Xaa is any amino acid
MKTLGICFGATTVQYVKLNASDAAAGAAIEATGRVAHEGDPKGIALKLLSDPALADVDRVAVTGRAFRASVDLSAISEPEAVECALRRIYQEGGCPHLVISSGGETQLVYVINSKGGVSSVHSGNKCASGTGEFFLQQIRRMDLTLEEAVELAKRGTPHKIAGRCSVFCKSDCTHALNKGEPRANIAAGLCLMMADKICELVKDMRGGKSALIGGGSLNTAMVNILKERLGELDVPDTAAVFEAYGAALWAVDNECVPLPKNLSDAIHDAPTSFGRHAPLSEALPLVSFKEMKKDTVKAGDECVLGLDVGSTTTKAVLMRRKDKAVVASIYLRTNGDPIGASRNCYKAVREQVGSVKFDITGLGVTGSGRQIAALHALTDNVINEIIAHATAAAYFDKDVDTIFEIGGQDAKYTYLTGGVPSDYAMNEACSAGTGSFLEESARESLNVKTEEIGERALLGKQPPNFTDQCSAFISSDIKTAGQEGIGKDDILAGLVYSVCLNYLNRVKGSRQVGRKIFMQGGVCYNKAVPVAMASLMKHEIVVPPEPGLMGAFGVAMETANRMDIGLSAVSKFDLDELSNREATRESSFVCAGGKEKCDRKCEISRIRVNDKLYPFGGVCNKYYNLRLHKEVDVEDLDLVAVRNKLLFEQFGVMEGLAHKGHAKTADGHGAHPKSVGIMRTFLTHALYPLYSNFFREMGFRVVLADAIDPEGIARIEAAFCLPAELTHGSFLNLLKKKPDYIFLPHVSQIPVKNPSTHSKTCVFVQGEAYYLKTTFRHEIEEARTAILSPVLSFERDYDRARARHELINMAVSAMHISQKTAEAAFHRAVERQHAFDNELQTYGRRALEYLEANPDTFGLVIFGRPYNSFAADANMGIPHKAASRGYIVIPFDMLPAGDYMADSKMYWGHGAKDHESGAVCQEKG

SEQ ID NO: 64571 - DNA, 1356 bp, Unknown
  Obtained from environmental sample
  misc_feature (1)..(1356): n is a, c, g, or t
atggggcaaaagatcatgaaagcggcgcagtttgtcaagaaaagggataaccttttcggcgtctttataacaaatttctcgtgcggccccgactcgtttatcctgagttacttccgcaacttgatgaagtctaagccgtcgctgacgcttgaactcgaccagcacaccgccgacgccggcatcgacacccgcatagaggcggcggtggacatcatgcagagttaccgacgcatcagcaaaagtttacctccggaggagacgtcgtttatccccgccgtagtcccggacaacgagatgagggtgagggccgccgacggcacattctacaacctgcgcgatcccaaggtggaattaatgctgccgtctatggggcgctacggcaccgaagcgctggccgcgatattcaggagcctcggcgtgaacgcccacgccctgcccgtcgccgacaaggaggtcttgagcatcggcaaaaagaactcgacctgcaaggagtgcgtgccgtacatcgtcaccaccggatcgttcctgcagtacgtgtgggaaaagaagaaagacccggataagatcactctattcttcatggcgacaagcgacggcccctgccgtctcggccagtactgccgggcgatagcgcaaaacatagagaacctgaaaatccccaacacggcggtgctaacgctcaccgacgaaaacggctacggcggaatgggcgcggcaagcctcctgaaaggatggcagagcattatagtctccgacgtcttcagcgacatacggagtatgcttgccgtggccgcgaaggacaaggagcaagcgctcgcgacgctcgaggagtgctggggggagttcatcagattctttgagggcagggtaggcggcggcgtcatgaagacgattgacagagtggtaaaacgcctgtccaaaataccgctgaagatgaaaccggaggatgtgcctatagtatcggtcatcggggaaatctttgtgcggcgcgacgagttctgccgcaaaaacatcaccgactacttggaatcgcacggtttcgcggccaaggtcgcgcctatcagcgagttcctatgctacagcaattacgtgctgaactccaacccgcccgacatcgaacaaacgctgaaagaacgcatccgcgtccgcctgacgtcgaaacttcaggactggtgggagaaccgaattaaggcggccatggcaaaatgcggtctgtacaaattcgaacttgtggaggtggagaagacgcttgcggcgtcgcggcacctgatagacgagcgcttgcgcggagaagcnggtgctgacggtcggccttgctctgcggaaattctgcacgactcgtctcggccgatctga

SEQ ID NO: 64572 - protein, 451 aa, Unknown
  Obtained from environmental sample
  misc_feature (1)..(451): Xaa is any amino acid
MGQKIMKAAQFVKKRDNLFGVFITNFSCGPDSFILSYFRNLMKSKPSLTLELDQHTADAGIDTRIEAAVDIMQSYRRISKSLPPEETSFIPAVVPDNEMRVRAADGTFYNLRDPKVELMLPSMGRYGTEALAAIFRSLGVNAHALPVADKEVLSIGKKNSTCKECVPYIVTTGSFLQYVWEKKKDPDKITLFFMATSDGPCRLGQYCRAIAQNIENLKIPNTAVLTLTDENGYGGMGAASLLKGWQSIIVSDVFSDIRSMLAVAAKDKEQALATLEECWGEFIRFFEGRVGGGVMKTIDRVVKRLSKIPLKMKPEDVPIVSVIGEIFVRRDEFCRKNITDYLESHGFAAKVAPISEFLCYSNYVLNSNPPDIEQTLKERIRVRLTSKLQDWWENRIKAAMAKCGLYKFELVEVEKTLAASRHLIDERLRGEAGADGRPCSAEILHDSSRPI

SEQ ID NO: 64573 - DNA, 933 bp, Unknown
  Obtained from environmental sample
  misc_feature (1)..(933): n is a, c, g, or t
atgagtttagcgcggtatactgcaaaaaagaaagcggccttttcgcatctgattaaggaaataataaaaagccgcgtgtgctatattttccttgccccgtacgcgatagtatttgccctgttctttatcgctccgcttgtggtttcggtattttacagttttacatacttcaatatcctggagccgcccaaatttatcggcctgcgcaattatatcaatcttatgttaggcgacgacgtgttcctcaaggcggtgaaaaacacctttattatggcggcggtaaccggccccataggttatattttttcatttctgttcgcgtggtttatcaatgagttgccccgctatatccgcgccgtggtaacgcttgttttttacgcgccctcaatttccggcgcggtgtacatgatatgggcgatcatcttctccggcgacgcctacggctacatcaacgggctgctgctgaatctgggcatactggatcagccggtgctatggctgaccgatcccaggtacatgatgccggttatgttagtcgtcattttatggatgagtttggggacggggtttttggcttttatagcgggccttagcaccatcgacgtgtcgctctacgaggcgggtctggtggacgggataaagaaccgctggcaggaactctggtacattaccctgcccaatatgaaggggatgctgatgttcggcgcggtcatggccattacccagtcattcggcgtcgccgacgtcaccgtggccctggcggggttcccaagcacggattacgcggcgcataccgtggtgaaccatctggttgattacggctcgcttcgttttgaaatgggttatgcgtcagcgattgcgaccctgcttttcctgaccatgatcatctgcaatacgctggtgcagaaagccttgcgccgcgtggggacatga

SEQ ID NO: 64574 - protein, 310 aa, Unknown
  Obtained from environmental sample
  DOMAIN (81)...(307): Binding-protein-dependent transport system inner membrane component
  misc_feature (1)..(310): Xaa is any amino acid
MSLARYTAKKKAAFSHLIKEIIKSRVCYIFLAPYAIVFALFFIAPLVVSVFYSFTYFNILEPPKFIGLRNYINLMLGDDVFLKAVKNTFIMAAVTGPIGYIFSFLFAWFINELPRYIRAVVTLVFYAPSISGAVYMIWAIIFSGDAYGYINGLLLNLGILDQPVLWLTDPRYMMPVMLVVILWMSLGTGFLAFIAGLSTIDVSLYEAGLVDGIKNRWQELWYITLPNMKGMLMFGAVMAITQSFGVADVTVALAGFPSTDYAAHTVVNHLVDYGSLRFEMGYASAIATLLFLTMIICNTLVQKALRRVGT

SEQ ID NO: 64575 - DNA, 531 bp, Unknown
  Obtained from environmental sample
  misc_feature (1)..(531): n is a, c, g, or t
atgccgctcgctttcgcggattacaccaactttaacacattggaagttttcgcgccggaactgcgcggcctgtggggtttcgcccgtatgcccggccttcgcaaacaggacggcagcatcgaccgctcggtgcctacgggaacccttgcctcaatgattttttccaacgcgaagagaccggaacttgcctgggaattccttaagtggtgggtcagcgccgatacacagcttcgtttcggccgcgagcttgaaagcgttatgggcgcggcggcgcggtatcccacggcgaattatgacgcttttacgcggctttcctggggttcggatcaaatgaccgtgcttagggaacagcgttcctggacggtaggcacgccggaagtgcccggcggctactatgtcagccgtcatataaccaacgcggtgcgccgtatattgaacgaaggcgaggatacgcgggaaaccctgctggattacagcataacgataaatgacgaactgctgaaaaaacgcaaggaattcggtctggagtag

SEQ ID NO: 64576 - protein, 176 aa, Unknown
  Obtained from environmental sample
  misc_feature (1)..(176): Xaa is any amino acid
MPLAFADYTNFNTLEVFAPELRGLWGFARMPGLRKQDGSIDRSVPTGTLASMIFSNAKRPELAWEFLKWWVSADTQLRFGRELESVMGAAARYPTANYDAFTRLSWGSDQMTVLREQRSWTVGTPEVPGGYYVSRHITNAVRRILNEGEDTRETLLDYSITINDELLKKRKEFGLE

SEQ ID NO: 64577 - DNA, 906 bp, Unknown
  Obtained from environmental sample
  misc_feature (1)..(906): n is a, c, g, or t
ttgacatgcggcccgataaaatcccccggacattggttaattttaaattcaatatcagcgacgatgggcgacagccttctggccctttcccagtcccaactggacgttgattatattctgataagcgcccgcggcgtgaaactgccaccggtaagggagaatttctttgtcgccttttcccacgagatacgctcgttcctggcctcgttcttcgtagattacaacaacctcggcaacgtgtatcgcaaaggcgcagatgtcgtaaacgtgtggatgcttgcagggcgcgatcaaagtacgattctgaaggggatgattgacgatacctttaccccccagacaaaaattaaagtgaatgtaaaactggtggcccccgacgcggttatgccggcggtgatagccggcatagggccggacgcggcgctgaccgtgccgcaggtcgatccggtgaattacgccgtccgccatgccgccgttgacatttcaaaattaccgggttatgaggaactgacgcgggagttttctcccagcgtccttgtacccttcggctacgcgggcgggatttacggccttccggaaacccagtacttccatgtcatgttttaccgcaaggatatttttaccgaactgaacattgacgttcccgaaacatgggatgagttgatcagcattttgcccattattcaaaagaacaacatgaacgtgggtatcccctcggtggcgaccaccgtgcaggccaatatcgacttttccaatttcctcgcgcatctgtaccagcgcaagggccgcctgtacaacgaaaacggttcccgcaccctgctggacggcgagactgccattgaggcgtttgatgtctacacgaaattttttacccattataaaactcctatagtgtataatntttaa

SEQ ID NO: 64578 - protein, 301 aa, Unknown
  Obtained from environmental sample
  misc_feature (1)..(301): Xaa is any amino acid
MTCGPIKSPGHWLILNSISATMGDSLLALSQSQLDVDYILISARGVKLPPVRENFFVAFSHEIRSFLASFFVDYNNLGNVYRKGADVVNVWMLAGRDQSTILKGMIDDTFTPQTKIKVNVKLVAPDAVMPAVIAGIGPDAALTVPQVDPVNYAVRHAAVDISKLPGYEELTREFSPSVLVPFGYAGGIYGLPETQYFHVMFYRKDIFTELNIDVPETWDELISILPIIQKNNMNVGIPSVATTVQANIDFSNFLAHLYQRKGRLYNENGSRTLLDGETAIEAFDVYTKFFTHYKTPIVYNX

SEQ ID NO: 64579 - DNA, 1197 bp, Unknown
  Obtained from environmental sample
  misc_feature (1)..(1197): n is a, c, g, or t
atgtacaatgtgtatattgaatattaccccctcccttcgcggggcatcgctatcgaacgttccttcaaaataaacggggagaccccctttctgggggccgaccggctgagctttcagcgggtctggggcgacgccgatgacgtgcgcaaggataaccagggcaacgagatccgtcccgcccaggtggaaaaaccccgctgggaaagcgcttatttccgcgattctttgggctatacgcctgagccttacgaattttattttgacgcgggggacagcgtcatccggcttgatgggataaatgagcctgtggcgctccgcgccctctgccttaaagcccctgttcccgcccaagactaccggcagtacgtacagggggtcgatacggacaattaccgcaattcggcctccggttatatgttaaagatacagggagaagacgccttataccgttccgatccttcgttatacgccatttacgaccgttcttccggagcgacggagccgcccagtgtggcaaaaataaaactcaacatgataggcggacagagctggcgcgtcgcggggcagtggattgaatgggaattctatgtgccggaaaacggcatgtacaggtttaccgtcaagggccgtcagaattacaaccgcggttttgtttcaaaccgcgcggtgttgatagacgggcaaaccccctgcacggaacttgccgccgtaccttttacctacaacaacaaatggaagctgacgacattccgcgacaacgagggggatatgctgtttcctctggaacacggccggcatagtttgcgcctgcaggtggctatgggcggcatgggcgagatgttaagcgtcatggaggaaagcgtataccgcctgaactggatctaccgcaagatactggtgctgaccggcacggaaccggacatttaccgcgattaccgcgtggacgtggtataccccgaggttatcgaggcaatggagcgggaaagcaaaatcctctataaactcgttgatgatttaaccacctattcgggcgagcgcaccgctcatgccgcggccacgctgacgctggaccgccaactggaactttttgacatgcggcccgataaaatcccccggacattggttaattttaaattcaatatcagcgacgatgggcgacagccttctggccctttcccagtcccaactggacgttga

SEQ ID NO: 64580 - protein, 398 aa, Unknown
  Obtained from environmental sample
  misc_feature (1)..(398): Xaa is any amino acid
MYNVYIEYYPLPSRGIAIERSFKINGETPFLGADRLSFQRVWGDADDVRKDNQGNEIRPAQVEKPRWESAYFRDSLGYTPEPYEFYFDAGDSVIRLDGINEPVALRALCLKAPVPAQDYRQYVQGVDTDNYRNSASGYMLKIQGEDALYRSDPSLYAIYDRSSGATEPPSVAKIKLNMIGGQSWRVAGQWIEWEFYVPENGMYRFTVKGRQNYNRGFVSNRAVLIDGQTPCTELAAVPFTYNNKWKLTTFRDNEGDMLFPLEHGRHSLRLQVAMGGMGEMLSVMEESVYRLNWIYRKILVLTGTEPDIYRDYRVDVVYPEVIEAMERESKILYKLVDDLTTYSGERTAHAAATLTLDRQLELFDMRPDKIPRTLVNFKFNISDDGRQPSGPFPVPTGR

SEQ ID NO: 64581 - DNA, 471 bp, Unknown
  Obtained from environmental sample
  misc_feature (1)..(471): n is a, c, g, or t
gtggtgatccccggctactgtaccaaacccaagcacacgcttgctaattatttctggttgccgccggacgacgcccccaaccggcagattgtaacctttcactattacgatccttacgaatttgggatagcgggcacgcgcaccgaatggggttcagatgcggataaaaacagggtcagcatggattttgccccctttaaggatatgtataccgataagaatattccggtgatcatcggggaatgcggcgcggtgcggcagttcacggacaaggcgcggcaaaacaggcttgattacctttcctgggtattcggcaaagccaaagaaaacggcctggttcccatttattgggacaacgggcttttcagcggtaacggtgaaaaattcggccttttttcccgcagcagcggccagccgaattcggcggagagcgaggcctgtatcaaggcgatgatagaagctgtaaaataa

SEQ ID NO: 64582 - protein, 156 aa, Unknown
  Obtained from environmental sample
  misc_feature (1)..(156): Xaa is any amino acid
MVIPGYCTKPKHTLANYFWLPPDDAPNRQIVTFHYYDPYEFGIAGTRTEWGSDADKNRVSMDFAPFKDMYTDKNIPVIIGECGAVRQFTDKARQNRLDYLSWVFGKAKENGLVPIYWDNGLFSGNGEKFGLFSRSSGQPNSAESEACIKAMIEAVK

SEQ ID NO: 64583 - DNA, 1680 bp, Unknown
  Obtained from environmental sample
  misc_feature (1)..(1680): n is a, c, g, or t
atgggcaagattattggcattgacctggggactactaaatcgtgtgtggccgtctttcagaggggcgagccggtggtaatcaagaatgcagagggggaacttacaaccccgtccattgtgggctttaccggcaaaggggacaggattgtcggcgcgcctgccaaaaatcagatgattaccaatccggaaaatacggtttattcaattaaaaggcttatgggcagacggtattccgaggtatcaagcgggatgaagcgggtaccttaccgcatcgtggagcaggtggatgatgtaagagtaaaaatcggcgacnaaccctatactccacaagagataaccgctttcgtactccaaaagatgaagcagactgccgaggattacctgggcgagtccgtaaccgaggcggtcattaccgttcccgcttacttcaacgacgcccagcgtcaggcgacaaaggacgccggtaagatcgcgggtctggacgtaaagcgtataatcaacgagccgaccgccgcgtctctggcctttggctttaacaaagaccaaaagaaggaaaaaactatcgctgtctacgacctggggggcggtactttcgatatttctattctggaattgggcgagggggtttttgaggtaaaatccacaaacggggatacacacttgggaggggacgatttcgaccttaaagtcctggattggctcattgaagaattcaagaaagataccggcattgaccttggcaaagatcgcatggcccttcagcggcttagggaagcttcggaaaaggcaaagagggagctttcctcaacccagactaccgaaattaacctcccctttatcaccgccgaccagaacggccccaagcatcttcaaaaaagccttacacgggcgaagttcgagcagatggtgtcggatcttttggagagaaccaaagagccctgccgcaaagccctctctgacgcggggctttcggaggatcaaattgacgaggttatccttgtcggtggttctaccagaattccggcggtgcaggcgattgtaaaagatctctttaagaaagagccaaacaagggcgtgaacccagacgaggcagtcgcggttggagccgccattcagggtggaatcctgggcggcgacgtgaggggcgtgctgctgctggacgttaccccgctttctctgggcatcgagaccctgggtggcgtgatggcgaagctcattccccggaacaccacgattcccaccagaagaagcgaaattttctctaccgctgccgatggacagaccgcggtttcaatccatgtgcttcagggcgaaagtgaaatggccgcccaaaaccatacgttgggcaagttcgatttggtcggtatccggccggagcggaagggagttccacagatagaagtaacttttagcattgacgcgaatagcgttttccatgtttcagcgaaagaccttggcaccggcaaggagcagaaggtccttatcgaaagctcttccggcctttcggacagcgaaatcgatcgcatggtaaaggaagcggacaatatgaactacgctaccggaaaaaataccagagagccgggtaacatactgttttgtccaaagtgcggtacaaaattgcgggaggggtttgttttttgtacaggatgcggtactaatttatcaatactaaataaatga

SEQ ID NO: 64584 - protein, 559 aa, Unknown
  Obtained from environmental sample
  DOMAIN (4)...(556): Hsp70 protein
  misc_feature (1)..(559): Xaa is any amino acid
MGKIIGIDLGTTKSCVAVFQRGEPVVIKNAEGELTTPSIVGFTGKGDRIVGAPAKNQMITNPENTVYSIKRLMGRRYSEVSSGMKRVPYRIVEQVDDVRVKIGDXPYTPQEITAFVLQKMKQTAEDYLGESVTEAVITVPAYFNDAQRQATKDAGKIAGLDVKRIINEPTAASLAFGFNKDQKKEKTIAVYDLGGGTFDISILELGEGVFEVKSTNGDTHLGGDDFDLKVLDWLIEEFKKDTGIDLGKDRMALQRLREASEKAKRELSSTQTTEINLPFITADQNGPKHLQKSLTRAKFEQMVSDLLERTKEPCRKALSDAGLSEDQIDEVILVGGSTRIPAVQAIVKDLFKKEPNKGVNPDEAVAVGAAIQGGILGGDVRGVLLLDVTPLSLGIETLGGVMAKLIPRNTTIPTRRSEIFSTAADGQTAVSIHVLQGESEMAAQNHTLGKFDLVGIRPERKGVPQIEVTFSIDANSVFHVSAKDLGTGKEQKVLIESSSGLSDSEIDRMVKEADNMNYATGKNTREPGNILFCPKCGTKLREGFVFCTGCGTNLSILNK

SEQ ID NO: 64585 - DNA, 420 bp, Unknown
  Obtained from environmental sample
  misc_feature (1)..(420): n is a, c, g, or t
gtgtgtatccccgtttgtggattttacctcaaaaaccccctcgcccaattccagaatagaaatatcgaaagtaccgccccccaggtcgtagacagcgatagttttttccttcttttggtctttgttaaagccaaaggccagagacgcggcggtcggctcgttgattatacgctttacgtccagacccgcgatcttaccggcgtcctttgtcgcctgacgctgggcgtcgttgaagtaagcgggaacggtaatgaccgcctcggttacggactcgcccaggtaatcctcggcagtctgcttcatcttttggagtacgaaagcggttatctcttgtggagtatagggttngtcgccgatttttactcttacatcatccacctgctccacgatgcggtaaggtacccgcttcatcccgcttga

SEQ ID NO: 64586 - protein, 139 aa, Unknown
  Obtained from environmental sample
  misc_feature (1)..(139): Xaa is any amino acid
MCIPVCGFYLKNPLAQFQNRNIESTAPQVVDSDSFFLLLVFVKAKGQRRGGRLVDYTLYVQTRDLTGVLCRLTLGVVEVSGNGNDRLGYGLAQVILGSLLHLLEYESGYLLWSIGXVADFYSYIIHLLHDAVRYPLHPA

SEQ ID NO: 64587 - DNA, 912 bp, Unknown
  Obtained from environmental sample
  misc_feature (1)..(912): n is a, c, g, or t
atgcgttgctcttggggcttgcccagcggtattgataccctttattcttataccatgaagaccgatggccccggcggcttaaaaatccttgccctggatctggatgatacccttttacactcggatctttcaatttcttacaggacaaggaatgccataaaacaagccgtagaaatgggcgtaactgtggttctggcttccgggcgggttcttgcggtaatggagcattttgcgcggcttttgggccttcataaaaagcgcggctaccttatttgcaataacggcgcgcttattctggaaacccacaccggcaacattgtccatgaagcgaaacttgacaaagaaacacttctggccgtctgcagccttgctgacgctgaaggcttcgcgttgcagatgtacgatgacaacattatgtatgtatcgcagcagaatgagtattcagacattgatcaaaaggttaccggtctgcgccaggtggtagtggaaaatttcaaggatatggccggggaaggctgttacaagcttgtaattcccggagatcctgaactcttaaaatatatggaaataattattcagacttatctggggcaaagcttaaccctttgtaccagccgtccctattttcttgaaataacgcccgaaaataccgacaagggaaccgcattggcaaaagtggcgaagattctggaagtcaggcaggaacagacgatagccatcggggattccatgaacgacgaagccatgatccgctgggcaggcataggagtggcaatggcaaacggggatgaacgcataaaaaacatggctgatgtggtaactgaacacacaaacgatgaagacggcgtagcggaagttattgaggaattttttgcaattaaaaacggacagaaagaagggggacaccaatga

SEQ ID NO: 64588 - protein, 303 aa, Unknown
  Obtained from environmental sample
  DOMAIN (27)...(263): haloacid dehalogenase-like hydrolase
  misc_feature (1)..(303): Xaa is any amino acid
MRCSWGLPSGIDTLYSYTMKTDGPGGLKILALDLDDTLLHSDLSISYRTRNAIKQAVEMGVTVVLASGRVLAVMEHFARLLGLHKKRGYLICNNGALILETHTGNIVHEAKLDKETLLAVCSLADAEGFALQMYDDNIMYVSQQNEYSDIDQKVTGLRQVVVENFKDMAGEGCYKLVIPGDPELLKYMEIIIQTYLGQSLTLCTSRPYFLEITPENTDKGTALAKVAKILEVRQEQTIAIGDSMNDEAMIRWAGIGVAMANGDERIKNMADVVTEHTNDEDGVAEVIEEFFAIKNGQKEGGHQ

SEQ ID NO: 64589 - DNA, 477 bp, Unknown
  Obtained from environmental sample
  misc_feature (1)..(477): n is a, c, g, or t
atgagtgacaactctggatcttccgaagacattcccatcagtacggttgattcgccttcggtggtattggaacttatttatcagttgaagataaaggatgtaatgaactccgcagtaatcagcgcgagaagtacagacacaatacgacgtatccagtcgatcatgcgggaaaattatatcagcggccttcccatttcggataaaagggagcttttgggcatcgtttctatcgaggacattattaaagcccttgagggcgggtatattgatgaaccagcggaagctcatatgaccaaaaatgttattgttctgcaagatgatatgcccctttcattcgcgatttcctatctgaacaagtaccgttatggccgctttccggttttanataaaaacaaggagttggtggggatcatttcttcaaaggatgtggtaaaaagcctccttgtgngaatgaaccgtgaaagtatgaggctttga

SEQ ID NO: 64590 - protein, 158 aa, Unknown
  Obtained from environmental sample
  DOMAIN (33)...(148): CBS domain pair
  misc_feature (1)..(158): Xaa is any amino acid
MSDNSGSSEDIPISTVDSPSVVLELIYQLKIKDVMNSAVISARSTDTIRRIQSIMRENYISGLPISDKRELLGIVSIEDIIKALEGGYIDEPAEAHMTKNVIVLQDDMPLSFAISYLNKYRYGRFPVLXKNKELVGIISSKDVVKSLLVXMNRESMRL

SEQ ID NO: 64591 - DNA, 573 bp, Unknown
  Obtained from environmental sample
  misc_feature (1)..(573): n is a, c, g, or t
atgaccggagcttgccggtctgcagttggaaatttcaccttctacgcagacataagagaaagaaccttcaagattcaagcgtatttgttccgtaagttcgcttactgtaagatgtttcccattcattgtttccaattatcttcgggaaacaattttctttcaaggcggttaagtaatataagcgtaatgatagcaagaactacggttgttaaggcggcgataaacattcccgccccgatggtaagccctacggcggctgtaagccaaagggaggcggctgtagtaagccctctgatattgctgccaagacggattatcgcgcccgctcccaaaaatcccataccggaaacaacctgcgccgctattcttcccgggtctccgacgcttaattgctggggaagccagattgaaagcatcataagacagcaggagccgatggcaataagtatgtgggtgcgaagccccgcaacctggcggcggcttgatcgttctattccgataataccgccggcggcaaaggcaaggcacaaacggattacaaaatcaatttccgtcataattttccttaattaa

SEQ ID NO: 64592 - protein, 190 aa, Unknown
  Obtained from environmental sample
  misc_feature (1)..(190): Xaa is any amino acid
MTGACRSAVGNFTFYADIRERTFKIQAYLFRKFAYCKMFPIHCFQLSSGNNFLSRRLSNISVMIARTTVVKAAINIPAPMVSPTAAVSQREAAVVSPLILLPRRIIAPAPKNPIPETTCAAILPGSPTLNCWGSQIESIIRQQEPMAISMWVRSPATWRRLDRSIPIIPPAAKARHKRITKSISVIIFLN

SEQ ID NO: 64593 - DNA, 435 bp, Unknown
  Obtained from environmental sample
  misc_feature (1)..(435): n is a, c, g, or t
atgacggaaattgattttgtaatccgtttgtgccttgcctttgccgccggcggtattatcggaatagaacgatcaagccgccgccaggttgcggggcttcgcacccacatacttattgccatcggctcctgctgtcttatgatgctttcaatctggcttccccagcaattaagcgtcggagacccgggaagaatagcggcgcaggttgtttccggtatgggatttttgggagcgggcgcgataatccgtcttggcagcaatatcagagggcttactacagccgcctccctttggcttacagccgccgtagggcttaccatcggggcgggaatgtttatcgccgccttaacaaccgtagttcttgctatcattacgcttatattacttaaccgccttgaaagaaaattgtttcccgaagataattggaaacaatga

SEQ ID NO: 64594 - protein, 144 aa, Unknown
  Obtained from environmental sample
  DOMAIN (10)...(138): MgtC family
  misc_feature (1)..(144): Xaa is any amino acid
MTEIDFVIRLCLAFAAGGIIGIERSSRRQVAGLRTHILIAIGSCCLMMLSIWLPQQLSVGDPGRIAAQVVSGMGFLGAGAIIRLGSNIRGLTTAASLWLTAAVGLTIGAGMFIAALTTVVLAIITLILLNRLERKLFPEDNWKQ

SEQ ID NO: 64595 - DNA, 1137 bp, Unknown
  Obtained from environmental sample
  misc_feature (1)..(1137): n is a, c, g, or t
ttggaaacaatgaatgggaaacatcttacagtaagcgaacttacggaacaaatacgcttgaatcttgaaggttctttctcttatgtctgcgtagaaggtgaaatttccaactgcagaccggcaagctccggtcatctttatttcagtttaaaagattcaggcgcaaaaattgacgccataatgtttaaaaataagttaagaaccataaattttgaaccaaaagacggaatgttaatgcgcgtgcgcggaagtctttccgtgtacgctccgcgaggctcttattccattgtctgcgaagaaatggaaatcgcgggggcgggcgaaattctcgccatgctggaaaaaagaaaacaaaaactcgcggcggaaggtctttttgacgaagaaaaaaaacgccccctgccccgctttccggcaactgtcggcgttgtaagttctccaacgggagcggcgttacgtgacattttaaatatactggcaaggcgcgctcccggtatcaaggtgataattcttccggctcccgtacagggagacgaggcggcttcgttaattgcggcgagaatcaagcaggcaaaccaatggcatcttgccgatgttttaatcgtgggaagaggcggaggttctcttgaagaccttttgcccttctccgacgaggaagttgtccgcgccgtagcaaaatcaaaaatacccacagtcagcgcggtggggcatgaaattgactgggcgttatgtgattattcggcggatttgcgcgcgcctactccttccgccgccgcggaactgctgattcccgataaaacggagttacggcagaggacggacgatatggaaaactttttgcggaggggattggagcgtctcctgaccgaccagtatcaggaactggattattgcgggcagagattggacgagctgctgcagagaattctggagaaaaacagagagaactgccgttttctggcggacagactgaccgacctcaatcctttgcaggtcttgcagcgcggcttcacactgacggagaaagacggcaagccggtggcgtcaattaaagaaattaagaaagacgatttactgagtgtccggtttaaggacggatgtgcgaaagtttgtgtggaaaaaacgggacgtttttag

SEQ ID NO: 64596 - protein, 378 aa, Unknown
  Obtained from environmental sample
  DOMAIN (29)...(104): OB-fold nucleic acid binding domain
  misc_feature (1)..(378): Xaa is any amino acid
METMNGKHLTVSELTEQIRLNLEGSFSYVCVEGEISNCRPASSGHLYFSLKDSGAKIDAIMFKNKLRTINFEPKDGMLMRVRGSLSVYAPRGSYSIVCEEMEIAGAGEILAMLEKRKQKLAAEGLFDEEKKRPLPRFPATVGVVSSPTGAALRDILNILARRAPGIKVIILPAPVQGDEAASLIAARIKQANQWHLADVLIVGRGGGSLEDLLPFSDEEVVRAVAKSKIPTVSAVGHEIDWALCDYSADLRAPTPSAAAELLIPDKTELRQRTDDMENFLRRGLERLLTDQYQELDYCGQRLDELLQRILEKNRENCRFLADRLTDLNPLQVLQRGFTLTEKDGKPVASIKEIKKDDLLSVRFKDGCAKVCVEKTGRF

SEQ ID NO: 64597 - DNA, 798 bp, Unknown
  Obtained from environmental sample
  misc_feature (1)..(798): n is a, c, g, or t
atgggaaacatggggacacccgaccaataccttataaacccgatttatgaaacggaaattatgagcgatgtcgccaaaaagtccgtgatgatgaaccttgtcagccaccgtccgatgaaagggccttcaataatgcttcctacgagggaaaggggcggggtaaaacttaactggttgaccgcttacggggagaaaatcgaaggcagcaaacctcatggcgcggaaagggttgaattaaaagcctatacccttgcgggcttcattccgtggtttgatgaattcgccgaggacgttttcattgatcttggggctatgtttgttgatgaattccttgaaacgtatgggcaggaatttgacaggcagtgtttgatggcagataacgatccgtttaccggggcgatgatggtcaacgatgtaacggaggtaacgattgccggaaacacaatagacaaattgacgtggaaggatttccgcgacagcgtttacaaagtccctgccgaagaacgcaaagattgcgcgtggttcatcaatgagacggtactcaatcacatagccaacattgaagacacgacaggccgcccgatatggcgccgtccgacagaagcaatgcccggtaaacttgacctgtatccttatcacgaagtttcaattttaccgcaaattgccgacatcgaggcgggagaagtatttgcgatttttatgaacccgaaacggattattcacggcaaccgtaagggtattgaactcaagcggtatgatcagacgactgaagcgatggaatacggagaaattttttga

SEQ ID NO: 64598 - protein, 265 aa, Unknown
  Obtained from environmental sample
  DOMAIN (8)...(264): Phage capsid family
  misc_feature (1)..(265): Xaa is any amino acid
MGNMGTPDQYLINPIYETEIMSDVAKKSVMMNLVSHRPMKGPSIMLPTRERGGVKLNWLTAYGEKIEGSKPHGAERVELKAYTLAGFIPWFDEFAEDVFIDLGAMFVDEFLETYGQEFDRQCLMADNDPFTGAMMVNDVTEVTIAGNTIDKLTWKDFRDSVYKVPAEERKDCAWFINETVLNHIANIEDTTGRPIWRRPTEAMPGKLDLYPYHEVSILPQIADIEAGEVFAIFMNPKRIIHGNRKGIELKRYDQTTEAMEYGEIF

SEQ ID NO: 64599 - DNA, 696 bp, Unknown
  Obtained from environmental sample
  misc_feature (1)..(696): n is a, c, g, or t
atgattattagaacgaaaagcggggaatttcacgaggcgaattcatcggttctgttggattttcttggcgtgaaaaagacggcggcggggatacaaaaagtctctgctgatgtggtgctggtttcgggcgtaccttttcacctaacggcagaaaatgaaaatgagaaaggttatccgtggacgttatcaacctatgaccttgaccgtttcggggaaaggatagatccgactggttgggatttttcgcagtatgttaaaaaccctattgtggagtgggcgcataggtttgatattccggcaatcggcaaaattgaggggctggcgattgatgacaaggggcttcatggctctgttgtcttcaatgacaaagaatacgaccaattcggttggggtatcgggcagcgcgtaaaggctggcgttatccgcgccggttcggtgggctttcgtgttttggagattgaaattccgtcaaaagatgatagcacggacggtacaacgctcattttccgtaaacaggaattgcttgaattttctatctgcaatgttccggctaatccgtgggctttagtaaagcccaatgctttggcaaaggcaaagagcaatgaacaagcgccaacagagtcagcgataacaatgaacaatgaagacggctctaatgctgccccattttggggcggcttaataaataacttatag

SEQ ID NO: 64600 - protein, 231 aa, Unknown
  Obtained from environmental sample
  DOMAIN (44)...(201): Caudovirus prohead protease
  misc_feature (1)..(231): Xaa is any amino acid
MIIRTKSGEFHEANSSVLLDFLGVKKTAAGIQKVSADVVLVSGVPFHLTAENENEKGYPWTLSTYDLDRFGERIDPTGWDFSQYVKNPIVEWAHRFDIPAIGKIEGLAIDDKGLHGSVVFNDKEYDQFGWGIGQRVKAGVIRAGSVGFRVLEIEIPSKDDSTDGTTLIFRKQELLEFSICNVPANPWALVKPNALAKAKSNEQAPTESAITMNNEDGSNAAPFWGGLINNL

SEQ ID NO: 64601 - DNA, 717 bp, Unknown
  Obtained from environmental sample
  misc_feature (1)..(717): n is a, c, g, or t
atgcagaggggaactttagtagttagcagggcggttaataaccactcgtactacaaaaagcgttttgaagctctgggatttcctgacgtaacggttacggctcttgaaaaggacgccctttcctctcttatccgtaaacaaaaaccaaaacaattatttatgggagcgagattttatcaatgctgtacgccgtttttaatggggcaattacataaagattttcctaaaataaatatgactgctgtttgtatcggcgaataccctgccgaacttggtatgtattttattgtaaacggaattaaatcatactttacaagttttgagggccttgaccaattctataccggaattgacgaggtaagaaaaggcaatggttatatttcccctgcggcaatggctcgtatggatatgaggcaaactttcataatgcctgccggggatataactggcagggaaagggaagtaatacggcttatatgctgcggctataaggatttggaaattggcgataccctgcacatttcgagaaggactgtagatactcacaaaacaaatatatttaccttgttaaatgtccgtaatgctgtcgaactggttattgccgccctgacgcttaaaattgtcaatctcgatgagctttatttctacccaaaagattatacgttaaatcctttaccggatacaaaaattaagaggagagaaaaaaatgattattag

SEQ ID NO: 64602 - protein, 238 aa, Unknown
  Obtained from environmental sample
  DOMAIN (145)...(202): Bacterial regulatory proteins, luxR family
  misc_feature (1)..(238): Xaa is any amino acid
MQRGTLVVSRAVNNHSYYKKRFEALGFPDVTVTALEKDALSSLIRKQKPKQLFMGARFYQCCTPFLMGQLHKDFPKINMTAVCIGEYPAELGMYFIVNGIKSYFTSFEGLDQFYTGIDEVRKGNGYISPAAMARMDMRQTFIMPAGDITGREREVIRLICCGYKDLEIGDTLHISRRTVDTHKTNIFTLLNVRNAVELVIAALTLKIVNLDELYFYPKDYTLNPLPDTKIKRREKNDY

SEQ ID NO: 64603 - DNA, 1254 bp, Unknown
  Obtained from environmental sample
  misc_feature (1)..(1254): n is a, c, g, or t
gtgaacatctttgagcgacttttaccaaaccgcaagcgacaaaaaagcggtgcttcgttaggcgaaaaaagttttgctaattcccgtttttccttgacttcggacgaggactttactaatttatatatagaccccttcacagacacttatctttgcagcgcatgggtgaatattgcggttaatatcttaatccgtaatgttgcccgtgcggatttcattctcgaaagagacgggattgagttaaaaaacggtcccctctattccctgttccaccgaccgaatgagtatttaagccgtttcgatttgtggaaagagactgccgcatggtggttattagagggtgaggcgttttggtggttcgggcctgactactccggcggaataccaaaacaactgtacattctcaatcccaggaaactccaacttgagggagaggggttggacgtgcaggattgtgtcgcaaataaaaaacggcgctggttctatcatgccggaaccgaattagtacctatcttttctgatgagcttgtccattttagggattggaacccgtggaaccctctgcggggcgttaatcctcttgtctctttaactcttgagcttgaacaagatttttttgccaataaagccaattccatcttactcaaaaacaacgctattccccaggggcttctcaaaactgaccaaactctgcgaccggaagaagcggacgcattagaacggcggtgggaaagcaaatacggacaggcgaaggcggggcgaaaaatcgccgtgcttggcaagggaaccagttttgaagcgttaagttttaatcccgatgtggtgaaactgtttgaattaaaacgctggaacttatataccattcttgcaaagtacggcataccgccccgtgtcgcaaatatatctgacaagtcaacggctttatccggcaaagataccaaagaacaacattccgcattttggcaatacacgttaattcccctgctgagacaatttgaacaaacattagaaagccaattttttatgcgtttcaacctgaaagaaaaaggccgttttgacctttgggatataccggaactaatggaaagcgaagattcgcaaagcaggagggatattgcggaaataaacgcggggcttaaaacaataaatgaagtgcttaaagaacgtggaaaagaacctaaaccgtggggggatatttggtatagaccgaaaaatatgattgcaactaacggtaaaaatggggatggggaataa

SEQ ID NO: 64604 - protein, 417 aa, Unknown
  Obtained from environmental sample
  DOMAIN (37)...(387): Phage portal protein
  misc_feature (1)..(417): Xaa is any amino acid
MNIFERLLPNRKRQKSGASLGEKSFANSRFSLTSDEDFTNLYIDPFTDTYLCSAWVNIAVNILIRNVARADFILERDGIELKNGPLYSLFHRPNEYLSRFDLWKETAAWWLLEGEAFWWFGPDYSGGIPKQLYILNPRKLQLEGEGLDVQDCVANKKRRWFYHAGTELVPIFSDELVHFRDWNPWNPLRGVNPLVSLTLELEQDFFANKANSILLKNNAIPQGLLKTDQTLRPEEADALERRWESKYGQAKAGRKIAVLGKGTSFEALSFNPDVVKLFELKRWNLYTILAKYGIPPRVANISDKSTALSGKDTKEQHSAFWQYTLIPLLRQFEQTLESQFFMRFNLKEKGRFDLWDIPELMESEDSQSRRDIAEINAGLKTINEVLKERGKEPKPWGDIWYRPKNMIATNGKNGDGE

SEQ ID NO: 64605 - DNA, 843 bp, Unknown
  Obtained from environmental sample
  misc_feature (1)..(843): n is a, c, g, or t
gtggtttgcgtagtgatttcattatttgtcggtcttgccaattttaccaaactgctccatgaccagtatttctggggcgctctgggaaatacctttattatctggggtgttaatttcctcccccagttggggcttgccctggtgcttgccatctggttgtccgacgtcaggcttaaactgtcaggcaagggcccgttccgggcaattgtttatatgcccaacctgctgactgccgcgtcggtggctttgctcttccgcagtattttcggctacgccgcacatgtcacggccccagcgaatcaatttctgtattcattaggtattcaagacacaaaaattgatccaattaccggggagactgtaaaagaggcatttgacttcttccgtagtgtcgccttttcacggggattagtggcttttatccaatggtggatgtggtatggctataccatgatcatactcatggcggggattacttctatcccaatatcgctgtatgaatccgcgtccattgacggcgctaatagcagtcaaacaacatggtacataaccctgcctctgctccgccctataatgctctatatccttgttacgtctatgatcggcggtatgcagatgtttgacattccattcctgcttacagatatgcagggcgctcccaattataagataaggactacaactgtgtatcagtacaatattgccttgggtaggggcgctaacgattatgcctatggttccgttatttctatcggaatatttattattactattttccttgctctattaatattcttcttcttgcaggatcgtagtgaattaaagaagaagaaaggaggctga

SEQ ID NO: 64606 - protein, 280 aa, Unknown
  Obtained from environmental sample
  DOMAIN (24)...(273): Binding-protein-dependent transport system inner membrane component
  misc_feature (1)..(280): Xaa is any amino acid
MVCVVISLFVGLANFTKLLHDQYFWGALGNTFIIWGVNFLPQLGLALVLAIWLSDVRLKLSGKGPFRAIVYMPNLLTAASVALLFRSIFGYAAHVTAPANQFLYSLGIQDTKIDPITGETVKEAFDFFRSVAFSRGLVAFIQWWMWYGYTMIILMAGITSIPISLYESASIDGANSSQTTWYITLPLLRPIMLYILVTSMIGGMQMFDIPFLLTDMQGAPNYKIRTTTVYQYNIALGRGANDYAYGSVISIGIFIITIFLALLIFFFLQDRSELKKKKGG

SEQ ID NO: 64607 - DNA, 1155 bp, Unknown
  Obtained from environmental sample
  misc_feature (1)..(1155): n is a, c, g, or t
atgggaagatctgattcaccattaatgaggtattttatacatgcaattatgttaattcttgggcttattgcgatagtacctatttatatgctgttgcttaacgctacccgttctaccgaacagatcaattccgggattgttattattcccggtaaagatgcattttttgggagcactaacaatgtaattgccgattggaaatccgatgaatttcccgtagaaagtggaactgccagatatctgactgaaaatattggcagaacattaaaagaagaaaaaaataaaaaaaccggagtcctggaaaaaatagtaattaagaaatttacagaaagcttacaaccgcgtatttctatttttaatgatgaagatcaaattatagcaacttttaaccttacaaatgagactgttatttttattaataacggacaaaaggttaaaaaaggtgaggttcttgccagactcactactcttccgaatattcgctttaactggagtgttttaacaggacggagctttcaaatttggcagggattcggaaacagcgcttttatttccatttgtactacaatattaagtatttacttttcagcgatgaccgcttatggcttacatgtctatcggtttaaggggagattggtgttgtggactgttatcttgattgtaataatgttgcccagttcgctttccatcatcggtttttatcagtttatgtccacaatgaagctccgtgacagttatattccgctaattattccgggaatagccgcggcgggaacggttttgttcctaaggcagtacatgacatctgttttaagtaccgatcttattgatgcggcgcgtattgacggcgcgaatgagtatcggatatttaatatcattattcttccgattatgactcccgcgcttgccgctcagtcaatttttacctttgtaagttcatggaataactttattacaccgttcatattaatttccaacgaaaagaagtttactttgccaatgcttgttcaaagtttgcggggtaatatttaccgcgcagagtacggtgcgatttatctgggaatagccgtttctcttataccgattattgtcttttattcattcatgtcacggtttattatttccggtattactatgggcggtctgaaagagtag

SEQ ID NO: 64608 - protein, 384 aa, Unknown
  Obtained from environmental sample
  DOMAIN (174)...(379): Binding-protein-dependent transport system inner membrane component
  misc_feature (1)..(384): Xaa is any amino acid
MGRSDSPLMRYFIHAIMLILGLIAIVPIYMLLLNATRSTEQINSGIVIIPGKDAFFGSTNNVIADWKSDEFPVESGTARYLTENIGRTLKEEKNKKTGVLEKIVIKKFTESLQPRISIFNDEDQIIATFNLTNETVIFINNGQKVKKGEVLARLTTLPNIRFNWSVLTGRSFQIWQGFGNSAFISICTTILSIYFSAMTAYGLHVYRFKGRLVLWTVILIVIMLPSSLSIIGFYQFMSTMKLRDSYIPLIIPGIAAAGTVLFLRQYMTSVLSTDLIDAARIDGANEYRIFNIIILPIMTPALAAQSIFTFVSSWNNFITPFILISNEKKFTLPMLVQSLRGNIYRAEYGAIYLGIAVSLIPIIVFYSFMSRFIISGITMGGLKE

SEQ ID NO: 64609 - DNA, 1530 bp, Unknown
  Obtained from environmental sample
  misc_feature (1)..(1530): n is a, c, g, or t
gtggacagaatcggcacgaggnacgaacataaacatattaaatttaatcttgaaatgaatgagaatattcctttaacccttttaggcgatgaattacgcataaagcagattctgaacaatctgctttctaacgcgtttaagtatacggataccggagaagttacgctgtcagttaacgccgaatattcatcgcagcaatgggcgcaaataacgcttatattccgcgtgtctgatacaggacatggaatgacaagcgaacaggtagacaaacttttcgatgagtacacccgttttaacatggaggccaacaagaaagccgaaggcgttggccttggcatgagcattacaaaacaccttgtgcgtatgatgaacggggatattaaagtgaaaagcgagtcaggaaaaggttcgatttttaccgtaagcctaccccagggggttctcggtaccgaagtgttagggaaagaattaactgaaaacgccaggaaattcaatttcggcaaagcctcccaaataaataacgcgccccaatttgtccgtgaatttatgccttacggcagggttttggttgtggacgatgtggagacaaacctgtatgtcgcaagggggcttatggctccttacggcataacgatagaaaccgccgcaagcgggtttgaggcgattgaaaaaatcaagaacggcgaagtttatgacattattttcatggatcattttatgccgagaatggacggtatagaaacggcgaanaaactgcgtaatctggattatacgcgcccaatcatagcgctgacagctaacgcccttatcgggcaggcggagatgtttatggaaaacgggttcgacgggtttatttccaaacctattgatattcgccagcttaacgcttcgctgaacaaacttatacgcgataaaaagccgagtgaagtagtagaggaagcgcgtctgcaaaaggacaaacttttcgcggaagttgctcataaagaggttacaaccgcccagttggcggaattttttgttcgggacgccataaaagcggcggctgttttggacgcaatagccaaaaataactgccgcagaacagacgatctttcgttgtttgtcattaacgttcacgcgatgaagagcgctctggcaaacgtgggagaaacggaactttccgaatttgccaaaatacttgaacaggcggggcgtaataataatattaacctgattttatccgaattgcccatattccttgacgctttatacaatgtaatcgggaggttcaggcaaaaagaagaagagaacatcaatgaagaagaaaccataaacatggatattgaacgccattatttgcttgaaaaaatgcttgtaataaagaacgcgtgcgagtcaatggataaaaaaaccgccaaaacagttcttgcggaattaaaggaaaaagcgtggccgaggcaggttaaagaacagcttggcgtcatttcagagcttttacttcacagcgatttcgaagaagccgccgaagccgccggaaatttcaatatttag

SEQ ID NO: 64610 - protein, 509 aa, Unknown
  Obtained from environmental sample
  DOMAIN (186)...(299): Response regulator receiver domain
  misc_feature (1)..(509): Xaa is any amino acid
MDRIGTRXEHKHIKFNLEMNENIPLTLLGDELRIKQILNNLLSNAFKYTDTGEVTLSVNAEYSSQQWAQITLIFRVSDTGHGMTSEQVDKLFDEYTRFNMEANKKAEGVGLGMSITKHLVRMMNGDIKVKSESGKGSIFTVSLPQGVLGTEVLGKELTENARKFNFGKASQINNAPQFVREFMPYGRVLVVDDVETNLYVARGLMAPYGITIETAASGFEAIEKIKNGEVYDIIFMDHFMPRMDGIETAXKLRNLDYTRPIIALTANALIGQAEMFMENGFDGFISKPIDIRQLNASLNKLIRDKKPSEVVEEARLQKDKLFAEVAHKEVTTAQLAEFFVRDAIKAAAVLDAIAKNNCRRTDDLSLFVINVHAMKSALANVGETELSEFAKILEQAGRNNNINLILSELPIFLDALYNVIGRFRQKEEENINEEETINMDIERHYLLEKMLVIKNACESMDKKTAKTVLAELKEKAWPRQVKEQLGVISELLLHSDFEEAAEAAGNFNI

SEQ ID NO: 64611 - DNA, 690 bp, Unknown
  Obtained from environmental sample
  misc_feature (1)..(690): n is a, c, g, or t
atgcttaaactgtatgatttactcgaaaatatacttcttgatattgagaataacatcaaaaacaatataaatgcgtccgccctttcaaaaaaatacaatttttcggaaagtcatttgcgcaaaatattcagctttgttttcaatcaatctgtcgcatcatatatacgttcgcgtatattaacggcaaccctaaacgatatactggaaacagataacgacattattgatattgcgattaaatacggttttgaatatgagcagtcgtacatcaggactttcaagcgtgaattcggaataacacccggacatttgcgtaaaacaagacaagttatacaaatcaaacctccgctgcatcttttcgatgaaagaaggctggacaacggaattttattcggacccgattttgtaatggttccgcggtttcatgttataggtaagcgtcatcatttatcttttaaagatttgcctacggaaccgttactgacaaaacaattctgggaaaatgaacgcaagcaaataaaagaaactgtaaatcctcacgcgtgtatcaatttatcctgtaaccttaatttggaagaaggacattttgattatataccttcgttacaggttgaaaatttaaaaaacataccgtccggtctcagcggtgaaacttttgatacttcaatgtgcgtcagattccgtttatag

SEQ ID NO: 64612 - protein, 229 aa, Unknown
  Obtained from environmental sample
  DOMAIN (62)...(106): Bacterial regulatory helix-turn-helix proteins, AraC family
  misc_feature (1)..(229): Xaa is any amino acid
MLKLYDLLENILLDIENNIKNNINASALSKKYNFSESHLRKIFSFVFNQSVASYIRSRILTATLNDILETDNDIIDIAIKYGFEYEQSYIRTFKREFGITPGHLRKTRQVIQIKPPLHLFDERRLDNGILFGPDFVMVPRFHVIGKRHHLSFKDLPTEPLLTKQFWENERKQIKETVNPHACINLSCNLNLEEGHFDYIPSLQVENLKNIPSGLSGETFDTSMCVRFRL

SEQ ID NO: 64613 - DNA, 1557 bp, Unknown
  Obtained from environmental sample
  misc_feature (1)..(1557): n is a, c, g, or t
ttgatcttttttgtcgcgcgaagaatcagctcgccgataaaggctatccattcggctctggaaaagttaaaggacggggatttaaccgtaaaagtagccgttaaatcggaagatgaaataggggaattgtcgggctttttcaatacgactctggaaaaaatcaaaaaccttgtagggactataaaatacaaagtcaacgggcttaaccataccagttttgaactttcctccaatatgaacaaaaccgctactgccgtacagcagatttcagctaacctggacaacatggaaaaccttatggttaaacaggaaaacggagccgaagaagccggcagggcggtaggggcaattaagaccaatattgacagccttaacaaaatgatagaagagcagaccgaaagcgtaaatatgtcgtcttcggcgattgaggaaatgacagctaacattcattcggttacgcagacgctggctgaaaacagcaaaaatgtcggcgttttggctgaagcgtcagagaacggtaaaacagggttgcagacagtggcgcaggagatacagggaatagcccgtgattccgaagggattttggaaataaattcggtgatgaacaatatcgcagctcagacaaacctgctttcgatgaatgccgcgattgaggcggctcacgccggagaagcagggagggggtttgccgttgtcgccgatgaaatccgcaagctcgcagaatcatcaagcagacaatcaaaaaccacagctacgatgctgaagaaaataaaagcgtccatagacaacattaccaaatcctccgatgatgtattaaaccgttttggcgctatagactcaagcgtaaaaacagtttcagaacacgagcaaaatattttaaacgccatgcgggaacaggaaacaggcggcaagcaaatattggaatccataagccgtcttagggacataacccactcggttaaagacggctcctatgacatggcggaatcaggcaagactctggttaaggaaacggacgaattcataaaaacaagtcaggaagcggtagaaggcatgaacgagatactgaaaggcgttaatcagataaaggtttcagccggacttgtaaacgacatgagtctggaaaacaaccggaactttgacgccttgaaacaagaaacggaaaagttttatgacaccgtcggcgacgagaaacagaaaattctagtagtcgatgatgacggtattcatcttgaaatggtggaagcggtattgcggaataagtatgacgtatcgagtgttaaatccggcaaagaagcgctggctttattctatcagggtcttgttcctcaattaatattattggatttaataatgccggatatggacgggtggaatacctacgccagaataaaagcgattagcggcttgtataatatcccgatagcgttttttacatcttcaaatgatcctaaagacataaaacacgcgcaggaaataggagcggttgattatatcaaaaagccctatgacaatgacgatctgttacgcaggatagggaaaattttaaagttgtga

SEQ ID NO: 64614 - protein, 518 aa, Unknown
  Obtained from environmental sample
  DOMAIN (1)...(56): HAMP domain
  misc_feature (1)..(518): Xaa is any amino acid
MIFFVARRISSPIKAIHSALEKLKDGDLTVKVAVKSEDEIGELSGFFNTTLEKIKNLVGTIKYKVNGLNHTSFELSSNMNKTATAVQQISANLDNMENLMVKQENGAEEAGRAVGAIKTNIDSLNKMIEEQTESVNMSSSAIEEMTANIHSVTQTLAENSKNVGVLAEASENGKTGLQTVAQEIQGIARDSEGILEINSVMNNIAAQTNLLSMNAAIEAAHAGEAGRGFAVVADEIRKLAESSSRQSKTTATMLKKIKASIDNITKSSDDVLNRFGAIDSSVKTVSEHEQNILNAMREQETGGKQILESISRLRDITHSVKDGSYDMAESGKTLVKETDEFIKTSQEAVEGMNEILKGVNQIKVSAGLVNDMSLENNRNFDALKQETEKFYDTVGDEKQKILVVDDDGIHLEMVEAVLRNKYDVSSVKSGKEALALFYQGLVPQLILLDLIMPDMDGWNTYARIKAISGLYNIPIAFFTSSNDPKDIKHAQEIGAVDYIKKPYDNDDLLRRIGKILKL

SEQ ID NO: 64615 - DNA, 1275 bp, Unknown
  Obtained from environmental sample
  misc_feature (1)..(1275): n is a, c, g, or t
atgacatcatattcccaaaaagagggcgttatgaaggttcataatgattttaccttgtattttcgggtcatcccttcgggaaaaaaggtcgtgtatttctatgcctatgacgaanacggcaagcggacgcagggaaggtctaccgggcagaccaacaaaacggcggcaagggttgttgtcaacaggcttttgaaagaaggggctttgctgccgaaaaaagacgatgtacccactttcggcgaatacgccgtggactggtgggattgggaaaaatgcgaatacctgaaaaaaagacggaagcgggctaatctgacccaaagctattccgaccacatgaagcggaatttggacaaagttgttttgccttattttaaaaatatgaaaatggactccattacccctgcggttatcgaggcgtttctggacagccttatcaaacaaaaatataagaataccacgattaacggttattacgggactttcaaaaccatgatgattgaagccgtcgagcgcgggattattgccgccgaccccaccgccaaagtcgagcggctgataaacgaccgtgacgaaatcaagattatcaccccccttgaattcaaaaagctgtttgtcggggattggcgtaaagtctgggaagataaccgcatctgttataccgtgaacaaactggcggcgctgtcgggtatgagggtgtccgagattttggggctgaaagggagctgcctgttcgacgatcacatttacgtctgtatgcagcatgataattacggttacaggccgacaaaaacgaaagacaaacataacataccgcttccggcttccctgattggcgatttgaaactgctgaaagaaaagagcggggacggctatctgttttccactgacggcgggggcagccctgtttgcagaaaaacggttttaatgtatctccgcaaggcgctggtaaatatcggcatgagcagcgcggaaatcaaagagcggaatttgcatatccacgcatggaggcattttttcaatacggagatgttaaagggcgggatgaccacggaacaggcgcaggcgataaccacgcataagagcgaaaggatgactgaacggtacacgcattttgacccgcttgaatttgtaaaggcgaaggaaattcaggaagccttgttacagcctgttgatgaaaagccgcaagcgctggaagcggaaaaaaaggaactgccgccgaacgtgttttcttttcctgtgtcgggcataccgcaagaggaactgaaacaggcgtaa

SEQ ID NO: 64616 - protein, 424 aa, Unknown
  Obtained from environmental sample
  DOMAIN (205)...(378): Phage integrase family
  misc_feature (1)..(424): Xaa is any amino acid
MTSYSQKEGVMKVHNDFTLYFRVIPSGKKVVYFYAYDEXGKRTQGRSTGQTNKTAARVVVNRLLKEGALLPKKDDVPTFGEYAVDWWDWEKCEYLKKRRKRANLTQSYSDHMKRNLDKVVLPYFKNMKMDSITPAVIEAFLDSLIKQKYKNTTINGYYGTFKTMMIEAVERGIIAADPTAKVERLINDRDEIKIITPLEFKKLFVGDWRKVWEDNRICYTVNKLAALSGMRVSEILGLKGSCLFDDHIYVCMQHDNYGYRPTKTKDKHNIPLPASLIGDLKLLKEKSGDGYLFSTDGGGSPVCRKTVLMYLRKALVNIGMSSAEIKERNLHIHAWRHFFNTEMLKGGMTTEQAQAITTHKSERMTERYTHFDPLEFVKAKEIQEALLQPVDEKPQALEAEKKELPPNVFSFPVSGIPQEELKQA

SEQ ID NO: 64617 - DNA, 483 bp, Unknown
  Obtained from environmental sample
  misc_feature (1)..(483): n is a, c, g, or t
ttgagtgcttttgagaacaaccatctgtctaacgtcattatccccaatagcgttactaaaattgggaatgaagcgtttaggaaaaacaaactaaccagcgttaccattggcaacggtgtgaaagaaatagggggaggtgcatttgaggacaaccaacttaccagcgttaccatccctaacagcgtaacaaaaattgattataatgcgtttagtaaaaattatctgaccagcgttaccatcggcaatagtgtcacaataattggatatagagcattttccaacaaccaacttaccagtatcaccatccccaataatgtaaaagaaattagaagtgaagcgttttctaacaaccagctgaacagcgttaccattggcaacagcgttactaaaatcggggatagagcattttccaacaatcaacttaccagcgttaccataccggacaaaaggaaaatgacacattttacccaattacagagttag

SEQ ID NO: 64618 - protein, 160 aa, Unknown
  Obtained from environmental sample
  misc_feature (1)..(160): Xaa is any amino acid
MSAFENNHLSNVIIPNSVTKIGNEAFRKNKLTSVTIGNGVKEIGGGAFEDNQLTSVTIPNSVTKIDYNAFSKNYLTSVTIGNSVTIIGYRAFSNNQLTSITIPNNVKEIRSEAFSNNQLNSVTIGNSVTKIGDRAFSNNQLTSVTIPDKRKMTHFTQLQS

SEQ ID NO: 64619 - DNA, 1524 bp, Unknown
  Obtained from environmental sample
  misc_feature (1)..(1524): n is a, c, g, or t
gtgtttttgacaagcagaaaattcctctctgcggaaggcggttttgcgagagtcgtatggatgcccaaagaactaaaagatgttttgcgtaacgatttgataaaacgctttgacgagcaaaaacttcccggctttatcgaccaaattgctgatgagacaaatgccgtgagcgccgaagatgtgcggaagttcatggaaaaagttaaacatcccgcgttgaaaatggacgatatgtcgcgctttgcccaaagcgaacaagccggggaagccgccgcgaaaactgacgcggggaaaaaagacgcgtctggcgaatcacagtccgcgaaaaaggaagaagcggggagtgttccggcgaatatcgatcttgccgttatcacggaaaaaataaaagccgatgtaacaaaagaagttattacaggcataatcgacattttaagcgagcgttttttgggcaaagctccgtcagcgtcaggctcggaagttaaaacggaatccgccgcttcttcaggtaagccgaaaatatcggcgttggatcgtgtttccaaaattaaaagttttgatattcccgttgacagcgtaagctgttccacatattcggttaaacttgggaatttgaaatcggagggcggcacgcgcggcaaaacttatacgataggcggcgctgattgtatgccgttccatttctgggaagggaaaatgccgaacaagccgttagtcgccatggaagtttccgacagtgtaagcgaaaagtatcccgaaatacttcgcaaggcttacggagacgttttaaacaatccggcgcaaatggcgaaactatgcgtagaaaaatacggagcggatctaatcaatgtaaaacttgaaggcactcaccctgagcgcaataactacagcggcaagcagagcgtcgatcttgtaaaatcaattcttgaagctgtcgatgtgccgctgattatcacaggaaccagccactacgataaaaacaacgaggtaatgaaggcaatcgcccaaaactgcgaaggtgagaatctgatatttaactgggtagagcaggataattacagaactatcacgggggcggcaatggcttatggtcacactcttgtagcgcaagccccaatcgacgttaatatcagcaaacagttaaatattttgttaaccaacatgggcttggctgccgacaaaataatcatcgacccaatgacaagtacaatcggttacggtattgaatatacttattccgtaatggagcgtattcgcctaacgggtcttggcggagacaatatgctcttaagtcccatgattgtctctatcggacaggagtgcgccaagattaaagaatttaaagcgcctgaatcgagcttccccgactggggcgatcttgcaaagcgcgcggcttattgggaaatcgccgcggcaacgacgctgttatacgcgggagccgacatattgattctttacacgccggaagcggtaacaacaataaagaagaccatcaacagtttgatggatagggagggtaaataa

SEQ ID NO: 64620 - protein, 507 aa, Unknown
  Obtained from environmental sample
  DOMAIN (199)...(505): CO dehydrogenase/acetyl-CoA synthase delta subunit
  misc_feature (1)..(507): Xaa is any amino acid
MFLTSRKFLSAEGGFARVVWMPKELKDVLRNDLIKRFDEQKLPGFIDQIADETNAVSAEDVRKFMEKVKHPALKMDDMSRFAQSEQAGEAAAKTDAGKKDASGESQSAKKEEAGSVPANIDLAVITEKIKADVTKEVITGIIDILSERFLGKAPSASGSEVKTESAASSGKPKISALDRVSKIKSFDIPVDSVSCSTYSVKLGNLKSEGGTRGKTYTIGGADCMPFHFWEGKMPNKPLVAMEVSDSVSEKYPEILRKAYGDVLNNPAQMAKLCVEKYGADLINVKLEGTHPERNNYSGKQSVDLVKSILEAVDVPLIITGTSHYDKNNEVMKAIAQNCEGENLIFNWVEQDNYRTITGAAMAYGHTLVAQAPIDVNISKQLNILLTNMGLAADKIIIDPMTSTIGYGIEYTYSVMERIRLTGLGGDNMLLSPMIVSIGQECAKIKEFKAPESSFPDWGDLAKRAAYWEIAAATTLLYAGADILILYTPEAVTTIKKTINSLMDREGK

SEQ ID NO: 64621 - DNA, 1260 bp, Unknown
  Obtained from environmental sample
  misc_feature (1)..(1260): n is a, c, g, or t
ttgacggccgcgccttcggtcctgccgaatggtatttcctcggcacaggatttcaggcttatcgacggcgaatggacggaattttcgtttacaggcgatgagaaggccaggcttgacgttcctccggcgcatacggaggggtatgtgatgagggaacttccccgcgacatggggtttatacggtatgtatcctctccggcgcaaaataccgtccggctgatcagctatcacataggcgaagattttgatcttggcatggccgccgttaacaaccagaatgagcgttttgaagtaatcggcatactgcgggataatgtaaaaatcattacgcttttctactatggagtgtttttcttccccacgctgctgatgaccttgatcatcgccatatccctgaccaagcgcgttaccacccccataacggacctgaccgaagcgacccgccgcgttgccgagggcgacttttccatacagataatggcgcggcggggcgacgagctggggctgttgatccgatcgtttaacgcgatggtgcaggatcttgaaaaatccagggccgcgcttgtaaaggcggagaaaatatcgatctggcagactatggcccagcagcttgctcatgaaatcaagaaccccctgacgcccataaaactctccgccgaaagagtcctgcggcgctggcgcaaccagcctgaacagattggcgaaataatagaagattccatgatggcgatcatccaggagacggaagggctttcggttctgctcaacgaattcaggactctgtccaagcctatggaaccgtcaaagtcattgacaaaaatcggcgaggccgtggaagaagtattgaacccgtaccggggttctttaccggatgtgtctttcaacacagatcatgtttccaatgacatggcggtcaggattgacaagctccgtttttcacaggcgctggcaaatcttgtaatcaacgccattgacgcgatggacgggaagggttttattgaaatcaggaccgattccataaaaaaaagggaggcgcagttttgcaggctcagcgtcagggactcgggcaaaggcatttccaaacaggacagccaaaatgtctttacgccgtattatacgacaaaagagacgggtaccggcctcgggcttcccattgttgagcggattatcaacgaccacggcgggagtatctggtttaacacggcggagggagtgggaactactttttatatcgacctgccggtaagtgaggaggtatag

SEQ ID NO: 64622 - protein, 419 aa, Unknown
  Obtained from environmental sample
  DOMAIN (196)...(267): His Kinase A (phosphoacceptor) domain
  misc_feature (1)..(419): Xaa is any amino acid
MTAAPSVLPNGISSAQDFRLIDGEWTEFSFTGDEKARLDVPPAHTEGYVMRELPRDMGFIRYVSSPAQNTVRLISYHIGEDFDLGMAAVNNQNERFEVIGILRDNVKIITLFYYGVFFFPTLLMTLIIAISLTKRVTTPITDLTEATRRVAEGDFSIQIMARRGDELGLLIRSFNAMVQDLEKSRAALVKAEKISIWQTMAQQLAHEIKNPLTPIKLSAERVLRRWRNQPEQIGEIIEDSMMAIIQETEGLSVLLNEFRTLSKPMEPSKSLTKIGEAVEEVLNPYRGSLPDVSFNTDHVSNDMAVRIDKLRFSQALANLVINAIDAMDGKGFIEIRTDSIKKREAQFCRLSVRDSGKGISKQDSQNVFTPYYTTKETGTGLGLPIVERIINDHGGSIWFNTAEGVGTTFYIDLPVSEEV

SEQ ID NO: 64623 - DNA, 447 bp, Unknown
  Obtained from environmental sample
  misc_feature (1)..(447): n is a, c, g, or t
atgaatcgggatgacattcagcctgaagtacaaatcctgacggaacagcccctgggcgcaggctttttccagatctttgttggacgccgcgataaggcggacgtcggtttctatggtcttttcaccgcctaccctttcaattttctgttcctggataacccgcagtacctttgcctgcgccgaaagcgacatatcgccgatctcgtcaaggaaaagcgtgccgccgccggcaatttcaaagcgccccttccggctggaaaccgcgtcggtaaaagcgcccttttcatggccgaaaagctcgctctccagaagggtgtcgggtatggccgcgcagttcaagcccacaaaaggacgctcggaacgggaagatccaagatgaatggcccgcgccaccacttctttgccggttccattctctccggtaatcaggatgcgcgcgtcgcatga

SEQ ID NO: 64624 - protein, 148 aa, Unknown
  Obtained from environmental sample
  misc_feature (1)..(148): Xaa is any amino acid
MNRDDIQPEVQILTEQPLGAGFFQIFVGRRDKADVGFYGLFTAYPFNFLFLDNPQYLCLRRKRHIADLVKEKRAAAGNFKAPLPAGNRVGKSALFMAEKLALQKGVGYGRAVQAHKRTLGTGRSKMNGPRHHFFAGSILSGNQDARVA

SEQ ID NO: 64625 - DNA, 681 bp, Unknown
  Obtained from environmental sample
  misc_feature (1)..(681): n is a, c, g, or t
atggggcctccggctgccgccgcggtactcaaggaatgtctgtaccggggagcggattttaccgcgctggtgtcggaccggggctttgccggtgccgataccctggctacctcctacgcgcttaagtgcgcgatagaaaaaatcggcggttacgatctggtgctttgcggccgccaggcgattgatggggacaccgcccaggttggcccccagacggcggaaaaactggggatcaaccagatcacctgcgtttccaaaatcgagactcttgacgcggcaaagaaagaaattgtcgcggtccgttccatagaagggggatgggaaagggtaaaggcgaaactgcccattctgattacctttaccgaagaaggggaagcgccccggcccgcctcggctatcaagaccatggcctataaacgggtaacgcccgtttcaggcggctccggttctcccaatgatccgtttggggaagaagccagggccaacaatcccatggccctttgggacattccggcgatcaacgccgacccgctccagtgcggcctttccggctccccaaccaaggtcaagcacatcaattccgtggtgctgaccgccgccgatatcaggtacatcgatccaggcgaggccggtgtttcggaactcatccacggccttatcgcggatcacacttttggataa

SEQ ID NO: 64626 - protein, 226 aa, Unknown
  Obtained from environmental sample
  DOMAIN (1)...(159): Electron transfer flavoprotein domain
  misc_feature (1)..(226): Xaa is any amino acid
MGPPAAAAVLKECLYRGADFTALVSDRGFAGADTLATSYALKCAIEKIGGYDLVLCGRQAIDGDTAQVGPQTAEKLGINQITCVSKIETLDAAKKEIVAVRSIEGGWERVKAKLPILITFTEEGEAPRPASAIKTMAYKRVTPVSGGSGSPNDPFGEEARANNPMALWDIPAINADPLQCGLSGSPTKVKHINSVVLTAADIRYIDPGEAGVSELIHGLIADHTFG

SEQ ID NO: 64627 - DNA, 1011 bp, Unknown
  Obtained from environmental sample
  misc_feature (1)..(1011): n is a, c, g, or t
atgagcgaaaatagcgtaatggtatatatacagcanaacgggggaaaagcggccgaggtgagtctggaactggtctgtaaagccagggaactcgcggaccggctaaaggtggaagtcagcgccgccctgttcggggaacatgtggcgggggaagcggcgcggcttgcttcgctgggtgcggatcgcgtttacataatggaagacccgcggcttaaattttacacgcccgtaccctacagcaaattgatgatacaaacaatcgaagagtacaagccgcagatcgtcctgttcggggcgaccaccgaaggccgcgacctcgccccgcgtgtcgcgtcacacttgaaagtcggacttaccgcggattgcaccgatttgcagataggagaccacactcaaaaagaaaccgagtacaaggacatactttatcagatacgccccgcgttcggcggcaacatcatcgccacgattgtaagccccgagaaaaagccgcagatggcgacagtccgcgaaggcgttatgcgcatggcacaaccaaacacttcacgaaaggccgaaaccgtcaaaataaaacttccactcgaaatcggagactttgttacggaaataattgagcgcgtaatggaagaaaaaaccgtaaacctgaaaggcgcgcagataatagtttcaggcggcatgggcgtagggagcaaagataacttcgccctaatccgcgagcttgcccaaaccctcggcgcggaagttggcgcgtcacgcgccgccgtggatcagggctttatcggcaaggaacatcaggtggggcagacggggacaacggtgcgcccgaaactgtacattgcctgcggcatttccggggcgatacagcaccgcgccggcatggacggctccgcgagaattatcgccattaacaccgatcccgaagcgccgattttcagcgtcgcgcattacggcatagtgggagacttaaacgatgttatccccagaatgatcaaagcatataaggcaagagtttaa

SEQ ID NO: 64628 - protein, 336 aa, Unknown
  Obtained from environmental sample
  DOMAIN (5)...(202): Electron transfer flavoprotein domain
  misc_feature (1)..(336): Xaa is any amino acid
MSENSVMVYIQXNGGKAAEVSLELVCKARELADRLKVEVSAALFGEHVAGEAARLASLGADRVYIMEDPRLKFYTPVPYSKLMIQTIEEYKPQIVLFGATTEGRDLAPRVASHLKVGLTADCTDLQIGDHTQKETEYKDILYQIRPAFGGNIIATIVSPEKKPQMATVREGVMRMAQPNTSRKAETVKIKLPLEIGDFVTEIIERVMEEKTVNLKGAQIIVSGGMGVGSKDNFALIRELAQTLGAEVGASRAAVDQGFIGKEHQVGQTGTTVRPKLYIACGISGAIQHRAGMDGSARIIAINTDPEAPIFSVAHYGIVGDLNDVIPRMIKAYKARV

SEQ ID NO: 64629 - DNA, 1737 bp, Unknown
  Obtained from environmental sample
  misc_feature (1)..(1737): n is a, c, g, or t
atggaaaattttttactggataacgatgatattttatttcatttggatcacatcgatcttgatcgcataattcaattaaaagaagacaactttgagcaggcgaggcaatacgcccacgctcccagagacattgaggacgcaaaagactcctaccgaagaatcctgtcgatcatcggcgaaatcgccggagagtacatggctcctaacgctcccgccgtcgatgaaagcggcccgactcttgcgaacaatcaggtaacgctgaaccccgcgacaaaaaaagccctcgacatgatggcgaaagccgacatgatgggctttgttatcccccgcagatacggcggcatcaacatgcctaacacaattttaactataggcgcggatatcttgtcgagagcggacggctcttttctcaacttcggccttcagcaggacaacgccggaacgatcaacaaattcgcgtcggaagagcagaaacaggcctacctgcccaaactctgctccggcgagtgggactcctcgatggttttaacggaacccgacgcgggcagcgatttgcaatcggtcaacctgaaagcgacgcaggacgcggacggaaaatggcgcttaaacggagttaaacgctttatcaccaacggctgcgcgaaaatcgctcttgttctcgcccgaagcgaagaaaagggaaaaggcgcgcgcggcctctcattcttcttatacaaacgcgaagatgatgtatcgaagcagacaatgctaatccgccggttggaacacaaactgggtatacacggctcgcccacctgtgagctgcaattcaacaatgcgcccgcggagttaatcggcgagcgccagcgagggctgaccaaatacactctctggctgatgaacaacgcgcgtctgggagttgccgcccagggcgtaggcatcgccgaagccgcctaccgcgaagccgatctttacgccgcaaagcgcattcaattcggcgcgcccgtgcgcgacctcccccctgtttttgaaatgctcaccgagatgaaagtcgccgttgaagccggccgcgccctgttatacgaaacagcccgctttgtcgatttgaaagaagttcttgaagaatactccgataaacaccccgaagaaaagggagaaattattgaggagaaaaagaaatacgcgaaacttgcgggacttttcactcccgtggtaaaagcctacgcgaccgaaacggcgaacaaagtttccaacgacgcgattcaaatccacggcggaaccggctacatgaaagagtttaacatcgagcgccactaccgcgacgcgaggatcaccaacatctacgaaggcacgacgcagttacaggttgtcgccgccataggccccgtaacatcgggcgtcgctcaaatgatactggacgagtacgacggcgcaaattacacccacggcgcggagttactcgcaaaagtccgcgaatcgcgaaaagtttttgacgaggcgcttgagttcgccaagtcctgcaaagagcacgagcagtttttaacgtaccactcgcgcaggcttgtggagatggcgacggatttgataattagctatctttttatgagagacggaaattacagtgagaggaagcagaaggtagctgaaatatttattaccaagatggtctcaagaataagagcaaatagagatttcattgtgggagaaaatgcaactttgttgaagaactataaagctgtaatagacgcgagtaagtaa

SEQ ID NO: 64630 - protein, 578 aa, Unknown
  Obtained from environmental sample
  DOMAIN (173)...(224): Acyl-CoA dehydrogenase, middle domain
  misc_feature (1)..(578): Xaa is any amino acid
MENFLLDNDDILFHLDHIDLDRIIQLKEDNFEQARQYAHAPRDIEDAKDSYRRILSIIGEIAGEYMAPNAPAVDESGPTLANNQVTLNPATKKALDMMAKADMMGFVIPRRYGGINMPNTILTIGADILSRADGSFLNFGLQQDNAGTINKFASEEQKQAYLPKLCSGEWDSSMVLTEPDAGSDLQSVNLKATQDADGKWRLNGVKRFITNGCAKIALVLARSEEKGKGARGLSFFLYKREDDVSKQTMLIRRLEHKLGIHGSPTCELQFNNAPAELIGERQRGLTKYTLWLMNNARLGVAAQGVGIAEAAYREADLYAAKRIQFGAPVRDLPPVFEMLTEMKVAVEAGRALLYETARFVDLKEVLEEYSDKHPEEKGEIIEEKKKYAKLAGLFTPVVKAYATETANKVSNDAIQIHGGTGYMKEFNIERHYRDARITNIYEGTTQLQVVAAIGPVTSGVAQMILDEYDGANYTHGAELLAKVRESRKVFDEALEFAKSCKEHEQFLTYHSRRLVEMATDLIISYLFMRDGNYSERKQKVAEIFITKMVSRIRANRDFIVGENATLLKNYKAVIDASK

SEQ ID NO: 64631 - DNA, 321 bp, Unknown
  Obtained from environmental sample
  misc_feature (1)..(321): n is a, c, g, or t
atgttaacccaggatataaaggatatattagcgagaaatctcaagtattttcgtatccaaaggcagttttcgcaggctcaactggctgaaaaagccaacatttcggttactttcctatcaaatatagagcgtggtaagatgtttccaaaagttgagaccctgtcacggctcaccgaaagccttaatgttgaagtacatgagctttttcaacctgatttggtctccgaagaaaataaaaaaattatgaatcgcctttcagaagatattacaaaaaatgtaaatttggctttaactgatgtttttaaactatatttaaggtaa

SEQ ID NO: 64632 - protein, 106 aa, Unknown
  Obtained from environmental sample
  DOMAIN (14)...(68): Helix-turn-helix
  misc_feature (1)..(106): Xaa is any amino acid
MLTQDIKDILARNLKYFRIQRQFSQAQLAEKANISVTFLSNIERGKMFPKVETLSRLTESLNVEVHELFQPDLVSEENKKIMNRLSEDITKNVNLALTDVFKLYLR

SEQ ID NO: 64633 - DNA, 1293 bp, Unknown
  Obtained from environmental sample
  misc_feature (1)..(1293): n is a, c, g, or t
atgctggaagatattgatcgcgcgcttatctatccggcaaaacaattcgtaatgcccggcgaaatggtgcaaaacgctatgggcgctatcaagcaagagttgaaagatcgacttgagtattttaaaaacaacggcaaaattcttgaagcggaaagattaaagactcgtgttgaatacgatatcgaaatgcttaacgaaatgggctactgttcgggtattgaaaattactccgctcatttggcgggacgcaaaagcggcgaaacccccgacacgcttgtagattatttcccgaaaagacatttaacattcattgacgaaagccacgttactctgccgcagttaggcgcaatgtacgcgggcgaccgtagccgcaaacagagtcttgtcgattacggcttccgtctcccctgcgcccttgataaccgcccccttcgctacgatgaatttgtcgagcggctggataaaacggtttttgtttccgccacacccggaaaaaacgagattgaacaatcggcgcgagttgtacagcaggtgatacgccccacaggacttttagaccccgaaatagaagtgcgtcccagcgaagggcaaatggaagacatttacggcgaagtgcaaaaacgcattaaagcaaaagaacgctctcttattctcaccctgacaaaaaaaatggcggaagaccttacggattatcttaccagtctcggtttgaaagtccgctacattcacagcgaagtggaaaccattgagcgcgtggaaattctcacgcaacttcgtcaaggcgattttgacattctggtaggaattaacctgttacgcgaaggtatcgacctgcctgaagtttcatttatcgcaattctcgacgccgacaaaatcggctttttacgctcgcttacaagtcttgtgcagataatcgggcgggcggctcgtaacgccgcgggaaaagtaatcatgtacgccgaccgcatgagcgaagcgatggaaaaagcaatcgccgaaaccaaccgccgccgcgagatacaaatagcgtataacaaaaaacacggcataacccctgcgacagttaaaaaagccattgcggaaatactgacccgccatgttgaggaagccgacaatgcggcggcaagcacggtagaagttttgaaaaaatcttttaatatactgatccccgcacagcgcaaacagttgattaaagctctggagagcgagatgcttgaacacgcaaaaaatcttgagtttgaacaagcggcgctgattagagacgaaatcacaaagattaaagaagtgggataa

SEQ ID NO: 64634 - protein, 430 aa, Unknown
  Obtained from environmental sample
  DOMAIN (394)...(429): UvrB/uvrC motif
  misc_feature (1)..(430): Xaa is any amino acid
MLEDIDRALIYPAKQFVMPGEMVQNAMGAIKQELKDRLEYFKNNGKILEAERLKTRVEYDIEMLNEMGYCSGIENYSAHLAGRKSGETPDTLVDYFPKRHLTFIDESHVTLPQLGAMYAGDRSRKQSLVDYGFRLPCALDNRPLRYDEFVERLDKTVFVSATPGKNEIEQSARVVQQVIRPTGLLDPEIEVRPSEGQMEDIYGEVQKRIKAKERSLILTLTKKMAEDLTDYLTSLGLKVRYIHSEVETIERVEILTQLRQGDFDILVGINLLREGIDLPEVSFIAILDADKIGFLRSLTSLVQIIGRAARNAAGKVIMYADRMSEAMEKAIAETNRRREIQIAYNKKHGITPATVKKAIAEILTRHVEEADNAAASTVEVLKKSFNILIPAQRKQLIKALESEMLEHAKNLEFEQAALIRDEITKIKEVG

SEQ ID NO: 64635 - DNA, 825 bp, Unknown
  Obtained from environmental sample
  misc_feature (1)..(825): n is a, c, g, or t
atgaaacctgtaaactttaatactgtattttccagcgccttaaaagaattccccccgttctatcaatcaaagaatactgtaatttttaacggcgactgcttggagatactgcgctctttccctgaaaattcggtagatatgatttttgccgatccgccttatatgctgtcgaatgacggatttacttgccaaaacgggaaaatggttaatgtgaacaaagggaaatgggacaaaagcaatggctttgaaaacgatacggcgtttcataatgagtggatttccgtttgcagacgtgttttgaaacctgaaggaacaatttggatttcggggacatatcacagtatttatcaatgcggctatcttctgcaaaaaaatgattttcatattttaaatgacataacatggtttaagcctaacgcgtcgcctaacttgagctgccgtttttttacagcgtcgcacgaaacgcttatttgggcgaggaaagataaaaaagcaaaacacacatttaattacgatgaaatgaaaaacggattattccccgaagataaattaaaaaatgaaaacacgcaaatgagatctgtttggtcgataccgactcccaaaaacaacgaaaaagaacacggaaaacacccgacgcaaaaaccgttagatcttctaaaacgcattgtacttgcatcgacaaacgaaaacgccattgtacttgatccgttttgcggaagcggaacgacaggagccgcttgcaaatgtttaccggacagattttttatcggtattgaaattgataaatcatactgcgaattggcgaaaaaaagattaagcgaataa

SEQ ID NO: 64636 - protein, 274 aa, Unknown
  Obtained from environmental sample
  DOMAIN (45)...(270): DNA methylase
  misc_feature (1)..(274): Xaa is any amino acid
MKPVNFNTVFSSALKEFPPFYQSKNTVIFNGDCLEILRSFPENSVDMIFADPPYMLSNDGFTCQNGKMVNVNKGKWDKSNGFENDTAFHNEWISVCRRVLKPEGTIWISGTYHSIYQCGYLLQKNDFHILNDITWFKPNASPNLSCRFFTASHETLIWARKDKKAKHTFNYDEMKNGLFPEDKLKNENTQMRSVWSIPTPKNNEKEHGKHPTQKPLDLLKRIVLASTNENAIVLDPFCGSGTTGAACKCLPDRFFIGIEIDKSYCELAKKRLSE

SEQ ID NO: 64637 - DNA, 1596 bp, Unknown
  Obtained from environmental sample
  misc_feature (1)..(1596): n is a, c, g, or t
atgtatattcactctccgcgcgatccgttacgcgaaggtcagcgtcttgcgcaggcttgcggagaaaacgcaggcggcgagaaaaaagcggttgtgattctcggctttgggcttggttatgccgctcaagcggctgcggaaatggggcattgcgtaattgtggcggaaaaacataaggacctgctgataaaagcgcttgaagttagagatttcagcgagttccttggtaagaacagaataattttcgtaatcggcggaagtggagaggcgataacaagcgctctttcgatagcggatgaaataatctctacaggaaaaacggaagcgaaaaaaacagcgccgtacatcattaacaacaaagcgctgaccgcttttgatgagcaatggtataaacaggtagaggacaaaattcgttcatggacgatgagggacgatatcaacacagccacgcacaagcgttttgggcagagatgggtgcgtaatttctcgcgtaacatcgaagctatccgtgattatccggggatttcccgattgtcaaatcttgcggcggcggacgcagaaaataaaccgctccccgtatttcttgccgcagcgggaccgagtttagacaaaattaaacctttgttacacgacatttatgaaagatgcgttattgtcgccgtagacacaaaccttcgtttttttgtaaaaaacaacattcagcccgattttgttcttgtagtagaccctcaattttggaacagccgtcatcttgatcgatgtatccgcaaagaaaataatttacaaacagcattgattgccgagcctgccgtttatccgcccgtattaaaacttcctttcaaaaataaatttctttgcggctctatgcttccgcttggaaaatttatcgaacgcaaagttgacgaaaaaacaaaactgggcgctggcggttctgtcgcttccacggcgtgggatttcgcccgcttcctcggcgctttggaaatttggatagccggtttagacctttcgtttcccgatttgaaaacgcatttccgaggcgcgcgttttgaggaactttccaattccggctcgaatcgttttaaccccgttgaaaaatggatagtgcgggcattgcgcgacggtttcccattcaaagcagtttccgttcacggcggacaagttacaacggacagacgtctttctctctacgccgtctggttcgaggcgcaatttgcgcaaaacaaacaaatccaaaactacagcctgttccacgaaggactggcaataaaaggactccagccatcggacagtcaaaaaattttagccctgccgaaacgccgggaagaaatcgaccgccgtattcagcggacattttccgaaatagaaaaagattttaacgcccccgaagaaaaacacgccagaacggaacgttatgataaagcggttaacgctctgacgcacggattggaaagtataaaaacagccgttgaagaaggagcggaaattgccaaagatagtgaatttaaggaaatagcggattttttgtcggcgtgtgtggagaaagagcggtataatgcgtatttaaaggaagttttgaaattatacggagtaatttaa

SEQ ID NO: 64638 - protein, 531 aa, Unknown
  Obtained from environmental sample
  DOMAIN (176)...(335): Protein of unknown function DUF115
  misc_feature (1)..(531): Xaa is any amino acid
MYIHSPRDPLREGQRLAQACGENAGGEKKAVVILGFGLGYAAQAAAEMGHCVIVAEKHKDLLIKALEVRDFSEFLGKNRIIFVIGGSGEAITSALSIADEIISTGKTEAKKTAPYIINNKALTAFDEQWYKQVEDKIRSWTMRDDINTATHKRFGQRWVRNFSRNIEAIRDYPGISRLSNLAAADAENKPLPVFLAAAGPSLDKIKPLLHDIYERCVIVAVDTNLRFFVKNNIQPDFVLVVDPQFWNSRHLDRCIRKENNLQTALIAEPAVYPPVLKLPFKNKFLCGSMLPLGKFIERKVDEKTKLGAGGSVASTAWDFARFLGALEIWIAGLDLSFPDLKTHFRGARFEELSNSGSNRFNPVEKWIVRALRDGFPFKAVSVHGGQVTTDRRLSLYAVWFEAQFAQNKQIQNYSLFHEGLAIKGLQPSDSQKILALPKRREEIDRRIQRTFSEIEKDFNAPEEKHARTERYDKAVNALTHGLESIKTAVEEGAEIAKDSEFKEIADFLSACVEKERYNAYLKEVLKLYGVI

SEQ ID NO: 64639 - DNA, 897 bp, Unknown
  Obtained from environmental sample
  misc_feature (1)..(897): n is a, c, g, or t
atgaatattttagaacttgtcggcaacactccggtaattgaattaaaaaaaatattcaatggggcaaacggcgtttccctgtttgcaaaagcggaattttttaacccgagcggctccgtaaaagaccgcgccgcgaaagccatgatactgcacggcattaactcaaggaagcttaccaaagataaaattcttttggattccacaagcggcaataccggcatcgcgtattcaatgttcggcgcggcgcttgggtaccgggtaaaactgctcatgccggcaaacgccagtgaggaaagaaaaaaaattatgcgcgcttacggcgcggaaattgtagaaacagacccgcttgaaggttctgacggcgcgtatcgcatagtaatggagttagccaaaaaagagccggacttgtattttttccccaaccagtacgacaattttgaaaatccgcgcacacattatgaaacaaccggagttgaattgtataaccagtgtaagcctagtcattttgtcgccggtaccggcacttcgggaacttttatgggcgtttccagacggcttaaagagactgattcttccatacaaatcatgctcatgcagccggattcgccgtttcacgggctggagggaatgaagcacatggaatcaaccataacgccgaaaatatttgaccggagcattgccgatgtacatataaccgttaaaacagaagacgcttacgcgacagcgcggcggcttgccgcggaagagggagtttttgtggggataagctccggggcaaatgtgtacgccgcgatggaatgggcaaaaaccctgcccgcaggttcgcgggtcgctacaatactgtgcgataacggcaaccgttatctttcacagcccttatggaaggacctcgcataa

SEQ ID NO: 64640 - protein, 298 aa, Unknown
  Obtained from environmental sample
  DOMAIN (3)...(284): Pyridoxal-phosphate dependent enzyme
  misc_feature (1)..(298): Xaa is any amino acid
MNILELVGNTPVIELKKIFNGANGVSLFAKAEFFNPSGSVKDRAAKAMILHGINSRKLTKDKILLDSTSGNTGIAYSMFGAALGYRVKLLMPANASEERKKIMRAYGAEIVETDPLEGSDGAYRIVMELAKKEPDLYFFPNQYDNFENPRTHYETTGVELYNQCKPSHFVAGTGTSGTFMGVSRRLKETDSSIQIMLMQPDSPFHGLEGMKHMESTITPKIFDRSIADVHITVKTEDAYATARRLAAEEGVFVGISSGANVYAAMEWAKTLPAGSRVATILCDNGNRYLSQPLWKDLA

SEQ ID NO: 64641 - DNA, 342 bp, Unknown
  Obtained from environmental sample
  misc_feature (1)..(342): n is a, c, g, or t
ttgcatgtaaagcggcgtatgaagacggggccgaaatggctggatcagcttttgggttatctctctgaaaatatgttgttccttaaaacatatctttccccacacattccaaagatcaagcttattgaaccggagggaacataccttgcgtggctggattgtaatgaactgggactttcagcccaaaaactggatgaagcgcttacccggggaaaattatggctgagcgcgggtcattcctttggaaaaggcggaaacgggttccagcgcatgaatgtcgcctgcccccgttccgtattacatgacgcgctggaacggttgaaaaatacggtaaacctgtga

SEQ ID NO: 64642 - protein, 113 aa, Unknown
  Obtained from environmental sample
  misc_feature (1)..(113): Xaa is any amino acid
MHVKRRMKTGPKWLDQLLGYLSENMLFLKTYLSPHIPKIKLIEPEGTYLAWLDCNELGLSAQKLDEALTRGKLWLSAGHSFGKGGNGFQRMNVACPRSVLHDALERLKNTVNL

SEQ ID NO: 64643 - DNA, 810 bp, Unknown
  Obtained from environmental sample
  misc_feature (1)..(810): n is a, c, g, or t
atgaaatatgatttcgatggggtaattgacaggagcaattcctacagcattaaatacgagccttcatggcgcggtaaacccgatgacatactgccattatgggttgccgatatggatttcgccgctcccggctgcgtacaggaggcgctgatccgccgcgcccaacatggaatcttcggatactccgaacctgatgccgcgtactttgacgttatgcgcaaatggtttgaggaacgttttagctggacaacggagcgcgactggctgacgattacccccggagtggtaaacgccctgtatcttgccgtccgcgcgttaacaaaacagaatgacggaattgttatacaacaacccgtttattatccttttgaagcaagcataaggaaaacaggacggcagctgcttgtaaatgaacttgtttacaaagacggatattacagcatagattttcaggattttgaagaaaaaataaaacaggcgaaaatgttcattctgtgcaatcctcataaccctgtagggcgcgtttggaaccgcgatgaacttacccgcatgggcgaaatagccttgagccacggcgtgaccgttatcgccgatgaaatccacgaggattttgttttctcgggtcataaacatcttgtattcgccgctcttaaccctgattttgcgaacataaccgtcacctgcacttccccctcaaaaacctttaactttgcgggattgctttgcgccaatatttttatttccaacaaagatatgcgcgataaattcaaagaagagtatgtcggctgcggtttagccagccgggcgtaa

SEQ ID NO: 64644 - protein, 269 aa, Unknown
  Obtained from environmental sample
  DOMAIN (28)...(269): Aminotransferase class I and II
  misc_feature (1)..(269): Xaa is any amino acid
MKYDFDGVIDRSNSYSIKYEPSWRGKPDDILPLWVADMDFAAPGCVQEALIRRAQHGIFGYSEPDAAYFDVMRKWFEERFSWTTERDWLTITPGVVNALYLAVRALTKQNDGIVIQQPVYYPFEASIRKTGRQLLVNELVYKDGYYSIDFQDFEEKIKQAKMFILCNPHNPVGRVWNRDELTRMGEIALSHGVTVIADEIHEDFVFSGHKHLVFAALNPDFANITVTCTSPSKTFNFAGLLCANIFISNKDMRDKFKEEYVGCGLASRA

SEQ ID NO: 64645 - DNA, 1128 bp, Unknown
  Obtained from environmental sample
  misc_feature (1)..(1128): n is a, c, g, or t
atggacataagcacaatatgcgtacacggatgtgaaaaaaaattcgatacgaccggatcggtcgccgttcccatattcgcctccgccactttcgcccaccccggcgtgggacgcagcacgggatttgattactcacgctcgctcaaccctaccactgtgcatctggaagacactgtcgccgcgctggaagggggcagtcaggcaatagcgttttcttccggcatggcggcggtttcggcattaatggaactgttttcgccgggcgatcatatcatagcctccgatgacctttatggcggcacagtccgcctttttacgcatatatccgaaaagaacggtgtaaaagtttcttatgcctcggcggaaaacatcgaaaaaggaataactccgtccacaaaagccgtatttatagaaacgccttccaatccgatgatgcgcgtaacggacatcgcggctgtcgcggcaattacgaaaaaacataatatgctccttattgttgacaacacgttccttacgccgtattttcaaaaaccgttttctcttggagccgatattattctgcacagcgggacaaaatatttaggcggccacaacgataccctgtcgggaatgttggttgtaaatgatgcggccatcggggaaaaattaaggtttatcgccaaaacaacaggaggatgcctctcgccctttgacagtttcttaattattcgcggcattaaaacgctcgcgatccgcatggaacgccagcaggagaccgccctgaaaatcgtgcgccggcttttggaacaggacgcggtaaaaaaagtgtattatccgggattgaaagaacaccccgattatgaaatatccgcccgtcaggcaagcggttttggcgcgatgatctctttttccgtgcgggacgggcaaacggcggtacgcatactggaaagcgtaaaagttataaaatacgccgaaagtttaggcggcgttgaaagcctcattacataccccatgcttcaaacccacgccgaccttcccgaaagcgagcggatctcgcggggcatagatgattgtttattgcgcttatcggtcggactggaagcgccggacgatctaatcgccgaccttaaacaggcattcggggactga

SEQ ID NO: 64646 - protein, 375 aa, Unknown
  Obtained from environmental sample
  DOMAIN (12)...(311): Aminotransferase class I and II
  misc_feature (1)..(375): Xaa is any amino acid
MDISTICVHGCEKKFDTTGSVAVPIFASATFAHPGVGRSTGFDYSRSLNPTTVHLEDTVAALEGGSQAIAFSSGMAAVSALMELFSPGDHIIASDDLYGGTVRLFTHISEKNGVKVSYASAENIEKGITPSTKAVFIETPSNPMMRVTDIAAVAAITKKHNMLLIVDNTFLTPYFQKPFSLGADIILHSGTKYLGGHNDTLSGMLVVNDAAIGEKLRFIAKTTGGCLSPFDSFLIIRGIKTLAIRMERQQETALKIVRRLLEQDAVKKVYYPGLKEHPDYEISARQASGFGAMISFSVRDGQTAVRILESVKVIKYAESLGGVESLITYPMLQTHADLPESERISRGIDDCLLRLSVGLEAPDDLIADLKQAFGD

SEQ ID NO: 64647 - DNA, 771 bp, Unknown
  Obtained from environmental sample
  misc_feature (1)..(771): n is a, c, g, or t
atgacatcccgtgaacgtgaaatttttgacttattaattaaaggactcccgccaaaggaaatagccagtaagctgaatatcagtcatgctacagtagatttccaccgcagcaatatatacaaagaactgggtgttcacagcatacaggaacttcttgccaaatactcacccggtaccaaagcccctgaaccggatgccgcgccccttgtttccgatgccaaaaagcaatctgctcattcagcgcaggcggatataataccaatgtataatatgggtttctttggttcgaccgacagggaaatagggggaaactctaccgcggaagtttatgtaacaaaggatgaaattgacggggagagcgttgacagtgttttaaatattaaaatagaaatggcggagattggaggcgacagggaatacgctcaggcgtttacccataaatacgacatacttaaacggttaaggaaagcaaacggaatacggtttaaggcgaaaggagacggaacaacgtggtatttggaattaaaaacgccggaatcaaccgcagaagtacgtttcgctaattatcaatttgaattcggaactatacgcgatcaggttattgttgttgacataccgtattcaagtttatatatggctgagtgggcggaaagacaatattattttgagtttaaaaaagaaacaataatcggcatggatatttgtacaaaacctttcaagcatggaaacacttcgttttttttgcaaatttttgattttgagatttattaa

SEQ ID NO: 64648 - protein, 256 aa, Unknown
  Obtained from environmental sample
  DOMAIN (2)...(55): Bacterial regulatory proteins, luxR family
  misc_feature (1)..(256): Xaa is any amino acid
MTSREREIFDLLIKGLPPKEIASKLNISHATVDFHRSNIYKELGVHSIQELLAKYSPGTKAPEPDAAPLVSDAKKQSAHSAQADIIPMYNMGFFGSTDREIGGNSTAEVYVTKDEIDGESVDSVLNIKIEMAEIGGDREYAQAFTHKYDILKRLRKANGIRFKAKGDGTTWYLELKTPESTAEVRFANYQFEFGTIRDQVIVVDIPYSSLYMAEWAERQYYFEFKKETIIGMDICTKPFKHGNTSFFLQIFDFEIY

SEQ ID NO: 64649 - DNA, 1896 bp, Unknown
  Obtained from environmental sample
  misc_feature (1)..(1896): n is a, c, g, or t
atgaaaaacgtatttaaaattaaaatgttcggaaacctcaaccgagaccgaaggtcgaaggttcccctcttgattattgcgcttttggcaataattatgttttctttggcaacttgcagtaatgatgatgcaagcggtaataacccgtttatcggtacatgggaaagtgatgagttagatttaacattaacattgacagattccacgtggacaaatggatacgcttcaggcacttatacctataacggtaatacagcaacattaattgattctgacggtgataaatatggaaccatcactatttccggaaacacaataacaataaaattagcaccgaattattgggggttggaaggtaaactcacaaaatccgatggcaaacccaaaaccccaaccgccgcgcactttaccatcagcggagcggggacggtttattttgatcctaaagtcgcgactcctccggtaaccgttacagctcaaacaggcaaaaccacaggaaaaataaccgttaattatgaagggacaggcggcacggtatatcctaaagttgaagcagtccctgtttttttcggaacatataaagtaacatttgacgtggcggcggcaacagggtggaatgaggcgaaaggacttaacgccggaacactcactatcgccgacggaacgcccggtactccgacaggcttaaacgtagcgataggatccgcaaattcattaaaagtaagctggacttctgttgatcgcgcaaccagctacaaagtttattacataacaaacggaactaatactaatcccgccccggttgatcctaccccggttgatcccactcctgccgattatactgtaactaatccaagtttttcaggctggggtggtttgggaagcgtaacaggaagtacgtttaatatggaaaaagaaccgtcaaatacatatctttgcagaaccacatattcattccccacgcaagcgtcttcttattcaaattttgctgtttcttataccgttacaaaaacaaaagataccgataagagaattaaacttaaatttacggatgttgccaaagatgactgggatgaaacttcaaaaacttttgatggctggatggatcatgaaagcaacggaacgtatacttacactcacgcccgtacaaacaaaaacactttttcgattgagataaacaaatatgacgacaatgaaacgaccgctgattttactatcgttattaattctattaagttttccaatccctccggcaattccggcaactccggtaactcaggcaactccggcaatgcgctaaagcttgccggaactgttaatacaaattcgcttacccatagcaatttaacgcttaatttgaatgacatatatttttactacgtcatcgccgttaattccagtggagaaagcgactattcggatttcaagtctattgtaattgataagcctgttactcctgtaaacgtgtcagcgacggcggattcatccaacaagataaccattagatggggcgcagtttcaggcgctacaggctataaagtatattctgcaaccagtgaatcaggtgaaaaaacattacgttcatcgccaagctatagttccgcaaccgtctcctcgctttccgccaatactacttattatttctttatacaagccgtgaacggtatgggagatagcgcttattcaacagcggtttccgcgaaaacgcttcctgccgccgcggctaacgcacctaaaatcacagatgttagtgtgagttctgataggatatttgtaacatgggcaaaaacaggagccacatactacaagctttattacgcaacttctcctgatggtcctaaatcggttgctatgaactttataacgcttacgagtggtatatctcggccaatctga

SEQ ID NO: 64650 - protein, 631 aa, Unknown
  Obtained from environmental sample
  DOMAIN (483)...(562): Fibronectin type III domain
  misc_feature (1)..(631): Xaa is any amino acid
MKNVFKIKMFGNLNRDRRSKVPLLIIALLAIIMFSLATCSNDDASGNNPFIGTWESDELDLTLTLTDSTWTNGYASGTYTYNGNTATLIDSDGDKYGTITISGNTITIKLAPNYWGLEGKLTKSDGKPKTPTAAHFTISGAGTVYFDPKVATPPVTVTAQTGKTTGKITVNYEGTGGTVYPKVEAVPVFFGTYKVTFDVAAATGWNEAKGLNAGTLTIADGTPGTPTGLNVAIGSANSLKVSWTSVDRATSYKVYYITNGTNTNPAPVDPTPVDPTPADYTVTNPSFSGWGGLGSVTGSTFNMEKEPSNTYLCRTTYSFPTQASSYSNFAVSYTVTKTKDTDKRIKLKFTDVAKDDWDETSKTFDGWMDHESNGTYTYTHARTNKNTFSIEINKYDDNETTADFTIVINSIKFSNPSGNSGNSGNSGNSGNALKLAGTVNTNSLTHSNLTLNLNDIYFYYVIAVNSSGESDYSDFKSIVIDKPVTPVNVSATADSSNKITIRWGAVSGATGYKVYSATSESGEKTLRSSPSYSSATVSSLSANTTYYFFIQAVNGMGDSAYSTAVSAKTLPAAAANAPKITDVSVSSDRIFVTWAKTGATYYKLYYATSPDGPKSVAMNFITLTSGISRPI

SEQ ID NO: 64651 - DNA, 990 bp, Unknown
  Obtained from environmental sample
  misc_feature (1)..(990): n is a, c, g, or t
atgctggaagaaccgacgcgtcggaaaatcgccctctttaccaacgtagatcctgacgcggtttttacttcacccgacattagtacgaccatttatcaaataccgatggttttctttgatcaaaaacttgatcaggttattcttcgcaaaatgggcgttgaaagccgtcatgccgatatgcgcccgtggcattccgtaatggagcgtttttccgcgcgtaagggaaaagtgcgcgtcggcgttgtcggaaaatatatggagttacacgacacttatacgtcgttatatgaagcgttattccacgcaagccttgaatgcggcgtagaaatggaactggtaaaaatcgattcgtccaaacttgaggaaacggaaaacactaacgcaattttgggaaaaggcgaaaacgcaaaaaactgtatgtttcaggttgacggcattttggttcccggcggtttcggcgagagaggaatcggcggcatggtaagagcggcggcttgggcaagaacgaataaagttccgtacttgggaatttgtcttggtatgcacataatgataatcgattggggacgcaatgtgctgaattgggcggacgccgattcaaccgaatttaaccgtgactcgaaacaccctgttgtgagtcttcttgaagaacaggtcaatgtaacaaattacggcggaaccatgcgtcttggcgcaatggaaaccgtaaacgaaaacggcactcatattttagcggcatacggcgaaaagcgaattatggaacgccaccgccaccgctatgaatttacaaaccagtaccgcgaagaaatgacaaagacaggacttaaacttgcggcttttaattccgacggctctctggttgaatgtgttgaatggactgatcacccgtggggtgtcgccgttcaatttcatcccgaatttaaatccaaacctacggcggcggctccgctgttcagggaatttattacggcggttaaaaagaacaaatga

SEQ ID NO: 64652 - protein, 329 aa, Unknown
  Obtained from environmental sample
  DOMAIN (107)...(306): Peptidase C26
  misc_feature (1)..(329): Xaa is any amino acid
MLEEPTRRKIALFTNVDPDAVFTSPDISTTIYQIPMVFFDQKLDQVILRKMGVESRHADMRPWHSVMERFSARKGKVRVGVVGKYMELHDTYTSLYEALFHASLECGVEMELVKIDSSKLEETENTNAILGKGENAKNCMFQVDGILVPGGFGERGIGGMVRAAAWARTNKVPYLGICLGMHIMIIDWGRNVLNWADADSTEFNRDSKHPVVSLLEEQVNVTNYGGTMRLGAMETVNENGTHILAAYGEKRIMERHRHRYEFTNQYREEMTKTGLKLAAFNSDGSLVECVEWTDHPWGVAVQFHPEFKSKPTAAAPLFREFITAVKKNK

SEQ ID NO: 64653 - DNA, 642 bp, Unknown
  Obtained from environmental sample
  misc_feature (1)..(642): n is a, c, g, or t
atgatgaataaacgtaaaatatcaaatataaatcttcacggcttatgtttaataatttttttattattcagcgtaaaaaatatttatgccgatagattttcttttaaagcggacaaaatgtccggttcaaaggcgttgggtagcgagacgactattttaaccgggcatgcggaagttcgctctgacagtttactgttacgcgccgatagaatagaaatacagggaaaagacaaccaatttatcgtatgtaccggtaatgtgtggggacatgaagaagacaagaatatcttatttcttacagacaaactccgttacgatcgcaaattaaaaatcgcgcggcttgagggaaattcatctttagaggatagggagaacgagattgtaacaagagcgcgatttcttgaatatgacgataaaaacgaaatcgctgtttttcaaatcaacgtgcgcctattcaaagatgacatggtttgccgttccgaatacgcgatttatcatcgtaaggaaaaattactcgatctttccggttttccggtagtatttaaaaaggatgatgaattccgcgcggataaaattcgtgtggatttagatacggatgacgttattatggaaggaaccgtttccggaacaataatgaattaa

SEQ ID NO: 64654 - protein, 213 aa, Unknown
  Obtained from environmental sample
  SIGNAL (1)...(26)
  misc_feature (1)..(213): Xaa is any amino acid
MMNKRKISNINLHGLCLIIFLLFSVKNIYADRFSFKADKMSGSKALGSETTILTGHAEVRSDSLLLRADRIEIQGKDNQFIVCTGNVWGHEEDKNILFLTDKLRYDRKLKIARLEGNSSLEDRENEIVTRARFLEYDDKNEIAVFQINVRLFKDDMVCRSEYAIYHRKEKLLDLSGFPVVFKKDDEFRADKIRVDLDTDDVIMEGTVSGTIMN

SEQ ID NO: 64655 - DNA, 651 bp, Unknown
  Obtained from environmental sample
  misc_feature (1)..(651): n is a, c, g, or t
atgaaaaaacgcgaggtagccggacttcttggtcccaacggagcgggcaaaactacaattttctacatgattgtaggtttttatcagccaacaatgggttatgtgacaatggatgatattgatataactcaactaccgatgtaccgccgagccagaatgggcatcgcctatcttccgcaggaagcctcgattttccgcaaacttactgttgaacaaaatatctgggcgattttggaaagccgtcaggatattgacgacgacgcaaaaaaagaaaaactggaaagtcttttagacgagttcggcatagggcgtatacgcacgcaattagggtacactctttcaggcggagagagacgccgcacggaaatcgcccgcgctctcgctacagagccgaaatttctgctattagacgaaccttttgccggaatcgacccaatcgcggtttatgagataaaacaaattatccgccaacttgcgaaaaaaggcattggaattcttattacagaccacaatgttcgtgatacactggaaataacaaacgaagcgtttatcatcgctgacggaaatattttcgccagaggtgataaagacgttattttgaataacgagatggttagaaaagtttatttgggcagtgaatttagaatgtaa

SEQ ID NO: 64656 - protein, 216 aa, Unknown
  Obtained from environmental sample
  DOMAIN (4)...(188): ABC transporter
  misc_feature (1)..(216): Xaa is any amino acid
MKKREVAGLLGPNGAGKTTIFYMIVGFYQPTMGYVTMDDIDITQLPMYRRARMGIAYLPQEASIFRKLTVEQNIWAILESRQDIDDDAKKEKLESLLDEFGIGRIRTQLGYTLSGGERRRTEIARALATEPKFLLLDEPFAGIDPIAVYEIKQIIRQLAKKGIGILITDHNVRDTLEITNEAFIIADGNIFARGDKDVILNNEMVRKVYLGSEFRM

SEQ ID NO: 64657 - DNA, 918 bp, Unknown
  Obtained from environmental sample
  misc_feature (1)..(918): n is a, c, g, or t
gtgaatttagaatgtaagagagaaaaaatgaaagtctttattatttgtctggaagaagaaaaagaaaaagccttacatcttggatctttccttgaaaaaacaggtgtttcctcggaaacacttcttattaaaaccaaagatgaagaacggaaggcaatcgaaaatttcacccacattgtaattctttcaaagcttggatccgggtggatagatttttttgcgggatttttctgcggttcgcatattcccattcttgtatttggtgataaagctatcgaaaacattcccgatgtatttgctttttgctttaaattttttgacactgaaggaaaattgtacggctatctcgcgtgggaatgcgaaactttcaaaaagaatgaaacgacaaatcacgccaagcaagccttgcttgacagaggcattcccactacaaacgacgctcttattatgtgtgttgcccacggtgaagaagatgaagtttctctattttttgccgccggtttttcgcccgatacaaaagataaaaaaggaattcccttgcttagtctttccgcgagaagcggacagttaaatattcttaagcttctgcttcgttccggcgctcaagtaaacctcattgccgaagacaggggttctacagctcttcttgacagcgctattgaaagaaacaaagatatggtaaaaatccttattgaagccggagcggatgtgaacattcagagcaaggacggacagacagcgttagttgtcgttgtaggcgcaggcgatgaggaacttgccgaaatgctggttaaagccggagccgaccctgacattaaagacgctcttggcgtcagcgcaagaaagtacgccactatttttagtaatagtaaaatgctagcaatgtttgacgctaatacggcaaacaaagcgacctaa

SEQ ID NO: 64658 - protein, 305 aa, Unknown
  Obtained from environmental sample
  DOMAIN (210)...(242): Ankyrin repeat
  misc_feature (1)..(305): Xaa is any amino acid
MNLECKREKMKVFIICLEEEKEKALHLGSFLEKTGVSSETLLIKTKDEERKAIENFTHIVILSKLGSGWIDFFAGFFCGSHIPILVFGDKAIENIPDVFAFCFKFFDTEGKLYGYLAWECETFKKNETTNHAKQALLDRGIPTTNDALIMCVAHGEEDEVSLFFAAGFSPDTKDKKGIPLLSLSARSGQLNILKLLLRSGAQVNLIAEDRGSTALLDSAIERNKDMVKILIEAGADVNIQSKDGQTALVVVVGAGDEELAEMLVKAGADPDIKDALGVSARKYATIFSNSKMLAMFDANTANKAT

SEQ ID NO: 64659 - DNA, 483 bp, Unknown
  Obtained from environmental sample
  misc_feature (1)..(483): n is a, c, g, or t
atgattttgtatcatggcggcactgatattatcaaaaagctgattattaaacctcaatctgcaggcagagattttggcgcaggtttttattgtacggatatacgcagtcaggcggaaaaatgggctatgcggcaagggcggatcagaaagcaaaacgccgtcttgaacatatatgaatttgatatatctcgcgctcaaagcgatctcaagttaaaaatgtttaatgattattcaaatgaatggcttgaacttgtaatcaactgccgtaaaaattatgagtatgcgcatggttttgatattgtacacggaaaaattgccaatgatgatgttggcgaaactgttcaggcagttgtagacggacttatgtcttatgatttcgcgcttcanaaactcatttttatgccatcaaataatcagtattgtttttgtacggagaaatctttagcgtatcttgaatttaccgaatccgtaaatttggagtaa

SEQ ID NO: 64660 - protein, 160 aa, Unknown
  Obtained from environmental sample
  misc_feature (1)..(160): Xaa is any amino acid
MILYHGGTDIIKKLIIKPQSAGRDFGAGFYCTDIRSQAEKWAMRQGRIRKQNAVLNIYEFDISRAQSDLKLKMFNDYSNEWLELVINCRKNYEYAHGFDIVHGKIANDDVGETVQAVVDGLMSYDFALXKLIFMPSNNQYCFCTEKSLAYLEFTESVNLE

SEQ ID NO: 64661 - DNA, 951 bp, Unknown
  Obtained from environmental sample
  misc_feature (1)..(951): n is a, c, g, or t
ttggtatggttcttgctggtatataagcagatagcaagggggcatatcatgaaaggaaaacagaaaaagagcttaaaggtggaagaggccgctaatggcaagaccagaaccggcggaaagaacggtgaaaacatactgtccatgtatttgaaagaaatcaaccgcatccctttattaacaagggaagaagaggacagtattgcgcgcgctgctgcgaacggtagtattacggcacgcaacaaattgatcagcagtaacctccgctttgtcgtcaatgtggcgaagaggtatcaggggcatgggatgcctctgatggatctaatcagcgaaggcaatatcgggttgataaaagctgttgagaaatacgatgcggacagggggttccattttatttcttacgcggtgtggtggatacgtcaaaccatactcaaggcgcttgccgatcaatcaaggcttatccgtctgcctgtcagccggacaaacgaccttatccagattgaaaaagcgaaaaaactgcttgccggcagccaaagttgtgagactgagatacgtgaactggcgcagttgcttagtatggacgaaggccacattgaggacatgctggcaatctccagagagactctttcgctggaaaaatcggtcgacgccggcaggaacgcatcgccgcttggaaactttgtagttgacaaccgctacgacgcgcccgatcaggcaattttcaataagttcctgaagcacgacattgaggaagtgttaaacaccctcagcagcaaagaggcggaaataatacgctgccgctttgggcttggacagcgcaagccgatgaacttccaggaaatcggcgattgctttgacctttccaaggaacgcatccgtcagattgaagaaaaagccataaggctccttcagcagcccagccgcaaatccaaactggaggcctatgtcgcgtaa

SEQ ID NO: 64662 - protein, 316 aa, Unknown
  Obtained from environmental sample
  DOMAIN (43)...(79): Sigma-70 factor, region 1.2
  misc_feature (1)..(316): Xaa is any amino acid
MVWFLLVYKQIARGHIMKGKQKKSLKVEEAANGKTRTGGKNGENILSMYLKEINRIPLLTREEEDSIARAAANGSITARNKLISSNLRFVVNVAKRYQGHGMPLMDLISEGNIGLIKAVEKYDADRGFHFISYAVWWIRQTILKALADQSRLIRLPVSRTNDLIQIEKAKKLLAGSQSCETEIRELAQLLSMDEGHIEDMLAISRETLSLEKSVDAGRNASPLGNFVVDNRYDAPDQAIFNKFLKHDIEEVLNTLSSKEAEIIRCRFGLGQRKPMNFQEIGDCFDLSKERIRQIEEKAIRLLQQPSRKSKLEAYVA

SEQ ID NO: 64663 - DNA, 900 bp, Unknown
  Obtained from environmental sample
  misc_feature (1)..(900): n is a, c, g, or t
atggataaaaaattttcttcgcttcatacacataccgtattctgcgacggcaaagacaatgtggaaacaatgtgtcggacggcttatgaaaaagggctcgcgtccatcgggttcagcagtcatgctcctgtcgggaaaaccgggctaaaaacacactggcacataaaagacgataagcttggggaatatattaacgaggttaaggccgcccggcttcgctgggaggggaagctccccgtctaccttgggcttgaggtagattacatcaaaggtttacgctcgccattggacagcgacattaaggacttaaacctggattacaccattggcgctgtacattacctgacaccgccccacggcgacttgtttacaattgacggccatcttgaagaactggagaacggcatactgaacggttttgacggcgatggggaagcaatgttaagcgcctacttaaacaatgttatggaaatggtcaccttgggcggatttgacattgtagcccatcttgatctggtaagaaaaaatcttcacttgcaaagaagccccgcttttttggagaggcagggccgttggtttgaagtggagaacgcggattatatgcagaaggtggaagaaatcgcccgcgccatttccgccgcaggtcttgtggttgaggccaacaccggcggaattaaccgtggctatattaaagatacctatccctcatttgcggttttacctctgatgcacaaatacaaaattccggttatgatcagcgccgacgcccataatcccaatgacctggacggccattacagagaagcgcgtcaaatcttgctcaatgcgggctataccaaacatgtcctatttgaaggcagaaaaaacggaaaaccaatctggactgaacgtccgctttga

SEQ ID NO: 64664 - protein, 299 aa, Unknown
  Obtained from environmental sample
  DOMAIN (6)...(260): PHP domain
  misc_feature (1)..(299): Xaa is any amino acid
MDKKFSSLHTHTVFCDGKDNVETMCRTAYEKGLASIGFSSHAPVGKTGLKTHWHIKDDKLGEYINEVKAARLRWEGKLPVYLGLEVDYIKGLRSPLDSDIKDLNLDYTIGAVHYLTPPHGDLFTIDGHLEELENGILNGFDGDGEAMLSAYLNNVMEMVTLGGFDIVAHLDLVRKNLHLQRSPAFLERQGRWFEVENADYMQKVEEIARAISAAGLVVEANTGGINRGYIKDTYPSFAVLPLMHKYKIPVMISADAHNPNDLDGHYREARQILLNAGYTKHVLFEGRKNGKPIWTERPL

SEQ ID NO: 64665 - DNA, 309 bp, Unknown
  Obtained from environmental sample
  misc_feature (1)..(309): n is a, c, g, or t
atggggaatgttttaattcctgcatttatcttgcaatctgggctgaaggcaaggagattaccacccacggaggggttattaagcgcggacggggaactctctgcgatccagcaggcgttcatcgacgagggcgcggtgcagtgcggtttttgcacgccgggctttttgatgagcgccactgaaattatacgctccggaaaaacctacagcgacgcggaactgcggaaactgctgtccgggcacttatgccgttgcacgggctatgagaacatattccgcgccgtaagaaaacttgctggtcagaaataa

SEQ ID NO: 64666 - protein, 102 aa, Unknown
  Obtained from environmental sample
  DOMAIN (24)...(97): [2Fe-2S] binding domain
  misc_feature (1)..(102): Xaa is any amino acid
MGNVLIPAFILQSGLKARRLPPTEGLLSADGELSAIQQAFIDEGAVQCGFCTPGFLMSATEIIRSGKTYSDAELRKLLSGHLCRCTGYENIFRAVRKLAGQK

SEQ ID NO: 64667 - DNA, 345 bp, Unknown
  Obtained from environmental sample
  misc_feature (1)..(345): n is a, c, g, or t
atgagaaaacagcttgtgcgttgtaccattaacggcaaggccacggaaaccatggtggacatccgtgcatcgctgacagacatgctgcgtaatgaataccgcttgaccagcgtcaaaaaaggatgcgaggtgggtgagtgcggggcctgcaacgtgatcatcaatggggaatgttttaattcctgcatttatcttgcaatctgggctgaaggcaaggagattaccacccacggaggggttattaagcgcggacggggaactctctgcgatccagcaggcgttcatcgacgagggcgcggtgcagtgcggtttttgcacgccgggctttttgatgagcgccactga

SEQ ID NO: 64668 - protein, 114 aa, Unknown
  Obtained from environmental sample
  misc_feature (1)..(114): Xaa is any amino acid
MRKQLVRCTINGKATETMVDIRASLTDMLRNEYRLTSVKKGCEVGECGACNVIINGECFNSCIYLAIWAEGKEITTHGGVIKRGRGTLCDPAGVHRRGRGAVRFLHAGLFDERH

SEQ ID NO: 64669 - DNA, 882 bp, Unknown
  Obtained from environmental sample
  misc_feature (1)..(882): n is a, c, g, or t
atgtatgatatagaagaaatatacgaggctganagcccctctcacgcggttgagttgctgcaacaacatccggacgcgaaaattatcgcggggggcagcgacgtgttaatcgaaatccgcgagggcaggcttgcggggcgcacgttgatgagtattcagaaacttgatgagcttcggggtgtaaggcttgaaaaggatggcgctatacgtattggcgcattgacgagtttttcacatgtcgcgcaagaccctgtcatacaaaaaaatgtcccggtgcttgcggaagcggtgctgaccattggcgggccgcaactgcgtaacatcggtactataggcggaaacgtctgcaacggggtgacctctgcggacagcgcctcaacactgatggcctatgacgcggtaatggaataccttggccccgatggcctgcggctggttcccatttccgctcattatgtaagtgccggcaaaaccgcccttgcccatgacgagattttgaaggctattcttatcccaaaggaaagttatgaaaattgttttggcaattatataaaatacgccatgagggaagctttggacattgcgactctgggatgttcggcaaatgtccggctttcaaaagatcgcaaaactattgacagagcccgcctggcctacggcgttgccgggcctgtccccatgcgggttcccacagcggaacaggcggcagccggaaaaccggcaaacgccgaaactgccgccgcccttgccgaactggtgttaaatgacattaacccgcgctcaagttggcgggccagcaaggaattccgcctgcatcttgcggaagagcttgccaaacgggcgattaccgaatcgcttaaacgcgcgggggtatcgttatga

SEQ ID NO: 64670 - protein, 293 aa, Unknown
  Obtained from environmental sample
  DOMAIN (182)...(290): CO dehydrogenase flavoprotein C-terminal domain
  misc_feature (1)..(293): Xaa is any amino acid
MYDIEEIYEAXSPSHAVELLQQHPDAKIIAGGSDVLIEIREGRLAGRTLMSIQKLDELRGVRLEKDGAIRIGALTSFSHVAQDPVIQKNVPVLAEAVLTIGGPQLRNIGTIGGNVCNGVTSADSASTLMAYDAVMEYLGPDGLRLVPISAHYVSAGKTALAHDEILKAILIPKESYENCFGNYIKYAMREALDIATLGCSANVRLSKDRKTIDRARLAYGVAGPVPMRVPTAEQAAAGKPANAETAAALAELVLNDINPRSSWRASKEFRLHLAEELAKRAITESLKRAGVSL

SEQ ID NO: 64671 - DNA, 612 bp, Unknown
  Obtained from environmental sample
  misc_feature (1)..(612): n is a, c, g, or t
gtgggcgagctagacatcgtaaacggcgatattgttaatacttcgcttaacggtaaaaaaatttgcagccttgaagaacttgtcattgataccctgtaccataccgaacattccgagcatttgaccgccgaggctaccgcccaggttaaaagtaacgcctttagcctgggctgcgcctttgccgaggtggaagtagacatgcccttctgcaaagtcaaactgctggaaatggttaattgtcatgactgcggcacgctgatcaacccgaaaacagccgaagcgcaggttcacggcggcatgagcatggcgattggttatgggttgtacgagaagatgttatacgaccccaaaacaggaaagctcctcaatggcaatctgcttgactacaaactgccgacgattatggatcacccacggcttgaagctgaatttatcgaaaaccacgagccgaccagcccctacgggacaaaagccctcggcgagccgccgaccgtgccgggcgcttcggctattcgtaatgccgtgcttcacgccaccggcgtgggaatcaataccatcccgcttacgcctcatgtgctttttgcggaattcaaaaaagcggggttgctgtaa

SEQ ID NO: 64672 - protein, 203 aa, Unknown
  Obtained from environmental sample
  misc_feature (1)..(203): Xaa is any amino acid
MGELDIVNGDIVNTSLNGKKICSLEELVIDTLYHTEHSEHLTAEATAQVKSNAFSLGCAFAEVEVDMPFCKVKLLEMVNCHDCGTLINPKTAEAQVHGGMSMAIGYGLYEKMLYDPKTGKLLNGNLLDYKLPTIMDHPRLEAEFIENHEPTSPYGTKALGEPPTVPGASAIRNAVLHATGVGINTIPLTPHVLFAEFKKAGLL

SEQ ID NO: 64673 - DNA, 2133 bp, Unknown
  Obtained from environmental sample
  misc_feature (1)..(2133): n is a, c, g, or t
gtgggcaagccgcttgatcaatacaaatccgtatgccgtcatgggacgggctacaccaaacttgaggcggattacaaggatattcattcgagcgcgctttactatgtgcctcaggacgcggactacgaagtgtggaaagtaaaagtaacaaataccggaaacagggcgcgtaaaatctcctgttttggttttgttgaatttacatgcgaaagtttttacgagcaggatcaggtgaatcttcaatatacgcaatttattacccgcacttattttaaggaaaaatttattctgcaaaccattaacgaaaattgtctgaacgccgtaaaccaaagccgcgtagagacgcgctttttcgccatgaccggcgcgaagatcgcaagttactgcggagacaaggcaagttttttgggcaaataccgcgaatacggaaatccaatttccgtggaaaacggcaagctggacggcactctcaactataacctgaacccctgcggcgctttacacacagctttcgatcttgagcccggcaaaagcgccgagtttattttccttctggggcaaaaacgcgaacctcaggtaaaaaaacttgtgtcgcgttacgaggatatgagcctgcccgaaaaagaaattgacaaattaaaaaactactggcacagcagacttgccaaccttacggtaaacacgcccgatgataacttcaacaatatgatcaatacatggaacgcgtaccagtgttttattacctttgtctggtcgcgcgccgcgtctcttatttactgcggacagcgcaacggttacggctaccgcgacacggtacaggatattcagggcatcatccaccttgatcctaaaatggctcttgaaaaaatcaagtttatgatttccgcccaggtcagccacggcggcgcgcttccgcttgtgaaatacgatcacaacccgggacacgaagacaagcccgaagacgagtcctaccgtaaaaacacgggacacccctcataccgcgcggacgacgcgctgtggctgtttcccactgtctggaaatatatctcggaaaccggcaacaccgccctgttagacgaaataatcccgtacgcggacaagggcaaggacactttattcaatcacttgaaaaaagcgataagtttctcgcttaacaatttgggaatacacggccttcccgcagggcttcacgcggactggaacgactgcctccgcctcggtgcaaaaggcgtttccgtatttgtcgcgctccagttgtactatgcgttcgagatcatgattcgtttcgcaaagttcaaaaaaaattccgcggcggagaaagaaatgacgagtcaaaaaaaccgttttggaaaaattatcgaaaaatactgctggaaagacgaccgctttgtgcgcgggatcaccgagaaagacgttacggtcggaaagaaaggcgatccggaagcgaacatctggcttaatccgcaaagctgggcggtattcagcggtttcgctgacgaagcccgcagtaaagcgatactcgatttagtacacaaagaactaaacacaaagtacggcgcgcgccttatgtcgccttcttaccgcaaacacgcctttgacggtgcgcttgccttattgttcaatcncagtacaaaagaaaacggcggtatctttctgcaaactcagggctggataattcttgccgaagcgttgctcggacgaggaaaccgcgccgtcgagtattacttggaaagctgtcccgccgctcagaacgaaatagccgacacacgccttatggagccgtatgtttattcgcaatttacggaaagcgtagacagcccgtttgaaggacgcagtcacgttcactggctgacaggaaccgcaagcacggtaatggtcggcagtgtggaaggcattttgggattgagacccgacattgaaggattgcgcttagcgcctgcaattccctcatcgtggaaatcttttacaatggaaaaatctttccgaggcaaaaaacttaacataaaagtaaataatcccgacggacatgaaagcggctgtaaaaaactgactgtcaacggaacggcggttgaaggaaattatatacctgccggcattttgaaaccggaaaacgaaataattttggatatgtga

SEQ ID NO: 64674 - protein, 710 aa, Unknown
  Obtained from environmental sample
  DOMAIN (2)...(89): Glycosyltransferase family 36
  misc_feature (1)..(710): Xaa is any amino acid
MGKPLDQYKSVCRHGTGYTKLEADYKDIHSSALYYVPQDADYEVWKVKVTNTGNRARKISCFGFVEFTCESFYEQDQVNLQYTQFITRTYFKEKFILQTINENCLNAVNQSRVETRFFAMTGAKIASYCGDKASFLGKYREYGNPISVENGKLDGTLNYNLNPCGALHTAFDLEPGKSAEFIFLLGQKREPQVKKLVSRYEDMSLPEKEIDKLKNYWHSRLANLTVNTPDDNFNNMINTWNAYQCFITFVWSRAASLIYCGQRNGYGYRDTVQDIQGIIHLDPKMALEKIKFMISAQVSHGGALPLVKYDHNPGHEDKPEDESYRKNTGHPSYRADDALWLFPTVWKYISETGNTALLDEIIPYADKGKDTLFNHLKKAISFSLNNLGIHGLPAGLHADWNDCLRLGAKGVSVFVALQLYYAFEIMIRFAKFKKNSAAEKEMTSQKNRFGKIIEKYCWKDDRFVRGITEKDVTVGKKGDPEANIWLNPQSWAVFSGFADEARSKAILDLVHKELNTKYGARLMSPSYRKHAFDGALALLFNXSTKENGGIFLQTQGWIILAEALLGRGNRAVEYYLESCPAAQNEIADTRLMEPYVYSQFTESVDSPFEGRSHVHWLTGTASTVMVGSVEGILGLRPDIEGLRLAPAIPSSWKSFTMEKSFRGKKLNIKVNNPDGHESGCKKLTVNGTAVEGNYIPAGILKPENEIILDM

SEQ ID NO: 64675 - DNA, 1605 bp, Unknown
  Obtained from environmental sample
  misc_feature (1)..(1605): n is a, c, g, or t
ttggtgctttttgcggatcgaaataacgaacgctttttcgataacgaaagcgccgaaatgatgcgttcggcggcgtttttgtttgtgaacgccatcacgcatgacgaaatggaacgcgaagctaagtaccgggatcacctgctgcgggcggcgaatcaggcggcgactttcctgcttaactcggatatagaatcatttgaaagcaacctgcttcaaagcatgaaggtcatgtctgaggctgtaaaagccaaccgcatgtatatctggaaaaactacacggttgacgggcggcttcattgcaaacagttatacgaatggtccgaaaccgcggcgccgcagaaggggaaggagtttactcttggtctgtcgtacagtgataattcccccggatgggaaaaaatcctgtcaagcggaaaatgtataaacaatttggtgcgcaatatgccgctggaagaacagaaagtgttaatcccgcagggcattgtgtccatattggtggtaccggtatttaagaatgatcagttttggggttttgtcggtttcgatgattgttacaatgagcggatattcacggaggatgaagaaacgatcctgcgttccggcagtctgctgttcacccacgctttattccgcaatgaaatgacactgaacctccggaatacttcagtcaaattagaatcggcgctggagcaggcgaccgccgcaagcagggcaaagagcgattttctgtcgcgtatgagtcacgaaatacgcacgccgatgaacgcgattatcggtatgataaaaataggcaagtcagcgttggatatcgagcgtaaagattactgctttatgaaaatagaagacgcggcgaaccacctgcttggcgtaataaacgacattctggacatgtcaaagatcgaagccaataaatttgaactttcagaaactgaatttgaatttgagagaatgcttcggcgtgttgtgaatgtcgccactttccgtatagatgaaaaacgtcaaaaattttccgttaatatagatcattccattccacacacctttataggggacgaccagcggatagcgcaagtcatcaccaacctgcttggaaacgccgttaaatttacccccgaacagggagaaatcagcctaaccgtgcgtcttaaggaaaaagcggacgatctctgtaccctgcaaatttcggtaagcgacacaggaatcggcataagtcccgaacaacaggcaaaattgttccagtcttttgaacaagccgaatccagcacaacccgcaaatacggcggaacggggcttggacttgcaatttccaaaagtatcatagaactgatgggcggcaaaatctggattgaatcggaattgaataaaggctctacttttttctttaccattcagctaagacgcggtacgaatgaaaaacacaggcttttatcttccgatataaactcaaaaaatgtccgtatcatggcagttgacgacgacccggacgtattggtttattttaatgaaatatcacacggcttcagtatgatgtgcgatacagccataagcggagaagaagcgcttgagcttatagacaaaaaggcggctacaatatctattttatag

SEQ ID NO: 64676 - protein, 534 aa, Unknown
  Obtained from environmental sample
  DOMAIN (65)...(209): GAF domain
  misc_feature (1)..(534): Xaa is any amino acid
MVLFADRNNERFFDNESAEMMRSAAFLFVNAITHDEMEREAKYRDHLLRAANQAATFLLNSDIESFESNLLQSMKVMSEAVKANRMYIWKNYTVDGRLHCKQLYEWSETAAPQKGKEFTLGLSYSDNSPGWEKILSSGKCINNLVRNMPLEEQKVLIPQGIVSILVVPVFKNDQFWGFVGFDDCYNERIFTEDEETILRSGSLLFTHALFRNEMTLNLRNTSVKLESALEQATAASRAKSDFLSRMSHEIRTPMNAIIGMIKIGKSALDIERKDYCFMKIEDAANHLLGVINDILDMSKIEANKFELSETEFEFERMLRRVVNVATFRIDEKRQKFSVNIDHSIPHTFIGDDQRIAQVITNLLGNAVKFTPEQGEISLTVRLKEKADDLCTLQISVSDTGIGISPEQQAKLFQSFEQAESSTTRKYGGTGLGLAISKSIIELMGGKIWIESELNKGSTFFFTIQLRRGTNEKHRLLSSDINSKNVRIMAVDDDPDVLVYFNEISHGFSMMCDTAISGEEALELIDKKAATISIL

SEQ ID NO: 64677 - DNA, 630 bp, Unknown
  Obtained from environmental sample
  misc_feature (1)..(630): n is a, c, g, or t
atgccgaacatggacggtatgcgtctttcccacgaaataaagacaaaggtatcagaacattctatagtgataatgatctccgccctcgaatggagcgcaatcgccaatgaagcgaaaacggcgggggttgataaattcttgtccaagccgctgttctcttctacgattgcggaaattatcaatgaatgtcttggtgtagataaacagcaggcggaaagggcgcagtctgcggacattgaaggtattttttccgggcggcatatactgctggtagaagacgtggatatcaaccgcgagattgtacagaccttgcttgaatcaacccaggtggagatagactgcgctgcaaacggcgtagaagcagtccgtatgtttaccgaagcccctgacaagtacgacatgattttcatggatatacagatgccggaaatggacggctatgaggcgacacggcgcattcgtgccatgaatattccccaggctaaaaccattccgataattgccatgaccgctaacgtttttcgtgaggatgttgaaaaatgcctcgccgccggtatggacagccacgttggtaagcccgttgattttgaagaagtactacatcgccttcattcatatttggataaatga

SEQ ID NO: 64678 - protein, 209 aa, Unknown
  Obtained from environmental sample
  DOMAIN (86)...(204): Response regulator receiver domain
  misc_feature (1)..(209): Xaa is any amino acid
MPNMDGMRLSHEIKTKVSEHSIVIMISALEWSAIANEAKTAGVDKFLSKPLFSSTIAEIINECLGVDKQQAERAQSADIEGIFSGRHILLVEDVDINREIVQTLLESTQVEIDCAANGVEAVRMFTEAPDKYDMIFMDIQMPEMDGYEATRRIRAMNIPQAKTIPIIAMTANVFREDVEKCLAAGMDSHVGKPVDFEEVLHRLHSYLDK

SEQ ID NO: 64679 - DNA, 897 bp, Unknown
  Obtained from environmental sample
  misc_feature (1)..(897): n is a, c, g, or t
ttgataaatattgcaagccaatttgttatgaaaaatccgaatcaaataaagaaaacgttgcagtcgaaaaagaattgtcaaaatcctatttgcttgtactattacagagaaaacaattttaattccgttttagaaaggatacttgattatattgtaaaagaacatggtgagaacgcgaatgttcttctactgggtcgtactaataatgacattgagccattaaagacaggagaatttactataaaaaatgataccgttacttataaaaaacatgagaaattaaaaatacaatttctaactgtgcataaatcaaaaggtcttgaagctgacaatgtgattattctaaatatgaaaaacgacaaactcggctttccaaataaaattgcagatgacccaattttacaattatttttaccaactgaagacaattttgcgtttgcggaagaacgccgtttattctatgttgcgcttacacgaacacgcaataaaacatttttgcttgtaccagaccgtaatgcaagcgagtttgcaaacgaaattaaagcgttgtgtcatatagaagtaccagaaggcgaaaaattgataatcaataatccaacctgtccaaaatgtaaaactggtcgattagtaattcgccaagcaaatgctgaaaactttgtaggttgtacaaattatccagtttgtgactatacgaataaaaatacatcaataattaaaaatccgataaaatgcccaatatgcgacggctttcttgttgttcgtaaaagcaagcgtggacaatttttaggttgtacgaattatcccaattattgtaaatatacggcacanatcaataattccaaaattgaaaaaataaatcctaataacgttttggtaaccgacaatactttttcgtag

SEQ ID NO: 64680 - protein, 298 aa, Unknown
  Obtained from environmental sample
  DOMAIN (198)...(237): Topoisomerase DNA binding C4 zinc finger
  misc_feature (1)..(298): Xaa is any amino acid
MINIASQFVMKNPNQIKKTLQSKKNCQNPICLYYYRENNFNSVLERILDYIVKEHGENANVLLLGRTNNDIEPLKTGEFTIKNDTVTYKKHEKLKIQFLTVHKSKGLEADNVIILNMKNDKLGFPNKIADDPILQLFLPTEDNFAFAEERRLFYVALTRTRNKTFLLVPDRNASEFANEIKALCHIEVPEGEKLIINNPTCPKCKTGRLVIRQANAENFVGCTNYPVCDYTNKNTSIIKNPIKCPICDGFLVVRKSKRGQFLGCTNYPNYCKYTAXINNSKIEKINPNNVLVTDNTFS

SEQ ID NO: 64681 - DNA, 780 bp, Unknown
  Obtained from environmental sample
  misc_feature (1)..(780): n is a, c, g, or t
atgtataatttagccatgaactctaagaaggacaggattagtgaattagagactcagatacagcggtatcaggcttcttactacaatggggaagcggaaatttctgatggggaatttgaccttctttggaataagcttaaagctcttgctcctgaaagtgaaatattaaaaaaagtagggacggggactgataccgacggtttcccaaaagcccgacatcttatcccgatgggcagtcaggacaaggcatccaatccgcatgaattcatggaatgggctgaaaaaatgggattggataccaaagaagacgctccgttaaccaataaaaaaaataagttaacaaagaaatttatagttcagtataaattggacggcgcaagccttgaattacagtacgaaaaagggaaacttatccgcgcagttacaaggggcgacggtataataggcgatgacattacggacaacgcgctgcgtatgaaaggcgtggttaaaaaaattgatatttcctttacaggcggcgtaaggggtgaggttgtcatgacccacgatgtctggaacaaaaaatacccatccaaggcaaattgcagaaatgccgccaatgggctgatgcgccgcaaggacggtgaaggctgtgaagacctgcaagtaattgtttatgacgcggcggcttcggatgacgacaggttttttaaagacgaattgcaaaaacttaagatggttgaggacagcgcggatttaaaaccacggaaacaaagtcctttaccacagggcaggaaataa

SEQ ID NO: 64682 - protein, 259 aa, Unknown
  Obtained from environmental sample
  DOMAIN (7)...(256): NAD-dependent DNA ligase adenylation domain
  misc_feature (1)..(259): Xaa is any amino acid
MYNLAMNSKKDRISELETQIQRYQASYYNGEAEISDGEFDLLWNKLKALAPESEILKKVGTGTDTDGFPKARHLIPMGSQDKASNPHEFMEWAEKMGLDTKEDAPLTNKKNKLTKKFIVQYKLDGASLELQYEKGKLIRAVTRGDGIIGDDITDNALRMKGVVKKIDISFTGGVRGEVVMTHDVWNKKYPSKANCRNAANGLMRRKDGEGCEDLQVIVYDAAASDDDRFFKDELQKLKMVEDSADLKPRKQSPLPQGRK

SEQ ID NO: 64683 - DNA, 477 bp, Unknown
  Obtained from environmental sample
  misc_feature (1)..(477): n is a, c, g, or t
gtggtaaaggacatagagacagacgtgtccgatctccgcaaggcccgccccgaaaagcagattgccttcaagttcgagttggaaacggcgttcagcgttttgcgcgaagttatttggagcgaatcgggggcgacatacacgccaatcggcgtagtcgatcctgtgcgtcttgccgggactacggtaaaaagggcgaaccttaacaaccccgatatgatccgctctatgggacttaaaatcggctcaacagtttctgttgtaaaacgcggagaaataatcccgaagatagaagggcttgctcctgtctcgtcaatggaaaagacacaggaaattgaatttccaaaaatttgcggcgtatgcaataccgcccttgttgatgccgggacacggctttactgcccgaacccggcctgcccgaagcgtcttttgcacaggcttgaaaaatgggtatcggtactggatatccgcgaattatga

SEQ ID NO: 64684 - protein, 158 aa, Unknown
  Obtained from environmental sample
  DOMAIN (30)...(110): NAD-dependent DNA ligase OB-fold domain
  misc_feature (1)..(158): Xaa is any amino acid
MVKDIETDVSDLRKARPEKQIAFKFELETAFSVLREVIWSESGATYTPIGVVDPVRLAGTTVKRANLNNPDMIRSMGLKIGSTVSVVKRGEIIPKIEGLAPVSSMEKTQEIEFPKICGVCNTALVDAGTRLYCPNPACPKRLLHRLEKWVSVLDIREL

SEQ ID NO: 64685 - DNA, 708 bp, Unknown
  Obtained from environmental sample
  misc_feature (1)..(708): n is a, c, g, or t
gtgaattgtacccttaaaaccgaagaacttgcggaatacgaaagaatgggagagctttctgccaaaaaagtaatacgtcacattcaaacagaacaagaactttcccttgcggcttttattgcaggttttgactttgaaggagtagccgaaaccacaatggataaaaccgctgccgcaggttttgacactttggaaaaacttcgtctggcggacgcggcagaccttgccgccgtcttgggtcttggagaaataaccgcggaagtaattgtcaaaggtcttaaagaatgcgcctccgaaatggacgaagtattaaagactggatatataacaataacgaagccgccgtcaaaagaatctcagcctctgcgaggaatttctttttgttttacaggagaattaaaatccatgaaaagaagagatgcggaagaaaaaataaagtcactgggagggttagtaaagtcttcggtggtaaaggatctttcttttcttgttaccaatgatcccgagtcaaattcctcaaaaaacatagatgcgcgcaagtttaggataaaaattatcaatgaagacgaattcctaaaaaaaattactttggaatctccaaaaaagcctaaattaaaaaagcagtctgcgtcaaaaaaacaacctgtattaaataaacaaaagacgacaaaaaagcagccgaacttaaaacaaggagaattattttga

SEQ ID NO: 64686 - protein, 235 aa, Unknown
  Obtained from environmental sample
  DOMAIN (117)...(195): BRCA1 C Terminus (BRCT) domain
  misc_feature (1)..(235): Xaa is any amino acid
MNCTLKTEELAEYERMGELSAKKVIRHIQTEQELSLAAFIAGFDFEGVAETTMDKTAAAGFDTLEKLRLADAADLAAVLGLGEITAEVIVKGLKECASEMDEVLKTGYITITKPPSKESQPLRGISFCFTGELKSMKRRDAEEKIKSLGGLVKSSVVKDLSFLVTNDPESNSSKNIDARKFRIKIINEDEFLKKITLESPKKPKLKKQSASKKQPVLNKQKTTKKQPNLKQGELF

SEQ ID NO: 64687 - DNA, 735 bp, Unknown
  Obtained from environmental sample
  misc_feature (1)..(735): n is a, c, g, or t
ttgttcgcggtcatgttgaatttaaaaatgtcagtttcagttatgacggggtacaccgcggttttaaatgacattagttttgacggccaccccggtgaaagcattgccattgtcgggccgaccggcgcgggtaaaaccacgattgtgaatttactgtcgcggttttacaatatcgaagaaggccaggttttaattgacggtcaggatgttatgcgggtaacgttaagttctctgcgaagccaaatgggtatcatgctgcaggacagtttcctttttacgggaacaatagctgataatatccgttacggcaagctggatgccaccgatgaggaaatccgcgccgccgcgcggcttatcggcgcccagcgctttatcgaaaaactgccccagggttacaatactcctgttaccgaacggggtggcagcatttctcagggtgagcggcagcttctcgcctttacccgtacccttatttccaatccgcggattttaattcttgacgaagcgaccagcagcatagacaccggtacggaacagttggtacaggaaggtattcagacactgatgaaaggccgcacctcgtttatcattgcccaccggctttccacgattcggaattgcacaaagataatgttcatcagtgacggacagattgtagaacatggttcccatgatgaactgatggcgatgaaaggccgctattacgaactctaccaggcgcagtataccgagtag

SEQ ID NO: 64688 - protein, 244 aa, Unknown
  Obtained from environmental sample
  DOMAIN (32)...(216): ABC transporter
  misc_feature (1)..(244): Xaa is any amino acid
MFAVMLNLKMSVSVMTGYTAVLNDISFDGHPGESIAIVGPTGAGKTTIVNLLSRFYNIEEGQVLIDGQDVMRVTLSSLRSQMGIMLQDSFLFTGTIADNIRYGKLDATDEEIRAAARLIGAQRFIEKLPQGYNTPVTERGGSISQGERQLLAFTRTLISNPRILILDEATSSIDTGTEQLVQEGIQTLMKGRTSFIIAHRLSTIRNCTKIMFISDGQIVEHGSHDELMAMKGRYYELYQAQYTE

SEQ ID NO: 64689 - DNA, 669 bp, Unknown
  Obtained from environmental sample
  misc_feature (1)..(669): n is a, c, g, or t
atgacgcttgaggaaaaagtcgggcaaatgactcaggcagaacgcggaaatctgcaaaaaggcgatgttgagaaatacttcattggttctgttttaagcggcggcggatcaactccatgggaaaatactccgcagggctggttaaaaatgattaacggctttgtagaagaatctttaaaaacacggcttggtattccggttgtttacgggattgacgcggtacacggacacaacaacgcgcaaggcgcgacgattttgccgcataacatcgctcttggcgctattgccgccggtaaccaacagcgcggagcgcaggcggcgtatacggcgggaaaaattaccgctcaggaaatgattgcggcgggtgtgcgctggacatttgcgcctgttctcggcatcgctcaagatgttcgatggggacgcacttacgaaagtttcagcgaaaatgaaagtattgttacaataatgggcgcaggctttatcaaaggtttgcaggaaaacggagccgccgcctgcatgaagcattatcttggagaaggtcagacaatagacggacgcaatcaggggaacgctattttggatcgcgccggaattgagaagattcttccgccctaccgcgcggcaattaaagagggggcgatgtctttaatgccttcgttttcagtgtga

SEQ ID NO: 64690 - protein, 222 aa, Unknown
  Obtained from environmental sample
  DOMAIN (57)...(222): Glycosyl hydrolase family 3 N terminal domain
  misc_feature (1)..(222): Xaa is any amino acid
MTLEEKVGQMTQAERGNLQKGDVEKYFIGSVLSGGGSTPWENTPQGWLKMINGFVEESLKTRLGIPVVYGIDAVHGHNNAQGATILPHNIALGAIAAGNQQRGAQAAYTAGKITAQEMIAAGVRWTFAPVLGIAQDVRWGRTYESFSENESIVTIMGAGFIKGLQENGAAACMKHYLGEGQTIDGRNQGNAILDRAGIEKILPPYRAAIKEGAMSLMPSFSV

SEQ ID NO: 64691 - DNA, 1047 bp, Unknown
  Obtained from environmental sample
  misc_feature (1)..(1047): n is a, c, g, or t
gtgaacggaattaaaatgcaccagcacaaagaattgcttaccgatttgttaaaagatgaaatgggttttaagggttttgttgtctccgactggtcggcgattaaacaattgaccggcggcagttacaaaatgcagattgcaaacgctattaacgccggagttgatatgtgcatggcgactgacggcagggataattgggtatcatttataagtaatcttattaagttagttgaagatggaactgtcccgatgtcgcgcattgacgacgctgttatgcgcattctgcgctttaaacagagtatggggttatttgaaaatccactgacggcgcaggcgggcgaaatcggtacaaacgaaaacagagccgccgcgcgcgctcttgtttcagattcgcttgttcttttgcgtaacgagaatgacgctgtcaaaaaactttccgagagtaaaaagattttagtcgctggtcaaggcgcaaacgatataggaatgcaatgcggcggatggacaataacgtggcagggttcgcacggcagaattacaaagggaacgacaatacttgaaggaatacagtcggcggtaaacggcaaagcatcggttacttatgccgaagacgggaacgcaaacggctcttttgacgcggtaattgccgtaatcggagaggacccttacgcggaaaccgacggcgaccgttccggcaatatcagtatccgcgccaaagatttggaaatgttaaaaaagacttacggatttcattgccccgttatcgttatcatgttatcaggacgcccgatgaatatcggcgatgagtataaaaagtgggacgcgtttattgcggcgtggctgcccggaactgaaggcagcggaattgcggatgttctttttgggggcaaaagtttcacggggacgcactccgtacacatggcggaaaactttaaatggagaggtttttttcctttttggggcggggctttaggttttaagattagatgtcagggttttaaaattttcaagcgcagttatggggttctttttcaacaaaaccgctaa

SEQ ID NO: 64692 - protein, 348 aa, Unknown
  Obtained from environmental sample
  DOMAIN (132)...(322): Glycosyl hydrolase family 3 C terminal domain
  misc_feature (1)..(348): Xaa is any amino acid
MNGIKMHQHKELLTDLLKDEMGFKGFVVSDWSAIKQLTGGSYKMQIANAINAGVDMCMATDGRDNWVSFISNLIKLVEDGTVPMSRIDDAVMRILRFKQSMGLFENPLTAQAGEIGTNENRAAARALVSDSLVLLRNENDAVKKLSESKKILVAGQGANDIGMQCGGWTITWQGSHGRITKGTTILEGIQSAVNGKASVTYAEDGNANGSFDAVIAVIGEDPYAETDGDRSGNISIRAKDLEMLKKTYGFHCPVIVIMLSGRPMNIGDEYKKWDAFIAAWLPGTEGSGIADVLFGGKSFTGTHSVHMAENFKWRGFFPFWGGALGFKIRCQGFKIFKRSYGVLFQQNR

SEQ ID NO: 64693 - DNA, 1458 bp, Unknown
  Obtained from environmental sample
  misc_feature (1)..(1458): n is a, c, g, or t
ttgaaagccgacaaggttattgcgatctaccgtcgcatgcggaaagagccgttatggagactgcttgcctcagacaacggcccctttgtcattggtcttctgcaatcgcatctttatgagaacgagcggagcttgcccgcttcgatcctgcatgaacgaatcggacgcgatctggaagcgctcagggcgcagggagaaaactttcctcaaactgcccaagtctatatttccgggtggcttgctgaaggttatctggaaaggcgcttccctgccggatccaatgaagaagaatatgaactctccgccgcggctgtcgaggcgatccgtttcctatccggcctggagcagccccactcggccgctaccgaaagccggttggcgctggtgatacaggcattggtgaagcttgccgaagataccgatacggatcaagccaggcggatcgagcggctggaagccgagaaggcgcgcatagaaaaagaaattgatgcaattcaagacggcaggatgcgggtgatcccatatccttcagcgttggaacaaatacgggaaataatttctctggcggatgaattaaccggagactttcgccgcgtccgcgatcaatttgatcaattgaaccgtaaattgagagaagaacttatggacaacgaaggcagccggagcggagtactggattcagtattcacgggttttgaccaaatttctgaaagcgaggccggtaaaacattcacggcattttggcgtttactaaccgatattgaacagtcgacagtgtttgatcaagcgctggacagcgttatgtcccgcgagtttattaatcatctggaattaaagaacatacgctttctaaaacgcatgaaaagcaatttacttgaacaaggcgagatagttcataaagtcctgtatgattttgcacgcagtcttaaacatttcgttcaaagcagtgaataccttgaacaacgccggttaaatcaaattttaaaagacgcgcagcgtaccgcgatggcgattaaggatgaagttagggcaacaaacgtaatcaaggatcttgtgctgaccagcagccgcatccggtcatcgtctcaactggtgctttacgatccatccatacaggccttgcccagcggaatgtatgagggagatattcctgatattgatctggatttcgtagcggaactggttgtccagtcagagatcgactttcgatcgctcaaggcgaatgtacgcgacgtgcttgaaaccctctctcaggcatcgatccatgacgtacttgaacagtaccctgcggctcagggactgggcagcgttgtaggcttgatcgtattgggcagccggtacggcataaaatcagaaaatcgggaaactgtttcatggattggaaatgacgctctcaggcggagcgcacgaatcccccaaatcttttttttaagagagcgaatgaatgagcttgtctga

SEQ ID NO: 64694 - protein, 485 aa, Unknown
  Obtained from environmental sample
  misc_feature (1)..(485): Xaa is any amino acid
MKADKVIAIYRRMRKEPLWRLLASDNGPFVIGLLQSHLYENERSLPASILHERIGRDLEALRAQGENFPQTAQVYISGWLAEGYLERRFPAGSNEEEYELSAAAVEAIRFLSGLEQPHSAATESRLALVIQALVKLAEDTDTDQARRIERLEAEKARIEKEIDAIQDGRMRVIPYPSALEQIREIISLADELTGDFRRVRDQFDQLNRKLREELMDNEGSRSGVLDSVFTGFDQISESEAGKTFTAFWRLLTDIEQSTVFDQALDSVMSREFINHLELKNIRFLKRMKSNLLEQGEIVHKVLYDFARSLKHFVQSSEYLEQRRLNQILKDAQRTAMAIKDEVRATNVIKDLVLTSSRIRSSSQLVLYDPSIQALPSGMYEGDIPDIDLDFVAELVVQSEIDFRSLKANVRDVLETLSQASIHDVLEQYPAAQGLGSVVGLIVLGSRYGIKSENRETVSWIGNDALRRSARIPQIFFLRERMNELV

SEQ ID NO: 64695 - DNA, 378 bp, Unknown
  Obtained from environmental sample
  misc_feature (1)..(378): n is a, c, g, or t
atgccctttattgaaagtcaatataaagtatcaaatgaacgcagcggacgcgccattgccggattgtcaatgggcggaatggagtctcttcacataggcattagtatgcctgaaacattcggctatatcggcgctttttccgccgctccaaccttaccgcttacacctgaacaaatgaaacttcctgacaattacagagataacacattcattatgataacctgcggcatagaggacgggctgctgtctttttccgaaaattataataaatcccttgtaaataacggagtaaaaacttacttttacacaattcatggcggtcatgatttcggcgtttggaaaaacggattgtacaattttgcaaggagaattttttaa

SEQ ID NO: 64696 - protein, 125 aa, Unknown
  Obtained from environmental sample
  misc_feature (1)..(125): Xaa is any amino acid
MPFIESQYKVSNERSGRAIAGLSMGGMESLHIGISMPETFGYIGAFSAAPTLPLTPEQMKLPDNYRDNTFIMITCGIEDGLLSFSENYNKSLVNNGVKTYFYTIHGGHDFGVWKNGLYNFARRIF

SEQ ID NO: 64697 - DNA, 2088 bp, Unknown
  Obtained from environmental sample
  misc_feature (1)..(2088): n is a, c, g, or t
atggataataattcttcattatggtataaaaaccctgcaaaagaatggactgaagctttgcctatcggaaacggcagactcgcaggtatggtgttcggcggagttcagcacgagcgcatacagttaaacgaagaatccctgtggtcaggcggcttcagggatcgcaataacccgcaagccaaaccaaacctggaaaaattgcgttctttgcttaaagcgggaaagatatctcaggcggaagaacttgcgcgtttttccttaacgggattgcctgaatttcagcgtacatatcaaacattgggcgatatgtttattaatttcagcgcaacggacggcgaatgtgaagaatacgttagattacttgatttggaaaacgcggtagcgactgtaagttttaaaaccggcagatacagctatgagcgggaaatttttgcgtccgctccagctgatgttattgttatgcggctgtctacagcgaaccccgagggcatttcctttgatgcgaggctcgtgcgtaaccgtttatgcgatcattgcggaaaaatagactgggaaacagttttttttgacgagatttccggcggcatttccttttgctgcatgatgaccggcgcggcaaaaaacggcgaaatgaaagcaattggcgaatatcttgtattcaaaggcgcaagcgaagcgtatctctatataaacgctgtaacaagcttcagaagcgcagacctgtccgcagattgcctttcggttttaaaaaccgcaaaaaaaagcggatatgagtatttactaaaagaacatatagctgactatcaaaaaattgaacgccgcctgactctgaaactgacaaaagataatgaggtatccagccttcctgtcaatgaacgccttgagctttttaaaaaggatttttcggatataaagctgatagagctgtatttcagatacgggcgttatctcctgatttccagcagccggcccgggaatcttcccgccaatctgcaaggtatatggtgcaacgaattcctgccgccctgggacagcaagtacacgataaacataaacacccaaatgaattactggcctgccgaaatctgcaatctatcagagtgtcatctgccgctgtttgatcacatcaaacgaatgtacganaacggccgccacactgcctgcgctatgtatggcgcgagggggtttgtcgcccaccataataccgacatctggggagataccgctcctcaggatacatggattccggccacatactgggtaatgggagcggcatggctttgtctgcatatctgggaacattatcagtacacattggacagagactttttaaatgaacatttttacctgttaagggattcggctttattctttacggactaccttacggaaaatgaacgcggcgagatgataatatcacccacagtatccccggaaaatacatatattctgcctaatggcgttagcggatgtctgtgcaatggctgcgcgatggattcccagatattaacggaactgtttaacgcctgtataaacgcaagccgtattgtaggcgcggacattgaatttgaaaatcaactttcaacgctgttaaaaaaaatgccgcctgttcgcataggcaaaaacggtacaatacaggaatggctggaagactacgaggaagctgaaccggggcatcgccatatatctcatctgttcgcgttatttcccggaactcaaattaccgtaaggaatactcccgatctggcaaatgccgcaagacgtacccttgagcgcaggttatcccacggcggcggccacaccggctggagcagggcttggattgccaatttctgggcgaaactgggggattcacaaaaagcgtcagaaaatattgatttgctcctcgcaaaatctaccctgcccaatctctttgacaaccatcctccgtttcaaattgacggaaatttcggcggtactgcggcaatagccaatatgctgctacaaagtgagtctgacagcctgataatactgcccgctcttcccattaagtggaaaaacggcgaagtaaacggacttaaagcaaaaggcgggctgaagtcaatatga

SEQ ID NO: 64698 - protein, 695 aa, Unknown
  Obtained from environmental sample
  misc_feature (1)..(695): Xaa is any amino acid
MDNNSSLWYKNPAKEWTEALPIGNGRLAGMVFGGVQHERIQLNEESLWSGGFRDRNNPQAKPNLEKLRSLLKAGKISQAEELARFSLTGLPEFQRTYQTLGDMFINFSATDGECEEYVRLLDLENAVATVSFKTGRYSYEREIFASAPADVIVMRLSTANPEGISFDARLVRNRLCDHCGKIDWETVFFDEISGGISFCCMMTGAAKNGEMKAIGEYLVFKGASEAYLYINAVTSFRSADLSADCLSVLKTAKKSGYEYLLKEHIADYQKIERRLTLKLTKDNEVSSLPVNERLELFKKDFSDIKLIELYFRYGRYLLISSSRPGNLPANLQGIWCNEFLPPWDSKYTININTQMNYWPAEICNLSECHLPLFDHIKRMYXNGRHTACAMYGARGFVAHHNTDIWGDTAPQDTWIPATYWVMGAAWLCLHIWEHYQYTLDRDFLNEHFYLLRDSALFFTDYLTENERGEMIISPTVSPENTYILPNGVSGCLCNGCAMDSQILTELFNACINASRIVGADIEFENQLSTLLKKMPPVRIGKNGTIQEWLEDYEEAEPGHRHISHLFALFPGTQITVRNTPDLANAARRTLERRLSHGGGHTGWSRAWIANFWAKLGDSQKASENIDLLLAKSTLPNLFDNHPPFQIDGNFGGTAAIANMLLQSESDSLIILPALPIKWKNGEVNGLKAKGGLKSI

SEQ ID NO: 64699 - DNA, 1461 bp, Unknown
  Obtained from environmental sample
  misc_feature (1)..(1461): n is a, c, g, or t
ttgggagcagactacggcagaggcttatataagcaactgcaagagacgatagaaaaagtagaaaaactgacctcggaaatccgcgaaataaaaacagcgcatcaaatagaaatcgcaagcctaaaagcggagaatgaaagcctgcggaaagaaaacaccgccctaagaaacgaaaaccaaaagctgaaagccatcatcaataaagacagcagcaactcaagcaagccgccgtcttctgacgccttcaagaagatattcaacagccgcgaaaagacaggcagaaaacccggcgggcaaccgggccacccgggcagcgtcccggttctgtttgagaaccctgcacacattataaaccacaggcgggaaagatgcgcttgcggcggcacagtcgcatacggagaagtttatcaggcgaagcagatagtggaactggtaatcagggcggaggtaaccgagcaccgcagttataccggcgtttgcgagcactgcaacgcaacggtacaaaacgacatgccgttacaagatacaatcacctacggcggaacggtaaaagcgtttgtcgctatgctgggcagcgaagggctggtctccataagccggatacaggcgatgctttgtgaaataaccggcggggcaatcgatctgtccgatggcactattgcgaagtggaaccaggaattaagcggcaaattagcgccgtttatcgaggaaatgaagggaaagctgctgacgcagcctgttttacggaaagacgagacagggatcaggattgccaacatcctgcaatggcttcacgtgctgagcaatgagacgtatacgctgtattttgcaaataagaagcggggcaatgaagcggacaaggaaatcggcatactgcccgcgtacagcggggttctggtacacgatcacctgaaagggctgtacagtttcccctgcgaacatgcggagtgcaacgcgcatgttttgcggtacttgaaatctgcctcggaaacaaataaatgcgtgtgggcggctgccatgacagcgtttttggttgatgccaacaataccgtgaaagaccataaggcaaagaatattcctgcgcttgacagtgcgctgctggccgaataccgcgcccgttacgatgagattcttgaacagggacgccttgagttctttcaaaaagaaaagaaggataacaacagcgaagacatgaagctgttgcggcgactgagggaatataaagacgaacacttgaggttcctgtcggatttccaggttccgtttgacaacaatctggcggaacgggatctgaggatggtaaaaagcaagacgaaagtgtccggctgtttcaggggcaatgagggcggcaccgtttttgcaaatatcaaaagctacacctcaactttgagaaagaattccaggaatattttcaacggcttaaaatctgcctttttgggcctgcctttttcctgggcttga

SEQ ID NO: 64700 - protein, 486 aa, Unknown
  Obtained from environmental sample
  misc_feature (1)..(486): Xaa is any amino acid
MGADYGRGLYKQLQETIEKVEKLTSEIREIKTAHQIEIASLKAENESLRKENTALRNENQKLKAIINKDSSNSSKPPSSDAFKKIFNSREKTGRKPGGQPGHPGSVPVLFENPAHIINHRRERCACGGTVAYGEVYQAKQIVELVIRAEVTEHRSYTGVCEHCNATVQNDMPLQDTITYGGTVKAFVAMLGSEGLVSISRIQAMLCEITGGAIDLSDGTIAKWNQELSGKLAPFIEEMKGKLLTQPVLRKDETGIRIANILQWLHVLSNETYTLYFANKKRGNEADKEIGILPAYSGVLVHDHLKGLYSFPCEHAECNAHVLRYLKSASETNKCVWAAAMTAFLVDANNTVKDHKAKNIPALDSALLAEYRARYDEILEQGRLEFFQKEKKDNNSEDMKLLRRLREYKDEHLRFLSDFQVPFDNNLAERDLRMVKSKTKVSGCFRGNEGGTVFANIKSYTSTLRKNSRNIFNGLKSAFLGLPFSWA

SEQ ID NO: 64701 - DNA, 663 bp, Unknown
  Obtained from environmental sample
  misc_feature (1)..(663): n is a, c, g, or t
gtggaagagatgctgtcattggcggccaattacatgataataagcggaatttcacagtcaatgctgaaactgcgtagtgaggaagctttgaatgacagcaggaaatccctttacaaagcggtaatatactatgaagaggttgtaagcccttatgtggatgcgccgttttcggactacgaggaacgcctgactgaaattgaaaccatagacgctcaaaaacgatataacctgattagaaagacagggcttgcgttgcagcttttggaaaccgcctatggggacaatacaaaatggagatgggcctttgttgaactggaaggccgctttgccgccgttgccaaaaatattatgaatttaagaactgcggtggctaatacggatccgtcttctccggactatgagcccacgatgtaccacctgaggctgattaaaaaactgcttgttcaggccgccgaccgttaccgtgaaaaatatgaattatccaccaaccggattgatgattttaaaatgggcataaattttcttaatgctttacgccgcattcatgcgcttcttggggaacggtctgaagccgaaacgctcaagaaaaaggcggatatttggtcttcgaaactggaaatggatcataaaaagcaggaagaagcgcccctcaggaaaaactaa

SEQ ID NO: 64702 - protein, 220 aa, Unknown
  Obtained from environmental sample
  misc_feature (1)..(220): Xaa is any amino acid
MEEMLSLAANYMIISGISQSMLKLRSEEALNDSRKSLYKAVIYYEEVVSPYVDAPFSDYEERLTEIETIDAQKRYNLIRKTGLALQLLETAYGDNTKWRWAFVELEGRFAAVAKNIMNLRTAVANTDPSSPDYEPTMYHLRLIKKLLVQAADRYREKYELSTNRIDDFKMGINFLNALRRIHALLGERSEAETLKKKADIWSSKLEMDHKKQEEAPLRKN

SEQ ID NO: 64703 - DNA, 1254 bp, Unknown
  Obtained from environmental sample
  misc_feature (1)..(1254): n is a, c, g, or t
atggcctccggcgataacgaatcatcatccaaaaaaacgtctttagcggaattccgttcactgtttccgtattttcgtaaatactctctgaattacgccgtgggctttttctttcttattactgtggatgccgcccaggttataattccccaatttattcgtcaggcggttgatattgcttcgtccggtgtgtttgagataaaaaaagtcattgttccctgcgccgtcatggttggccttatggggattgtttctctggggcgttttttttggcgctacttcattcacggtgcctcccggcgtatcgaaacagagctgcgtgaaaagctttttgaacatctgctttccctctcttatgatttttatcagaaaaacaagataggggatcttatggcgcgggccaccaacgacctgaacgccgtaagggaatcaatcggcatggggcttgtggccatggtggacggcacggtgatggccgccgctattctgataatcatttttattcaggatacgcgtactgccgctttcgctgttattcctttgccgctggtaaccattttgattctctgctttggcaacctcattgggaaacgctttcaacgcgcccaggagacatactcggcgttgagcgatgccgttcaggaaactttttccggcgtaagggtggtaaagtcctttgtaaaggaatggtggttcattaagaaattcgccgataccaacgacgactaccgcgacgcgaatatggaattggtgaagctatttggaatattttttcctttgatctctttcctttcagggctcactgttttaatcgtgcttctggttggaggaataagcgtaaccgaaggtagcatgagcccgggaagcctggtggccctgttccgttaccttaacatgctaatctggccgctcatgggagcgggctttgtcgtgaacatgattcagcgtggcgcggtctcccttggaagggtgaacgaagttatgaaggcagtgcctttaattttctcgcagacggaagcggtaaaaggcgtgtcctcatccgagcctggtgtgcctctaatagaactgcgtaatttaacctttgggttttctaacgggtttcccgaagaaacgccggtgcttgaaaatataaatctttcaataaaagaaggaaccataacgggaattcttggcagaaccggctcaggaaagtcaacgcttataaaggccataacgcggatgattgccgcacctccggggaacagtttttattaa

SEQ ID NO: 64704 - protein, 417 aa, Unknown
  Obtained from environmental sample
  DOMAIN (32)...(304): ABC transporter transmembrane region
  misc_feature (1)..(417): Xaa is any amino acid
MASGDNESSSKKTSLAEFRSLFPYFRKYSLNYAVGFFFLITVDAAQVIIPQFIRQAVDIASSGVFEIKKVIVPCAVMVGLMGIVSLGRFFWRYFIHGASRRIETELREKLFEHLLSLSYDFYQKNKIGDLMARATNDLNAVRESIGMGLVAMVDGTVMAAAILIIIFIQDTRTAAFAVIPLPLVTILILCFGNLIGKRFQRAQETYSALSDAVQETFSGVRVVKSFVKEWWFIKKFADTNDDYRDANMELVKLFGIFFPLISFLSGLTVLIVLLVGGISVTEGSMSPGSLVALFRYLNMLIWPLMGAGFVVNMIQRGAVSLGRVNEVMKAVPLIFSQTEAVKGVSSSEPGVPLIELRNLTFGFSNGFPEETPVLENINLSIKEGTITGILGRTGSGKSTLIKAITRMIAAPPGNSFY

SEQ ID NO: 64705 - DNA, 630 bp, Unknown
  Obtained from environmental sample
  misc_feature (1)..(630): n is a, c, g, or t
ttgccgcacctccggggaacagtttttattaagggagtggaatcttcggcatgggatttggcggatttaagaaaaatcttcggcgttaccccgcaggacagttatctgttttcagattcaataaaaaacaacatcggttacgcggtggagatagaaaaagggaatgaagaaattctgaccagggcggcttcccttgcggctttgaacagcgatttttctgtttttcaagacggctggaacactccaatcggcgaaaggggtcttacgctttcaggcggccagaaacagcgtaccgccatcgcgcgctcggttgccgccgacagggaaattcttatcctggacgattcactttcggcagtggacgcggaaacagagaaaaaaatactggacgccttgtttgagttgggcagggaaaaacgccgctcgggcctcccctggacgatgatcattgtgtcacacagggtctccgctttgagccgctcggatgaggtcattgttttagaaaagggcaggatcattgaaaaagggacgccgatggaacttgcagcacagggcggtttttatgcccgcacggcggccctgcagagcctgggagcccagggttccacaggcggggagggctttgtttaa

SEQ ID NO: 64706 - protein, 209 aa, Unknown
  Obtained from environmental sample
  DOMAIN (3)...(170): ABC transporter
  misc_feature (1)..(209): Xaa is any amino acid
MPHLRGTVFIKGVESSAWDLADLRKIFGVTPQDSYLFSDSIKNNIGYAVEIEKGNEEILTRAASLAALNSDFSVFQDGWNTPIGERGLTLSGGQKQRTAIARSVAADREILILDDSLSAVDAETEKKILDALFELGREKRRSGLPWTMIIVSHRVSALSRSDEVIVLEKGRIIEKGTPMELAAQGGFYARTAALQSLGAQGSTGGEGFV

SEQ ID NO: 64707 - DNA, 546 bp, Unknown
  Obtained from environmental sample
  misc_feature (1)..(546): n is a, c, g, or t
gtgtacacacaggcaatcttcaccatgagaggcaaaccgcaaaacgtcttcggcaaaacgcgggcggccatataccaaaatgaagaactttacgatatgatgatggcgctgggcattgaggaggacgtggagaagttgcgttacaacagaatagtcttagccacggacgccgatgtggacggtttccacataagaaacttattactgactttcttcctcacatactttgaggaactcgtacaagccggacacgtctacatcctagaaacgcctctcttccgcgtccgcaacaaaaaagaaacactctactgctacagcgaaaaagaacgcgacgcggccgtcgccaaaatacgcgacccggaggtaacgcgtttcaagggcctgggagaaatatccccaagcgagttcggtcaattcataggcaaagacatgcgcctagtagaagtcaacgtaaagtcggcgaagaacatcgccgagacgttagagttctacatgggaaaaaatacgccggagcggcgagattttattatggagaatttgatatag

SEQ ID NO: 64708 - protein, 181 aa, Unknown
  Obtained from environmental sample
  misc_feature (1)..(181): Xaa is any amino acid
MYTQAIFTMRGKPQNVFGKTRAAIYQNEELYDMMMALGIEEDVEKLRYNRIVLATDADVDGFHIRNLLLTFFLTYFEELVQAGHVYILETPLFRVRNKKETLYCYSEKERDAAVAKIRDPEVTRFKGLGEISPSEFGQFIGKDMRLVEVNVKSAKNIAETLEFYMGKNTPERRDFIMENLI

SEQ ID NO: 64709 - DNA, 933 bp, Unknown
  Obtained from environmental sample
  misc_feature (1)..(933): n is a, c, g, or t
atgaatctgnaagcgtttattcttggctgcggcggcatgatgccgcttcccaacaggcatttaacatccgttttactaaggcgcgagggcgagctttttctctttgactgcggagaaggcactcaggtttcttggcgccgtcttaaccttcgctggaaaaaaatctcggttatttttataagccatacgcacgcggatcatgttaccggtattcccggcttgttgatgctttcatctcaggtagacagggacgatcctctttacataataggtccgccgcgtattgccgaatatatcgaaaccagccggcgtgtgctggatatgtacattaattatgaaataatcgtaaaagaaattacggctcccggaattgtgtatcagggggaaggttttcatgtaagatgttttccgctgtcgcataccaaaccttgttacggttatacgctggaagaagatatgcgccccggggagtttcacccgcagaaagcggaagaattaaatatcccgatgggaaaattatggggaaaactgcagaagggcgagactattcaaactcccgacggcagggagatacgcccggagcaagttgtgggggctccgcggcaggggcgtaaattttcttttgttacagattctcttgccctgccggaaatctccacccatgttataggctccgatctttttatctgcgagggtatgttcacccatgatttggtagaagacgcccgcgataaaaagcacatgacggcggcggaggcggcaaaaatcgccgcttcttcgcagggtgtaaaaaaattggcgttaattcactatagcccgcgttataccgactacgaattaaaacaactccttgccgaagcgcaggctgtttttcccgatacagttcttacaaaagaccgttatgtttttccgattgaatttgttgataactga

SEQ ID NO: 64710 - protein, 310 aa, Unknown
  Obtained from environmental sample
  DOMAIN (20)...(270): Metallo-beta-lactamase superfamily
  misc_feature (1)..(310): Xaa is any amino acid
MNLXAFILGCGGMMPLPNRHLTSVLLRREGELFLFDCGEGTQVSWRRLNLRWKKISVIFISHTHADHVTGIPGLLMLSSQVDRDDPLYIIGPPRIAEYIETSRRVLDMYINYEIIVKEITAPGIVYQGEGFHVRCFPLSHTKPCYGYTLEEDMRPGEFHPQKAEELNIPMGKLWGKLQKGETIQTPDGREIRPEQVVGAPRQGRKFSFVTDSLALPEISTHVIGSDLFICEGMFTHDLVEDARDKKHMTAAEAAKIAASSQGVKKLALIHYSPRYTDYELKQLLAEAQAVFPDTVLTKDRYVFPIEFVDN

SEQ ID NO: 64711 - DNA, 531 bp, Unknown
  Obtained from environmental sample
  misc_feature (1)..(531): n is a, c, g, or t
gtggatacgccagagcatattaagcgcccttccgaaaaaaccagaatgatacggcttccggtaaaccgcgtattagaacttgtcaaaattgaaaaagcaaagaaaatggttaaaaatcaaaattccgctgaaaaggaaatagccgaacttttaaacatggaaagagaccatgttgtcgaactgctaaatatctccagggatatagtttctttggaaattccggtttccagacacaccgattccatgttaatagacttaatcgaagacagaaagtatacaattcctgataaagtcgctgaacaaaacgcaatggaagccgacattgaaaacgccttaaatactctcgataaagacgaagcggacattattcgttaccattacggtcttggtcatagaaaaccaatgtcattgaaagaaatcggcattgttttcaacctcagcaaggagcgcataagacaaattgaagcgaaagctcttgcaaggctcaaaaaccccctgcgcagcaagaatctacgggtatatgttgcataa

SEQ ID NO: 64712 - protein, 176 aa, Unknown
  Obtained from environmental sample
  DOMAIN (18)...(99): Sigma-70 region 3
  misc_feature (1)..(176): Xaa is any amino acid
MDTPEHIKRPSEKTRMIRLPVNRVLELVKIEKAKKMVKNQNSAEKEIAELLNMERDHVVELLNISRDIVSLEIPVSRHTDSMLIDLIEDRKYTIPDKVAEQNAMEADIENALNTLDKDEADIIRYHYGLGHRKPMSLKEIGIVFNLSKERIRQIEAKALARLKNPLRSKNLRVYVA

SEQ ID NO: 64713 - DNA, 366 bp, Unknown
  Obtained from environmental sample
  misc_feature (1)..(366): n is a, c, g, or t
atgaaaaagaaagaagaaaagaaaagaaaaccggaagaaagcacccttgcgatatttcttaaagaaatcagcaatattccgttgatgagtcgtgaagaagaggaaataacagcccgcgcggccgccgaaggcaataaagccgcaagggaaaaacttataaacgccaacttgcgctttgtcgtaaatatcgcgaagaaataccaggggctgggacttccccttgaagacctgatagccaccggcaaccttgggcttgtaaccgccgttgaccgttttgaagttgataaaaacaaccgttttatttcatacgcggtctggtggatacgccagagcatattaagcgcccttccgaaaaaaccagaatga

SEQ ID NO: 64714 - protein, 121 aa, Unknown
  Obtained from environmental sample
  DOMAIN (13)...(49): Sigma-70 factor, region 1.2
  misc_feature (1)..(121): Xaa is any amino acid
MKKKEEKKRKPEESTLAIFLKEISNIPLMSREEEEITARAAAEGNKAAREKLINANLRFVVNIAKKYQGLGLPLEDLIATGNLGLVTAVDRFEVDKNNRFISYAVWWIRQSILSALPKKPE

SEQ ID NO: 64715 - DNA, 1497 bp, Unknown
  Obtained from environmental sample
  misc_feature (1)..(1497): n is a, c, g, or t
atggcttctgctaccgaattggtcgtagacgaaaataaaattaagaaagcgataaagtccgctcttcctctgactataacgacatatactctgcctaaagaaatagaggtatatcttgaacaggtaatcggagtttttctaaaacatacaaatcaattaaaattaaaagattatatagtctattgcgttcaggaacttgaagttaacgcaaaaaaagccaataccaaacgtgtttattttacggaacacaacctggatattaacgatccggatgattataaatcgggtatggaaaaattcaaggaagatactctttctcaaatagaccggtatcttaatctgcagaaaaaggaaggactgtatataaaggtaattttgcagattaaaaaaaatacgattaacatagaaatacgcaataatgtaaaagccacaaagattgaacagctccgcattcaggataaactggcaagggccagacagtacgacagccttgaagacgccatggaacaggcgctggatgatactgaaggagccgggcttgggcttattattcttgttctgatgttaaaaaaaataggccttactgacgaagctttttccattcaaaccaaagagaaagagactgtagccagtatatccatccctatggacggcgctatgataaaaaatatttcggatctttcaaaggcaattatcgaagatataaacagcctgcctcagttcccggaaaatattttacaagttcaaaaacttattgatgatccaagctctgatatgtcgtccattgcccgtcagatttcgatggatcctgcgcttacgggcgatttattaaaaatcgtcaactccgctcaatatatgctgataaaaaaagtagaaaatatttcagaagcggtaaaaatggtcggtataaaagggcttaaaaatttgctttattcctatggcacgcagaaaatattaggcgatgataccattgataaaaaaagcctttgggaacattcgtacaaaacggcgttttatgcgtacaatctggtaaaaaatttcaagaacgatagtaaccttctggatgatgtatatgtcggcggtatattgcacgatatggggaaaattatttttttcaatgtgcatcccgatttacttaataaaataaaggcattcagcgtaaaaagaaaccttcccgcttcaacctttgaaaacctttccgccggcatgaaccacgcggaacttggcgctttgattgcggaaaaatggaactttccccccagactggctgcggcaatccgctatcatcacgaacccgacacggtaacggatgatttaaaaaatatggttgacgctgtataccttgcaaatatgttctgcgagtatgaaaacaaaaatgccggttttgaccagtttgataccggcgctcttgaaaattacgggctggacagcaaggaaaaactcgatactatacttgaacgttttgcgtcagggtttgtaaaacaaagccaaatttaa

SEQ ID NO: 64716 - protein, 498 aa, Unknown
  Obtained from environmental sample
  DOMAIN (329)...(451): HD domain
  misc_feature (1)..(498): Xaa is any amino acid
MASATELVVDENKIKKAIKSALPLTITTYTLPKEIEVYLEQVIGVFLKHTNQLKLKDYIVYCVQELEVNAKKANTKRVYFTEHNLDINDPDDYKSGMEKFKEDTLSQIDRYLNLQKKEGLYIKVILQIKKNTINIEIRNNVKATKIEQLRIQDKLARARQYDSLEDAMEQALDDTEGAGLGLIILVLMLKKIGLTDEAFSIQTKEKETVASISIPMDGAMIKNISDLSKAIIEDINSLPQFPENILQVQKLIDDPSSDMSSIARQISMDPALTGDLLKIVNSAQYMLIKKVENISEAVKMVGIKGLKNLLYSYGTQKILGDDTIDKKSLWEHSYKTAFYAYNLVKNFKNDSNLLDDVYVGGILHDMGKIIFFNVHPDLLNKIKAFSVKRNLPASTFENLSAGMNHAELGALIAEKWNFPPRLAAAIRYHHEPDTVTDDLKNMVDAVYLANMFCEYENKNAGFDQFDTGALENYGLDSKEKLDTILERFASGFVKQSQI

SEQ ID NO: 64717 - DNA, 324 bp, Unknown
  Obtained from environmental sample
  misc_feature (1)..(324): n is a, c, g, or t
atggttagagttacttccgccacattcagaggtttacgggtttccgtgccgccaaaaataacgtcttccatcttttcggcgcgcagagactttatggcgtgttcccccagcacccacttgaccgcgtccacaacgttggactttccgcagccgttgggaccaagaagggcggtaataccgtcgctaaaggctatatctgtacggtcggcaaaagacttaaaaccgagaattgtaagacgtttaagaaacatattattcctgaatatagcagaaaagaaaaaattttggaatgggagtctgaccactaaaaacttcgatttttag

SEQ ID NO: 64718 - protein, 107 aa, Unknown
  Obtained from environmental sample
  misc_feature (1)..(107): Xaa is any amino acid
MVRVTSATFRGLRVSVPPKITSSIFSARRDFMACSPSTHLTASTTLDFPQPLGPRRAVIPSLKAISVRSAKDLKPRIVRRLRNILFLNIAEKKKFWNGSLTTKNFDF

SEQ ID NO: 64719 - DNA, 714 bp, Unknown
  Obtained from environmental sample
  misc_feature (1)..(714): n is a, c, g, or t
gtggtcagactcccattccaaaattttttcttttctgctatattcaggaataatatgtttcttaaacgtcttacaattctcggttttaagtcttttgccgaccgtacagatatagcctttagcgacggtattaccgcccttcttggtcccaacggctgcggaaagtccaacgttgtggacgcggtcaagtgggtgctgggggaacacgccataaagtctctgcgcgccgaaaagatggaagacgttatttttggcggcacggaaacccgtaaacctctgaatgtggcggaagtaactctaaccatcgcaaacgattccggccttctgcctctggatttgccggaaattgagataaaaaggcggctttaccgctccggcgagagcgagtattttatcaacggcgcacaggtgcgtcttaaagacatccgcgaacttttttgggacaccggcgtaggcaaaaccgcctactccgtgatggagcagggaaggatagaccagattctctcttctaagccggaggataggcgctatctttttgaagaagcggctggtattacgcgcttcaaagaacgcggcgcggagcggagcgcaaccttgccagaccgaggaaaatgtccgccaggtggaaataatcctgaacgaagtaaaacgctcccacgacagcctgaaagtccagtccgaaaagacaatgaagtaccgcaccctgcgcgatga

SEQ ID NO: 64720 - protein, 237 aa, Unknown
  Obtained from environmental sample
  DOMAIN (20)...(196): RecF/RecN/SMC N terminal domain
  misc_feature (1)..(237): Xaa is any amino acid
MVRLPFQNFFFSAIFRNNMFLKRLTILGFKSFADRTDIAFSDGITALLGPNGCGKSNVVDAVKWVLGEHAIKSLRAEKMEDVIFGGTETRKPLNVAEVTLTIANDSGLLPLDLPEIEIKRRLYRSGESEYFINGAQVRLKDIRELFWDTGVGKTAYSVMEQGRIDQILSSKPEDRRYLFEEAAGITRFKERGAERSATLPDRGKCPPGGNNPERSKTLPRQPESPVRKDNEVPHPAR

SEQ ID NO: 64721 - DNA, 999 bp, Unknown
  Obtained from environmental sample
  misc_feature (1)..(999): n is a, c, g, or t
ttgaagaagcggctggtattacgcgcttcaaagaacgcggcgcggagcggagcgcaaccttgccagaccgaggaaaatgtccgccaggtggaaataatcctgaacgaagtaaaacgctcccacgacagcctgaaagtccagtccgaaaagacaatgaagtaccgcaccctgcgcgatgaaattttcaattacgagcttgatatccagctattgcgcttaaagcagttcagaaacgagaggggagagcgcaacgaaacattgaaacggcgcactgccgaccgtgaccgtatccgcgccgagatggaagacgagaacaaagcgcttgaagcccacatggacgaggtaaattccatggaggcgcgttttgtcgaactgcaaaaaaacatttacggtcttgctcttgaaaaaaacgcgcgggaaaacgaggtgcgcctttttaacgaacagcgcggcgagaataaaataaaaatcggccagaacgaggaacgtgaaaaacagattattcaaaaaatagaagaactgaacaacgacgccgccgctcaggacgctattgtcgccgacatgcaaaaacagcttgaaagcatagaagaaaatatccgctcctttgaggaaaacatccagcttgccgcctcccgcataagcgagaatgaaaaggaagtgcatcgtgcggaagaagagatacacaatatcgagaaagagcaggcggaacttgaaaaagagcttgccaaaataacagatgacattgtcgcggaattggacgcgggccttaaaaaagccggctattcggcggttgaacgcaaaaccgcggaagaggcgttacacgaaactttaggccgcctgaacgcttttctcggcggcagggaagcgcttctgcgcgatttaaccgcggcatcatcggcggggggcgttgaaaagcgcgaacttgggcgcattgccggcgctttgacgtcngggcttgccgagccgccacagacgcgcaaaagccctcgaactttttaa

SEQ ID NO: 64722 - protein, 332 aa, Unknown
  Obtained from environmental sample
  misc_feature (1)..(332): Xaa is any amino acid
MKKRLVLRASKNAARSGAQPCQTEENVRQVEIILNEVKRSHDSLKVQSEKTMKYRTLRDEIFNYELDIQLLRLKQFRNERGERNETLKRRTADRDRIRAEMEDENKALEAHMDEVNSMEARFVELQKNIYGLALEKNARENEVRLFNEQRGENKIKIGQNEEREKQIIQKIEELNNDAAAQDAIVADMQKQLESIEENIRSFEENIQLAASRISENEKEVHRAEEEIHNIEKEQAELEKELAKITDDIVAELDAGLKKAGYSAVERKTAEEALHETLGRLNAFLGGREALLRDLTAASSAGGVEKRELGRIAGALTSGLAEPPQTRKSPRTF

SEQ ID NO: 64723 - DNA, 3054 bp, Unknown
  Obtained from environmental sample
  misc_feature (1)..(3054): n is a, c, g, or t
gtgcctttccttcatttctttgacggtttccgcaccagccacgaacttcaaaatattgaggaaatttcctacgatgtaatgcaccagatgattgacgatgatctcgtaaccgcccaccgcacaagagggcttacccccgaaaaaccaagtattcgcggaaccgcccaaaaccccgacacttatttccagagccgcgaaggcgtggacaaatattacgaaaaagttcccggtatcgttcaggcggaaatggacaagtacgcgaaattaacgggcagagcctaccatatctttgattactacggcgcgaaagacgctgagaacgtaatcatcataatgggttcaggcgccgacacttgcgaagagacaatcgactaccttaacagcaaaggtggaaagacaggcatggtaaaagtaaggctgtaccgtcctttcaacgcaaaactttttgtaaaagccctgccttcttctgttaaagcaattgccgtcttagaccgtacaaaagaaccgggttctttgggcgagccgttatatgaagacgtacgcaccgctatcgcggaaatgcaggcttcaggcgaatttaagtctaatcccgttgtactcggcggacgttacggcttaggttcaaaagaatttactcccgcaatggtaaaaggcgtatttgaaaaccttaccggtaaaaaaatcgccaacttcatcgtaggtatcaatgacgacgtgcttggcaagagtattgattacgatccgcattttgtattggaagaagaaggcttgagtgaagcattgttctacggtctgggatcggacggtacggtcggcgcgaacaagaacttcatcaagatcatcagcgaggcgaaacccgagcttaacgcgcaggcgtacttctcctacgactcgaaaaaatcgggcggctttaccgtatcgcatcttcgcttcggcaagggcgctatcagaagaccctaccttatcaactcagcggacttcctcgcgtgccacaaattttcctacatggaaatgtacgacatgcttaaaatgctcaagtcaggcggcacattccttcttaacagccccttcaaagcggcggatgtatggaagaatatccccgtagaggcacagcagcgcataattgacaaaaaattaaaattctatgttataaacgccgccgaaattgcgtttaacaccggcatgggcaaccgcatcaacacggtcatgcaggccgcttatttcaagatttccggcatattgtccgaagaagaagcggtaaggcgcatgaaggaacatatcgaacattcctacggtaaaaaaggaaaagacgtagtagaaaagaactataaaaccgtagacgcgtcattaaccgccgttgaggaagtaaaatatccttccaagaccgaaggcgacatccacatgaaaaaaccctttgccaccgcgaaggattcatggatcaaggaagttctcggaaccatgtctgtacaggaaggcgacaatctgcctgtcagcaaacttccggaagacggaacattcccgaccgccactacccagtacgaaaaacgctccgtcgcggagcgcgttccgctttggaatccggaagtctgtattcaatgcggtaactgtacggtcgtatgtccgcacgcgtgtatgcgttttaagaaccttacagacgatcaggtcgcgaaagcgccgaaaggatttaagacagcggaaattaaaccgaaacctgtagccggacagaaagcggcattggttatcgcgtgcgagattgttacgctgtggcgtttgtttcatatctgccccatgtccaataaaggtcaggagaaaccggcgttgtcatggaaatcttacgcggacgatcatgaattacacgcggaacaggtagccgtttgggattacttcctttcattgcccgaaacgccggccggcgatcttatatcgcctaaagcgcttgcctacaagcgccccttgtttgaattctccggcgcgtgcggcggatgcggcgaaactccatacgttaaacttatgtcgcagttgttcggcgaccgcgcgatcatcgccaacgccacgggctgttcctccatttacggcggaaacctcccgaccacgccttactgcaagcgcgcggacgggcgcgggccggcatggtcgaacagcttgttcgaggacgcggctgaatttgcgatgggcttccgtttaacaagcgacaagctcgccgttcatgcccgcgaaatcgccgagaaggcaaagagcgaaggtatcgcggcgggaatcatagacaagattctttccaacaatcaggccgacgacgcggcgattgacgaactgcgcaaaaatattgacgagcttaaagccgcacttaaaaacgattcaaagccgaccgcgaaactgcttgtttcgttagccgactattttgtaaaacgttctgtgtgggcgttcggcggagacggctgggcttacgacataggcttcggcggactggatcatgttatcgcttccggcaagaacgtaaaccttttgtgcatggataccgaggtttattccaacaccggcggacagatgtccaaatcgacgcctgtcggcgcaatcgcaaaatttgccaacgcgggaaaggatattacaaagaaagaccttggcgcgatagcgatgagctacggttatgtgtatgtcgccaaggtatcgctgggcgcggacatgaaccagacgatcaaagcgttccgcgaagccgaatcctacaacggcccctcgcttatcatcgcctactcgcactgcatcaaccacggcatcgacatgagcaagggacttgaacacggcaaggcggtggtcaccagcggcctgtggcccctgtaccgctacgaccccaggctcaaggaccagggcaagaaccccttccagcttgactccaaggatcccaccaccagcattgaggatttcatgtacagcgaagtccgcttcaagagcctcaagcaggccgaccccgcgcgcgccgacgcgctgctcgcgaaagcgaaagcccacgcggaaagggtccggaaagagtacaagtacctggcggacagaccgttctaa

SEQ ID NO: 64724 - protein, 1017 aa, Unknown
  Obtained from environmental sample
  DOMAIN (523)...(546): 4Fe-4S binding domain
  misc_feature (1)..(1017): Xaa is any amino acid
MPFLHFFDGFRTSHELQNIEEISYDVMHQMIDDDLVTAHRTRGLTPEKPSIRGTAQNPDTYFQSREGVDKYYEKVPGIVQAEMDKYAKLTGRAYHIFDYYGAKDAENVIIIMGSGADTCEETIDYLNSKGGKTGMVKVRLYRPFNAKLFVKALPSSVKAIAVLDRTKEPGSLGEPLYEDVRTAIAEMQASGEFKSNPVVLGGRYGLGSKEFTPAMVKGVFENLTGKKIANFIVGINDDVLGKSIDYDPHFVLEEEGLSEALFYGLGSDGTVGANKNFIKIISEAKPELNAQAYFSYDSKKSGGFTVSHLRFGKGAIRRPYLINSADFLACHKFSYMEMYDMLKMLKSGGTFLLNSPFKAADVWKNIPVEAQQRIIDKKLKFYVINAAEIAFNTGMGNRINTVMQAAYFKISGILSEEEAVRRMKEHIEHSYGKKGKDVVEKNYKTVDASLTAVEEVKYPSKTEGDIHMKKPFATAKDSWIKEVLGTMSVQEGDNLPVSKLPEDGTFPTATTQYEKRSVAERVPLWNPEVCIQCGNCTVVCPHACMRFKNLTDDQVAKAPKGFKTAEIKPKPVAGQKAALVIACEIVTLWRLFHICPMSNKGQEKPALSWKSYADDHELHAEQVAVWDYFLSLPETPAGDLISPKALAYKRPLFEFSGACGGCGETPYVKLMSQLFGDRAIIANATGCSSIYGGNLPTTPYCKRADGRGPAWSNSLFEDAAEFAMGFRLTSDKLAVHAREIAEKAKSEGIAAGIIDKILSNNQADDAAIDELRKNIDELKAALKNDSKPTAKLLVSLADYFVKRSVWAFGGDGWAYDIGFGGLDHVIASGKNVNLLCMDTEVYSNTGGQMSKSTPVGAIAKFANAGKDITKKDLGAIAMSYGYVYVAKVSLGADMNQTIKAFREAESYNGPSLIIAYSHCINHGIDMSKGLEHGKAVVTSGLWPLYRYDPRLKDQGKNPFQLDSKDPTTSIEDFMYSEVRFKSLKQADPARADALLAKAKAHAERVRKEYKYLADRPF

SEQ ID NO: 64725 - DNA, 1275 bp, Unknown
  Obtained from environmental sample
  misc_feature (1)..(1275): n is a, c, g, or t
atgaacagaagcagaagcgttacaaagagaggtagagcgtccggaaccgctaaaacaaggtcacgaacacgtaaaccctacactcccaccgcccgcatgttaaaaaaatactccgacgttttagtcaagttcgccctaaacggcggcgccggaatcaagaagggcgacgtcgtctaccttgccgtccagcaaccgggcctccccttagccaaggcaatctacaagacaatcttggaggtgggcgggcatcctatcgtgagtgtgattgacgacgattttaagttgttgcaggtgaccgccgcctccatgcggcagttgacattctttccggagaagtactaccgcggccttgccgataccatcgaccattggatacgggtcgtggccgacgaggagccgatgtacctgaagtccgccgacccggccaaggtgctgctctcgaatcagtcggcgcggaaattccgcgtgtggctcgacgagaaggaggatcggggcggctttacgtggacgctatgcctctacgccacggagagaatggctcaggaggccgggttgacgcttagggagtattgggatcagatagccaaggcgtgttttttgaacgagacgaatccggtgatcaagtggcggcgcgtcttccgcgatctgcagggcgtgctcgacaggctgaacgccctgccgataaagcggttgcacgtggagtccaaggggacggatctgtggataacgcttggcgagaagcgcaagtggcttggcgggagcggacggaacatcccgtcgtttgagatcttcacctccccggattggcgggggacggaggggaagatatgcttcgacatgccgttgtacagatacggaaacgtgatcaaagacatcaagctggagttcaggaacgggcgtgtggtaaaggccgcggcgtccaagaacgagcggctgctgaaagagctaatcaagcagaagaacgccgacaagataggggagttctcgctgacggacatacgtttttccaagataacgaagttcatggccgagacgctctttgacgagaatttcggcggtaagtacggcaacacgcacatcgcggtagggaaaagctaccacgacacctacgccggagacacgtcgaagatgacggaagcccagttcgccaaattgggttttaatcattcgcaggagcatacggacataatatctacggtggataggacggtaacggccgttttaagggatggaagcgaaaaagttatttacaggaagggaaaatttgttatctaa

SEQ ID NO: 64726 - protein, 424 aa, Unknown
  Obtained from environmental sample
  DOMAIN (31)...(422): Thermophilic metalloprotease (M29)
  misc_feature (1)..(424): Xaa is any amino acid
MNRSRSVTKRGRASGTAKTRSRTRKPYTPTARMLKKYSDVLVKFALNGGAGIKKGDVVYLAVQQPGLPLAKAIYKTILEVGGHPIVSVIDDDFKLLQVTAASMRQLTFFPEKYYRGLADTIDHWIRVVADEEPMYLKSADPAKVLLSNQSARKFRVWLDEKEDRGGFTWTLCLYATERMAQEAGLTLREYWDQIAKACFLNETNPVIKWRRVFRDLQGVLDRLNALPIKRLHVESKGTDLWITLGEKRKWLGGSGRNIPSFEIFTSPDWRGTEGKICFDMPLYRYGNVIKDIKLEFRNGRVVKAAASKNERLLKELIKQKNADKIGEFSLTDIRFSKITKFMAETLFDENFGGKYGNTHIAVGKSYHDTYAGDTSKMTEAQFAKLGFNHSQEHTDIISTVDRTVTAVLRDGSEKVIYRKGKFVI

SEQ ID NO: 64727 - DNA, 831 bp, Unknown
  Obtained from environmental sample
  misc_feature (1)..(831): n is a, c, g, or t
atggaagcgaaaaagttatttacaggaagggaaaatttgttatctaaaaagaatatagaatcaatataccgccaatatcatcacccgcgttacctaggcctagacccgttagtctgtgtccgccggtttgatgataatgagagccgcgaggtggcggggttgttttcggcggcgttggcttacgggcgtgtggagacgattgtacgcaatgtcaatgcgttgatcgacggcgtgatgggcggcgatccggtgtcgtttgtcaagggtgtgtcgtacaaagataagcggaggctgttaaccggtttcaagcatcgttttaacgacggggacgacatagccgcgctattggaagcggtgaacgggctgacgcggcggcacgggtcgcttggcgggtgttttggcgagtgcttaacgcgttcagacggtcaattcagagcggccttgacattatttaccgatgaattgaagggggtattgatacaagacgcggcgacccgcaacgccctccgcccgagttttgagtacctgatcccctctccgacacgcggcagcgcctgcaagcgtatggcgctctacctgcgttggatggtgcgggaggacgacgggattgacctaggtgtttggaaggacattccggcgtcaatccttttaatccctgtagacacccacgtggcgcagatagcaagacactacgagttgacgacccgaaatgccgcagactggaagatggcggaggagataacatcagccctaagaaaatttgaccccgaagaccccgtcaagttcgacttttcgctctgtcacgcgggtatgataaattacagaaattga

SEQ ID NO: 64728 - protein, 276 aa, Unknown
  Obtained from environmental sample
  misc_feature (1)..(276): Xaa is any amino acid
MEAKKLFTGRENLLSKKNIESIYRQYHHPRYLGLDPLVCVRRFDDNESREVAGLFSAALAYGRVETIVRNVNALIDGVMGGDPVSFVKGVSYKDKRRLLTGFKHRFNDGDDIAALLEAVNGLTRRHGSLGGCFGECLTRSDGQFRAALTLFTDELKGVLIQDAATRNALRPSFEYLIPSPTRGSACKRMALYLRWMVREDDGIDLGVWKDIPASILLIPVDTHVAQIARHYELTTRNAADWKMAEEITSALRKFDPEDPVKFDFSLCHAGMINYRN

SEQ ID NO: 64729 - DNA, 2529 bp, Unknown
  Obtained from environmental sample
  misc_feature (1)..(2529): n is a, c, g, or t
ttggtagatgtggacggtaaacgtttaaatacacctgttcagtattcgattcccgataaatgggaattaccggaaatacgttttgccggaagcggcgctattctgccgacgagtcagggctctcagcttgtgatcgaaacaaaaaatgtttcggggattttggtagaggcgtttcaaatttacaatcaaaatatggtttactttttgcaatccaacaaccttagggacaattctgaacttgatcgcgtgggagagcctgtgtggtcaaaagcttttgattttcaatggattgcgtccgatcaaaatcgttgggtgcgccgaggactggatatggcggaactcagcaagaagtttcccggcggaatgttccatataaggatcagtttcaggcatagacatattaaatatgtttgcgataaaggtcataaagatttttccggctatgaatttcccgacgactcattttcaccgagttatacgataagcggcgaaaaatatacgagttattataatgctaaagattacaactggagagaatgggacaactacaaaaccgatccatgtcatccggctttttattataatatgtacgagcacaatataacanagagacggaatgtgcttgtttcggatttagggcttatagcgaaacgatcccttgacggttcatggcttatcgcgacgacnaatcttattaccgcccgtgccgcgcccaatgttgaaatacaagttttaacttatcaggggcgggttcttcatcagggcaaaacaaactcaaacggcatcgcggcaattcccgcgtccgcggatacggcgggcggttctcgactttttgtgtacgccgaaagcaatttaggcagagcgtatataagggctaatgattctctggctctttccgtaagccattttgatatttcaggcggcactccttcttcgggactgcgcggacttatttacggagagcgcgacgtatggcgtcccggcgatgatatatacctaacgttccttcttgcggatcccttgggcagccttcctcaaaatcatcccgtaacttttgagttggaagacccgagaggcagacctgtcatcaaccgcacttacacttcttccgtggacggattttacgcgctcgccgccgctacagcgtccgacgctcccacgggagactggactgccagagtgcgggtaggcggaaaaacatttaacaaaagcgtaaaaatagaaaccgttatgccgaacagattaaagatcgatcttgatttcggcgcaagtgaatttataaaaagcggctctcataaaattccattggaagcccaatggctttacggagcgccggcttccggtttaaaagccgatatttccgtcacatactcggacaaagaaacaaccttcaaaagttataccgattattctttccgcgatccttccagaagagtttcaacggaacgtcaggaaatctggagcgggtctcttgataccgcgggaaaagcagttgtaacaatgaactttaatcccggccgcgccgttcccggcaaagtaacgacgcgtttcttaacgcgggtctttgaaccgtcaggagtgttttcatcggaacaagtcagcagggagtattcaccttacagccgttatgtcggaataaaactgccaaagggagacgcaagggagatgctgcttaccgatacggaacacaaggcggagatagtgattgttgacgaagacggaaaattgcttcagggaaaagttgatcttgattgtgcgatttataaattggattggcactggtggtgggaaaaaagtgaggatgaatccgctgaattcgcatcgacgctttcaaggaacgcgatttcacgtcaaactgtttccgccacgaacgggaaggcggtttttaattttaatattaagtatcccgattggggacgctacattgttatagccagagacagtaaaggcggacacgcggcggctaaagtggcgtacattgattggccgggctgggctggacgcgcccgcgacgaaggtcagggttcaacgtcaatgcttacgctgaccgcgggaaaaccgcagtataacaccggtgaaaaagtgcagataacattcccatctaataaggacgccgccgcccttgtcgcgctggaaaaaggtggaaacattataaaaagcgaatgggttacatgtcaggacgggacaaccaaatatgaatttatcgccgagccgtcaatggttccgaatatctatatgcacataacgcttgtccagcctcatttgcaaaaacaaaacgaccttccaatccggctttacggaattgttcccgtaatggtagaagactcaagggtagttatttatccgcagattaaaacgcaggacaactggcaggccgaatccaaggtttcatttaccgtcagcgaagcgaatggcagaccgatggcgtataccgtcgcggttgtggatgagggactccctcgggtcttacccgttttaatataccgaatccgaaaaatactttttacgcaagagacgcgtcgtttataa

SEQ ID NO: 64730 - protein, 842 aa, Unknown
  Obtained from environmental sample
  DOMAIN (676)...(821): Alpha-2-macroglobulin family N-terminal region
  misc_feature (1)..(842): Xaa is any amino acid
MVDVDGKRLNTPVQYSIPDKWELPEIRFAGSGAILPTSQGSQLVIETKNVSGILVEAFQIYNQNMVYFLQSNNLRDNSELDRVGEPVWSKAFDFQWIASDQNRWVRRGLDMAELSKKFPGGMFHIRISFRHRHIKYVCDKGHKDFSGYEFPDDSFSPSYTISGEKYTSYYNAKDYNWREWDNYKTDPCHPAFYYNMYEHNITXRRNVLVSDLGLIAKRSLDGSWLIATTNLITARAAPNVEIQVLTYQGRVLHQGKTNSNGIAAIPASADTAGGSRLFVYAESNLGRAYIRANDSLALSVSHFDISGGTPSSGLRGLIYGERDVWRPGDDIYLTFLLADPLGSLPQNHPVTFELEDPRGRPVINRTYTSSVDGFYALAAATASDAPTGDWTARVRVGGKTFNKSVKIETVMPNRLKIDLDFGASEFIKSGSHKIPLEAQWLYGAPASGLKADISVTYSDKETTFKSYTDYSFRDPSRRVSTERQEIWSGSLDTAGKAVVTMNFNPGRAVPGKVTTRFLTRVFEPSGVFSSEQVSREYSPYSRYVGIKLPKGDAREMLLTDTEHKAEIVIVDEDGKLLQGKVDLDCAIYKLDWHWWWEKSEDESAEFASTLSRNAISRQTVSATNGKAVFNFNIKYPDWGRYIVIARDSKGGHAAAKVAYIDWPGWAGRARDEGQGSTSMLTLTAGKPQYNTGEKVQITFPSNKDAAALVALEKGGNIIKSEWVTCQDGTTKYEFIAEPSMVPNIYMHITLVQPHLQKQNDLPIRLYGIVPVMVEDSRVVIYPQIKTQDNWQAESKVSFTVSEANGRPMAYTVAVVDEGLPRVLPVLIYRIRKILFTQETRRL

SEQ ID NO: 64731 - DNA, 1080 bp, Unknown
  Obtained from environmental sample
  misc_feature (1)..(1080): n is a, c, g, or t
ttgatggccgagaggtatcaaagaaaagctttgacgcgcgcaaaagaaattcaatctcggattgatgcggctaaagccgccggcgagccgctctcaccgcttgcgggcgtgccaatcgcaattaaagataacatttccacagagggaataaaaacaacgtgcgcgtctaaaatgcttggtaattacacgcccgtgtttaacgcggcggttattgagaaactggaagaagccggcatggtggtaatcggcaaactcaacatggatgagtacgcgatgggcggctcaagtgagactggcgcgtttggcgctgtctgtaatccgtgggatgtctctcgtgtggcgggcggctcgtcagggggaagcgccaccgcagtagccttaagggaaatacccatcgctcttggttcggatactggcggcagtatacgccagccatgcgccttttgcggcgttaccggtatcaaaccaacttacggttccgtgtcacggtacggtcttttggcgtatgcctcatctctagatcagatcggccccatcggacaaaacattgacgactgcgccgccttactatcgatcatttcaggaccggataagagggacagtacctgcgtcatagaaaagccgtttgaatttagcgaaccaaaatcaaaattggaaagcgtgaagatagggcttccgcgaaattatttcgcgggcggcattgacgatgaggtaaagaccgccgttcttgcaacggctaaggagtttcaggcatccggcgcaattatagaagaatttgaaatgccatttttggattatgtgatcccaacctactacataatcgcctgcgccgaagcgtcgtcaaacctttcaaatacgacggtcttaaatacggctaccgcagtccgaacgcgaaaacgctctccgaagtctaccggctctccagaagcgagggcttcggaatggaagcaaaaagaagaatcatgctcggctcgtttgttctctcatcgggatactacgatgcttactacaagaaagccctgcaggcgcgcgcgcttcttaaagacgcttacagcaaattgttcgggcgctttgacataa

SEQ ID NO: 64732 - protein, 359 aa, Unknown
  Obtained from environmental sample
  DOMAIN (1)...(359): Amidase
  misc_feature (1)..(359): Xaa is any amino acid
MMAERYQRKALTRAKEIQSRIDAAKAAGEPLSPLAGVPIAIKDNISTEGIKTTCASKMLGNYTPVFNAAVIEKLEEAGMVVIGKLNMDEYAMGGSSETGAFGAVCNPWDVSRVAGGSSGGSATAVALREIPIALGSDTGGSIRQPCAFCGVTGIKPTYGSVSRYGLLAYASSLDQIGPIGQNIDDCAALLSIISGPDKRDSTCVIEKPFEFSEPKSKLESVKIGLPRNYFAGGIDDEVKTAVLATAKEFQASGAIIEEFEMPFLDYVIPTYYIIACAEASSNLSNTTVLNTATAVRTRKRSPKSTGSPEARASEWKQKEESCSARLFSHRDTTMLTTRKPCRRARFLKTLTANCSGALT

SEQ ID NO: 64733 - DNA, 420 bp, Unknown
  Obtained from environmental sample
  misc_feature (1)..(420): n is a, c, g, or t
atggaagcaaaaagaagaatcatgctcggctcgtttgttctctcatcgggatactacgatgcttactacaagaaagccctgcaggcgcgcgcgcttcttaaagacgcttacagcaaattgttcgggcgctttgacataatactctcccctaccgcgcccaccactgcgtacaagttaggtgacaatataggcgaccctgtaaaaatgtacatgggagacatctacactgtttcgatcaatcttgcggggcttcccgccgccgccctcccatgcggctttgacaaacaaggattgccaatcggcttccagttaatcggggacgctttttcggagaataaaataataaacgcggcgcgtgtttttcaaaaccggacagatcatcataaaaagaaaccttctataaacggaggtgtacaatga

SEQ ID NO: 64734 - protein, 139 aa, Unknown
  Obtained from environmental sample
  misc_feature (1)..(139): Xaa is any amino acid
MEAKRRIMLGSFVLSSGYYDAYYKKALQARALLKDAYSKLFGRFDIILSPTAPTTAYKLGDNIGDPVKMYMGDIYTVSINLAGLPAAALPCGFDKQGLPIGFQLIGDAFSENKIINAARVFQNRTDHHKKKPSINGGVQ

SEQ ID NO: 64735 - DNA, 306 bp, Unknown
  Obtained from environmental sample
  misc_feature (1)..(306): n is a, c, g, or t
atgaagtgggaaacagttatcggccttgaaattcacaccgagctttcgacaaaatcaaaaatcttctgcggctgtacaaccgcttacggcggagagccgaacacccacgtctgcccggtttgctcagggatgcccggtactctgcctgtgctgaaccgcgccgtgcctgagtacgcaatgaggcttgggcttactcttaattgcgaaattacaaggctcagcaagttcgacagaaaaaattatttttatccagatcttccaaacgcgtatcagatatcccagcttttacgcccctatatgcactaa

SEQ ID NO: 64736 - protein, 101 aa, Unknown
  Obtained from environmental sample
  DOMAIN (1)...(101): PET112 family, N terminal region
  misc_feature (1)..(101): Xaa is any amino acid
MKWETVIGLEIHTELSTKSKIFCGCTTAYGGEPNTHVCPVCSGMPGTLPVLNRAVPEYAMRLGLTLNCEITRLSKFDRKNYFYPDLPNAYQISQLLRPYMH

SEQ ID NO: 64737 - DNA, 978 bp, Unknown
  Obtained from environmental sample
  misc_feature (1)..(978): n is a, c, g, or t
ttgggcttactcttaattgcgaaattacaaggctcagcaagttcgacagaaaaaattatttttatccagatcttccaaacgcgtatcagatatcccagcttttacgcccctatatgcactaacgggtatcttgaaatagaaatagatgggcaaaaaagaccaataagaatacgcgagatacacatggaagaggatgcgggcaagttagtccacaatccgcaaaacggcaatacctatatggatttcaaccgctgcggcgttcctctcttggagatagtatcacaacccgattttagaaacagcgaagaggttatcgcttatttagaaaaactgcgggaaactttgctttatttgggtatatgcgattgcaaaatgcaagagggttcaattcgtgcggacgtgaacctttcggttcgccaagctggcggtgaattgggtgtgcgcaccgagatgaaaaacttgaattcatttaaagcgatagctcgcgccattgcgtgtgagtctgcgcgccaaattggagttttagaaggcggcgggaaaattgagcaagaaacacgccgctgggacgatgacaaaggcatctcctatgccatgcgttccaaagaggatgcgcacgattatcgttattttccagaacctgatttattgccaatcaaggttgacgatgcttggctgaacagcgttgaaaagagtatgccggagctagctcctcaaaaaagggaacgctatgtgcgtgttcttggaatttcagagtacgaggcatcggttttgaccgtgcataagaatatctccgagttgtttgagcttatttctggcaaaagcggcgagccgttggaatccgcacatttgataacaggcgaaattatgcggctgatgaaccaaaccaacactttgccagaggaattatccttggatgggcaaaagctatcgacgttgataactttggtattaggcgggaaaataaccgaaattctataa

SEQ ID NO: 64738 - protein, 325 aa, Unknown
  Obtained from environmental sample
  DOMAIN (195)...(263): PET112 family, C terminal region
  misc_feature (1)..(325): Xaa is any amino acid
MGLLLIAKLQGSASSTEKIIFIQIFQTRIRYPSFYAPICTNGYLEIEIDGQKRPIRIREIHMEEDAGKLVHNPQNGNTYMDFNRCGVPLLEIVSQPDFRNSEEVIAYLEKLRETLLYLGICDCKMQEGSIRADVNLSVRQAGGELGVRTEMKNLNSFKAIARAIACESARQIGVLEGGGKIEQETRRWDDDKGISYAMRSKEDAHDYRYFPEPDLLPIKVDDAWLNSVEKSMPELAPQKRERYVRVLGISEYEASVLTVHKNISELFELISGKSGEPLESAHLITGEIMRLMNQTNTLPEELSLDGQKLSTLITLVLGGKITEIL

SEQ ID NO: 64739 - DNA, 492 bp, Unknown
  Obtained from environmental sample
  misc_feature (1)..(492): n is a, c, g, or t
ttggccgagtgttctgcgaatgttaatttcggccagtcaataatagccggtgcttttacattaagcataatgatactgcctgttattatacgcacaaccgaagaatcacttaaatcaattccagacactttccgcgaaggttctcttgcgttaggcgcaaccaaattccagacaattattcatgtagttctgccttcagcactgccgggaattgtaacctctgtgatccttgctatcggcagagtggtcggagaatccgcgcctgtactgcttacggtcggccttactaaaaatataccgcgtaccatttttgaatcaggaagaaccctgacaatccacctttattatctgacaaacgaagctgtgcgcccggaagatttcggcattgctttcgcgactgcgtttgttttggtaattcttgttgtaataataaataccgcgacgaaaattatgaccgcaaactttagaaaaaaacttggagacgtgcaatga

SEQ ID NO: 64740 - protein, 163 aa, Unknown
  Obtained from environmental sample
  misc_feature (1)..(163): Xaa is any amino acid
MAECSANVNFGQSIIAGAFTLSIMILPVIIRTTEESLKSIPDTFREGSLALGATKFQTIIHVVLPSALPGIVTSVILAIGRVVGESAPVLLTVGLTKNIPRTIFESGRTLTIHLYYLTNEAVRPEDFGIAFATAFVLVILVVIINTATKIMTANFRKKLGDVQ

SEQ ID NO: 64741 - DNA, 756 bp, Unknown
  Obtained from environmental sample
  misc_feature (1)..(756): n is a, c, g, or t
atgagcggaaataaaatagaagtaaacaaccttgatcttttttacggcgattttaaggcattgtcaaaaataaatttttcgcttgcggaacaggatgtagcggcgctcatcgggccttccggctgcggaaaatcaacgtttatacgcatattgaaccggatgaacgatttaattccttcatgccgcataacaggcgaggtcttgctggatggcaaggatatttacggcacaatggatgttacggaactgcgcagtcgggtgggtatggtgtttcaaaaaccaaatccttttaacatgagcgtatttgacaatgtcgcttacggaaagcgcatgcagggattaaaaaacaaaggaaagatcgcggacattgtagaaatttcactgcgaaaggcggctctttgggacgaggtaaaagacagattgaaaaagcccgctcaggcgctttccggcggacagcagcaaaggctctgtatcgccagaactatcgcaatggagccggaaattattttgatggacgagcctacaagcgcgcttgatccaatcgcgacagggcgtattgaggaacttatcggagaattaaagaaagattatagtattataattgtcacacatgccatgcatcaggcttccagggtcagcaataaaacggcttttttccttttgggtgaattagtcgagtataataatacaagagaggtttttacgaaacccagagacaagcggacggaagattatatttcaggcaggtttggttga

SEQ ID NO: 64742 - protein, 251 aa, Unknown
  Obtained from environmental sample
  DOMAIN (31)...(222): ABC transporter
  misc_feature (1)..(251): Xaa is any amino acid
MSGNKIEVNNLDLFYGDFKALSKINFSLAEQDVAALIGPSGCGKSTFIRILNRMNDLIPSCRITGEVLLDGKDIYGTMDVTELRSRVGMVFQKPNPFNMSVFDNVAYGKRMQGLKNKGKIADIVEISLRKAALWDEVKDRLKKPAQALSGGQQQRLCIARTIAMEPEIILMDEPTSALDPIATGRIEELIGELKKDYSIIIVTHAMHQASRVSNKTAFFLLGELVEYNNTREVFTKPRDKRTEDYISGRFG

SEQ ID NO: 64743 - DNA, 681 bp, Unknown
  Obtained from environmental sample
  misc_feature (1)..(681): n is a, c, g, or t
ttggttgaggtgaatatgagtgcaagaaacattttttcggaagaattaagcaggttacgccacgatattttgtcaatggcggcaagagtggaaggaaaccttggcaaagcgctttccgcgttaagaacacgcaatgcggatcttgcgaatgaagtgcgcgcggatgattcggctgtagacgctctgcagttacagatcgaagacgatgccgcaattgttatcgcgacacaacagcccgtggcgcgcgacttgcgcgaacttgtttcggtttttaaacttacaagcaatattgaaagggtaggggatcatgccgtgcatcttgcgcgcgccgcgaagaagctggcgaaaatgggagattcctcttttcacgcgcaggagcatcttgaaaaaatggcggagaccgggcagataatgcttcgcgcggctatttccgcttttatggcaaaagacgcgcaggcggcaagagaagcggctgcaatggacagtataattaactcggagcataaaatccttaccgaagatatatttaaagtgatgaaaaagaattcagagcttgttaaagaggctcttcagatacttcatacttccaatcagcttgagcggctgggtgatcatattaccaatatatgcgaagctgttatttatatgatagaaggaaaacatgaggagttaaatgactaa

SEQ ID NO: 64744 - protein, 226 aa, Unknown
  Obtained from environmental sample
  DOMAIN (128)...(213): PhoU family
  misc_feature (1)..(226): Xaa is any amino acid
MVEVNMSARNIFSEELSRLRHDILSMAARVEGNLGKALSALRTRNADLANEVRADDSAVDALQLQIEDDAAIVIATQQPVARDLRELVSVFKLTSNIERVGDHAVHLARAAKKLAKMGDSSFHAQEHLEKMAETGQIMLRAAISAFMAKDAQAAREAAAMDSIINSEHKILTEDIFKVMKKNSELVKEALQILHTSNQLERLGDHITNICEAVIYMIEGKHEELND

SEQ ID NO: 64745 - DNA, 696 bp, Unknown
  Obtained from environmental sample
  misc_feature (1)..(696): n is a, c, g, or t
atgactaaggctgtaattcttataatagaagacgatcctgaaattcaggaattattgtttcattccttgtccaaagaaggctggaaactcattcaagtaaaaaccggggaagaagggttaaaaatacttaaaacaaaaaaagcggactgtatccttttggatattatgctgcccggtatagacggcttaactatattaaaaaaaataaaagatattgaacaatgcagaaatattcccgttattatgaccacggcgaggggcgaggaagccgatattgtcgcaggtcttgagcttggggcggatgattatgtcgtaaagccgtacagtcccaaggtgttaatcgcaagaatacgcgcgggactgcgccggatggaagaaagcgccgttaaaaaaacagatactgtctggcagcagggagaaattaaacttgacgccgcccgtcatgttgttttttgcggcgacaaacagctagacctctttgccacagaattcgcccttcttaaacattttttgactaatcctgaaattgttttttcgcgcaatcaaattatagaagcaataagggggccggattatccggttaccgaccgttccgtggacgtgcagatattgggcctgcggaaaaaacttggaaaagccggggatatgatcgaaactatccgaggcgtcggttaccggttaagaatacaggagtaa

SEQ ID NO: 64746 - protein, 231 aa, Unknown
  Obtained from environmental sample
  DOMAIN (154)...(227): Transcriptional regulatory protein, C terminal
  misc_feature (1)..(231): Xaa is any amino acid
MTKAVILIIEDDPEIQELLFHSLSKEGWKLIQVKTGEEGLKILKTKKADCILLDIMLPGIDGLTILKKIKDIEQCRNIPVIMTTARGEEADIVAGLELGADDYVVKPYSPKVLIARIRAGLRRMEESAVKKTDTVWQQGEIKLDAARHVVFCGDKQLDLFATEFALLKHFLTNPEIVFSRNQIIEAIRGPDYPVTDRSVDVQILGLRKKLGKAGDMIETIRGVGYRLRIQE

SEQ ID NO: 64747 - DNA, 696 bp, Unknown
  Obtained from environmental sample
  misc_feature (1)..(696): n is a, c, g, or t
atgacaatatttaaaagaagcctgctcaccttaggcacggcggcgcttgttttttcggcggttcttgtagtcacttctctggtttttatggactcattgtattatgaaattaatttgcaggatctaaaaaaaaccgcaaaaacccttatgaccgcaatagggcgtgagcgcataacggaatattttttatataacgatgaaaataacgattttcccgtaaatgacaccggcgaataccgtcttactttaattgctccttcaggaattgtaatgtgggattcccatgtaaaagacggacttgtgaatcatattgaccgcaaagaaatagcggcggctcttgaggggaaagaagaaatcgcgcgccgcgattcaatcagcaccaacataaagcggatttattttgccatgcctgtatttgacggcaataatgtagtaggtgtgttcaggctttccgccgccgttcccaaattcggaatgcgcatctcatcaattattttaccttttatagtattttcgtttattatggcagtagctgttttttgggctgtatacgctatatcccgctctctttcaacatcaatcggcaggctggtggatattacgcaggaaggcgcgtctctgctgtccggtcccgaagcggaggaaactgtctcgccggaatttgtaagtttggaaaaagcgataagnnggcgatga

SEQ ID NO: 64748 - protein, 231 aa, Unknown
  Obtained from environmental sample
  SIGNAL (1)...(23)
  misc_feature (1)..(231): Xaa is any amino acid
MTIFKRSLLTLGTAALVFSAVLVVTSLVFMDSLYYEINLQDLKKTAKTLMTAIGRERITEYFLYNDENNDFPVNDTGEYRLTLIAPSGIVMWDSHVKDGLVNHIDRKEIAAALEGKEEIARRDSISTNIKRIYFAMPVFDGNNVVGVFRLSAAVPKFGMRISSIILPFIVFSFIMAVAVFWAVYAISRSLSTSIGRLVDITQEGASLLSGPEAEETVSPEFVSLEKAIXXR

SEQ ID NO: 64749 - DNA, 552 bp, Unknown
  Obtained from environmental sample
  misc_feature (1)..(552): n is a, c, g, or t
atggggctggataaaagtataaaaaaaactatggtcataggttccggccctattgttatcgggcaggcggcggagtttgactacgcgggaacgcaggcctgccgtatgttgcgcgaggacgggattgagattgtccttgtcaattccaaccccgcaaccattatgaccgacagtaacattgccgacaagatatacattgagccgctgacccttcccaccgttaaacgcattatcgaaaaagaaaaacccgacagcatattatccggtctcggagggcaaacggggcttaccctgtgcatgcagcttgcccgcgacggctttcttaaaaaaatgaacgtgcgccttttgggttcctcgcccganaccatcgacaaggccgaagaccggcaaatattcaaagaaaccatgcagggcatagggcagccctgcgttccctcggtaatcgccaccgatgttgagacggcggtaaaattcgccgacgaactggggtattccgtcatcgtgcggncccgctttcacgctgggcggcacgggcggcggaattgcggctaa

SEQ ID NO: 64750 - protein, 183 aa, Unknown
  Obtained from environmental sample
  DOMAIN (6)...(126): Carbamoyl-phosphate synthase L chain, N-terminal domain
  misc_feature (1)..(183): Xaa is any amino acid
MGLDKSIKKTMVIGSGPIVIGQAAEFDYAGTQACRMLREDGIEIVLVNSNPATIMTDSNIADKIYIEPLTLPTVKRIIEKEKPDSILSGLGGQTGLTLCMQLARDGFLKKMNVRLLGSSPXTIDKAEDRQIFKETMQGIGQPCVPSVIATDVETAVKFADELGYSVIVRXRFHAGRHGRRNCG

SEQ ID NO: 64751 - DNA, 420 bp, Unknown
  Obtained from environmental sample
  misc_feature (1)..(420): n is a, c, g, or t
atgacggaataccccagttcgtcggcgaattttaccgccgtctcaacatcggtggcgattaccgagggaacgcagggctgccctatgccctgcatggtttctttgaatatttgccggtcttcggccttgtcgatggtntcgggcgaggaacccaaaaggcgcacgttcatttttttaagaaagccgtcgcgggcaagctgcatgcacagggtaagccccgtttgccctccgagaccggataatatgctgtcgggtttttctttttcgataatgcgtttaacggtgggaagggtcagcggctcaatgtatatcttgtcggcaatgttactgtcggtcataatggttgcggggttggaattgacaaggacaatctcaatcccgtcctcgcgcaacatacggcaggcctgcgttcccgcgtag

SEQ ID NO: 64752 - protein, 139 aa, Unknown
  Obtained from environmental sample
  misc_feature (1)..(139): Xaa is any amino acid
MTEYPSSSANFTAVSTSVAITEGTQGCPMPCMVSLNICRSSALSMVSGEEPKRRTFIFLRKPSRASCMHRVSPVCPPRPDNMLSGFSFSIMRLTVGRVSGSMYILSAMLLSVIMVAGLELTRTISIPSSRNIRQACVPA

SEQ ID NO: 64753 - DNA, 762 bp, Unknown
  Obtained from environmental sample
  misc_feature (1)..(762): n is a, c, g, or t
atgcgcgaccgcgccgggaacgttatcacggtctgctcaatggaaaatttcgatcctgtcggcatacacacgggcgacagcatcgtcatcgcgcccgccgtcaccctggctgataaggaatatcagatgctccgctcagccgctttgaatatcattcaggcgttaggcgttgaaggcggctgtaacgtccagttcgccctgcatccaagcagctttgattacgcggtcatagaggtaaacccccgcgtctcgcgttcttcggctcttgccagcaaggctacaggctaccccatcgcgaaagtcgccacaaaaatcgccgtcggctacaccctggacgaaatagtgaacgccgttaccggcaataccttcgccgcgtttgagccgacgcttgactatgtggctgtgaaatttcccaaatggccctttgataaattcgtgtacgcgcacaaggaactgggtacgcagatgaaagccacgggcgaggtgatggcgattgccgacacctttgaggaagcgcttttaaaagccgtgcgcggcgcggagattggccttaacagccttaaccttccccgtcttgcgtcaaaatctaccgaagaaatccgcgcccttctgcaaaccgtaaccgacgagcgcctgttcgtgctatacgaggcgctcaagcgcggccttagtgtcgatgagctatatgatatgacaaaagttgaccgctggtttttgcatggattagcgaatatattgcgcaacgagcgtaaacatatatga

SEQ ID NO: 64754 - protein, 253 aa, Unknown
  Obtained from environmental sample
  DOMAIN (200)...(253): Carbamoyl-phosphate synthetase large chain, oligomerisation domain
  misc_feature (1)..(253): Xaa is any amino acid
MRDRAGNVITVCSMENFDPVGIHTGDSIVIAPAVTLADKEYQMLRSAALNIIQALGVEGGCNVQFALHPSSFDYAVIEVNPRVSRSSALASKATGYPIAKVATKIAVGYTLDEIVNAVTGNTFAAFEPTLDYVAVKFPKWPFDKFVYAHKELGTQMKATGEVMAIADTFEEALLKAVRGAEIGLNSLNLPRLASKSTEEIRALLQTVTDERLFVLYEALKRGLSVDELYDMTKVDRWFLHGLANILRNERKHI

SEQ ID NO: 64755 - DNA, 837 bp, Unknown
  Obtained from environmental sample
  misc_feature (1)..(837): n is a, c, g, or t
atgaaaacagccttgagtatagccggctctgattgttcaggcggcgcgggcatacaggccgatctgaaaacgttttccgcgcacggagtttttggcatgacggccgttacttcggttgtcgctgaaaatacgtttcgcgtgattgagtatcaggatatccgcccggacattatcgaaaagcagattgacgcggtgttcgaggatatcccgccggacgcggtaaaagtcgggatgctttcatgcgtccaaaccatgacggctgtcgcgggaaaattgcgggaatggaaacctcgcttcctttcggaagcgttcaacgtggttattgatccggtgatgtacgcgaagaacggagccccccttatggagatggacgctatcagcacgctgattaaggaaattgtacccttaggcgatttgataactccgaatattcccgaagccgagaaaatgtcgggaatgacaattaaaacacatgacgatatgcgggaagcggcgcggcgtattcgcgcgatgggctgccgcgccattgttgttaaaggcgggcacattgagggagacgcgaccgatattttgtttgacggagaaaaattttatgaatacccgtcgccgcgtatagataccaaacacacccacggaaccggctgtacgttttcatcggcgattgcatcaaaccttgctctggggctttcgcttcataaagcggtagaaaacgcanaggcgtatataaatacggcaattacccacgcgcccggacttggaaaaggacatgggcccacccatcatttttacgcgttatatgaagcctatgaaaaacaggctggatgccatgaagcgtaa

SEQ ID NO: 64756 - protein, 278 aa, Unknown
  Obtained from environmental sample
  DOMAIN (11)...(260): Phosphomethylpyrimidine kinase
  misc_feature (1)..(278): Xaa is any amino acid
MKTALSIAGSDCSGGAGIQADLKTFSAHGVFGMTAVTSVVAENTFRVIEYQDIRPDIIEKQIDAVFEDIPPDAVKVGMLSCVQTMTAVAGKLREWKPRFLSEAFNVVIDPVMYAKNGAPLMEMDAISTLIKEIVPLGDLITPNIPEAEKMSGMTIKTHDDMREAARRIRAMGCRAIVVKGGHIEGDATDILFDGEKFYEYPSPRIDTKHTHGTGCTFSSAIASNLALGLSLHKAVENAXAYINTAITHAPGLGKGHGPTHHFYALYEAYEKQAGCHEA

SEQ ID NO: 64757 - DNA, 711 bp, Unknown
  Obtained from environmental sample
  misc_feature (1)..(711): n is a, c, g, or t
ttggaaaaggacatgggcccacccatcatttttacgcgttatatgaagcctatgaaaaacaggctggatgccatgaagcgtaaagttgactacagcctgtatctggtgacagacagggaattaatgacagccggcagtattgatgaatgtgttgagcaagcggtttcgggcggctgtacactggtacaactgcgggaaaagaacgcgtcctcccgcgagttttttgaaaccgcagcgcgtgtgcgcaaaattaccgccgattgcggcgtgccgctgattatcaatgaccgcgccgatatcgcgttagctgtaaacgcggacggcgtgcatatcggtcaggaggatttgcctcttgaagcagcgcggcgcataatgggaaaagaggcgattatcggcgtttccgcaaacaatttgaccgaagctctggaggctgccgctatgggcgccgattatcttggcgtaggcgcaatgttccctaccggtaccaaaaaagacgccgacagtacgactatggatgaacttcgtcgcatacgcgctgaaataaaaatccccattgtggcaataggcggcattaacaaaaacaacattcatctctttgcgggaacgggaattgacggtatagccgtcgtatccgccatcgtttctcaaaaggatgcaagcggcgcggcgcgtgaattaaaagcgttgttctatagtataattggaaaataa

SEQ ID NO: 64758 - protein, 236 aa, Unknown
  Obtained from environmental sample
  DOMAIN (33)...(213): Thiamine monophosphate synthase/TENI
  misc_feature (1)..(236): Xaa is any amino acid
MEKDMGPPIIFTRYMKPMKNRLDAMKRKVDYSLYLVTDRELMTAGSIDECVEQAVSGGCTLVQLREKNASSREFFETAARVRKITADCGVPLIINDRADIALAVNADGVHIGQEDLPLEAARRIMGKEAIIGVSANNLTEALEAAAMGADYLGVGAMFPTGTKKDADSTTMDELRRIRAEIKIPIVAIGGINKNNIHLFAGTGIDGIAVVSAIVSQKDASGAARELKALFYSIIGK

SEQ ID NO: 64759 - DNA, 669 bp, Unknown
  Obtained from environmental sample
  misc_feature (1)..(669): n is a, c, g, or t
atgaagacgtataaagcgtatatttttgatctcgatggcacgcttcttgattcaatgggtgtgtgggctcaagttgacgttgattttctcgcgaaacggggaattgcccttccgcccgattatatggacgctatttcatcaatgagtttccacgagaccgccgactatacaattaaacgttttgcgttatctgacaccattgacggtttaatgcgcgaatggaaggacatggcggcatacgcctacggacacacggtacagatgaagccctatgctaaagagtaccttatgacactgcgagagcgcggggcaaagttagcggtcgcaacttccctgtccgccgaactttgcggtcctgtactgcgtaacaacggtattgataatttttttgacgttatttgcagaacagatgaagcgggatatggaaaatcacgtcccgatgttttcctgcttaccgcgcaaaagatcaacatttcgcccggcaactgcctggtttttgaggacatactcgcggcggtaaaaagcgccaaaagcgccggcatgagcgtttgcgccgtatatgacaaaacatcgcataacgattgggaagaaataaaaaaaacggcggattacgcgattgatgattttcgcgatgcgccgttaccgcggactaaaagtccggcggactaa

SEQ ID NO: 64760 - protein, 222 aa, Unknown
  Obtained from environmental sample
  DOMAIN (4)...(189): haloacid dehalogenase-like hydrolase
  misc_feature (1)..(222): Xaa is any amino acid
MKTYKAYIFDLDGTLLDSMGVWAQVDVDFLAKRGIALPPDYMDAISSMSFHETADYTIKRFALSDTIDGLMREWKDMAAYAYGHTVQMKPYAKEYLMTLRERGAKLAVATSLSAELCGPVLRNNGIDNFFDVICRTDEAGYGKSRPDVFLLTAQKINISPGNCLVFEDILAAVKSAKSAGMSVCAVYDKTSHNDWEEIKKTADYAIDDFRDAPLPRTKSPAD

SEQ ID NO: 64761 - DNA, 402 bp, Unknown
  Obtained from environmental sample
  misc_feature (1)..(402): n is a, c, g, or t
ttgatgattttcgcgatgcgccgttaccgcggactaaaagtccggcggactaaagtccgttggcaaaggagaataattatgtcattttcaagaggtttaaaagaaaaagcggcaaaagtttgggaagaaggttaccatcatccgttcgtacaggaactgggaaaaggaaccttagataaggaaatatttaaattttatttgctgcaggactaccaatacctgctgcggtacgcaaaagtttttgccgtagccgccataaaatccgatacggaagaactgatgaccaaattttcaacaatccagtacaagatcatcgcgaaggaaatgaatttacatcgagaatatatggcaagttttggcgtaacgcgcgaagaaattctttccgtaaaaccctcgcgttaa

SEQ ID NO: 64762 - protein, 133 aa, Unknown
  Obtained from environmental sample
  misc_feature (1)..(133): Xaa is any amino acid
MMIFAMRRYRGLKVRRTKVRWQRRIIMSFSRGLKEKAAKVWEEGYHHPFVQELGKGTLDKEIFKFYLLQDYQYLLRYAKVFAVAAIKSDTEELMTKFSTIQYKIIAKEMNLHREYMASFGVTREEILSVKPSR

SEQ ID NO: 64763 - DNA, 411 bp, Unknown
  Obtained from environmental sample
  misc_feature (1)..(411): n is a, c, g, or t
ttgcctacgccggtgtcccaaaaaagctctcgtatgtcttttagccgaacctgcgccccattgataaaatattcgctttctccggaacggtacagccgccgtttaatttcgatttccggcatatccattggcagaagacctgtttcattcgcgattgcaagggaaacttccgccacgttgagaggttttctggcttccgtgccgccgaaaatgacatcttccattttttccgcgcgaagtgattttatcgcgtgttcgccgagaacccatttgattgcgtcgactacgttggattttccgcagccgtttggtccaaggagagcggtgatgccgtcgttaaattcaatgtcggtgcggtctgcaaaagatttgaagccgagaatcgtaagacgcttaaggaacataaattaa

SEQ ID NO: 64764 - protein, 136 aa, Unknown
  Obtained from environmental sample
  misc_feature (1)..(136): Xaa is any amino acid
MPTPVSQKSSRMSFSRTCAPLIKYSLSPERYSRRLISISGISIGRRPVSFAIARETSATLRGFLASVPPKMTSSIFSARSDFIACSPRTHLIASTTLDFPQPFGPRRAVMPSLNSMSVRSAKDLKPRIVRRLRNIN

SEQ ID NO: 64765 - DNA, 414 bp, Unknown
  Obtained from environmental sample
  misc_feature (1)..(414): n is a, c, g, or t
atgttacacgacatgggaaaaatcgttttctccaatgtacatcccgatcttttaaacagaattaaaggtttctgtaacgaaaagaatcttcccgttgcggcgtttgaagatatttccgccggtatgaatcacgcggaacttggcgctcttatcgccgaaaaatggaatttcccggataaattggttgcggcaatacggtatcatcacgatcctgaatccgcgccttttgattgcaaagacctgatcgatactgtttatcttgccaatatgttctgcgaatatgaaaacaacaatatcagttttgatcagcttgaaacggaaccgcttgaaaactacggtttaaaaaaccaaaaacaagttgatacattgattgaacggctttccgcgggattcaacaaagaaggacagctttaa

SEQ ID NO: 64766 - protein, 137 aa, Unknown
  Obtained from environmental sample
  misc_feature (1)..(137): Xaa is any amino acid
MLHDMGKIVFSNVHPDLLNRIKGFCNEKNLPVAAFEDISAGMNHAELGALIAEKWNFPDKLVAAIRYHHDPESAPFDCKDLIDTVYLANMFCEYENNNISFDQLETEPLENYGLKNQKQVDTLIERLSAGFNKEGQL

SEQ ID NO: 64767 - DNA, 762 bp, Unknown
  Obtained from environmental sample
  misc_feature (1)..(762): n is a, c, g, or t
ttgcaagttaaacgaaataccattattattgaaatacgcaataatgttaccgcaaataaaatggaacaactgcgtatacaggacaagatggcaagatccaggcagtatgacagtctggaagacgcattgtcccaggtgcttgacgattctgaaggcgcggggcttggacttgttatcctggtccttatgttaagaaaaataggtcttgatgacgacgctttttcaatcaagacaaaaaacaactgcacaatcgcaagtatttctattccgcttgatcaggcaatggtagaaaatatgtcggctctgtcggaagaaattgtggaaaatgtaaacagcctgccgcaatttccggagaatgtcctgcttatacaaaaacttattaacgatcccgcttccgatatgcccataattgcaaggcaaatttcgatggacccggcgcttactgcggatctgttaaaaattgtcaattcagcgcaatatatgctgtccaaaaaagttgatcatatttcagacgctgtaaaaatgattggaataaacggcataaaaaacctgctttattcatacggaacacaaaaaatattgggcgacgatacggctgaaaaaaagaaactttgggatcattcgtacaaaaccgcgttttacgccttcaatttggtcaagaattttaaaaattctcccggacttctggacgacgtatatatcggcggatgttacacgacatgggaaaaatcgttttctccaatgtacatcccgatcttttaa

SEQ ID NO: 64768 - protein, 253 aa, Unknown
  Obtained from environmental sample
  misc_feature (1)..(253): Xaa is any amino acid
MQVKRNTIIIEIRNNVTANKMEQLRIQDKMARSRQYDSLEDALSQVLDDSEGAGLGLVILVLMLRKIGLDDDAFSIKTKNNCTIASISIPLDQAMVENMSALSEEIVENVNSLPQFPENVLLIQKLINDPASDMPIIARQISMDPALTADLLKIVNSAQYMLSKKVDHISDAVKMIGINGIKNLLYSYGTQKILGDDTAEKKKLWDHSYKTAFYAFNLVKNFKNSPGLLDDVYIGGCYTTWEKSFSPMYIPIF

SEQ ID NO: 64769 - DNA, 999 bp, Unknown
  Obtained from environmental sample
  misc_feature (1)..(999): n is a, c, g, or t
atgaaagccctggtaattgaaaaaccgggaacagcctgtgttcagacagtacaggctgctcaggttggcgatagggatctgcgcgttaaagtaaaagcctcaggcatttgcgggacggacttgcacattttcaggggggaataccttggcggttatccagtgattcccggccatgaattttccggtgttgttgaggaagcaggtgagagagtttcccgatttaaagtaggcgatcatgtcgcaatagagccgaatatcagctgcgataactgtgatgcctgtctgagcaacaggcagaatttttgtgagcggtggaacgctgtcggcgttacttttcccggtggcatggcggaatacgcggtgatccccgaaaaggcggctttcaatatcggggatcttccgtttttgtccggcgcttttgtcgagccgctttcctgcgttttgcacggagtcgaaagggcccgcatcaaattggctgacaaagtgctgattctgggcgcgggcccaataggcattctcctttctaaaaccatacagctacagggcgcctgtgaaattacccaggttgacctgaatcaaagcaggctggaattggcgaaaaaaagcggcgctgtgaaggtgtgtgcctcacttgagaaaataaaaaaagaatcattcgatgtggttgttgacgcttctggttcaactttccttatggaaaaggcactggatttcgtacgcaaaggcgggacagtgctctggttcggggttcccaagcgtgacgcgatattgcaattgccggcgttcacaatttttgaaaaagggttgtttttgctttcttcctacacttcggtacgaaattccattcaggctgtcgagttgcttaaaacaggaaaaatagatgtcgcccctctggtttcccatcaattgcctttggaagattttgttaaaggggtagaaattattgaaaaagggctagaaggcgttttaaaaatagtaattcttccggaacttacttaa

SEQ ID NO: 64770 - protein, 332 aa, Unknown
  Obtained from environmental sample
  DOMAIN (158)...(290): Zinc-binding dehydrogenase
  misc_feature (1)..(332): Xaa is any amino acid
MKALVIEKPGTACVQTVQAAQVGDRDLRVKVKASGICGTDLHIFRGEYLGGYPVIPGHEFSGVVEEAGERVSRFKVGDHVAIEPNISCDNCDACLSNRQNFCERWNAVGVTFPGGMAEYAVIPEKAAFNIGDLPFLSGAFVEPLSCVLHGVERARIKLADKVLILGAGPIGILLSKTIQLQGACEITQVDLNQSRLELAKKSGAVKVCASLEKIKKESFDVVVDASGSTFLMEKALDFVRKGGTVLWFGVPKRDAILQLPAFTIFEKGLFLLSSYTSVRNSIQAVELLKTGKIDVAPLVSHQLPLEDFVKGVEIIEKGLEGVLKIVILPELT

SEQ ID NO: 64771 - DNA, 1089 bp, Unknown
  Obtained from environmental sample
  misc_feature (1)..(1089): n is a, c, g, or t
atgagcgacgaatctaacggtatgtattatgcgccgaaaggaaaaccaaatcccgtagtaaaaaagggagaatttaattttgcggcaatcggccttgatcacgggcatatttacgggcagtgcaacggtctgatagaagcgggcggaacgctgaaaagcgtttacgatcccgatccaaaaaaagttgacagattctgcgaaacatatcccggcgtaaagcgcgcggcaagcgaggacgagattcttggcgacaaggaagtcttgcttgtagcgggagcggcaattacgtccgaacgctgcgcgctgggcttgcgcgtaatgtccgccggaaaggattattttacggacaaagccccgcttacaaccctggaacaactggaggcggcaaaagaaaaggtaaaagaaacaggcaaaaaatacatggtttattacagcgagcgcatccatgttgagagcgccgtttttgcgggccagctcattgaacagggagcaattggcagggtgattcaggtactcggccttggccctcaccgtcttgcagctccttcgcggcctgactggtttttcataaaaacacaatacggcggcattctttgcgacatcggcagccatcagatagaacaattcctgttttattcaggcgcgaaagacgctactgtagtccatagccagatcgcgaattacaaccatccgcagtatcccgaactggacgacttcggggacgcggtactcgtcggcgacaacggcgcgacccactatttccgtgtagactggttcacccctgacggtctgcaaatgtggggcgacggccgctcaatcattcttgggacagaaggctatatcgaacagcgaaaatacatgcagttggggagaaaagacagccacggtggcaacgtttacctcgcaacaaccaaggaagaaacttattacaatgttgacgggcaggtaggctacccttactttggacagttgattcttgactgtcttaaccgcactgaaaacgccatgacgcaggaacacgctttcaaggccgctgagctatgcgtaaaagcgcagatgcaggcggtgaagatcggatcgcttaagtaa

SEQ ID NO: 64772 - protein, 362 aa, Unknown
  Obtained from environmental sample
  DOMAIN (25)...(144): Oxidoreductase family, NAD-binding Rossmann fold
  misc_feature (1)..(362): Xaa is any amino acid
MSDESNGMYYAPKGKPNPVVKKGEFNFAAIGLDHGHIYGQCNGLIEAGGTLKSVYDPDPKKVDRFCETYPGVKRAASEDEILGDKEVLLVAGAAITSERCALGLRVMSAGKDYFTDKAPLTTLEQLEAAKEKVKETGKKYMVYYSERIHVESAVFAGQLIEQGAIGRVIQVLGLGPHRLAAPSRPDWFFIKTQYGGILCDIGSHQIEQFLFYSGAKDATVVHSQIANYNHPQYPELDDFGDAVLVGDNGATHYFRVDWFTPDGLQMWGDGRSIILGTEGYIEQRKYMQLGRKDSHGGNVYLATTKEETYYNVDGQVGYPYFGQLILDCLNRTENAMTQEHAFKAAELCVKAQMQAVKIGSLK

SEQ ID NO: 64773 - DNA, 672 bp, Unknown
  Obtained from environmental sample
  misc_feature (1)..(672): n is a, c, g, or t
ttgtggtggagaggcacatgggaaaaagaaggcggaggttgtacgttgaaccatgccgtgcatcacattgatatgctgtgctggatgcttggattgcccaagaaagtcagtgccgttatcagcaacgcatcccacgacaacgccgaagtggaggacatttctgttgcggtattgcaatacgacggcgggctttgctcgaaaggcgcgttggcgcaggtaacaagctccgttatccatcacggcgaggagcagcagcttgtttttcagggagagaaagcccgcgtttcggcaccgtggagagttacagccaatatcgctcagcccaatggttttcctgtcttcggacagcagaatgaagaactgatatcaaaacttaatgatttttacaatgcactgccaaaatatgcccatactttacacacagggcaagttgacgacgtattgaccgcgctcgaaaccggaggcaagccgttgattgacggcgaagacggcaggcgcacactggaacttatttccgccatttacaaggccggtacggaacaacgcgcagtggaactgccaatgaagaaagacgatcccttttacacggttaaaggcattatgggaaaagtgccgcatttctatgaaaagactgtctctgtaaacgatcagggcggaaacattacattttag

SEQ ID NO: 64774 - protein, 223 aa, Unknown
  Obtained from environmental sample
  misc_feature (1)..(223): Xaa is any amino acid
MWWRGTWEKEGGGCTLNHAVHHIDMLCWMLGLPKKVSAVISNASHDNAEVEDISVAVLQYDGGLCSKGALAQVTSSVIHHGEEQQLVFQGEKARVSAPWRVTANIAQPNGFPVFGQQNEELISKLNDFYNALPKYAHTLHTGQVDDVLTALETGGKPLIDGEDGRRTLELISAIYKAGTEQRAVELPMKKDDPFYTVKGIMGKVPHFYEKTVSVNDQGGNITF

SEQ ID NO: 64775 - DNA, 1242 bp, Unknown
  Obtained from environmental sample
  misc_feature (1)..(1242): n is a, c, g, or t
ttgaaagacaatatctctacaataggattggaaaccacctgcgcgtcaaaaattcttacgggttataaacccgttttcaacgcgacgataactgaaaaacttgaacgcgccggaatgatcgttatcggaaaactcaacatggacgagttcgctctcggcggctcaagcgagacgggagcgttcggcgcggcctttaacccgtgggatacaatgcgggtctgcggcggttcatcggggggcagcgccgccgcggttgccgcgggggaagcgcctgtcactctcggcaccgacacgggcggaagcatacgccagccctgctctttctgcggcgttacgggcattaaacccacttacggctctgtttcaagatacggaattgtcgccttcgcctcatcgctggatcaggcggggcctatcggacaaaacattgaagactgcgccgcgctgttatcgatcatttcgggagcggacgaaaaagacagcacctgcgtcatgaagaaaccgtttgatttcagcgaacggcgcgaggatatgaaaggcgtaaaaatcggcttgccgaaaaattatcttgaaggcggtatagaggacgaagtaaaagccgctgttctagcggcggcaaaagaatttgaaggggcgggagcttccgtcgaagaatttgaaatgccttttatggattacatgatccccacttattacatcatcgccgccgccgaagtgtcgtctaacctttcaaaatacgacggtcttaaatacggctaccgcagtccgaacgcgaaaacgctctccgaagtctaccggctctccagaagcgagggcttcggaatggaagcaaaaagaagaatcatgctcggctcgtttgttctctcatcgggatactacgacgcttactacaagaaagccctgcaggcgcgcgcgcttcttaaagacgcttacagcaaattgttcgggcgctttgacataatactctcccctaccgcgcccaccactgcgtacaagttaggtgacaatataggcgaccctgtaaaaatgtacatgggagacatctacactgtttcgatcaatcttgcggggcttcccgccgccgccctcccctgcggctttgacaaacaaggtttgccaatcggctttcaattaatcggggacgctttttcggaaaacaaaataataaacgcggcgcgtgtttttcaaaaccggacagatcatcataaaaagaaaccttctattaacggaggcgcatcatga

SEQ ID NO: 64776 - protein, 413 aa, Unknown
  Obtained from environmental sample
  DOMAIN (2)...(389): Amidase
  misc_feature (1)..(413): Xaa is any amino acid
MKDNISTIGLETTCASKILTGYKPVFNATITEKLERAGMIVIGKLNMDEFALGGSSETGAFGAAFNPWDTMRVCGGSSGGSAAAVAAGEAPVTLGTDTGGSIRQPCSFCGVTGIKPTYGSVSRYGIVAFASSLDQAGPIGQNIEDCAALLSIISGADEKDSTCVMKKPFDFSERREDMKGVKIGLPKNYLEGGIEDEVKAAVLAAAKEFEGAGASVEEFEMPFMDYMIPTYYIIAAAEVSSNLSKYDGLKYGYRSPNAKTLSEVYRLSRSEGFGMEAKRRIMLGSFVLSSGYYDAYYKKALQARALLKDAYSKLFGRFDIILSPTAPTTAYKLGDNIGDPVKMYMGDIYTVSINLAGLPAAALPCGFDKQGLPIGFQLIGDAFSENKIINAARVFQNRTDHHKKKPSINGGAS

SEQ ID NO: 64777 - DNA, 1554 bp, Unknown
  Obtained from environmental sample
  misc_feature (1)..(1554): n is a, c, g, or t
gtgtttttcaaaaccggacagatcatcataaaaagaaaccttctattaacggaggcgcatcatgaaactttgtttcatgttcggtttaactgtgcggtcatccgaccgcacggaaaagagggtataatgaaatgggaaaccgtaatcggtcttgaaattcacaccgagctttcgacaaaatcaaaaattttctgcgcttgtacaaccgcctacggcggagagccgaacacccacgtctgcccagtctgctcagggatgcccggaactctgcccgtactgaaccgcgccgtgcctgaatacgcgatgcggcttgggctcactcttaactgcgaaattacaaggctcagcaagtttgacagaaaaaattatttttaccccgatcttcccaacgcgtatcagatatcccagctttacgcaccgatatgcagaaacggttatcttgaaattgatattgaggggaagaaaaggaaaatcggtattcacgagatacacatggaacaggacgcgggaaaacttgttcacgatccgaaaggaaacagctctttcatggactttaacaggtgcagcgtccctcttttggaaattgtatccgagccggatttgcgaagcgcagccgaggtaatcgcctaccttgaaaaaatgcgcgagacgcttttgtaccttgatataagcgattgtaaaatgcaggaaggctcgatccgcgccgatgtcaatttgtcaattcgcctcttcggcggagaactcggcacacgcaccgagacaaaaaacatgaactcgtttaaggcgattgcgcgcgccattgaatacgagacggaacgtcagattgaaatacttgaggacggcggaaaaattgttcaggagacccgcaggtgggacgatgaaaaaggactctcctacggaatgcgctccaaagaaaacgcgcaggattaccgctatttcccagagcctgatcttctgccgcttcacattgacgacgcgtggattgagaacgttaaatcatttatgccggaactcgctcagcaaaagcgcgaacgctatgtccgcgattggggcatttccgaatccgcggctgtcgttcttactgtccataaaaagatttccaatctttttgagatcgtctcacaaaaaagcaatcaaccgcaggaagccgcgaatttgatcacgggcgaaatcatgcgcttgatgaacaatgccaatttacttcccgaagacctttccatagacgcggataaattatcggctctcatcggttttgtcgcaggcggaaaaattaaccgcgccgcatacaaggaaaccgttgaagcggtattcacggacaatgttgaccctgaaaaatatatcgcggaaaagggactgatgatggtcagcgatgacaacgccgtaatcgaagcgataaaatcggtattggcggaaaactcagacgccgtagcttcctggcgcggcggcaagacgcaggttttcggcttcctgatgggacaggttatgaaaaaactgggcaagggcgggaatcctgagattgcgaaaaaagcgctggaggaagcgctgaaagaataa

SEQ ID NO: 64778 - protein, 517 aa, Unknown
  Obtained from environmental sample
  DOMAIN (298)...(366): PET112 family, C terminal region
  misc_feature (1)..(517): Xaa is any amino acid
MFFKTGQIIIKRNLLLTEAHHETLFHVRFNCAVIRPHGKEGIMKWETVIGLEIHTELSTKSKIFCACTTAYGGEPNTHVCPVCSGMPGTLPVLNRAVPEYAMRLGLTLNCEITRLSKFDRKNYFYPDLPNAYQISQLYAPICRNGYLEIDIEGKKRKIGIHEIHMEQDAGKLVHDPKGNSSFMDFNRCSVPLLEIVSEPDLRSAAEVIAYLEKMRETLLYLDISDCKMQEGSIRADVNLSIRLFGGELGTRTETKNMNSFKAIARAIEYETERQIEILEDGGKIVQETRRWDDEKGLSYGMRSKENAQDYRYFPEPDLLPLHIDDAWIENVKSFMPELAQQKRERYVRDWGISESAAVVLTVHKKISNLFEIVSQKSNQPQEAANLITGEIMRLMNNANLLPEDLSIDADKLSALIGFVAGGKINRAAYKETVEAVFTDNVDPEKYIAEKGLMMVSDDNAVIEAIKSVLAENSDAVASWRGGKTQVFGFLMGQVMKKLGKGGNPEIAKKALEEALKE

SEQ ID NO: 64779 - DNA, 729 bp, Unknown
  Obtained from environmental sample
  misc_feature (1)..(729): n is a, c, g, or t
gtgccttattatcccaccgacacggttatggacattattacaagaattaacaattccggcgcggaagtcgtggcgcgtcttaacagggaggggaaattttcgttaaaagggactcctgcggaaatgatagacggcagaagagaaaatcctgattttgttatacgtcatgttgaggattcggggcatttccttgtcggttacgccggtgtccttcttgcgtcgggagcggaaggcgcttattcatgggacagggccgatgccgtaacaagcttacgcggcggcgcgcaagactacgcgcttgcaccggtcgcccatccttcaggctggatcgaggtaaatccggcgctgttaaaagatccgacttccgtagcggcaggcttcggctacaacggcagggcggctaacccgggaaacggagacgctgcggcggaaatggcgttaataaggaacagcccggtaatggtaggcaaacttgccacatttgacgactactttgcggattccgttgggcgtatcggcctgttgggcgaacaagccgcttcggcgctggaaacagaaaataaaattatgaaatatttaacggattggcgcagttcaatttcaggagtaaacataaacgaagaattatcgaacatgctccgttatcaacagggatttaacgctgcagcccgttttataacgacagttaattcaatgtatgacacgataatcaaccgtatgggagtttaa

SEQ ID NO: 64780 - protein, 242 aa, Unknown
  Obtained from environmental sample
  DOMAIN (201)...(239): Domain of unknown function (DUF1078)
  misc_feature (1)..(242): Xaa is any amino acid
MPYYPTDTVMDIITRINNSGAEVVARLNREGKFSLKGTPAEMIDGRRENPDFVIRHVEDSGHFLVGYAGVLLASGAEGAYSWDRADAVTSLRGGAQDYALAPVAHPSGWIEVNPALLKDPTSVAAGFGYNGRAANPGNGDAAAEMALIRNSPVMVGKLATFDDYFADSVGRIGLLGEQAASALETENKIMKYLTDWRSSISGVNINEELSNMLRYQQGFNAAARFITTVNSMYDTIINRMGV

SEQ ID NO: 64781 - DNA, 1056 bp, Unknown
  Obtained from environmental sample
  misc_feature (1)..(1056): n is a, c, g, or t
atgacttcaacatttatgggattggaaatcggtaaaaggngtatatttgcccaccaacaggcgcagcatgtaataggacacaaccttgacaatattgcaacagaaggatattcacgccaaaggattgagatagctcagtctgaacccgattacctgccgggccttaaccgcgcccttactccaggtcaaataggacaaggcgcttcggtggaacgtatagaacgtatccgcgacgagctattggacaagcgcattgtcgcgcaggcctcgggagagggttactgggctgtacgcgaccgttatatccaggagatggggcaattctaccttgagacaggggcaaattccgtaagaagcaaaatggacagtttctgggccggatgggatgaactttcacaaaatgcctcgaatatggaatcccgccatgtcgttcttcagcgcggaaaaaccttaatcgacggtattcataatcattttaataatttgaaaaggcttcaaactcaggttgacgaggacgtacagataaatgttgaaagggtgaacgaaataacccgccagatcgcgatgcttaacaaggatataacccgcattaaagccataggagacaaccccaacgaccttatggacaggcgagacctgttagtcgataaactttcttcaataattgatgttaccgtaaaccagttggatcatgacgagtttatggtgcatacttcagggcacgttcttgtacaggggcagaacgcgcgccagtttgatatgcgcaaagatatggataccgaaggttatgcgcatatttattggcatgatacaaaagatcaaatcgtctttacaaaaggcagccttggcgcgcttttggaacttcgtgatgttacaatagaagatgaaattcagagccttgataatatgacaatgaattttacagacctcataaacgaaatccacagcgaagcttacggcgcgaacggcactacccggcaacaatttcttttccgaatatccgtttgtaacaaatgtaaacggaaattacgaccgttcgggagacggtgtttttga

SEQ ID NO: 64782 - protein, 351 aa, Unknown
  Obtained from environmental sample
  misc_feature (1)..(351): Xaa is any amino acid
MTSTFMGLEIGKRXIFAHQQAQHVIGHNLDNIATEGYSRQRIEIAQSEPDYLPGLNRALTPGQIGQGASVERIERIRDELLDKRIVAQASGEGYWAVRDRYIQEMGQFYLETGANSVRSKMDSFWAGWDELSQNASNMESRHVVLQRGKTLIDGIHNHFNNLKRLQTQVDEDVQINVERVNEITRQIAMLNKDITRIKAIGDNPNDLMDRRDLLVDKLSSIIDVTVNQLDHDEFMVHTSGHVLVQGQNARQFDMRKDMDTEGYAHIYWHDTKDQIVFTKGSLGALLELRDVTIEDEIQSLDNMTMNFTDLINEIHSEAYGANGTTRQQFLFRISVCNKCKRKLRPFGRRCF

SEQ ID NO: 64783 - DNA, 690 bp, Unknown
  Obtained from environmental sample
  misc_feature (1)..(690): n is a, c, g, or t
atgaaaaataccgttatcggaccaaggccggaatacccgcctgacaaaatggtacagagatatccaaaagaacaccttctttttgccgagggcgaaaccgggcataccatgtatataattcaggacggttcggtaaaaataacaaagattgttgacaataaagaaataatccttgcggttcttggcaaaggcgatattttcggcgaaatggcgttattggaagacaaaccccgcgccgccaccgccgaaatttacgaagactgcacattattggcggttaaccgcgataacttctcaaacctcataaaggagcagcccgatatggtagtccgtatggcaaccttaatgtctgaacgcatttggctgctctatcgccagcttgataacacattcataaaagatccgttaggacgcgtttatgacgctctgcttatccagcttgaaaaaaaccgcgttgacataaacagcgacgaaccgtatttgtgtaacttcggtattaaagaattaattggcatggcgggtatgcaagaatccgagaacaaacagcttgaccgtaaaatcgccggtgacggaaagctgacctttaaggacgataaaatccagataatcaaaatctcggacatagtcaaagaatccacattctaccgcaaagcgcaaaaaatagccgaaaacagaaaagggaaactttaa

SEQ ID NO: 64784 - protein, 229 aa, Unknown
  Obtained from environmental sample
  DOMAIN (18)...(107): Cyclic nucleotide-binding domain
  misc_feature (1)..(229): Xaa is any amino acid
MKNTVIGPRPEYPPDKMVQRYPKEHLLFAEGETGHTMYIIQDGSVKITKIVDNKEIILAVLGKGDIFGEMALLEDKPRAATAEIYEDCTLLAVNRDNFSNLIKEQPDMVVRMATLMSERIWLLYRQLDNTFIKDPLGRVYDALLIQLEKNRVDINSDEPYLCNFGIKELIGMAGMQESENKQLDRKIAGDGKLTFKDDKIQIIKISDIVKESTFYRKAQKIAENRKGKL

SEQ ID NO: 64785 - DNA, 408 bp, Unknown
  Obtained from environmental sample
  misc_feature (1)..(408): n is a, c, g, or t
atggcaaagattgaaggatttagaattcgtaatttcagaactttgcgtgatgttacacttggccatttatggaacgagagaagttccggtgaattaactcctatgactgcagtaatcggaaaaaacggttcaggaaaaagtacgctttttgatgcgtttggctttctgtcggattgcttgaaattaggagtagaagaagcctgcgatgcgaaggggcgcggcggatttgaacgaataatatcacaaggcgtaaacgaacctattatgtttgagatttactatcgggaaacccgtacagaacttccaattacatacgaagtggcattcgctcttgatgatcatagccgaccatatgtcaaaagtgaacgcttacggcagcgaagagaaggacagaaatcaaccggctga

SEQ ID NO: 64786 - protein, 135 aa, Unknown
  Obtained from environmental sample
  misc_feature (1)..(135): Xaa is any amino acid
MAKIEGFRIRNFRTLRDVTLGHLWNERSSGELTPMTAVIGKNGSGKSTLFDAFGFLSDCLKLGVEEACDAKGRGGFERIISQGVNEPIMFEIYYRETRTELPITYEVAFALDDHSRPYVKSERLRQRREGQKSTG

SEQ ID NO: 64787 - DNA, 768 bp, Unknown
  Obtained from environmental sample
  misc_feature (1)..(768): n is a, c, g, or t
atgcgtgaagaatcaaccgaaagagaagttgttgaattggaagataaccgtagattaggtattgccacattaggcgcattaaagcaacatcccagaatttctacattcaggcaattcatcgaaggttggtatctttcatatttcaggcccgactcagctcgcgaactaccgttatcaggagctcagaagcatttaaatatacatggtgataatattggaaatgttgttcagtttatgaaacgtgaccatcctgagcaatttaaaataatattaaatgatattgccgagaaaattcccggaattgataaaatagacacggaaccaatgcccaatggtcgattgttgttaaaatttaatgataaaggttttaaagatcctttttctgcccagcaaatgtctgatggtacattaaaagtatttgcgtatttattattactttctgatccaacgcctcctccgtttatatgtattgaagaaccggaaaatggtttataccataagctgcttgaaacactcgcgcagcaattccgtgctcatgtcacaaacgaaaaaaacaaatcccaaattttcattactacgcatcagccatattttgttgacgcgctggaacctaaagaggtttggatactggaaaaaggcgatgatgggttctcaaaaattcgccgtgcaagtgatgatcctgtcattcgggaattagttaaagaaggattgcctcttgggggattatggtacagtgattattttgaagaggtaaaaaatgcactttga

SEQ ID NO: 64788 - protein, 255 aa, Unknown
  Obtained from environmental sample
  misc_feature (1)..(255): Xaa is any amino acid
MREESTEREVVELEDNRRLGIATLGALKQHPRISTFRQFIEGWYLSYFRPDSARELPLSGAQKHLNIHGDNIGNVVQFMKRDHPEQFKIILNDIAEKIPGIDKIDTEPMPNGRLLLKFNDKGFKDPFSAQQMSDGTLKVFAYLLLLSDPTPPPFICIEEPENGLYHKLLETLAQQFRAHVTNEKNKSQIFITTHQPYFVDALEPKEVWILEKGDDGFSKIRRASDDPVIRELVKEGLPLGGLWYSDYFEEVKNAL

SEQ ID NO: 64789 - DNA, 672 bp, Unknown
  Obtained from environmental sample
  misc_feature (1)..(672): n is a, c, g, or t
atgcactttgaatttttgatagaagatcaatcaggagctaaagcaatggatatacttcttccgaaattacttggaaataaagcttcgtatagaactatcaaaggttataaaggtcttggccatctcccaaaagatttaaagccaaaaactggagcgaataagcgaatacttcttgaccgactacctcaattattgagtggatatggcagatctcagaagttaggatataatttagaatatatagtaattatttgcgatttggacgataaggttgaaaaacagtttttatcagaactgaataatgtgctgaacagatgtaatcccaaaccaaatgctcttttctgtctagctattgaagagtttgaagcttggtatctcggcgatctggatgcgattcgaaaagcgtatcccaaagcaaaagacgctattttgaaaggatataaaaatgattcaatttgcgatacatgggagcttctcgctgatgctgtttgcaaaggaggaagcaaggcattaaagaaagaggggtggcaagctatcggaaaacaaaagtctgtctgggcaagagaaattagtccccatatgaatgttgacagtaacatttctccaagtttcaatagtatgcgtttgcaattacaaaacattaccaaaaaagctaaattagagagtacttaa

SEQ ID NO: 64790 - protein, 223 aa, Unknown
  Obtained from environmental sample
  misc_feature (1)..(223): Xaa is any amino acid
MHFEFLIEDQSGAKAMDILLPKLLGNKASYRTIKGYKGLGHLPKDLKPKTGANKRILLDRLPQLLSGYGRSQKLGYNLEYIVIICDLDDKVEKQFLSELNNVLNRCNPKPNALFCLAIEEFEAWYLGDLDAIRKAYPKAKDAILKGYKNDSICDTWELLADAVCKGGSKALKKEGWQAIGKQKSVWAREISPHMNVDSNISPSFNSMRLQLQNITKKAKLEST

SEQ ID NO: 64791 - DNA, 927 bp, Unknown
  Obtained from environmental sample
  misc_feature (1)..(927): n is a, c, g, or t
atggctgatataatccccgccgaagatacagtttatcaaagtatccgtactgttcttgccgccgcgcggcaaaaggtgtataccgcagtaaattccgctatggtcgaagcctattgggatatagggcggcaaatcatggaagcccaggaagggcagcgggctgaatatggcacggggttaattaagtatctggcggagcggctgactaaggaattcgggaaaggttttgatgagagcagcctgcggcggatgcgccagttttttcaggttttcccaattcgtgccgcagtgcggcacgaattaagctggacacattaccgccttttgatgaaagttggaaatgaggttgaacgtgaattctaccttaaagaatgtatcgaatgtaactggagttcccgtcagcttgaacggcaaattacgactttctattacaaacggctccttgccaccagaaaagaaggcaaggaatctgtaaaaaatgaaattcaagaaactgaaccgaaaacagaccccgacttcatattaaaagacccctatattctggagttccttgatctgaaagaaaataaagattatcacgaaagcgagcttgaacaagcccttatagacaaattacaggaattccttttggagctaggcaaagggttttcatttgtagcgcgccaaaaacgtataactattgaaggggatcattattatgttgatctggttttttacaattacctcttaaaatgctttattattattgatttaaaaaccggaaagctgtcatatcaggatattgggcagatagatttctatgtccgctattttgacgatcaaatcaagcttcacgaagacaatcccacattgggcatcattctatgcgccgataaaaatgaaactatggcaaaatattctgtcctttcggataaagatactgtttag

SEQ ID NO: 64792 - protein, 308 aa, Unknown
  Obtained from environmental sample
  DOMAIN (11)...(308): Protein of unknown function (DUF1016)
  misc_feature (1)..(308): Xaa is any amino acid
MADIIPAEDTVYQSIRTVLAAARQKVYTAVNSAMVEAYWDIGRQIMEAQEGQRAEYGTGLIKYLAERLTKEFGKGFDESSLRRMRQFFQVFPIRAAVRHELSWTHYRLLMKVGNEVEREFYLKECIECNWSSRQLERQITTFYYKRLLATRKEGKESVKNEIQETEPKTDPDFILKDPYILEFLDLKENKDYHESELEQALIDKLQEFLLELGKGFSFVARQKRITIEGDHYYVDLVFYNYLLKCFIIIDLKTGKLSYQDIGQIDFYVRYFDDQIKLHEDNPTLGIILCADKNETMAKYSVLSDKDTV

SEQ ID NO: 64793 - DNA, 1035 bp, Unknown
  Obtained from environmental sample
  misc_feature (1)..(1035): n is a, c, g, or t
gtgtctcagggcggaataattcagcatgtcacctacccggacagcttcatggatcagatggaggtcaccatctctcagattaccaccctggcttcggaccccctgatgaaggctatcattgtgaatcaggctgttcccggcaccgccgaggcctttaagcgcatcaaggaaaaccgcccggacataatactgctggccggcgagtctcatgaggatcccctggtgatccaggaggccgcgaccctggccgtaagctgtgattttatttcccgcggctacacaatcccctgggcggcgaaagagcttggagcggatacctttgtgcacatcagctttccacggcatatgagctatgaaagcttggggctccgcaggcagatttttgaggttgcctgtaatgacctgggaataaaatttgtgtttgttaccgctccggatcccacgtccgacgtgggcgtggctggcgcacagcagtacatccttgaacagactccgcagtggataaaccagtacggcaaaaacgcggttttcttctgcacaaacgacgcccatacggaacccctgcttaaacagcttttcgtttacggcggattgtttgtggaagccgatcttcccagcccgctcatgggttaccccggcgctttgggcattgacctttccgccgaggccggaaatttcccggcgattctaaagaaggttgaagaagcggttgtcgccaaaggcggcgcgggcaagttcggaacatgggctttctcctacgggtttaccgcgtcagccggcctgggcgaattcgcgaaacgcgtcctggacggcaaagctaaaatagacagctccgcggatctctacgcggctctgggcgagtttacccccggcgcgaaatggaacggcggttactatatcgacgccgctaccggcgtgcgtgccaggaaccaactgcttatttacatggatacttacatcatgggacagggcttccttcccaccacggcgcagacagttcccgataagtattaccagatcaaattccagcgctaa

SEQ ID NO: 64794 - protein, 344 aa, Unknown
  Obtained from environmental sample
  misc_feature (1)..(344): Xaa is any amino acid
MSQGGIIQHVTYPDSFMDQMEVTISQITTLASDPLMKAIIVNQAVPGTAEAFKRIKENRPDIILLAGESHEDPLVIQEAATLAVSCDFISRGYTIPWAAKELGADTFVHISFPRHMSYESLGLRRQIFEVACNDLGIKFVFVTAPDPTSDVGVAGAQQYILEQTPQWINQYGKNAVFFCTNDAHTEPLLKQLFVYGGLFVEADLPSPLMGYPGALGIDLSAEAGNFPAILKKVEEAVVAKGGAGKFGTWAFSYGFTASAGLGEFAKRVLDGKAKIDSSADLYAALGEFTPGAKWNGGYYIDAATGVRARNQLLIYMDTYIMGQGFLPTTAQTVPDKYYQIKFQR

SEQ ID NO: 64795 - DNA, 801 bp, Unknown
  Obtained from environmental sample
  misc_feature (1)..(801): n is a, c, g, or t
atgagtgatgtgccgctattgcggctggaaggtatcaccaaagatttttacggcgctacggttctttccggcgttagcttttcccttaaccagggcgagattcttggcttggttggggagaacggcgccggtaaaacaacgctgatgcacatactcttcgggatgtcggatattatcgagaccggaggtttcggcggttctatttttatcgaaggcaagcctgtaattttcaaatcgccctttgaggccctggacgccggtatcggcatggtacaccaggaattttccctgatacccggctttaccgcctgtgaaaacatcatgctgaaccgggaacccacgcgctttaatttggcggtggaattattcggcgacaggctagccacccttaagctcccccagatgcacgaacactcggcgaagaccattgccaagctgggcgtgaatatttccccggaaacgctggttatggagatgccggtggcccacaagcaattcacggaaatcgccagggaaatcagccgcgaccaggtaaagcttctggtgctggatgagccaacggcggtgcttaccgaaaccgaagccgacatactccttgaaaagcctaagcgcctttcaggcgagggcataggcataatttttatttcccacaggcttcacgaggttacaaaaatctgtaaccgggttctggtgcttagggacggccagttgatacgggacacaccgaaccaaagatgtatcggttcaggatattacaacntggatggtgggccgcgaaatttctcacaggccagcagatag

SEQ ID NO: 64796 - protein, 266 aa, Unknown
  Obtained from environmental sample
  DOMAIN (32)...(235): ABC transporter
  misc_feature (1)..(266): Xaa is any amino acid
MSDVPLLRLEGITKDFYGATVLSGVSFSLNQGEILGLVGENGAGKTTLMHILFGMSDIIETGGFGGSIFIEGKPVIFKSPFEALDAGIGMVHQEFSLIPGFTACENIMLNREPTRFNLAVELFGDRLATLKLPQMHEHSAKTIAKLGVNISPETLVMEMPVAHKQFTEIAREISRDQVKLLVLDEPTAVLTETEADILLEKPKRLSGEGIGIIFISHRLHEVTKICNRVLVLRDGQLIRDTPNQRCIGSGYYNXDGGPRNFSQASR

SEQ ID NO: 64797 - DNA, 822 bp, Unknown
  Obtained from environmental sample
  misc_feature (1)..(822): n is a, c, g, or t
atggtgggccgcgaaatttctcacaggccagcagatagtaccgagcgtagccttgaaggtgaggcctttaaagtggaaaacctttgggttgacatgcctggcgaaaccgtgcgggacgtttcatttacggtaaagaaaggggaaatcttcggcataggcggccttgctggtcagggaaaactaggcatccccaacggcatcatgggccttttcgcggcgggcggcagagcctggatagacggcgagagcctggagctgggctaccccaagaagatccttgacgcgggcgtggcctttgtttctgaagaccgccggggtgtgggtcttttgatggacgaaagccttgagtggaacatagcttttggcgttatgcagatcaaaggtcaaaatttgaaaaaattcttcggtggacttttcagcctgcgggatgaaaaagccatgcgccatcttgccgaggaatatatcaaaaaactggaaataaaatgcaccggatcaaggcaggccgctaaagagctttccggtggcaaccagcagaaaatctgcctttccaaggcctttgccctggaaccgaagctgctttttgtttccgagcctacacgcggcatagatgtgggtgccaaaaaaatcgtgctggatactctacgcttctacaaccagagcaagggaacaaccattgtgatgatctccagcgagcttgaggaacttcgttcaatctgcgacagaatcgccattgtagacgaaggaaagatcgcgggtattttgccgccagagtcacccgccgccgaattcggcttattaatgtccggagagaaaatagcatga

SEQ ID NO: 64798 - protein, 273 aa, Unknown
  Obtained from environmental sample
  DOMAIN (47)...(248): ABC transporter
  misc_feature (1)..(273): Xaa is any amino acid
MVGREISHRPADSTERSLEGEAFKVENLWVDMPGETVRDVSFTVKKGEIFGIGGLAGQGKLGIPNGIMGLFAAGGRAWIDGESLELGYPKKILDAGVAFVSEDRRGVGLLMDESLEWNIAFGVMQIKGQNLKKFFGGLFSLRDEKAMRHLAEEYIKKLEIKCTGSRQAAKELSGGNQQKICLSKAFALEPKLLFVSEPTRGIDVGAKKIVLDTLRFYNQSKGTTIVMISSELEELRSICDRIAIVDEGKIAGILPPESPAAEFGLLMSGEKIA

SEQ ID NO: 64799 - DNA, 1089 bp, Unknown
  Obtained from environmental sample
  misc_feature (1)..(1089): n is a, c, g, or t
atgagcaatgcagcaaacattcagattcaaggcgatagcctccaagataaaataaaaacattcgttgctgatttcggctggccccgcctgatcattttcttttttgtggttgtgctttttatcgttgctccttttgtgggcatcaacattgacagctctttcaaggatgtgctggtacgtttcgggcaaaacgggattatggtgctggcactggttccaatgatgcaatccggttccgggttgaacttcggcttgcccgtcggcattgttgcgggcttattgggttcgaccctagcgatgcaattcgagtttacaggcggctttggtttcctcatggcaattctgctcagcctgcctttcgcttttgtgttcggctggctctacggcatactccttaataaagtcaagggcgaggaaatgactatcgccatgtatgttggtttttccattgtcacctttatggcgatcatgtggcttctgctgccctattcgaatcccaaaatggtttgggggtatacgggccagggcctgcgcactaccataaccctggacggttactgggcgcggatcctcaataattttttgacaataaaaattaatggaaccttttttgaattccccacaggcgcgattttattttttattttgatggcctttatcatgtggctctttatgaacagccgtaccggaaccgcccttaccgcggtgggttcaaatcccgacttcgcccgcgcgagcggcgtttcagtggacaaatgccggatcatcggggtaattatttcttcgatctttggcgcgataggcatacttacctatcagcagagcttcgggtttatacagctttacaacgcgccgctctacatggcctttcccgcggtggcggccgtactcctgggcggcgcttcggtgaacaaagcttcaattctcaatgtggtggtgggaaccttcctctttcaaagtatactcaccatgaccccttcggtgatcaataatatactgcagactgacatgtccgaagtaataaggattctcatttccaacgggatgataatttacgcccttacccggaaaacgaaggttacaaaatga

SEQ ID NO: 64800 - protein, 362 aa, Unknown
  Obtained from environmental sample
  DOMAIN (53)...(353): Branched-chain amino acid transport system / permease component
  misc_feature (1)..(362): Xaa is any amino acid
MSNAANIQIQGDSLQDKIKTFVADFGWPRLIIFFFVVVLFIVAPFVGINIDSSFKDVLVRFGQNGIMVLALVPMMQSGSGLNFGLPVGIVAGLLGSTLAMQFEFTGGFGFLMAILLSLPFAFVFGWLYGILLNKVKGEEMTIAMYVGFSIVTFMAIMWLLLPYSNPKMVWGYTGQGLRTTITLDGYWARILNNFLTIKINGTFFEFPTGAILFFILMAFIMWLFMNSRTGTALTAVGSNPDFARASGVSVDKCRIIGVIISSIFGAIGILTYQQSFGFIQLYNAPLYMAFPAVAAVLLGGASVNKASILNVVVGTFLFQSILTMTPSVINNILQTDMSEVIRILISNGMIIYALTRKTKVTK

SEQ ID NO: 64801 - DNA, 786 bp, Unknown
  Obtained from environmental sample
  misc_feature (1)..(786): n is a, c, g, or t
atgaaacttatggacttgaggaaaaaaagtttcttcggcgcggtcgcggataacgcggtagtactgatctttgtgatcattaccctgacggcgattccggtttcaggaattcccattcccgaaataattcaggagatactttcccgtatagggcgcaactgctttctggttttcagccttctgcttcccatcatggcgggaatggggatcaacttcggcatggtactgggagcaatggctggacagatcgggctgatcttcgcggtggactggaacattgtaggcgttccgggacttatcttcgcgtctcttatcggcgtgcccatcgccgcctgtctgggctggttggcgggacagatactgaatcgggcgcggggcagggaaatggttaccggctatgtcctggggtttttcatggacggcttttatcagttcattgtactgtacctcatgggacggccggctatctgggcaggccaggccgcgggaaaatgggcggccctcattcccatccattcgcccagaatcgtattaagccggggttacggcatacgaaacacccttaatttggacgctgttcgccaatcccttgaccgctttattccccttaacatcgcaggaatcaatattcccgtcgccaattatctggtgataggccttttgtgcctttttattatctggttcaggaaaaccaaattgggccaggacatgagggctgtggggcagaatcagacggtggcccacgccgcgggattcccgtggatcgcaccagaatactggcaatag

SEQ ID NO: 64802 - protein, 261 aa, Unknown
  Obtained from environmental sample
  misc_feature (1)..(261): Xaa is any amino acid
MKLMDLRKKSFFGAVADNAVVLIFVIITLTAIPVSGIPIPEIIQEILSRIGRNCFLVFSLLLPIMAGMGINFGMVLGAMAGQIGLIFAVDWNIVGVPGLIFASLIGVPIAACLGWLAGQILNRARGREMVTGYVLGFFMDGFYQFIVLYLMGRPAIWAGQAAGKWAALIPIHSPRIVLSRGYGIRNTLNLDAVRQSLDRFIPLNIAGINIPVANYLVIGLLCLFIIWFRKTKLGQDMRAVGQNQTVAHAAGFPWIAPEYWQ

SEQ ID NO: 64803 - DNA, 384 bp, Unknown
  Obtained from environmental sample
  misc_feature (1)..(384): n is a, c, g, or t
ttgatcagatcggccgagcagcgtactgatgttgtcgtagcaaagaactatttatccgcggaagaaatgcagtcgcttgcattgattgtatcggcgtatcttgacctggccgaacgccgcgcaagagcgcgtgtacccatgacaatggcagattgggctcatcaccttgacttgattttacaggccgatggtaacgaactgttgaccaatgccgggaaaatatcagcgcagatagccgaagatcacgcattaagcgaattcgaagaataccgtgttattcaggataaactgtttgaaagcgattatgacagatttatcgccagcttgaataaattggaagaaaaatcaacggttaaaaagaaaaggaactccaatggatcataa

SEQ ID NO: 64804 - protein, 127 aa, Unknown
  Obtained from environmental sample
  misc_feature (1)..(127): Xaa is any amino acid
MIRSAEQRTDVVVAKNYLSAEEMQSLALIVSAYLDLAERRARARVPMTMADWAHHLDLILQADGNELLTNAGKISAQIAEDHALSEFEEYRVIQDKLFESDYDRFIASLNKLEEKSTVKKKRNSNGS

SEQ ID NO: 64805 - DNA, 843 bp, Unknown
  Obtained from environmental sample
  misc_feature (1)..(843): n is a, c, g, or t
atggatcataattctggcactggcaaattcaccgaacagcaattcgaagatgccattattgaattgctccaaaaagagggctacactcgcattcaaggcgaatctttacatcgccgttttgacgaagttctgcttgaagacgatataaaaacttaccttcaatcaacatacagtaatgagaaactgacagcgaatgaaataacaaaaataatcaacaatataaaacttgtatcaccttatccattgtacgatggaaacagggaaaccttctacttgataaacgaaggttttgacattggcagagatgatcctgcaaagcggcatatccatataaatttgattgactttgaaaatttagaaaacaatatcttcaaagcggtaaaccagttttgggtgggagaccagctcctcaggcgtcccgatctcttgctttttgtcaacggtataccggtcgtaatttgcgaattcaagactgctatcgaagaagataagactgtattcgatgcgtggaaacagatacacaaccgctataagcgcgacatcccaaaactgatgaagtattgttttttgtcaattataagcgatggggcaaattcaaaaatggggacgatttttactccctataagtattattactcatggcggagagtagattacggcacaccttctgcggatggtatagagtcgtcttttactctgataaagggagcgttaagtcccggtaggcttcttgccattttaagagattttatcgcgtatagggattcgggcagtacaaaacgagccgatgtgtgccgctatcccccgtattttgcccctttgatgatgccttcaaaacattga

SEQ ID NO: 64806 - protein, 280 aa, Unknown
  Obtained from environmental sample
  DOMAIN (9)...(210): Type I restriction enzyme R protein N terminus (HSDR_N)
  misc_feature (1)..(280): Xaa is any amino acid
MDHNSGTGKFTEQQFEDAIIELLQKEGYTRIQGESLHRRFDEVLLEDDIKTYLQSTYSNEKLTANEITKIINNIKLVSPYPLYDGNRETFYLINEGFDIGRDDPAKRHIHINLIDFENLENNIFKAVNQFWVGDQLLRRPDLLLFVNGIPVVICEFKTAIEEDKTVFDAWKQIHNRYKRDIPKLMKYCFLSIISDGANSKMGTIFTPYKYYYSWRRVDYGTPSADGIESSFTLIKGALSPGRLLAILRDFIAYRDSGSTKRADVCRYPPYFAPLMMPSKH

SEQ ID NO: 64807 - DNA, 1134 bp, Unknown
  Obtained from environmental sample
  misc_feature (1)..(1134): n is a, c, g, or t
ttgaaacctcacggcgatggaaagggaggaacatatttgggcgctacgggttgcggcaaaacccatatcatgctgtacctgagccgcctgttatctttacgaaaacgtgaaactttcaacaatccaaccattgtaataatagaagaccgtgaagatttggacgatcaaacaagcgaattgtttgtcacatcaaaacgataccttcatgaagagaacgtaaaaagtattgagaacagaaatgatttacagcatgagttgggcagccgtgaaagcggcggaatttttatcactactattcaaaaattttgcgaaaaaaccggtctgctttctgagagaaacaatattatctgcatttccgatgaagcccacaggacgcagacgaatgacggctcaaagctgaaaatcactcctgagggaatcaagaaaacttacggttttgccaaataccttagggattcttttcccaacgcaacttatgcgggatttacaggaacgccgatagacgaaactctccatgttttcggtgatgttgttgcccaatacaccatgcaggaatcctgcgatgacggtattactgttaaaataacttatgaaccacgtcttgcccgtgttctgctctcagaaagtcaggcaaaggaaatccaacagtattacaatcaatgccttgtggaaggggcaaataccgaacaggtggaaaaaagtaagcgggctatgagcgaaatgaaaaggatactcggtcatcctgaacggcaaaagaaacttgcggcggatatagtgtctcactacgaagcgttatgccaagaaaaaccgcaaattgttaaaaaagccatgatagtctgtgatgaccgtctgcttgcgtatcagctttataaagaaattattgctctaaaaccggaatggaatattccgaaaaaatccgagaatgacgaagcgttgtcaaaagaagaagcggaaaaacttatgcctcttgaaaaaattaaactggtagcaaccagagatagagatgatgaaaagccgctttatgaactgcttggcgaccgtgaataccgcaaaaaactggacaaacaattcaagaaaaataattccaactttaaaattgccattgttgttgatatgtggataacgcggttttga

SEQ ID NO: 64808 - protein, 377 aa, Unknown
  Obtained from environmental sample
  DOMAIN (2)...(168): Type III restriction enzyme, res subunit
  misc_feature (1)..(377): Xaa is any amino acid
MKPHGDGKGGTYLGATGCGKTHIMLYLSRLLSLRKRETFNNPTIVIIEDREDLDDQTSELFVTSKRYLHEENVKSIENRNDLQHELGSRESGGIFITTIQKFCEKTGLLSERNNIICISDEAHRTQTNDGSKLKITPEGIKKTYGFAKYLRDSFPNATYAGFTGTPIDETLHVFGDVVAQYTMQESCDDGITVKITYEPRLARVLLSESQAKEIQQYYNQCLVEGANTEQVEKSKRAMSEMKRILGHPERQKKLAADIVSHYEALCQEKPQIVKKAMIVCDDRLLAYQLYKEIIALKPEWNIPKKSENDEALSKEEAEKLMPLEKIKLVATRDRDDEKPLYELLGDREYRKKLDKQFKKNNSNFKIAIVVDMWITRF

SEQ ID NO: 64809 - DNA, 1902 bp, Unknown
  Obtained from environmental sample
  misc_feature (1)..(1902): n is a, c, g, or t
atgggcaaccgcatcaatacagttatgcaagctgcttactttaagatttcaggtatattggaagaagccgaagctgtcaaattgatgaaagagcatattcagcattcatacggcaaaaaaggagccgacgttgtagagaaaaactacaaaacagtagacgcgtcattaagcgccgttgaagaagtgaaatatccttccaagacagaaggcgatcaccacatgaaagttccttttgccacagcaaaggacgatcctcattttgaaaaatacagttcaaaatggataaaagaaacattgggagcggtatcataccaagcgggcgaatcattgcctgtcagcaaaatccccgaagacggaactttccccacagcgacaagccagtacgaaaaacgctcggttgcggaaagagttccgatttggaatcccgaagtttgtacacagtgcggtatctgctccatggtctgcccccacgcctgtatccgcatgaaaaatcttacaaacgatcaagttgcgaaagcgccaaaaggtttcaagaccgccgaagttaaacccaaagcggttgatggtcagaaagcggcattggttatttcctgcgccgactgttacgaatgcggcgcttgtttcaacgcctgcccgatgtgcaaaggcgacggaagtccgcagcctcttacctataaatcatattccgatgatcccgaattccatgcggaacaaggcgaaatatggaattatttcctcagcctgcccgaaactcccgccggcgaattaaacacacccaaagctcttgcttacaaacgcccgttatttgaattctcaggcgcttgcggcggctgcggtgagacgccatacgtcaaacttatgtcacagcttttcggcgacagagcgcttatcgccaacgccacaggttgttcgtcaatctacggcggtaacctgccgaccactccctattgtcagcgttcagacggaagaggtccggcgtgggcaaacagcctctttgaagacgcggcggaatttgcgctgggcttcagacttacaagcgacaagcttgccgttcacgcccgtgaaatggcggagaaggcaaagagcgaaggcattgcagcgggaattatcgacaaacttctttccaacacacaagctgacgacgccgcaatcgacgaacagcgcaaaaatgttgacgagcttaaagccgctcttaaaaaagaatccaaacccacagcgaaattactgctctctcttgccgaccactttgtaaaaagatcggtatggggcttcggcggcgacggttgggcttacgacatcggcttcggcggactcgaccacgttctcgcctccggcaaaaacgtaaatctgctttgtatggatacggaagtttactccaacacgggcggacagatgtcgaaagcaacacctgtcggtgctatagcgaaattcgccgcttccggtaaagagattaccaaaaaagacctcggcgcaattgcgatgagctacggctatgtctatgtggcaaagatttcgttaggcgcaaatatggcgcaaaccattaaagccttccgtgaagccgagtcctatgacggtccgtcgctgattatcgcttacgcgcattgtatcaaccacggtatcgacatgagcaagggattggatcagggcaaagcggtagtatcgagcggcttgtggccgttgttccgctatgacccgcgccttaaagaagaaggcaagaaccccttccagcttgactccaaagaacctactacagcgcttgaagatgtgatgtacaaagaagtccgcttcaagagcctcaaagccgcagaccccgccagagcggatatgctgcttgcgaaagcgaagaaacatgccgagcgtgtttataaagagtacaagtatttgtcggagcgccccttctaa

SEQ ID NO: 64810 - protein, 633 aa, Unknown
  Obtained from environmental sample
  DOMAIN (138)...(161): 4Fe-4S binding domain
  misc_feature (1)..(633): Xaa is any amino acid
MGNRINTVMQAAYFKISGILEEAEAVKLMKEHIQHSYGKKGADVVEKNYKTVDASLSAVEEVKYPSKTEGDHHMKVPFATAKDDPHFEKYSSKWIKETLGAVSYQAGESLPVSKIPEDGTFPTATSQYEKRSVAERVPIWNPEVCTQCGICSMVCPHACIRMKNLTNDQVAKAPKGFKTAEVKPKAVDGQKAALVISCADCYECGACFNACPMCKGDGSPQPLTYKSYSDDPEFHAEQGEIWNYFLSLPETPAGELNTPKALAYKRPLFEFSGACGGCGETPYVKLMSQLFGDRALIANATGCSSIYGGNLPTTPYCQRSDGRGPAWANSLFEDAAEFALGFRLTSDKLAVHAREMAEKAKSEGIAAGIIDKLLSNTQADDAAIDEQRKNVDELKAALKKESKPTAKLLLSLADHFVKRSVWGFGGDGWAYDIGFGGLDHVLASGKNVNLLCMDTEVYSNTGGQMSKATPVGAIAKFAASGKEITKKDLGAIAMSYGYVYVAKISLGANMAQTIKAFREAESYDGPSLIIAYAHCINHGIDMSKGLDQGKAVVSSGLWPLFRYDPRLKEEGKNPFQLDSKEPTTALEDVMYKEVRFKSLKAADPARADMLLAKAKKHAERVYKEYKYLSERPF

SEQ ID NO: 64811 - DNA, 405 bp, Unknown
  Obtained from environmental sample
  misc_feature (1)..(405): n is a, c, g, or t
atggacgacctccgcagaagacgcagcttagacttcatcctgctcctcacggccataaccctgtgggtaatcgggatattcctcgtctacagcgcgacctacatccacgagagcgggccgctggccggcatatacaagcagcagatactatgggtagtgatggcgcttctgatcgtcgttctcattatctctatacctacccgctacatatccaaaggcgcgtacgtcttctacggcatgtctctaatcatgctggtcctagccattgccacaggctccggcgtggccgccaaaggcgccgagcggtggatcatgataggcggcttaaagatacagccctccgagttcgccaaggtgggcctgctcctggcgctggccaaacgcctcagcgactcggccatctga

SEQ ID NO: 64812 - protein, 134 aa, Unknown
  Obtained from environmental sample
  misc_feature (1)..(134): Xaa is any amino acid
MDDLRRRRSLDFILLLTAITLWVIGIFLVYSATYIHESGPLAGIYKQQILWVVMALLIVVLIISIPTRYISKGAYVFYGMSLIMLVLAIATGSGVAAKGAERWIMIGGLKIQPSEFAKVGLLLALAKRLSDSAI

SEQ ID NO: 64813 - DNA, 2010 bp, Unknown
  Obtained from environmental sample
  misc_feature (1)..(2010): n is a, c, g, or t
atggcgattggaaaaaggctacacgacgaaccgcatgaacgacgggcgaaaagcctggtagtcgccatagtctgttgcgtcgctatgagcgtgctgctcgtaaatttataccgtctgcagataatcgaagccgaagagaatatccgggtgtcaaacgaaaacagcatgcgcgagcaggtggtgctcccgccgcgcggacgcattttggacagaaacggcaacgagctggcgcgtaaccgccccgcctactcgatatgcgtgctgccctacagcctgcgcaaccgcgacgccgtgatctcctcgctatgcaagatacgcgacattgacggcaacgccgtcttcgacagcgtgacgttggtacagcagatacgcagggccaacacccgcaagttcgagctcacccgcataaaagaggacgtgcccatagatatagtgagcatagtggaagagcactacatggagctgcccggaatagttgtggaggcggagtcgcgccgcgaatatccctacggcccggcggcgttccacgcggtgggctacatgggcgagataccggaaaacgagttcgataccctcagaaaccaagactactactggggcgacctgatgggcaggtccgggctagagcgcacctacgagagcgtcatgagggggaggtgcgggcgggagtacttggaggtaaacgcctacggcaagagcctcggcaccgtgtcaaatatcaaaaagatcgacccgatctacggaaacgacctctacacgacgctcgacatcaacatgcagcttgtggccaagaaggccttccccgactccctcaagggcgcggtggtcgccttggacccgcgcagcggcgatgttttggtgctcttcagcaacccgtcggtagatcccaatatcttctcctcgtcgccttccatcagaagcaagacgtgggcggcggtggcggccgaccgcagcctccccctgaacaaccgcgccatcgccggcgtgtacccccccgggtcaacgttcaaagtgcttagcggaataaccggcttggacgccggtataatcacaaaggattcgaggatgccctcggtgtgcggcggaagcttccgcttcggcaaccgcatagcgaagtgccacaagcctccgcccggccacggcagcacgaacatcatatcggctgtgcagtactcgtgcaacgtgtacttctaccagctcggcctgaagctcggcgacgcccggatcaacaagtacgccaagatgttctctctgggcgaaattaccggtattgaccttcccggagagaaagcgggctacctatcgggtgaaaaggcctacaacgaacgctttgcctccagaaaatggcgctggacgcaggggctggtcatggacctcgccatcggccagcagcaggtgctgacgccgctgcagttagcgctgatggtgggcggaatgggcaacgggaaagtcatatacaagccccgccttctgagcgaggagcgcaacaaagacggtatcttggtataccaaaacctgcctgcggtaaggaacaagatagttgtcggccagtacgcccaagacgtgatacgggaggcgttggccgcggtggtcaggcccggcggcaccggctggcgcgccggagtgcaggggattcccgtcggcggtaaaacaggcagcgcccagaacccgcacagcgacctctcgcacgcgatgttcatagccgtcgccccggttgacgatcctgtaatcgccgtggctgtggccatagagaacgccggcggcggcggcgccgtggcggcgcccgtggccggagcgctcctcaattacttcttctccgaaacggaagagggaaagagcgtctacaaaaagtataatccggattcggaccaaaagaccagaagaccgctgatgcagagaccggcgatatcggccgccgaaagcgcggcgaacgccgccgccgacgcggcggacagatccgagtccgtgccggttagccgcccggcggtaccggagggcggcaatgattaa

SEQ ID NO: 64814 - protein, 669 aa, Unknown
  Obtained from environmental sample
  DOMAIN (60)...(238): Penicillin-binding Protein dimerisation domain
  misc_feature (1)..(669): Xaa is any amino acid
MAIGKRLHDEPHERRAKSLVVAIVCCVAMSVLLVNLYRLQIIEAEENIRVSNENSMREQVVLPPRGRILDRNGNELARNRPAYSICVLPYSLRNRDAVISSLCKIRDIDGNAVFDSVTLVQQIRRANTRKFELTRIKEDVPIDIVSIVEEHYMELPGIVVEAESRREYPYGPAAFHAVGYMGEIPENEFDTLRNQDYYWGDLMGRSGLERTYESVMRGRCGREYLEVNAYGKSLGTVSNIKKIDPIYGNDLYTTLDINMQLVAKKAFPDSLKGAVVALDPRSGDVLVLFSNPSVDPNIFSSSPSIRSKTWAAVAADRSLPLNNRAIAGVYPPGSTFKVLSGITGLDAGIITKDSRMPSVCGGSFRFGNRIAKCHKPPPGHGSTNIISAVQYSCNVYFYQLGLKLGDARINKYAKMFSLGEITGIDLPGEKAGYLSGEKAYNERFASRKWRWTQGLVMDLAIGQQQVLTPLQLALMVGGMGNGKVIYKPRLLSEERNKDGILVYQNLPAVRNKIVVGQYAQDVIREALAAVVRPGGTGWRAGVQGIPVGGKTGSAQNPHSDLSHAMFIAVAPVDDPVIAVAVAIENAGGGGAVAAPVAGALLNYFFSETEEGKSVYKKYNPDSDQKTRRPLMQRPAISAAESAANAAADAADRSESVPVSRPAVPEGGND

SEQ ID NO: 64815 - DNA, 1398 bp, Unknown
  Obtained from environmental sample
  misc_feature (1)..(1398): n is a, c, g, or t
atggacggcgtaacaaagggactcacagtcggcgcgtctacggaaattatcgcgggcgagggcatgattgtcaccgccggcggtatcgacacacatatacattttatcagtcccactcaaattgagaccgcgctgtattcgggagttacaaccatgataggcggcggaacgggacccgcagacggaacaaacgccactacctgcacgccaggacgtttcaatcttgagaaaatgattgaggcggcggaaggctacccgatgaatctcggttttctcggcaagggcaacagttcatcccttaacgcgctcattgaacaaattgaggcgggcgcgtgcggacttaaaatccacgaggactggggttccaccgccgcagttgtccgcgccgcgcttgacgccgccgacaagtacgatgttcaagtcgctattcacaccgacacgctgaacgaaggcggctttgttgaagacacactcgccgcgataggcgggcgcgtcattcacacataccacacagaaggagcgggcggcggacacgcacccgacattatcaaagcggcggctctgccgaacattctgccgtcgtcaacaaaccccacaatgccgtttaccgtcaacaccgttgacgaacatcttgatatgctgatggtctgccaccacttggacagccgcgtacccgaagatgtcgcgtttgccgattcgcgtatccgccccgaaaccatcgccgcggaagacgtactgcacgacatgggaattttttcgatgatgagttctgactcacaggcaatggggcgagtaggcgaagtgatcatgaggacatggcagaccgcaagcaaaatgaaagaccagcgcggtcatcttgacgaagacaatgatcgcaacgacaactatcgggctaagcgttatgtatcgaagtatacgataaaccccgccgttacccacggcattgcggattatgtcggttctgtggaagcgggcaaatacgccgacttggttatctggaaccccgcgctcttcggcgcaaaaccggagatgatcataaagggcggatacataatagcgtccaaaatgggcgacgcaaacgcttctattccgacgccgcagcctgtgatatacagaaatatgttcggcgcttccggcttggcgcgcaagcgtacatgtatcacctttgtatcgggcgcggcggcaaagagcggaatcggcaaacggcttgggcttgaccgcattgtccttcccgtaaagaactgccgcaaattgtcaaaagcggatatgcgttttaatgaccgcacgggagacatcaaagttgatcccgaaacatacaccgtaaccgtggacggaaagaaagtaacctgcgagccggctgaaagccttagtttaacaagaaggtattggctgttttaa

SEQ ID NO: 64816 - protein, 465 aa, Unknown
  Obtained from environmental sample
  DOMAIN (23)...(334): Amidohydrolase family
  misc_feature (1)..(465): Xaa is any amino acid
MDGVTKGLTVGASTEIIAGEGMIVTAGGIDTHIHFISPTQIETALYSGVTTMIGGGTGPADGTNATTCTPGRFNLEKMIEAAEGYPMNLGFLGKGNSSSLNALIEQIEAGACGLKIHEDWGSTAAVVRAALDAADKYDVQVAIHTDTLNEGGFVEDTLAAIGGRVIHTYHTEGAGGGHAPDIIKAAALPNILPSSTNPTMPFTVNTVDEHLDMLMVCHHLDSRVPEDVAFADSRIRPETIAAEDVLHDMGIFSMMSSDSQAMGRVGEVIMRTWQTASKMKDQRGHLDEDNDRNDNYRAKRYVSKYTINPAVTHGIADYVGSVEAGKYADLVIWNPALFGAKPEMIIKGGYIIASKMGDANASIPTPQPVIYRNMFGASGLARKRTCITFVSGAAAKSGIGKRLGLDRIVLPVKNCRKLSKADMRFNDRTGDIKVDPETYTVTVDGKKVTCEPAESLSLTRRYWLF

SEQ ID NO: 64817 - DNA, 456 bp, Unknown
  Obtained from environmental sample
  misc_feature (1)..(456): n is a, c, g, or t
ttggctgttttaattatggttatcgaaaaaattttaggaaagaaaccggaaaacaccgacggaaaaattattgaaaccgtcccctttgaatggtttgaaatgaacaacaagattttaaagaaggtatcttcaaaagggacggaaatcgggctcaggctttcggagccattgtttgacggcgcggtgctgtacgaagacagcgaaaaaattatctgccttgaacttctgccgtgcgagacgacgcgggtacatgttcacagcataaaagaaatggggcgcgtatgctttgaactcggcaaccgccacctgccgctttccatcgcggaagattccgtaagcactccctatgacaacccaacctatgaatatttggaaaaactgaagtttcactgcgaacgcgtgacggaaaaatttacgccggagataattacccatggacatggacaccaccattga

SEQ ID NO: 64818 - protein, 151 aa, Unknown
  Obtained from environmental sample
  DOMAIN (9)...(75): UreE urease accessory protein, N-terminal domain
  misc_feature (1)..(151): Xaa is any amino acid
MAVLIMVIEKILGKKPENTDGKIIETVPFEWFEMNNKILKKVSSKGTEIGLRLSEPLFDGAVLYEDSEKIICLELLPCETTRVHVHSIKEMGRVCFELGNRHLPLSIAEDSVSTPYDNPTYEYLEKLKFHCERVTEKFTPEIITHGHGHHH

SEQ ID NO: 64819 - DNA, 1686 bp, Unknown
  Obtained from environmental sample
  misc_feature (1)..(1686): n is a, c, g, or t
atgaacggggcatcccccggtaacaaaagagagggtctttcccgtgcgggaaaaaccttactttccggcattgatcctgttggcaaggcggaacgtgtagcggaagcggttccggtcatggacaggactttgtacctgtgcccctctcccctgtatggttacgggctggaacgcctgcttgcccgcattgccggtttttcccattcagccgtattgtgcgttgaggccgatcctgaattgtttgccctttcatgtgagaattttgacccggcgctgaacaacaatcaaaagttacgactaaccaataattgcgaagctgaaacactgtgcgcgctgctgcggcaggaatgggggccgcgttttttccgccgggtggaaatgatccgcctgaacgggggctggcagttataccctgcgttatacgatatgctggcggattctctgcggcgggaaatcgcccttgactggggcaacgctataaccctgaccaaactgggccgccgctatatccgcaacgcgctgcgcaatctcagcctgattccgcgctgtcattcactgcggcagctttctttcggcggtgcgccggcgctcgtgttgggagcgggcccttcgctggatcaaacgcttgatgaccttcaaacccgttttggccgggcgctgtttacgccggaagaacggcctttcagaatcatctgcgttgacacctgcctcccggctttgaaagaacggggcataaagcccgatcttgccgttattctggaaagccagcattggaatctggaggactttatcgggctgtccggctggaatgttcccgccgctttggatctttccgcgctgccccgctcggctgccgttcttgcgggcggcctttttctgttttttactccctggacaagcctgaacatttttgaacggctgggagccgccggcctgctgcccgcaagtctgcccccgctgggatcggtgggcctgagcgccgcgatgattgcccggcggcttaccggcggaaccattatcaccgccggtctggatttttcatttacgctggattcgtaccatgcgcgttcaacgccgggacataaaggtaaattacgccgccacaaccgctttataagtcttttaaacgcgggaaccgcttttggcggggcggtttctcccgcggtttccaaaacagggggtcaggttttttcaagcccctccctgcgtaattaccgcgatctttttgaacgggagtttgccgccgcaagcgccgccaccaacaacgatacccgattcttcgatcttgccggcagcggtcttcccctgggcataaaaaccctctcgccggaagcggcttttgatatactgtccgccggtaataccattaccgataacgccccccctgcgtcactgtgcgcggacaatcccgcccttgccgaagcattgcggacttttatccgcggcgaacaaaatcgcctaacgctgctgcggaatatgcttaccggagaaagcgccatggattacgatgcccttgccgcgcttattgatgaatgtgattacctgtgggcgcattttcccgactatgccgccgcggaccgccgccccgataaagccgaactggaatcaggcgccgccctttcgttcctcaaacgtctccgtgtggagatagacccatttttgaaactgtgggaattgattacctaa

SEQ ID NO: 64820 - protein, 561 aa, Unknown
  Obtained from environmental sample
  DOMAIN (168)...(346): Protein of unknown function DUF115
  misc_feature (1)..(561): Xaa is any amino acid
MNGASPGNKREGLSRAGKTLLSGIDPVGKAERVAEAVPVMDRTLYLCPSPLYGYGLERLLARIAGFSHSAVLCVEADPELFALSCENFDPALNNNQKLRLTNNCEAETLCALLRQEWGPRFFRRVEMIRLNGGWQLYPALYDMLADSLRREIALDWGNAITLTKLGRRYIRNALRNLSLIPRCHSLRQLSFGGAPALVLGAGPSLDQTLDDLQTRFGRALFTPEERPFRIICVDTCLPALKERGIKPDLAVILESQHWNLEDFIGLSGWNVPAALDLSALPRSAAVLAGGLFLFFTPWTSLNIFERLGAAGLLPASLPPLGSVGLSAAMIARRLTGGTIITAGLDFSFTLDSYHARSTPGHKGKLRRHNRFISLLNAGTAFGGAVSPAVSKTGGQVFSSPSLRNYRDLFEREFAAASAATNNDTRFFDLAGSGLPLGIKTLSPEAAFDILSAGNTITDNAPPASLCADNPALAEALRTFIRGEQNRLTLLRNMLTGESAMDYDALAALIDECDYLWAHFPDYAAADRRPDKAELESGAALSFLKRLRVEIDPFLKLWELIT

SEQ ID NO: 64821 - DNA, 732 bp, Unknown
  Obtained from environmental sample
  misc_feature (1)..(732): n is a, c, g, or t
ttgccgccaatacctggagcaaaggataatcccctacttgtggattccaccggacttctggctgttgaaagcgtgcccaggcgtcttacggttatcggcggcggggttataggtgtggaatttgccgggctcttttccgcgcttggagcggaagtcactgtaatcgaaatgatggacgagattgttccttttatggacaaagagcaggcccccttgcttcgccgcgccatgaaaggagtggactttaagctgggctgtaaagttgaaaaaatagaaggcgcggcggtgcattacaccgacaaaaaagggaaggccgaaataaaagaagccgagcttgttctgatggccgttgggcgaaagccggtgactgacacctggggcgccgctgccgcaggcatcgactgtagccccaagggtgttgccgttgacgacagaatgagaaccaatattcccggcatttgggcggcgggggacgttacaggtaaaagcctccttgcccactctgcctatcgcatggcggaagtagcagttgcggacattcttgcgggtaaccacgccgacggcaaaacaaatcgaatgcgttataatgcggtaccctgggcggtgtacggtcttaccgaggccgccggggtcggcatcacagagcaggaagccgaagcaaaaggcattgccattctaaagtcggtccttcccatgagggtttcccgccgcttcgtcgcggaaacacgctaa

SEQ ID NO: 64822 - protein, 243 aa, Unknown
  Obtained from environmental sample
  DOMAIN (28)...(163): Pyridine nucleotide-disulphide oxidoreductase
  misc_feature (1)..(243): Xaa is any amino acid
MPPIPGAKDNPLLVDSTGLLAVESVPRRLTVIGGGVIGVEFAGLFSALGAEVTVIEMMDEIVPFMDKEQAPLLRRAMKGVDFKLGCKVEKIEGAAVHYTDKKGKAEIKEAELVLMAVGRKPVTDTWGAAAAGIDCSPKGVAVDDRMRTNIPGIWAAGDVTGKSLLAHSAYRMAEVAVADILAGNHADGKTNRMRYNAVPWAVYGLTEAAGVGITEQEAEAKGIAILKSVLPMRVSRRFVAETR

SEQ ID NO: 64823 - DNA, 2496 bp, Unknown
  Obtained from environmental sample
  misc_feature (1)..(2496): n is a, c, g, or t
atgcctaaatcaatcttggtagatcccaacgaactacgaaaaccacaaatcctcaagttgaaagacataccgatcaatcagtataagagcgatttcaaaaaagaagttgagttgtacggcaaggaacggcttgtacgcatttggcacgacatggcggtgattcgcgaatttgagtccatgctcaacgagtttaaaaccaagggaacgtggaacgggattgagtacaaccacaaagggccggctcatctttccatgggtcaggaagcgtccgctgtagggcagagcgttaatctcactaccgacgattatatctttggaagccatcggagccacggtgaaataattgccaagtgtttttcagctctctggcaactttcgcataacgccgatgatgagaagaagcttgaagccattatgaaaggttatctggaaggagaaaccctcgcggctgccgaaaagataccctacaaaaacctttgcgatctggcggagaactttgccctctacggaaccctcgctgaaattttcgccaggaaggctggctttaaccggggcttgggcggttccatgcacgccttctttacgcctttcggctccatgcccaacaacgcgatcgtgggcggctctggggacatcgccgtgggcgcggcgctttacaagcgaatcaacagcaagccggggatcgtaatagccaacatcggcgacgcgtcaatgggctgtgggccggtctgggaagggatgatgttagccgcaatggatcagtacaacacactttggccagaaagcaaacataaaaccgcaggcgcggtcagcaaaggagcgccgccgatacttttcaatttcttcaataatttttatggcatgggcggacagacttccggcgagaccatgggttacggcgtcatggccagagtcggcgcgggcgtcaatcccgataacatgcacgccgagcgggtggacggctacaatcctctggcggtggccgacgcggtggcgcggaaaaaaacccttctgcttgaaggcatgggcccggcgttactcgacaccatcacttaccgcatctcaggtcattccccctcggacgcttccagttaccgcacaccggaagaagtgaaactttggcaggaagccgattctatcgaagcctacggcgcatacttaatcgaaaacaaggccgtgacaaaaagcgagctggattcattacgcgaaggcatcaaggcaaagcttatagaagttgtgaaacttgccacgaacaacgaggcgtcccccagagcaagcggggccttcatcgagtcggtgatgttctccaacgggaaggctgaaaaactggatgagcgcgaaccagaaataattcaaaacgtggaagaaaaccagcgtgttaaagctttggcgggaaagattcgctcaggcttcgacgccgatggcaagcccgtctcaaagaacaagtcgtttcaatacagggacgcgctgttcgaggccgttcttcaccgttttacgattgacccgtctatggcggcctggggtgaggaaaaccgagactggggcggcgcgttcgccgtctaccgcggtcttaccgaccttttgccctaccaccggcttttcaacagccctatctccgagggcgcaatagtgggcgccggcgtgggttatgcgctatccggcggacgggcggtggtggagctaatgtactgcgatttcatgggaagggcaggggacgagattttcaaccaggcctcgaaatggcagtccatgtccgcggggcttcttaaaatgcccttggtggtgcgggtttcggtgggcaacaagtacggcgcacagcacagccaggactggtcggcccttaccgcccacattcccggcctaaagtcctacttccccgccacaccctacgacgccaagggaatgttaaacctggcgcttcgcggtaccgatccggtgatcttctttgaaagccagctgctctacgatgtgagcgagcagtttgaaaaagccggggttcccgaaggttactacgaggttcccgaaggcgagcctgttatacgcaagcagggcggggacatcaccattgccactttgggggctacgctttacaaggcaatggaagccgcgaaaaaactggaaacgcagttcggcctttccgtggagatcatcgatctgcgttttatcaaccccctgaattacgagaagatcatcgagtcggtgaagaaaaccgggaagctgctactggcaagcgacgccgccgagcgcggttccttcctccataccgtagccagcaatgttcagaccctggccttcgattaccttgacgctcctgtggcggttgtaggaagccgcaactggatcaccccggcggcggaaatggaggagctttactttccacaggttaattggatcatcgacgcaattcacgagcgcatcctgccactgcctggttacaagccggtaacggtgcagacaacgggggatttgcttaggaggaataaacacggcgtttaa

SEQ ID NO: 64824 - protein, 831 aa, Unknown
  Obtained from environmental sample
  DOMAIN (49)...(424): Dehydrogenase E1 component
  misc_feature (1)..(831): Xaa is any amino acid
MPKSILVDPNELRKPQILKLKDIPINQYKSDFKKEVELYGKERLVRIWHDMAVIREFESMLNEFKTKGTWNGIEYNHKGPAHLSMGQEASAVGQSVNLTTDDYIFGSHRSHGEIIAKCFSALWQLSHNADDEKKLEAIMKGYLEGETLAAAEKIPYKNLCDLAENFALYGTLAEIFARKAGFNRGLGGSMHAFFTPFGSMPNNAIVGGSGDIAVGAALYKRINSKPGIVIANIGDASMGCGPVWEGMMLAAMDQYNTLWPESKHKTAGAVSKGAPPILFNFFNNFYGMGGQTSGETMGYGVMARVGAGVNPDNMHAERVDGYNPLAVADAVARKKTLLLEGMGPALLDTITYRISGHSPSDASSYRTPEEVKLWQEADSIEAYGAYLIENKAVTKSELDSLREGIKAKLIEVVKLATNNEASPRASGAFIESVMFSNGKAEKLDEREPEIIQNVEENQRVKALAGKIRSGFDADGKPVSKNKSFQYRDALFEAVLHRFTIDPSMAAWGEENRDWGGAFAVYRGLTDLLPYHRLFNSPISEGAIVGAGVGYALSGGRAVVELMYCDFMGRAGDEIFNQASKWQSMSAGLLKMPLVVRVSVGNKYGAQHSQDWSALTAHIPGLKSYFPATPYDAKGMLNLALRGTDPVIFFESQLLYDVSEQFEKAGVPEGYYEVPEGEPVIRKQGGDITIATLGATLYKAMEAAKKLETQFGLSVEIIDLRFINPLNYEKIIESVKKTGKLLLASDAAERGSFLHTVASNVQTLAFDYLDAPVAVVGSRNWITPAAEMEELYFPQVNWIIDAIHERILPLPGYKPVTVQTTGDLLRRNKHGV

SEQ ID NO: 64825 - DNA, 360 bp, Unknown
  Obtained from environmental sample
  misc_feature (1)..(360): n is a, c, g, or t
atggaggtaaaaatggcagtgaatcgttttaagggcgagtatcccaagattgggttgaggccgaccatagacgggcgacagggcgcgttgagagtacgggaatctcttgaacagcagaccatgaatatggcaaaagcggcaaaggctctgcttgaaaaaaacctgcgctattccaatggcagtccggttcaggtggtgatagcggatacaaccatcggcagggtagcggaagccgccgcttgtgccgcaaaattccggcgggaaggagttgacattactttgacggtaacgccctgttggtgctacggatcggaaaccatggacatggatccttcaaccattaaaggcgttggggcttaa

SEQ ID NO: 64826 - protein, 119 aa, Unknown
  Obtained from environmental sample
  DOMAIN (12)...(118): L-fucose isomerase, first N-terminal domain
  misc_feature (1)..(119): Xaa is any amino acid
MEVKMAVNRFKGEYPKIGLRPTIDGRQGALRVRESLEQQTMNMAKAAKALLEKNLRYSNGSPVQVVIADTTIGRVAEAAACAAKFRREGVDITLTVTPCWCYGSETMDMDPSTIKGVGA

SEQ ID NO: 64827 - DNA, 1011 bp, Unknown
  Obtained from environmental sample
  misc_feature (1)..(1011): n is a, c, g, or t
atgtacagattcggccgaggggccgttatggttcctatgctgctgtcccggggaaagcgaatccgcgagttggaggcccggacggaacagtccgccgggagcgcgtcagatttcaggaataaaaccataaaactcgccgccgccgtcagggaatccgccgggcttatttccctttccggcaatccggcgtccggaggcgatcagaccggcagcagtatagaaaaaattgaaaaaacaattgacgaaaacgccaggatcgccgcggaaatcgtcgagaaaacgcgcagcgtcgccgttatttcctcaaaaatggaagaggacgtgctgaacgggttcgcggtgctggaaaaaaacgtcaggaaaatgggggatataaaagaaaagaattcgggggttatcagcggcattatatccctgggcaataaagtaaacaaaatacgcgatattgtgagggtcattaacactattacggaccagaccaaagtaattgcgtttaacgccgcgctggaagcggcgggagcgggggaaaccggcaagcgttttgcggtggtcgccgctgaggtaaacaggctggcggacgacatagccgttcttacgcgccagattcgggaacaggttgaggaaattcaaagctcctccgcttcgctgatcgtatacagcgaggaaggttccgacagaatcgccgagggttataaacttatcaaggatctggaagacgtttttaaggaaatcaaggccggcgcggaaataacctccaatcaggcgcaggctatcaccgtttccacgcagcagcagttgaagtccagcgaaaaagtcagtttcgccatctccgaagtttcccaggaagtaaaactttttataaattcggtggaaacggcggctttgaccgccggaactctggcggaacgcactcgcgagcttgaacgcttcctgactgtacaaacaacggcgcaaattgcggcgcaatatgcggggaaagaagcgatcggacagggcgattatggcggttga

SEQ ID NO: 64828 - protein, 336 aa, Unknown
  Obtained from environmental sample
  DOMAIN (60)...(316): Methyl-accepting chemotaxis protein (MCP) signaling domain
  misc_feature (1)..(336): Xaa is any amino acid
MYRFGRGAVMVPMLLSRGKRIRELEARTEQSAGSASDFRNKTIKLAAAVRESAGLISLSGNPASGGDQTGSSIEKIEKTIDENARIAAEIVEKTRSVAVISSKMEEDVLNGFAVLEKNVRKMGDIKEKNSGVISGIISLGNKVNKIRDIVRVINTITDQTKVIAFNAALEAAGAGETGKRFAVVAAEVNRLADDIAVLTRQIREQVEEIQSSSASLIVYSEEGSDRIAEGYKLIKDLEDVFKEIKAGAEITSNQAQAITVSTQQQLKSSEKVSFAISEVSQEVKLFINSVETAALTAGTLAERTRELERFLTVQTTAQIAAQYAGKEAIGQGDYGG

SEQ ID NO: 64829 - DNA, 2217 bp, Unknown
  Obtained from environmental sample
  misc_feature (1)..(2217): n is a, c, g, or t
ttgcggcgcaatatgcggggaaagaagcgatcggacagggcgattatggcggttgataaatccaggtacattaaccaattcgccgaagaaggccttgaaaatatctcgaccgtacaaaaactgctttttgaaattaaagacggctcttccgttcaggacgatcttgttacgctgatgcgcgcgcttcataccttaaaaggctcggcgcgcatgctggaatttaaaaacattgaaaccgtttcccactcgctggaaacggccttcgcttccctgaaggaagaacgcatcgggctcaatgacaaggcggtgaaacttcttcttgccgggcttgaccagctgagggcggggatcgaacaagtcaaatcaggcggaaaagacgacataaaagcggcggtctttcagaaggagctgtcgtcccttgccgcgaacgaagaatacaccatacccaatgccgaagccgatacggaagaaaagccgcagcgtcttaagccggaaagacctgaagacgcgaagtctgaaagcataagaatatcccttgcgcggatcgacgaggttattcacgacatggcggcgcttcaatcattggaaatcatagccagaaatatagcgcgtgacaccgaatcgcttaacgccgcgtccaggcagttttcaaaacttcttggcgccactttaccctggaattcccccataatccaggaattccggccgttggaactgatggccggcaaacttggctccctcgtgagaaattactccctggatgtcggcaatcatatacgaagcgcctatgacagcataatctccttgaggatgctgcccctttccacggcgcttgacgaatacccccggcaggtttttaccatcgcctccgaattgggcaagaaggtaaagctccgcattgagggggctgaaaatgaaattgacaaaaatttaattgaatcattatccgaggtgttcctgcacatgatacgcaactccatcgatcacgggattgaaacccccgaggaacggcgcaaacagggaaaagacgaaacgggccttttaacaattgcctgcgtccgtgaaagcggtaacatgaaggtgacaatctccgatgacggaaaaggcattaacatagagggaatccgcaaaaaaatcgttgaaaaaggtttggtttccccggaagccgccgcggccctcgaagaagaagaattaataaattttattttccaaagcggattttcaaccgcggaaaaactctccagcgtttcgggccgcggggtcgggatggacgcggtcaggaacaacattgagcgcatgaagggcagtatagctatacataccaaagtcggagaagggacaacgtttatcatttccgtcccgctgtcattggccgcccttatgggtttccccatttcatcgggcagcatgaaatttatcatccccgcgaattttgtggacacggtcatgcttatcaatacaaaagacatcatcaccgtggtagaccgtccgggcattaaatacaatgggcgcatcatcaaacttttctaccttcatcatgtcttaaaaatccccatgcccatagaagaaaaaaagaactcaggcgattcgatttttgtcgccatcgtccaggcttatgaggaaacggtagccctcgccgtaaatcaggtaagcagcatgaggcaggtgatccttaaaaatctgccctcttttatggaaaagatggaagttttctccggggtggtgttaagcgaagattatgaaatgatacccgccctgcatattcctacggtaataaggatggcgcggcgcacaaaaaccatcgacatgaaaaaacgccatattgattatgagcgcatgcgcaagtccattctggtggttgacgattcccgtccgacgcgggatatagagcgtgatattctggaggccgagggctataaggtggacgccgccgctgacggttccgaagcgctggccgccgcgaagaacgcccaatacgatttgatctgcaccgatatcgtaatgccgaatatggacggttttatgctggcggagaacatccgcaaaaacgaccgtctcaagaacatccccattatcgccatttcatcccgaagcggcgagaaagaccggaacagggccgcgcttctcgggataaaccgctttatcgcgaaaaattcgtttaacgtccacaatttgacagccattgtgcgggaattaatcggagaagccaatggataa

SEQ ID NO: 64830 - protein, 738 aa, Unknown
  Obtained from environmental sample
  DOMAIN (459)...(596): CheW-like domain
  misc_feature (1)..(738): Xaa is any amino acid
MRRNMRGKKRSDRAIMAVDKSRYINQFAEEGLENISTVQKLLFEIKDGSSVQDDLVTLMRALHTLKGSARMLEFKNIETVSHSLETAFASLKEERIGLNDKAVKLLLAGLDQLRAGIEQVKSGGKDDIKAAVFQKELSSLAANEEYTIPNAEADTEEKPQRLKPERPEDAKSESIRISLARIDEVIHDMAALQSLEIIARNIARDTESLNAASRQFSKLLGATLPWNSPIIQEFRPLELMAGKLGSLVRNYSLDVGNHIRSAYDSIISLRMLPLSTALDEYPRQVFTIASELGKKVKLRIEGAENEIDKNLIESLSEVFLHMIRNSIDHGIETPEERRKQGKDETGLLTIACVRESGNMKVTISDDGKGINIEGIRKKIVEKGLVSPEAAAALEEEELINFIFQSGFSTAEKLSSVSGRGVGMDAVRNNIERMKGSIAIHTKVGEGTTFIISVPLSLAALMGFPISSGSMKFIIPANFVDTVMLINTKDIITVVDRPGIKYNGRIIKLFYLHHVLKIPMPIEEKKNSGDSIFVAIVQAYEETVALAVNQVSSMRQVILKNLPSFMEKMEVFSGVVLSEDYEMIPALHIPTVIRMARRTKTIDMKKRHIDYERMRKSILVVDDSRPTRDIERDILEAEGYKVDAAADGSEALAAAKNAQYDLICTDIVMPNMDGFMLAENIRKNDRLKNIPIIAISSRSGEKDRNRAALLGINRFIAKNSFNVHNLTAIVRELIGEANG

SEQ ID NO: 64831 - DNA, 537 bp, Unknown
  Obtained from environmental sample
  misc_feature (1)..(537): n is a, c, g, or t
ttgatgatgcgcccattgtatttaatgcccggacggtctaccacggtgatgatgtcttttgtattgataagcatgaccgtgtccacaaaattcgcggggatgataaatttcatgctgcccgatgaaatggggaaacccataagggcggccaatgacagcgggacggaaatgataaacgttgtcccttctccgactttggtatgtatagctatactgcccttcatgcgctcaatgttgttcctgaccgcgtccatcccgaccccgcggcccgaaacgctggagagtttttccgcggttgaaaatccgctttggaaaataaaatttattaattcttcttcttcgagggccgcggcggcttccggggaaaccaaacctttttcaacgatttttttgcggattccctctatgttaatgccttttccgtcatcggagattgtcaccttcatgttaccgctttcacggacgcaggcaattgttaaaaggcccgtttcgtcttttccctgtttgcgccgttcctcgggggtttcaatcccgtga

SEQ ID NO: 64832 - protein, 178 aa, Unknown
  Obtained from environmental sample
  misc_feature (1)..(178): Xaa is any amino acid
MMMRPLYLMPGRSTTVMMSFVLISMTVSTKFAGMINFMLPDEMGKPIRAANDSGTEMINVVPSPTLVCIAILPFMRSMLFLTASIPTPRPETLESFSAVENPLWKIKFINSSSSRAAAASGETKPFSTIFLRIPSMLMPFPSSEIVTFMLPLSRTQAIVKRPVSSFPCLRRSSGVSIP

SEQ ID NO: 64833 - DNA, 2472 bp, Unknown
  Obtained from environmental sample
  misc_feature (1)..(2472): n is a, c, g, or t
atgaaacttgagcaaattgaacaattttcgccgccgcttataaacactcaaaagatgatacggcggccggacattatggcgcagataaggaaattatcagatcgctgtatcctttttattcacgatccggcaggttacggtaaaactaccgccgccgtccaatggattggaaacagaaaagccggatggttttcgcttgacgagtattcatctatgcccgtaaatttttatcggggaattttgcgggcattatctgcggaaatacctgacaattttgatgaattgccgcaggaatcaatgcttggttctttgcagaaattaaaaaagtggccgtccgtttttgtaatagatgattttcatctcttaaacgataattccgccgtgagtacgctgccgcttattcgttccagaatgccggtaaatacatcgtttttagttttaagccgcaatccgccgccagaagtgttaagcgaatacattctgaaaggaacaataaagcaactgaccgggctgcggtttaccagtgaggaaatttacgcgctgtttgataaaaacaaaacggctctttcacaatatgaagcgcaggcgttatgtgagcagacggacggttgggctgcggcgcttaccgcgatacttatgtctgatgaaagcggctatacgggcatagtgaacagggaaacgctgaataaatatttaaggaattatgtgtttgagtattgggaacattttgacgagttaaaaaagtgttctatctgcgatgttttaagctccaagttatgcgaagttataacggggcgaagcgatatttgggagctgataaccgcgctggcaaataaaacaggactagtgtcccgatacggtaatgatacgtataaattccatgcgctattaaaagaatttctggaaaccgaattgaagcttgacaagaaaattaaccaactgctgttgtataagaaagcggcttattggtacatggaaaaaggcgactggctgcatacgctcggaatggctgttaaaagccgcgacgatgatactattgaggaaatagcgcgccttgcaagcgaaaggcacgacagcgccggtgttgatgtttcacagtacattaagttcgtagagagaaattttttatcaattcccgtgcatataatagagcaatatccaaggctttccggtcactgcttcgttgtctcgctgttgtcccggtctttatctgaagtctgtatgtgggctgacatacttgaaaaacagatgaaaaaaggattggcgaataaaccggataatatttccgccgcttttcaaagagcggtagacccccggtattcaagctggtatgtgccaaagcaattcaaacgtattcagaaaattatacctgcaattaccaggcggcctcacatggttacgatcagccttaattttcctttctttcataaagcgcaaagggattataccgatatatcctgcgaattaaccgcgtatatttcagagtttcttcgtcaaacagaaccggctgcgggtccgctgatgaagacagtggcggcgcttattgaatcgggaatttattatgagcgcggtaattttatggaagccgaaaccattgccgaagctctgaaaaaagatgccggtaaattatcgccggaactatgtttctgtatatataccctgcatcttgaaaccctgcgcgtacagggcaaaaagattgaacctgaaataataagcgacatgattgagaataccggggcgcattatctgtcggcaaattttaatgcttatatgacaaatatccggctttataacggggacaaaaccgccgcggctcaatggctggatcaacaaaattcggttcacactttgcaactatacaaaatataccagcattttaccacggcaagggcaatgatggtaaaaagcaaactgtccgctgcggaaaaacttctggaaagaattgcgcgattttcacaggatttcaggcggaacgctgattatatcgaagcgctgaccttgcgggccatatgcttatggcgcgtggaacggacgggcgaagcggtaaaaacaatgaccgccgccattgtaaaagccgccgagttacagcttgccacgccaatcgttaaggacggtgaagacgtattgcctgttttgcaaaaaatattgaatcggctgaaatacggttacgacacaggtctgcttgacaaggcttttgtgaacttgctgtatataaaagcgcggaatatatcaaagcatacgccgggtatgttttcgcgaaacaaaacgcaagccctgaaattgtcgccgaagcaatcggaagtaatgaattatttggtgaaaaatctcagttatcaggaaatcagcgaagaaatgggagtaaccaaagcggcggtagattaccatatccgtattttacacgaaaaatttgaggcgtcgaatacccgtgatttattgcaaaaagcccaggatttagggttcatagatatgtag

SEQ ID NO: 64834 - protein, 823 aa, Unknown
  Obtained from environmental sample
  DOMAIN (758)...(815): Bacterial regulatory proteins, luxR family
  misc_feature (1)..(823): Xaa is any amino acid
MKLEQIEQFSPPLINTQKMIRRPDIMAQIRKLSDRCILFIHDPAGYGKTTAAVQWIGNRKAGWFSLDEYSSMPVNFYRGILRALSAEIPDNFDELPQESMLGSLQKLKKWPSVFVIDDFHLLNDNSAVSTLPLIRSRMPVNTSFLVLSRNPPPEVLSEYILKGTIKQLTGLRFTSEEIYALFDKNKTALSQYEAQALCEQTDGWAAALTAILMSDESGYTGIVNRETLNKYLRNYVFEYWEHFDELKKCSICDVLSSKLCEVITGRSDIWELITALANKTGLVSRYGNDTYKFHALLKEFLETELKLDKKINQLLLYKKAAYWYMEKGDWLHTLGMAVKSRDDDTIEEIARLASERHDSAGVDVSQYIKFVERNFLSIPVHIIEQYPRLSGHCFVVSLLSRSLSEVCMWADILEKQMKKGLANKPDNISAAFQRAVDPRYSSWYVPKQFKRIQKIIPAITRRPHMVTISLNFPFFHKAQRDYTDISCELTAYISEFLRQTEPAAGPLMKTVAALIESGIYYERGNFMEAETIAEALKKDAGKLSPELCFCIYTLHLETLRVQGKKIEPEIISDMIENTGAHYLSANFNAYMTNIRLYNGDKTAAAQWLDQQNSVHTLQLYKIYQHFTTARAMMVKSKLSAAEKLLERIARFSQDFRRNADYIEALTLRAICLWRVERTGEAVKTMTAAIVKAAELQLATPIVKDGEDVLPVLQKILNRLKYGYDTGLLDKAFVNLLYIKARNISKHTPGMFSRNKTQALKLSPKQSEVMNYLVKNLSYQEISEEMGVTKAAVDYHIRILHEKFEASNTRDLLQKAQDLGFIDM

SEQ ID NO: 64835 - DNA, 543 bp, Unknown
  Obtained from environmental sample
  misc_feature (1)..(543): n is a, c, g, or t
atgagctttatttttggtggggccatattggacttattatcgaagatagtgagtccgaaaaagcccgtttctatgactggggaattttctcctttgagaatgaaaatttttttcccnaactttgcccttgggaggctcctctattcctgtggggcgactcctccggaatggactttcaggcattatatcaatacaaaccgggacatcactctttataccctcaatctcccggctgaaaaaaaagaagaaatacggcgctatgccgaatggtctatactcccggaaaataaggattacttttaccatcatttccgggacaattgcgctaccaggctgagggacattctggacataggcttggatggtaaattcaaagaaaaatatatacatgagcctgggcgttttacctttagacagcatgtacggcgtcatacctggttcaatccttttttcgactggatccttaatttctggatgagccgggtcatagacaccccaattaccgtatgggacgagatgttccttccttcccgaagtcggtaa

SEQ ID NO: 64836 - protein, 180 aa, Unknown
  Obtained from environmental sample
  misc_feature (1)..(180): Xaa is any amino acid
MSFIFGGAILDLLSKIVSPKKPVSMTGEFSPLRMKIFFPNFALGRLLYSCGATPPEWTFRHYINTNRDITLYTLNLPAEKKEEIRRYAEWSILPENKDYFYHHFRDNCATRLRDILDIGLDGKFKEKYIHEPGRFTFRQHVRRHTWFNPFFDWILNFWMSRVIDTPITVWDEMFLPSRSR

SEQ ID NO: 64837 - DNA, 537 bp, Unknown
  Obtained from environmental sample
  misc_feature (1)..(537): n is a, c, g, or t
gtgtacgntgaagatgtcctcaccctggcgatgttccccaaagtggcgccggacttcttcaaaaaccgcgctaaaggccccgtggtgtttaaacccgagcccgacgcgccggcagctcccgcggcgcccctcgctcccgcagcacccccggcgctggctgctccccaagcgccttcccagcccgctcagtacaatgtgaatgtgaacggggtaaactacaatgtggtgatagcccccgccggtactgtggccgttgccccggctcccgctttggcggcagcccctgccgctcccgcggctcctccggctcccgccgcgtctggtggtgggactaaggttctcgcccctgtagccggggttgtcatccgttatgccactactgaaggcgccgccgtaaagtccggtgataatgtggtcatcatggaatccatgaaaatggagctggaaataaaagccaccgtcccgggaaaagttcatttcctcgtaccgacaggcgcgcaggttgcctcccagcagccaatcgcggaaattgggtga

SEQ ID NO: 64838 - protein, 178 aa, Unknown
  Obtained from environmental sample
  DOMAIN (111)...(177): Biotin-requiring enzyme
  misc_feature (1)..(178): Xaa is any amino acid
MYXEDVLTLAMFPKVAPDFFKNRAKGPVVFKPEPDAPAAPAAPLAPAAPPALAAPQAPSQPAQYNVNVNGVNYNVVIAPAGTVAVAPAPALAAAPAAPAAPPAPAASGGGTKVLAPVAGVVIRYATTEGAAVKSGDNVVIMESMKMELEIKATVPGKVHFLVPTGAQVASQQPIAEIG

SEQ ID NO: 64839 - DNA, 948 bp, Unknown
  Obtained from environmental sample
  misc_feature (1)..(948): n is a, c, g, or t
gtgttccgtatttttgacgcctgcaatgatccccgaaatttcgaggctgccaccaaagccgcaaaaaaaacaggtaagcacatccaggctaccatttcctatgcggtaactccgttccataccatcgaaaagtacgctgaatttgccaaacagcttgtgaatattggcgccgattctatttgcatcaaggatatggctggtcttctgaagccttacgagggctatgagctggtcaaagctatcaaaaaagtgacggctcttcccgtggaagttcatacccatgccactaccggaatgtctgtcgcgaccttggtaaagtgcgccgaggccggggcggagatcttggatacaactatttcgtccatgtccatgggcaccagccacagccccacggaaaccatggtggaaatcttcaaaggtaccgaatatgatacgggtcttgatacgaacctcctcctggagattgcggcgtatttccgggaagtaagaaagaattacaaaaaatttgagtccagcttccttggcgcggacacccgtatcctagtttcccaggtaccggggggaatgttgagcaacctcgaaagccagctcaaggagcaaggcgcgggcaacaagatcgacgacgtactcaaggaaatcgcggtggttcagaaagacgcggggtatccgcctctggttacacccaccagccaaatcgtgggtacccaggcggtgtttaatgtactctttggccgctataataggctttccggggaattccaggacctgatggccggtagatacggcgcgtgcccggctcccaaaaatcaggacgtggtcaaaaaggctttggaagcccttaagatggaaaaagaaattacccaccgtccggcggacgatattcccgcggaatacagcaagctggaagaagaaacaaagaaactcctgggaaccnacagtgtacgntga

SEQ ID NO: 64840 - protein, 315 aa, Unknown
  Obtained from environmental sample
  DOMAIN (1)...(165): HMGL-like
  misc_feature (1)..(315): Xaa is any amino acid
MFRIFDACNDPRNFEAATKAAKKTGKHIQATISYAVTPFHTIEKYAEFAKQLVNIGADSICIKDMAGLLKPYEGYELVKAIKKVTALPVEVHTHATTGMSVATLVKCAEAGAEILDTTISSMSMGTSHSPTETMVEIFKGTEYDTGLDTNLLLEIAAYFREVRKNYKKFESSFLGADTRILVSQVPGGMLSNLESQLKEQGAGNKIDDVLKEIAVVQKDAGYPPLVTPTSQIVGTQAVFNVLFGRYNRLSGEFQDLMAGRYGACPAPKNQDVVKKALEALKMEKEITHRPADDIPAEYSKLEEETKKLLGTXSVR

SEQ ID NO: 64841 - DNA, 975 bp, Unknown
  Obtained from environmental sample
  misc_feature (1)..(975): n is a, c, g, or t
atggtaaaaaaatacaccgattggctcgtgagaggcctcataatcgtcggtctgctgtacgttggcaagccggtactgatgcccctcgtgttggcggtgtttatatggtacctcatcagcatcctcaccgacgtcattgccaagccccgcaagtggaacccaatacgggtgccgcgcccgatcgcgttctctttcgcgctcttagtcatcttcggcgccatggtgctcgcctcgtggatcatcatgaccaatatcacccacgtggcggcggtgatccccgcttaccagtacaaccttgagcagatgagccggcgcgtcctctcaatggtcccgtttacagagccgctaacgttcaagaaactgctcgccgacgtcgacttcagctccatgacccgcggcgccgtccgcgaggtcacaagcgctttcggcaagggcgcctacgtcatcatctacctgattttcctgttcatggagcagcggagtttcgataagaaatttaaaaagctcctcccaaagtctggcggcggcgatgaggtgaacgccatcattgcccgcataaactccgatatacgcacgtacataggcataaaaaccctcgcaagcctcgtcaccgcggcggccggctacatagtcttcgcgagcgtggggctcaacttcgcaagcttctggacattcctgctgtttgtgctgaactatatcccgatcttgggctcaatagtggcgaccgccctgccggcggtcttcgccctgatgcagtacgagagtttagccccgttcttcgtggtgctgttcggcatagtaatcatccagcaagccgtaggcagcatcatcgagcccagattcatgggcgacaaactcaacctgagcccgctggttatcctgctctctttggccacgtggaacctgatatggggcatccccggaatgctgatgtgcgtgccgctcaccgccgtcgtcgaatatctctcgccataa

SEQ ID NO: 64842 - protein, 324 aa, Unknown
  Obtained from environmental sample
  DOMAIN (9)...(322): Domain of unknown function DUF20
  misc_feature (1)..(324): Xaa is any amino acid
MVKKYTDWLVRGLIIVGLLYVGKPVLMPLVLAVFIWYLISILTDVIAKPRKWNPIRVPRPIAFSFALLVIFGAMVLASWIIMTNITHVAAVIPAYQYNLEQMSRRVLSMVPFTEPLTFKKLLADVDFSSMTRGAVREVTSAFGKGAYVIIYLIFLFMEQRSFDKKFKKLLPKSGGGDEVNAIIARINSDIRTYIGIKTLASLVTAAAGYIVFASVGLNFASFWTFLLFVLNYIPILGSIVATALPAVFALMQYESLAPFFVVLFGIVIIQQAVGSIIEPRFMGDKLNLSPLVILLSLATWNLIWGIPGMLMCVPLTAVVEYLSP

SEQ ID NO: 64843 - DNA, 702 bp, Unknown
  Obtained from environmental sample
  misc_feature (1)..(702): n is a, c, g, or t
atgactatgagcgctccatttcttatacgcagcgaggccgaacttgatctggtgcttagggacgccagaccactgatggacgcccaggtaaacaaaacaaattttgtcgttttggcgtggtcaaaaggcggctgggtaaatatattttcaaaagacccggttgtaacaccagacgacctacgccgccagaaggttgcaactaacccggacgatgcgaaattaaacgcggcgttcaaggccatggggtttaatttaattgaatctgaaatgatagatatcggtccgaagatcgcaagtaacatggtcaacgccttttatcaaactccggcttcggtcgccccgctcggtttatataaacagcttagtaacatgatggatatacccatcgctcctttcctgggcgctattgtcattaacaaggttacatggaataaaatcaactccgccgaccagagtgaaattttgcgggttacgcagaaaatagcctctgaatttgaggctataatgccgcagatggtgactaacgccgtagcaatgatgcagagagaagggttaaaggtgaacaggttaaacccggcgcagcagcaactatggtacacggagatacagaaggtcacgccctcgttgatgggcaatacgtttgatcccgaattatacaataaaataaatgaaatagtaaggaagtccagaagcggacaataa

SEQ ID NO: 64844 - protein, 233 aa, Unknown
  Obtained from environmental sample
  misc_feature (1)..(233): Xaa is any amino acid
MTMSAPFLIRSEAELDLVLRDARPLMDAQVNKTNFVVLAWSKGGWVNIFSKDPVVTPDDLRRQKVATNPDDAKLNAAFKAMGFNLIESEMIDIGPKIASNMVNAFYQTPASVAPLGLYKQLSNMMDIPIAPFLGAIVINKVTWNKINSADQSEILRVTQKIASEFEAIMPQMVTNAVAMMQREGLKVNRLNPAQQQLWYTEIQKVTPSLMGNTFDPELYNKINEIVRKSRSGQ

SEQ ID NO: 64845 - DNA, 1845 bp, Unknown
  Obtained from environmental sample
  misc_feature (1)..(1845): n is a, c, g, or t
ttgttttggcgccttgtctttgcttgccctgataccttttatcgaatttattttacaccagttcagaattattattcccgcttccagggacctgatgacccaccttttcctggtacgggtttttttgccgccatgttgacggcaaaattaggggagcatatctcgataacggccgtccagtatataaagaacgaaaaaattaaacgggcgctggaatttataaattcgcttctgctggtttttattttgaccgtccttacgtggaactgcgtttcctttatcaaatacggcatgttggggaagctggtaggccccatacccgaccgcgtttttgccgtagccatgccgcttggttatgcggtcattcttctgcgtttcgcgtttatacggcgtacgggaaaagaaaaaattatcatggtagccgcgcttcttctcgggaccgcggcggcgcttcccgcaattgcgaaagtaatctggggttttgatccgccccagccgttttattcatgggtgaacgccctgtacgacctggcttatcatgtccgtgttccgcttatactgttcctgattctggcggcgttttccggaatgcccattttttccgcgattggcggcatcgccctggtgatactccaggctgccggaagagagccggaagccgcgccaatccagattttttcggcgttaactgatatggacattatcgccatccccctgtttacccttacgggttttttcctttcagagagcagggcgggggagaggctcgtccgcaccttcaggggtttcttcggctggctgccaggcggcatggttattgccacagttcttatctgcgccttttttacctcgtttaccggggcttccggggtgactattcttgcccttggcgggatactccatttgatccttgtcgaaaataaatacaaggaacaatcctccatcgggctgctcacctccgtcgggggcatcggccttatgtttcccccgtctcttccaatcatacttgtcgccagcaccagcaacacgattttgcactttatgaatgtgcccgtgtcttacaacattatccattattttatcggggcgattatccccggattaatactgatactgtcaatgatcgccatcggccttgtaacctctttcagggaaaagatacctgtggaacccttcaacggtaaagacgcgcttgcatccctgaaagaatcgtttctggaaattttattgccaataatcctgatactaggctatttttccgggaggctcaccctgttggaggtaagcgctttttcagttgtctatatagcggttgtggagatctttatcaagaaggacatagcccttaaagacattccaaaggttttttcaaaagcggttccgattttgggcggagtactggcgattctggcgatggcgaaaggcctttcctacgcgattattgattccggcgtgcctgaacatttcgcatattggatgcagggggccgtccggtcaaagttcgtattccttttgctgttgaatctatccctgcttgtggttggttgcctgatggacattttttcggcaatcctcgttgtgcttccccttattgtcccgctgggatacgcctacggcattgatccggtgcatcttggaattatttttatcatgaatcttgaagttggcttcctgactccgcctgtagggctgaacctcttcctggcaagctaccgttttgaaaagccttttataaagatttgccgttatgtgctgccttatcttgcgattcaatttgccgtagtgctgctggtaacctacgtgccgtggctgtcaaacggtttaatacagataattaataaatag

SEQ ID NO: 64846 - protein, 614 aa, Unknown
  Obtained from environmental sample
  DOMAIN (183)...(605): DctM-like transporters
  misc_feature (1)..(614): Xaa is any amino acid
MFWRLVFACPDTFYRIYFTPVQNYYSRFQGPDDPPFPGTGFFAAMLTAKLGEHISITAVQYIKNEKIKRALEFINSLLLVFILTVLTWNCVSFIKYGMLGKLVGPIPDRVFAVAMPLGYAVILLRFAFIRRTGKEKIIMVAALLLGTAAALPAIAKVIWGFDPPQPFYSWVNALYDLAYHVRVPLILFLILAAFSGMPIFSAIGGIALVILQAAGREPEAAPIQIFSALTDMDIIAIPLFTLTGFFLSESRAGERLVRTFRGFFGWLPGGMVIATVLICAFFTSFTGASGVTILALGGILHLILVENKYKEQSSIGLLTSVGGIGLMFPPSLPIILVASTSNTILHFMNVPVSYNIIHYFIGAIIPGLILILSMIAIGLVTSFREKIPVEPFNGKDALASLKESFLEILLPIILILGYFSGRLTLLEVSAFSVVYIAVVEIFIKKDIALKDIPKVFSKAVPILGGVLAILAMAKGLSYAIIDSGVPEHFAYWMQGAVRSKFVFLLLLNLSLLVVGCLMDIFSAILVVLPLIVPLGYAYGIDPVHLGIIFIMNLEVGFLTPPVGLNLFLASYRFEKPFIKICRYVLPYLAIQFAVVLLVTYVPWLSNGLIQIINK

SEQ ID NO: 64847 - DNA, 891 bp, Unknown
  Obtained from environmental sample
  misc_feature (1)..(891): n is a, c, g, or t
ttgtatttcaggcaaatttcaaactttcccctgctgacggtccaggaagaacagaacataggggaaaaaataatcagccttcgggcaaagcagaaagaacttgaggcggagcggaaggccaaaacccaggacgactacgacagggagaaagccgcgctggacagcacccttctcttctataaaaacaaaatgatcaattccaacctccgtctggtggtttccatcgctaaaaattaccagcaccgcgggctttcgcttcttgacctgatcgacgaaggcaatatcggcctgattgaagcggtcgagcgtttcgattataccagaggctgccgtttttcaacctacggcacatggtggatcaggcaggccataataaaaagcatagcggacaagggccgcgtgatccgcatccccatccacatgctgaatacgattaaaaaatgctattatgtcgccaaacaactgacccaggaccttggccgggatccaagcgaagaggagctgtcggaatatctcaggatccccgtcgcgaaggtgaaggatattatcaagctctcgcaggaaactaccagcctgaacgctattgtggacgacggaaaccttacaaggctcgccgatcttatcaaggacgaatccacggcggaaccgtttgaaatggttttttcaatgaccttgcaggaaaccatgagggacattctctcgcagctttctgaacgtgaaatgaagataatccagctccgctacggcctcgccggcgagggccccctcaccttggaagaaacgggaaaactgctcggaataacccgcgagcgcgtgcgccagatccaggaaaaagctactttcaaactgcggaacataagagcgttaagcgaactgaaagaaacctgttaa

SEQ ID NO: 64848 - protein, 296 aa, Unknown
  Obtained from environmental sample
  DOMAIN (138)...(220): Sigma-70 region 3
  misc_feature (1)..(296): Xaa is any amino acid
MYFRQISNFPLLTVQEEQNIGEKIISLRAKQKELEAERKAKTQDDYDREKAALDSTLLFYKNKMINSNLRLVVSIAKNYQHRGLSLLDLIDEGNIGLIEAVERFDYTRGCRFSTYGTWWIRQAIIKSIADKGRVIRIPIHMLNTIKKCYYVAKQLTQDLGRDPSEEELSEYLRIPVAKVKDIIKLSQETTSLNAIVDDGNLTRLADLIKDESTAEPFEMVFSMTLQETMRDILSQLSEREMKIIQLRYGLAGEGPLTLEETGKLLGITRERVRQIQEKATFKLRNIRALSELKETC

SEQ ID NO: 64849 - DNA, 744 bp, Unknown
  Obtained from environmental sample
  misc_feature (1)..(744): n is a, c, g, or t
atgacggaaaaaattccctgcattcgggaccgagaggttttgacaaactgctttggaaatccgaagcatacgaagaaaacgaaggcgatttatgattcgtgtttgaactggaaagccctgacggcgacatgcggttttccgggaaacctaaaagccgtactaagttacggacttacaaaatcaaatgaaataatcgcagattatcaggcgaaagttgatgagccgtgtcctgtgaaccttacaaatcacgcgtattttaatcttgcgggagaagggaagggcgatattctttcacatgaagtaatgctttattccgagttctatgttgaaattgataaacattcaatcccgacaggaaaactggttccggtgaagggcaatgcttttgatttcaggagcaaaaaacacattgacgcggatttcggaaaagtaaacggttatgaccactgttttgttgttgacggagagcagggtaaactgcgtccatgcgcggaagtaacagaaaaagtttcaggcagatcaatgaaagtttttacaacacagccgggcgttcagttttacaccggaaattaccttaacagcgttgccgggaaacagggttcttgttatgtgaaacactccggcttttgccttgagacgcagcattttcctgatactccgaaccagagcggctttccgtcatgcgttgccgttccgggaaaaggataccatgaaacagccgtgttttccttcagctggcactaa

SEQ ID NO: 64850 - protein, 247 aa, Unknown
  Obtained from environmental sample
  DOMAIN (4)...(243): Aldose 1-epimerase
  misc_feature (1)..(247): Xaa is any amino acid
MTEKIPCIRDREVLTNCFGNPKHTKKTKAIYDSCLNWKALTATCGFPGNLKAVLSYGLTKSNEIIADYQAKVDEPCPVNLTNHAYFNLAGEGKGDILSHEVMLYSEFYVEIDKHSIPTGKLVPVKGNAFDFRSKKHIDADFGKVNGYDHCFVVDGEQGKLRPCAEVTEKVSGRSMKVFTTQPGVQFYTGNYLNSVAGKQGSCYVKHSGFCLETQHFPDTPNQSGFPSCVAVPGKGYHETAVFSFSWH

SEQ ID NO: 64851 - DNA, 507 bp, Unknown
  Obtained from environmental sample
  misc_feature (1)..(507): n is a, c, g, or t
atgaaaaaaataacattttttttaatcagtttattaatatccgccgtatgtttcgcccaaagcgaccctgttgaaggcttttggctgagcgttgacgacgcttccggcaaaataaccgccggctggcaaatttatcaggaaggcggaaaactttacggaaaaattttatcgttggcggattatccggaaggcgtaatagccgtccgctgtaatgaaaattaccgaggcttccccgtagccggaaaagtaaacgcaatgcccgtcgccggaactccctggattttcggtcttacaaagagcagaaacggcgaatggagcggcggcaatgtaataaatcccgaagacggcaaaatgtacaattgcaaaataattttccgccccgccgacggcaaaaagttcaaaaccgacacccttgaaatgcggggcgaaatagggctgggcataggacgcagtcaattctggcgcaagaccgacgcgatgacagcggggggattgggacgtaaatga

SEQ ID NO: 64852 - protein, 168 aa, Unknown
  Obtained from environmental sample
  SIGNAL (1)...(19)
  misc_feature (1)..(168): Xaa is any amino acid
MKKITFFLISLLISAVCFAQSDPVEGFWLSVDDASGKITAGWQIYQEGGKLYGKILSLADYPEGVIAVRCNENYRGFPVAGKVNAMPVAGTPWIFGLTKSRNGEWSGGNVINPEDGKMYNCKIIFRPADGKKFKTDTLEMRGEIGLGIGRSQFWRKTDAMTAGGLGRK

SEQ ID NO: 64853 - DNA, 393 bp, Unknown
  Obtained from environmental sample
  misc_feature (1)..(393): n is a, c, g, or t
atgtcaagcgaatattacgtttttttaagtaataatatatttatgggttttaaggaaaacctgaaagctgaattggctttaaaaaatattctgattaaagaattagcctcaatttcgggaataaacagacgaactatagataattacttacgtgagaatggttctatgccctccgccgatgtcgctgtgcgcattgccaacgctcttggggtaacggtggagtatcttatcagcgataatgagcaaaaagagcgcaccccttccatgccgtttcccgactcacgggtagttttgaaaaatcttgaagcattgaacaaacgagaccgaaaaattgtgcttaacttaattaaatctctaaaagaaatggaagactttgagaaaaaatcaaagtaa

SEQ ID NO: 64854 - protein, 130 aa, Unknown
  Obtained from environmental sample
  DOMAIN (21)...(76): Helix-turn-helix
  misc_feature (1)..(130): Xaa is any amino acid
MSSEYYVFLSNNIFMGFKENLKAELALKNILIKELASISGINRRTIDNYLRENGSMPSADVAVRIANALGVTVEYLISDNEQKERTPSMPFPDSRVVLKNLEALNKRDRKIVLNLIKSLKEMEDFEKKSK

SEQ ID NO: 64855 - DNA, 312 bp, Unknown
  Obtained from environmental sample
  misc_feature (1)..(312): n is a, c, g, or t
ttggacggcattttattaagcgccatagaaaaagacaaaaccgatctctcaggcagtttctgccgttgctgcggctattgtctgccgtgtcccgccggtatccccattaacaatgcggcgcgtataacatttttggcgaaaagggcggtcaaagaatactggctctcggaagaatggcaaaaaaatatgcgcctaattgacaactgcacaggctgcggtcattgcaaacagcattgcccttacggacttgatgtgcctacgttgttaaaggcgcagcaggcggagttttttaagatggtggcggggtgttaa

SEQ ID NO: 64856 - protein, 103 aa, Unknown
  Obtained from environmental sample
  misc_feature (1)..(103): Xaa is any amino acid
MDGILLSAIEKDKTDLSGSFCRCCGYCLPCPAGIPINNAARITFLAKRAVKEYWLSEEWQKNMRLIDNCTGCGHCKQHCPYGLDVPTLLKAQQAEFFKMVAGC

SEQ ID NO: 64857 - DNA, 423 bp, Unknown
  Obtained from environmental sample
  misc_feature (1)..(423): n is a, c, g, or t
gtgaatacaattctccttcggcagtctatacgtagcgcctctgaaatcagcttctcccgatccggcgggcccggcgggcagaatgtcaacaaagttaatacaaaggtgacgctgcggctgcgcctggcctttattgccggcctctcggacgccgaactggaaagggcggggggactgctggcaaaccgcatcagcgccgggggcgagattgtaatcagctctgacgaagaacgctcgcagcgtaccaatctggaaagggcttattttcgcgttgaagcgcttataactcaggcggcgcggctgcccaaacaccgccgccctacaaagccgtcaaaggcggcccgtgagcaaaggctccatgtaaaacagttgcagagccgcaaaaaagcgttaaggcgtccgggtcttaggccggaagattaa

SEQ ID NO: 64858 - protein, 140 aa, Unknown
  Obtained from environmental sample
  DOMAIN (1)...(132): Peptidyl-tRNA hydrolase domain
  misc_feature (1)..(140): Xaa is any amino acid
MNTILLRQSIRSASEISFSRSGGPGGQNVNKVNTKVTLRLRLAFIAGLSDAELERAGGLLANRISAGGEIVISSDEERSQRTNLERAYFRVEALITQAARLPKHRRPTKPSKAAREQRLHVKQLQSRKKALRRPGLRPED

SEQ ID NO: 64859 - DNA, 381 bp, Unknown
  Obtained from environmental sample
  misc_feature (1)..(381): n is a, c, g, or t
atgaaggagatacttcttgccgcaatcaacgccaagtggatacacccgtcgcttgccctgcggcttcttaaagcgaacctcggcccctcccttgagaaaagctgcgatattatcgaatttgccctgcgccagccgttatgcgaaaaaatagaccccttgctgcttgcccagccccgtatactcggcctttcggtatcaatttggaatcacctcgctacgctggaattactaaagaaattgcgggaagcgtgggcggttgaggctgttcaaaagcaaggccgtttccaacggcccatcgtcatcctcggcgggcctgaagtgtcgtatctgccacaagaagctgaaatatttcaatatgncggattattgtatccggggtga

SEQ ID NO: 64860 - protein, 126 aa, Unknown
  Obtained from environmental sample
  misc_feature (1)..(126): Xaa is any amino acid
MKEILLAAINAKWIHPSLALRLLKANLGPSLEKSCDIIEFALRQPLCEKIDPLLLAQPRILGLSVSIWNHLATLELLKKLREAWAVEAVQKQGRFQRPIVILGGPEVSYLPQEAEIFQYXGLLYPG

SEQ ID NO: 64861 - DNA, 1233 bp, Unknown
  Obtained from environmental sample
  misc_feature (1)..(1233): n is a, c, g, or t
ttgaggctgttcaaaagcaaggccgtttccaacggcccatcgtcatcctcggcgggcctgaagtgtcgtatctgccacaagaagctgaaatatttcaatatgncggattattgtatccggggtgagggggaaattgcctttagggaattatgcgggaagattttaggcaatgatgatgtttttattgacaatgaatttcatacagttaatgttacggaaattaaaagcggttacagcttgtataccgatgaggatttaggcaaaaaacttgtatatgttgaggcaagcaggggctgtccctttggctgcgagttttgcttaagcgccacaggcgccagcgccacaggcgccagcgctgtaagcgccggtgtccgcgactccagggtgcgggaatttccattggaaccttttttctgtgaaatggaggggctaatacaccggggcgcaaagacatttaaattccttgacaggactttcaattttaatattgaaagaagcatgaaaattatgaatttctttttatataatattaatgaacaaatcaaacaaaacagaaagccccttgttgttcattttgaaatggtcccttcccgctttccgcccgggctgattgatactatagcccgttttcctccggacaccctcaggctggaaatcggtatacagacgctcaaccctgaggtgggagcccgaataggcaggccgtcaaaaccggaacaggaactggaaacgcttaagctccttgcggaaaaaaccaatgccattattcacgtagaccttatcgccggactgccgacagagggcatggagtcctttggcaaaggctttgacgcgctgtgggacgcatttaatggccgcgactccaggcgcgttgaaattcaactgggtattttaaagctgctgcccggcgcgccgattgcgaggcatatagaatgctttggcttgatgtttaattcattgccgccttatgaactcattgagagcgcagccattcccgcgtccaacatggacaggataaaaaacttcgcccggttttgggaattgcttgtcaaccgcgggcttttggacataggcccggccccggtctttgaccgtttcatggctctgtccgattctcttttagcacacttcggccgcaactggggaatagccaaagatgagctcgccggcgcctacagcctgggatccacaggctcactctccagggccagtaccccgaacacgcactcgtga

SEQ ID NO: 64862 - protein, 410 aa, Unknown
  Obtained from environmental sample
  DOMAIN (93)...(279): Radical SAM superfamily
  misc_feature (1)..(410): Xaa is any amino acid
MRLFKSKAVSNGPSSSSAGLKCRICHKKLKYFNMXDYCIRGEGEIAFRELCGKILGNDDVFIDNEFHTVNVTEIKSGYSLYTDEDLGKKLVYVEASRGCPFGCEFCLSATGASATGASAVSAGVRDSRVREFPLEPFFCEMEGLIHRGAKTFKFLDRTFNFNIERSMKIMNFFLYNINEQIKQNRKPLVVHFEMVPSRFPPGLIDTIARFPPDTLRLEIGIQTLNPEVGARIGRPSKPEQELETLKLLAEKTNAIIHVDLIAGLPTEGMESFGKGFDALWDAFNGRDSRRVEIQLGILKLLPGAPIARHIECFGLMFNSLPPYELIESAAIPASNMDRIKNFARFWELLVNRGLLDIGPAPVFDRFMALSDSLLAHFGRNWGIAKDELAGAYSLGSTGSLSRASTPNTHS

SEQ ID NO: 64863 - DNA, 1980 bp, Unknown
  Obtained from environmental sample
  misc_feature (1)..(1980): n is a, c, g, or t
ttgtcagagctaggctataaagtggactttgagaattgtaccgcaaagcatcctgaaaaccgcaaagccgtttttcttggcgatttctgcgacagaggacccaaaaatgtggcagttatccgccttgtgatgaacatggcagaaacgggcgacgcgtggtgcatagccggcaatcatgacgttaagctgcatagaaaacttaaaggttcggatgtacagctttcccatgggcttgataaaactgtgaaagaactggaaacgcaggacgaagagtttgtctcgaaggtaaagggttttctcgatggcttaatcagtcactatgtatttgatgacgggaagctggttgtcgcccatgccgggcttaaagaaaaataccaggggcgtggttcgggccgtgtgcgggaattttgcctttatggcgataccaatggtgaaatagatgagtacggcctgccggtacgtttgcagtgggcaaatgagtaccgcggcaaagctcttgtcgtatacggacacattcccactccggaagtgcagatgcttaacaataccgcgtgcatcgacacaggctgtgtattcggcggcaaacttaccgcatatcgctatcccgaaaaagaaatcgtgcaggtaaatgccaaacaggaatattattcgccgcttaagccatttttggacaagccccgcgatctcgataatgacgatatgctgaatatcgacgatgttattggacagaaataccttgataccaggctgcgccgttccataaaaattgacactgaaaattccactgccgccctggagctcatgagtcgctttgccgtcgatcctcactggttgatataccttccgcctaccatgtccccctgcgaaacaagcaagtcccccgactaccttgaatacccaacccaggcgtttgattattataaggtgcgcggcgttggcaagatagtttgcgaacagaagcacatgggttcacgcgcagtcattgtgctttgcaaggacgccgaaacagcattgaagcgttttggcatagcagataacagttctggcatcatttacacccgtactggcaggcatttctttgatgataaagaaaccgaaagggctattctttcgcggcttcaaaaagtactatccgattcgcgtttctggaatgatttcgatacaggttgggtttgtattgatactgagcttatgccctggtcggcaaaagcacaggagcttctggaaacacagtatgccccggtaggctgcgccgggcgcaacggacttgcggcagcggtagccgccattaaaaatgcgtctgacgcactgagtagcaaaatgcctaatgttgaactgtcatccaaccaaagccttaaccttgaggagctgtgtaaaaaatacgcaacgcgccataatgcgcttgtgctttacactgacgcttaccgccgttattgttgggatgttaaaaacattgatgactaccgcatcgcgccgtttcacattcttgccaccgaaggtaaaacatggaacggtgaaaatcacattcagcacatggaatgtatttttaaatacatgacgggccatgatcccatttttatgccgaccaattatttgctggttgacctgcttgacgaaagcagtgtagcagccggtgttaaatggtgggaagagctgaccgaatcangcggcgagggaatggtggtaaaacccttggaattcatacccatgaaaggcagggagcttttacagccggcaatcaaatgcagggggcttgagtatctgcgcatcatctacgggcctgaatacacgttaggcgccaatcttgagaggctgaaaaaacggtcgctcgggaaaaagcgcgaccttgcgcttagtgaattcgcccttggaatggaatcgctggaacggttcaccagaaaagaaccgctctaccgcgttcacgagtgcgtgttcggggtactggccctggagagtgagcctgtggatcccaggctgtag

SEQ ID NO: 64864 - protein, 659 aa, Unknown
  Obtained from environmental sample
  DOMAIN (6)...(175): Calcineurin-like phosphoesterase
  misc_feature (1)..(659): Xaa is any amino acid
MSELGYKVDFENCTAKHPENRKAVFLGDFCDRGPKNVAVIRLVMNMAETGDAWCIAGNHDVKLHRKLKGSDVQLSHGLDKTVKELETQDEEFVSKVKGFLDGLISHYVFDDGKLVVAHAGLKEKYQGRGSGRVREFCLYGDTNGEIDEYGLPVRLQWANEYRGKALVVYGHIPTPEVQMLNNTACIDTGCVFGGKLTAYRYPEKEIVQVNAKQEYYSPLKPFLDKPRDLDNDDMLNIDDVIGQKYLDTRLRRSIKIDTENSTAALELMSRFAVDPHWLIYLPPTMSPCETSKSPDYLEYPTQAFDYYKVRGVGKIVCEQKHMGSRAVIVLCKDAETALKRFGIADNSSGIIYTRTGRHFFDDKETERAILSRLQKVLSDSRFWNDFDTGWVCIDTELMPWSAKAQELLETQYAPVGCAGRNGLAAAVAAIKNASDALSSKMPNVELSSNQSLNLEELCKKYATRHNALVLYTDAYRRYCWDVKNIDDYRIAPFHILATEGKTWNGENHIQHMECIFKYMTGHDPIFMPTNYLLVDLLDESSVAAGVKWWEELTESXGEGMVVKPLEFIPMKGRELLQPAIKCRGLEYLRIIYGPEYTLGANLERLKKRSLGKKRDLALSEFALGMESLERFTRKEPLYRVHECVFGVLALESEPVDPRL

SEQ ID NO: 64865 - DNA, 552 bp, Unknown
  Obtained from environmental sample
  misc_feature (1)..(552): n is a, c, g, or t
atggcgcttgatctgggcgcgattgccaaaggttatatgactgacgaagcggcaaggatccttgcaaatgaaggtgtaaacagcggaattattgacctgagcggcaacatctttgccatgggggaaagaaaaagacgttttgaaaagggtacatactggcgcataggcgttcaggatcccagggcagacaggggaaactatctcggcatccttaatattaaaaacaaaagcatagtaacgtcaggaatttacgaaaggttttttgaggaagacgggaaacgctaccaccacattttttccacagaaaacggtttccccgtagaaaacaacctgctttctgtatctatcatagccgacaattccatcgatgccgacgccctttccaccgccgcctttgtgctgggctgggagaagggacgggaacttattgccggcgtagaaggcgctgaagggattttcgtgtttgacgatcttaccgtgcgcataaccggaagactggaagaggattttacgcttacagccgcggaatatacgcttagaatttatccctaa

SEQ ID NO: 64866 - protein, 183 aa, Unknown
  Obtained from environmental sample
  DOMAIN (1)...(163): ApbE family
  misc_feature (1)..(183): Xaa is any amino acid
MALDLGAIAKGYMTDEAARILANEGVNSGIIDLSGNIFAMGERKRRFEKGTYWRIGVQDPRADRGNYLGILNIKNKSIVTSGIYERFFEEDGKRYHHIFSTENGFPVENNLLSVSIIADNSIDADALSTAAFVLGWEKGRELIAGVEGAEGIFVFDDLTVRITGRLEEDFTLTAAEYTLRIYP

SEQ ID NO: 64867 - DNA, 822 bp, Unknown
  Obtained from environmental sample
  misc_feature (1)..(822): n is a, c, g, or t
atgaccgccgcaggaggcaaaccgttttatgacggccttgtctttcaccgcgtaattaaagatttcatgatccaggggggcgatcccctcggtgacggtacaggagggccgggttaccgttttcccgacgagtttgattccagccttttgcacgacggccctggggtgctttccatggccaatgcaggggccggtacaaacgggagccagttttttattacccatgtggcgacgccctggctggacggaaaacatactgttttcggcagggtagtcaagggccaggatgtggttgacgccatacagcagggagacaggatacaaaagattaccataatccgtaacggtgaaatggccgcgaacttcaaggcggatcagactgtttttgacgctttggttcgcaacagcgaatcggctgccgcggcaaaggcaaaagtccggcaggaagaggaaatcgcggaaatagtcaggaaatatccaaacgccgttgtgaatccctccggcttaaggtacatcgttcagaagcagggaaccggcccaaagccttcttccggaagtacggcagttgtcaacatcaaagggagcctgctttccggcacggtttttgccaattcggatctttcaggcggccctgaagagttgcctgtagggataggcagggtccttccgggcctggacgaagcaataatgggcatgtccagaggtgagaagcggcttgcgattgttccccctgaattgggatacggaaacagggacattaataacgtcattccggcaaatagttttcttgtttttgagctggaactggtggagataaagtag

SEQ ID NO: 64868 - protein, 273 aa, Unknown
  Obtained from environmental sample
  DOMAIN (177)...(270): FKBP-type peptidyl-prolyl cis-trans isomerase
  misc_feature (1)..(273): Xaa is any amino acid
MTAAGGKPFYDGLVFHRVIKDFMIQGGDPLGDGTGGPGYRFPDEFDSSLLHDGPGVLSMANAGAGTNGSQFFITHVATPWLDGKHTVFGRVVKGQDVVDAIQQGDRIQKITIIRNGEMAANFKADQTVFDALVRNSESAAAAKAKVRQEEEIAEIVRKYPNAVVNPSGLRYIVQKQGTGPKPSSGSTAVVNIKGSLLSGTVFANSDLSGGPEELPVGIGRVLPGLDEAIMGMSRGEKRLAIVPPELGYGNRDINNVIPANSFLVFELELVEIK

SEQ ID NO: 64869 - DNA, 453 bp, Unknown
  Obtained from environmental sample
  misc_feature (1)..(453): n is a, c, g, or t
ttgtatcctgtctccctgctgtatggcgtcaaccacatcctggcccttgactaccctgccgaaaacagtatgttttccgtccagccagggcgtcgccacatgggtaataaaaaactggctcccgtttgtaccggcccctgcattggccatggaaagcaccccagggccgtcgtgcaaaaggctggaatcaaactcgtcgggaaaacggtaacccggccctcctgtaccgtcaccgaggggatcgcccccctggatcatgaaatctttaattacgcggtgaaagacaaggccgtcataaaacggtttgcctcctgcggcggtcatcttgccttcggccgggcccgaagttcaaacggtcatgggggtcttttgatattccagacgaactacgatgtctcccctggacgttgtaattctggcaaaaaggccctcgcccagcgcggaatcggctga

SEQ ID NO: 64870 - protein, 150 aa, Unknown
  Obtained from environmental sample
  misc_feature (1)..(150): Xaa is any amino acid
MYPVSLLYGVNHILALDYPAENSMFSVQPGRRHMGNKKLAPVCTGPCIGHGKHPRAVVQKAGIKLVGKTVTRPSCTVTEGIAPLDHEIFNYAVKDKAVIKRFASCGGHLAFGRARSSNGHGGLLIFQTNYDVSPGRCNSGKKALAQRGIG

SEQ ID NO: 64871 - DNA, 405 bp, Unknown
  Obtained from environmental sample
  misc_feature (1)..(405): n is a, c, g, or t
atgggaattttattaagcgaagtttttgacccgcaatccataagattaaatcttgaaggcaaaaccaaagaggaaatttttattgaattagccgaagctatatgcgaggttcaccctgaatgcgatcgcgcttccatgcttgcgtctttatgggagcgcgaaaacaagctaagtacaggtatcggttccggcattgctattcctcacacaatatacggagggatcaataacatagccggagcaataggaacatcgcaaactggcattgagtacggcgctatcgatcacaaacctgtccacgttgtgtttatgctggcaataagcgataaggcaacggaaaaccatttgcacattttaaacccagcttttcacgccttgcccaatccgaggcaattgcgattataa

SEQ ID NO: 64872 - protein, 134 aa, Unknown
  Obtained from environmental sample
  DOMAIN (7)...(133): Phosphoenolpyruvate-dependent sugar phosphotransferase system, EIIA 2
  misc_feature (1)..(134): Xaa is any amino acid
MGILLSEVFDPQSIRLNLEGKTKEEIFIELAEAICEVHPECDRASMLASLWERENKLSTGIGSGIAIPHTIYGGINNIAGAIGTSQTGIEYGAIDHKPVHVVFMLAISDKATENHLHILNPAFHALPNPRQLRL

SEQ ID NO: 64873 - DNA, 612 bp, Unknown
  Obtained from environmental sample
  misc_feature (1)..(612): n is a, c, g, or t
atgactgaagggcccaacgctcttgacaggctggttgcgcttttttcaagactccccgggattgggaaaaaaagcgcaagccgccttgtgtaccacatccttgactccgatccgtcttacgcgaggacccttgccgccgagatacatggtcttcatgacgcgattaagcgatgctcgcgctgcggcagttttaccgaaagcgatccctgttccatctgtaccgacactacccgcgatcgcagtctgctttgcgtagtggaacgcgctcaggatgtcagggtcatcgaagaatccagggagtttcgcggcctttttcacattttaggcgggcttatcgcgcctctggaaggggttaatcctggtgatcttgcaattgcacagctcctgggccgtgtcagggacgagggcgtcagagaagtaattctggcccttaacccgacaatagaaggagataccaccgccctttatatccagaaatttctgaaagaaaaattgctttccggccagctcgaaataagccgcctggcttcgggcctccctgtcggcggcgaccttgaatacgcagacaggcttaccctgtcccgaagcctgcggggtagaataaaaaagtaa

SEQ ID NO: 64874 - protein, 203 aa, Unknown
  Obtained from environmental sample
  DOMAIN (81)...(178): Toprim domain
  misc_feature (1)..(203): Xaa is any amino acid
MTEGPNALDRLVALFSRLPGIGKKSASRLVYHILDSDPSYARTLAAEIHGLHDAIKRCSRCGSFTESDPCSICTDTTRDRSLLCVVERAQDVRVIEESREFRGLFHILGGLIAPLEGVNPGDLAIAQLLGRVRDEGVREVILALNPTIEGDTTALYIQKFLKEKLLSGQLEISRLASGLPVGGDLEYADRLTLSRSLRGRIKK

SEQ ID NO: 64875 - DNA, 306 bp, Unknown
  Obtained from environmental sample
  misc_feature (1)..(306): n is a, c, g, or t
atgaacatcaacccctttgacattttaaagaacgcccataaaattcaggagcagatgggagcttttcaggaaaaacttgaggagataaaaataaccggtaccgccggcggcggaatgattgagatggacatgaacggaagaatggaagtgcttgctgtcaggatagcgcaggaagcgatggaagaccgtgagatgcttcaggatttgattacagccgcctttaacaacgctatggaaaagatacgggaagagattaaccgcgaaatgggcggaatgatccctggcggcttaaacggcattatatga

SEQ ID NO: 64876 - protein, 101 aa, Unknown
  Obtained from environmental sample
  DOMAIN (9)...(100): Uncharacterised BCR, YbaB family COG0718
  misc_feature (1)..(101): Xaa is any amino acid
MNINPFDILKNAHKIQEQMGAFQEKLEEIKITGTAGGGMIEMDMNGRMEVLAVRIAQEAMEDREMLQDLITAAFNNAMEKIREEINREMGGMIPGGLNGII

SEQ ID NO: 64877 - DNA, 1011 bp, Unknown
  Obtained from environmental sample
  misc_feature (1)..(1011): n is a, c, g, or t
gtgcttttccctcccgccacaggccgctacaaggtctacataatcgacgaagtacatatgctttccaacagcgcttttaacgcccttctgaaaacgattgaagagccgcccccaaacgttgtttttatctttgccacaacagagttacagaaagtccccgccacaatcaggagccgctgccagcagtttaatttccgcctggtttccgttgatacaattattgccctgctaagagaggcgtgcaaggaaattggcgtgcaggcggaagacgacgctcttctctggattgcacgggaatctaccggaagctgcagggatgcctacaccctttttgatcaggttgcgtcgttttccggcgctcacatccgcatggagcttatcagggaaaagctcggtctggttgggctggacgagctcaataaattcgccgagtcatgcgccgccggggatttttccctctccctttccctcctggacgccgtcctttcttcgggagttgcggctgaaactttcatcacgagcctggcgggatactaccatagtctgcttcttttaaaagccggcgttacaagggattcgattttgggttacgccccggacaggttttcgcatctggcgcttgataaatacgacacgatccgccttgaacgggcaggggagcttttgtacgagctataccgggacatccgctattcggtgtctactcgctttgagctagaaaccctggtttcaaaactctgctggcttgataaatggatctcccccactgaactgggccacgctgtttcaatagtacaagccctggtgaataaccccatgtccgcgcccctgccggaaaagcaatcgccttcgttaacggaggaatttaaacgccacatggcaagcaggggaaatcccaaagaaagcccaggtgaaatttctcctgctcctgctgtcgccccccatgatccggctgtcaggaatgtcctgtcggttttcaacggaaccattgtggaggaaagccgaggatga

SEQ ID NO: 64878 - protein, 336 aa, Unknown
  Obtained from environmental sample
  misc_feature (1)..(336): Xaa is any amino acid
MLFPPATGRYKVYIIDEVHMLSNSAFNALLKTIEEPPPNVVFIFATTELQKVPATIRSRCQQFNFRLVSVDTIIALLREACKEIGVQAEDDALLWIARESTGSCRDAYTLFDQVASFSGAHIRMELIREKLGLVGLDELNKFAESCAAGDFSLSLSLLDAVLSSGVAAETFITSLAGYYHSLLLLKAGVTRDSILGYAPDRFSHLALDKYDTIRLERAGELLYELYRDIRYSVSTRFELETLVSKLCWLDKWISPTELGHAVSIVQALVNNPMSAPLPEKQSPSLTEEFKRHMASRGNPKESPGEISPAPAVAPHDPAVRNVLSVFNGTIVEESRG

SEQ ID NO: 64879 - DNA, 513 bp, Unknown
  Obtained from environmental sample
  misc_feature (1)..(513): n is a, c, g, or t
atggtcaagatcggccgagacgtatataattcctctgggaggagatactgtatgaggaaagaatctataacgctcaccgtaaaggaacgagccgatttagaacggtattgtagcaccggggtgcacagcgtcaggctggtcgatagagcgaaaataatattggcccttgatacctcaggcggcagaaccgcagaaaaacaggaggccatagcagaacgtctgggagtctgtcggcagaccgtcagcaatgtaaagagtgattttctggcattaggtgaggtatcaccgtttttacaacggaagaaacgggagacgccaccggtaccgccgaaagtaaccggtgaactggaagcccgtatcattgcgttagcatgcagcgaagcgcccaaagggtatgcgcgctggacattgcggcttttagcggcaaaatgtgtggaactgtgttatagcgataccatgtcgcacatgaccatacagcgccttttaaaaaaacacaacttaaaccgcatctga

SEQ ID NO: 64880 - protein, 170 aa, Unknown
  Obtained from environmental sample
  misc_feature (1)..(170): Xaa is any amino acid
MVKIGRDVYNSSGRRYCMRKESITLTVKERADLERYCSTGVHSVRLVDRAKIILALDTSGGRTAEKQEAIAERLGVCRQTVSNVKSDFLALGEVSPFLQRKKRETPPVPPKVTGELEARIIALACSEAPKGYARWTLRLLAAKCVELCYSDTMSHMTIQRLLKKHNLNRI

SEQ ID NO: 64881 - DNA, 858 bp, Unknown
  Obtained from environmental sample
  misc_feature (1)..(858): n is a, c, g, or t
atgagtaatgaaacgcccaagtggcgtaaaatgaaaaaaaaagaaagcgatataaaagccgccgaaacactattgcttgcaaatgaaaacaggtgcgtaagcgcgtgcgggcggtttctctcccttgatgagacaaaaggccatgtttggatgttaaatgaaaataaaacaagcgtttcggcgttaataatatattcaaaaagcacagtaattcccgtattatgcggcaagaaagagatcccttcccccgattttcttaaagaatttgtcaaaaaaaagaaaatacactcgttacagggtcagaaagaagacgcgcttgttttggaaaacatattgaagcaaatgggagcgcagacatctgacattttcgattacgatcttatgagccttgacaaactgcccgaccaaaaatgtttttcatccggtcctgtaaatctaattttacgcgccccacgtctaatagatttagacgcgatagcccccttacaggcggcatatgaaaaagaggaagttctgccaaccggttcaagcttaagtcccgcgacaagcagggtaaatctcgcgcacattatcgcaaaaggccaaatcctttgcgccgaaatagacggccgcatagtcggaaaaatcaacataaacgcagtttcctttacaaggcatcaagtaggcggcgtctacgttcaccccgatttccgcaacttgggaatcgcccgccgaatggcggcagaatttatagcgtctttaattaattcaggaagaggagtaactcttttcgtaaaaaaagcgaatctacacgctaagcgcctatataccggactagggtttactgtttccggcgattacagggatacttatttttaa

SEQ ID NO: 64882 - protein, 285 aa, Unknown
  Obtained from environmental sample
  DOMAIN (197)...(282): FR47-like protein
  misc_feature (1)..(285): Xaa is any amino acid
MSNETPKWRKMKKKESDIKAAETLLLANENRCVSACGRFLSLDETKGHVWMLNENKTSVSALIIYSKSTVIPVLCGKKEIPSPDFLKEFVKKKKIHSLQGQKEDALVLENILKQMGAQTSDIFDYDLMSLDKLPDQKCFSSGPVNLILRAPRLIDLDAIAPLQAAYEKEEVLPTGSSLSPATSRVNLAHIIAKGQILCAEIDGRIVGKININAVSFTRHQVGGVYVHPDFRNLGIARRMAAEFIASLINSGRGVTLFVKKANLHAKRLYTGLGFTVSGDYRDTYF

SEQ ID NO: 64883 - DNA, 492 bp, Unknown
  Obtained from environmental sample
  misc_feature (1)..(492): n is a, c, g, or t
ttgatggaaaacaacgataacgacattattaaatacatagaacctattctgcattattgcattaagcggctgaacaaccgtcaggacgccgaggacttggcgggcgaaataatggttcacatattaagcggcataaggaaatataaaatagattcgcttgaaaaatggatatggagtatcgcgcgtaatcgttacgcgaaatatatatacaaaagaaataaatccaattatacagaaacggatgccgattacgttgaaatcgctgatacttatgattttattgaccaattaattatttcaaacaggtatcagaatgtgtttaaggctcttcacgcgctttccggcgagtaccgcgatattttggttgattattatgttaatgggttttctgttaaacagattgccgagaaatttaatttgccggaaactacggttaaatggaggcttaatgcggggagggggaaaattaggggggaggtagacttaatttaa

SEQ ID NO: 64884 - protein, 163 aa, Unknown
  Obtained from environmental sample
  DOMAIN (9)...(75): Sigma-70 region 2
  misc_feature (1)..(163): Xaa is any amino acid
MMENNDNDIIKYIEPILHYCIKRLNNRQDAEDLAGEIMVHILSGIRKYKIDSLEKWIWSIARNRYAKYIYKRNKSNYTETDADYVEIADTYDFIDQLIISNRYQNVFKALHALSGEYRDILVDYYVNGFSVKQIAEKFNLPETTVKWRLNAGRGKIRGEVDLI

SEQ ID NO: 64885 - DNA, 420 bp, Unknown
  Obtained from environmental sample
  misc_feature (1)..(420): n is a, c, g, or t
atgggaattaagcaaatatcggtttttctggaaaacacaacgggcaggttaagcgacgtaacaaaaacacttgcaaacgcaggcattaaccttagggcaatcagcattgccgacactgcggactttgggattttacgccttattgttgacaagaccgacaaagctgttgacgctctgaatcaggcgggttttactacacggcagaccgatgtcgtcgccgtggaaattgaggacgtaccgggcagtcttgcaaaattgatggaattattccagcagtcgcaggttaatattgagtatctttacgcttcgcttgaagggctgcaggcgggaaaagccgtagttattttcaagttgaaggatcacgacaaaggtcagcaaatattaagctctaaaggctttaaaatggcggataacttctga

SEQ ID NO: 64886 - protein, 139 aa, Unknown
  Obtained from environmental sample
  DOMAIN (4)...(71): ACT domain
  misc_feature (1)..(139): Xaa is any amino acid
MGIKQISVFLENTTGRLSDVTKTLANAGINLRAISIADTADFGILRLIVDKTDKAVDALNQAGFTTRQTDVVAVEIEDVPGSLAKLMELFQQSQVNIEYLYASLEGLQAGKAVVIFKLKDHDKGQQILSSKGFKMADNF

SEQ ID NO: 64887 - DNA, 1521 bp, Unknown
  Obtained from environmental sample
  misc_feature (1)..(1521): n is a, c, g, or t
atgaaaatattaatggtatcaagcgaagcggtcccttgggcaaaaaccggcggacttgccgacatggtttccgcgctttcgattagtcttgctaaacttggtcatgacgtaagaattgtaatcccccgttactattctgttgaccgcggcggcttaaaacagcttcccggcgcgatgggaacgcctatgggcggcggcattgaagaatggagcgccgtctactataccgatatgccgggaacaacaaaaagtaatccggtaaaggtttattttatcgatcatgaaatattttttggcagggacggcatttacggaagcccgacagaaaccgatttttccgataactcaaggcggtttatgtttttttgccgcgctgcttttcagctttgccgcaaaataaagtggtttcccgacgtgcttcacgcccatgactggcctgcggcggtcgcgcccgtatatctgaaattcgcggaaagggtcaagggaagcgccggcggttttgaaaaaactgtttccattcttacaatccacaaccttggatatcagggaatttataacaaggacaattttaattacgcgggacttggctgggatgttttttacaacgcgggttttgaagactggagcatgcttaatatgctgaaagccggtctttacagtgccgacaagattaacacggtttcgcctaactatgccgaagaaacaaaaacgcagcccggcggtttcagactggacggcgtactacgctacagaagcgccgactattgcggtattttaaacggaattgacacaaacgtatggaatcccgctaaagacaaacacattcccgaaccttattccgtaaaagatatggcaggcaaggcaaaagcaaaagaagccctgcaaagggaattttctctgccgcctgatccggatgtgcccgttattggaatggttacgcgtctgactgagcaaaagggagtaggagagcttttcggtcccacatacggttctgcatggtcaatttgccgcgatttggaactgcaaatggttctgctcggctccggcgaatactggtgcgagtgcgaaatttcaggacttgcttcgcgattatcaaacttcaaggcaaaaatcggttacagcgaaaaaatcagccatctcatagaagcgggttccgactttttcctgatgccaagccgctacgagccatgcggccttaaccagatgtattcgcttatttacggaacactgccgattgtgcgcagaacaggcggtcttgcggataccgtgcaaaatttcgatgaaaagacaggcggcggcaccggcttcatgtttgattacctaagcccttcttcgatttacgacacggttacatgggcggtatggacatggcacaacagaaagaaagaaatcaggaaaatgcaggaacgcgcaatgacgcaggatttttcatgggagctttccgcgaagaagtacgtggatttgtacgaatcggcatttaagacgcaggggattaaattgccgaagaagattgatgcttaa

SEQ ID NO: 64888 - protein, 506 aa, Unknown
  Obtained from environmental sample
  DOMAIN (293)...(470): Glycosyl transferases group 1
  misc_feature (1)..(506): Xaa is any amino acid
MKILMVSSEAVPWAKTGGLADMVSALSISLAKLGHDVRIVIPRYYSVDRGGLKQLPGAMGTPMGGGIEEWSAVYYTDMPGTTKSNPVKVYFIDHEIFFGRDGIYGSPTETDFSDNSRRFMFFCRAAFQLCRKIKWFPDVLHAHDWPAAVAPVYLKFAERVKGSAGGFEKTVSILTIHNLGYQGIYNKDNFNYAGLGWDVFYNAGFEDWSMLNMLKAGLYSADKINTVSPNYAEETKTQPGGFRLDGVLRYRSADYCGILNGIDTNVWNPAKDKHIPEPYSVKDMAGKAKAKEALQREFSLPPDPDVPVIGMVTRLTEQKGVGELFGPTYGSAWSICRDLELQMVLLGSGEYWCECEISGLASRLSNFKAKIGYSEKISHLIEAGSDFFLMPSRYEPCGLNQMYSLIYGTLPIVRRTGGLADTVQNFDEKTGGGTGFMFDYLSPSSIYDTVTWAVWTWHNRKKEIRKMQERAMTQDFSWELSAKKYVDLYESAFKTQGIKLPKKIDA

SEQ ID NO: 64889 - DNA, 531 bp, Unknown
  Obtained from environmental sample
  misc_feature (1)..(531): n is a, c, g, or t
atgcaggcaaaacgaatcattccatgccttgatgttgacgacggaagggtagtgaagggcgttaaattcaagggcattcaggacgcgggagacccaagagaacttgcgcgccgctacaacgacgacggcgccgacgaactcacttttcttgacataggcgcgtcctacaaaagccgcgcgacactgcttaacgtggtgaaaacagttgccgccgaagtttttatccccttatgcgtaggcggcggcattcgcgtcatcgacgacatgcgcgacgcgatgaacgccggcgcggacaaagtttctgtctgcacctcagccctaagccgccctgagctgttacgcgaaatggcgaacgcctacggcagccagtgtgtcgtgctctcgatagacgcaaagcgcgtcgagggcgaaggggaattgcgctggcacgcatattcccacggcggcagaaccgacacaggcatagacgcgattgaatgggcggttagggcggtggaactgggcgcgggagaaatttactcaattcaatga

SEQ ID NO: 64890 - protein, 176 aa, Unknown
  Obtained from environmental sample
  DOMAIN (5)...(173): Histidine biosynthesis protein
  misc_feature (1)..(176): Xaa is any amino acid
MQAKRIIPCLDVDDGRVVKGVKFKGIQDAGDPRELARRYNDDGADELTFLDIGASYKSRATLLNVVKTVAAEVFIPLCVGGGIRVIDDMRDAMNAGADKVSVCTSALSRPELLREMANAYGSQCVVLSIDAKRVEGEGELRWHAYSHGGRTDTGIDAIEWAVRAVELGAGEIYSIQ

SEQ ID NO: 64891 - DNA, 609 bp, Unknown
  Obtained from environmental sample
  misc_feature (1)..(609): n is a, c, g, or t
atgataggcgtaattgattacggcgcgggaaatctaggttctgttatgaacgcactcaagcggctttctgttccggcgcgtttcgcggagggaccgcaggagctttcgctctcatcttcgccgtttgaaaaaataatttttccgggagacggacatttcgctgcggcaatgacgtcgattaacaattccggttacgcgcaggcgataaaggaatggataaaagcggacaagccctttttgggaatctgcataggcttacagttgttatttgaaacttctgaggaagcgccgaatacgcaggggctttctgttatttccggaacggtgcgccgctttcccggccgcaaggttccgcagattggctggaatcaaactaccgcgaggagtggttcattattgtttcgtaatataaatgaaaacagttttttctattatatacattcatactacgccgatccctcggacgattcggtaagcgccgcgcagaccgagtactatgtccgctactgctgcgctgttgaacgcggagccttagccgcggtgcagtttcacccggaaaaatccggcgcggcaggtattgccctccttaaaaattgggcggagggttaa

SEQ ID NO: 64892 - protein, 202 aa, Unknown
  Obtained from environmental sample
  DOMAIN (40)...(155): CobB/CobQ-like glutamine amidotransferase domain
  misc_feature (1)..(202): Xaa is any amino acid
MIGVIDYGAGNLGSVMNALKRLSVPARFAEGPQELSLSSSPFEKIIFPGDGHFAAAMTSINNSGYAQAIKEWIKADKPFLGICIGLQLLFETSEEAPNTQGLSVISGTVRRFPGRKVPQIGWNQTTARSGSLLFRNINENSFFYYIHSYYADPSDDSVSAAQTEYYVRYCCAVERGALAAVQFHPEKSGAAGIALLKNWAEG

SEQ ID NO: 64893 - DNA, 591 bp, Unknown
  Obtained from environmental sample
  misc_feature (1)..(591): n is a, c, g, or t
gtgatgaatagaacggcggagattggaagaaaaacaggggaaactgaaatatttattaaattgaatattgacggcaagggtaacgcgaatttggattaccctgtcggatttatgtcccatatgcttaacacctttgcgcgtcacgggttattcgacattgaagtacgcgcgaaaggcgaccttgaagttgatcagcaccacattgttgaagatacgggtattgtgctgggacaatgtttcgcgaaagcgttaggcgacaagcgaggtattacccgcagcggaagctgtctgttcccgatggacgaaactcttgcgtgcgccgccgtggatataagcggcagaccttttttgtattttgagggacagctttcagactccccgttaatttcaacggaaggcggaaaagagtacagatttcaaaccgatgtagttgaagatttttggcaaggtttcataaacgcggcaggatgtaatttgcatttagagattcttcgtggcagaagcgatcaccacaagattgaagccctgttcaaatccgccgcccgtgcccttcgcgccgcctgtgaaatgatgagaggattaaggatataa

SEQ ID NO: 64894 - protein, 196 aa, Unknown
  Obtained from environmental sample
  DOMAIN (35)...(185): Imidazoleglycerol-phosphate dehydratase
  misc_feature (1)..(196): Xaa is any amino acid
MMNRTAEIGRKTGETEIFIKLNIDGKGNANLDYPVGFMSHMLNTFARHGLFDIEVRAKGDLEVDQHHIVEDTGIVLGQCFAKALGDKRGITRSGSCLFPMDETLACAAVDISGRPFLYFEGQLSDSPLISTEGGKEYRFQTDVVEDFWQGFINAAGCNLHLEILRGRSDHHKIEALFKSAARALRAACEMMRGLRI

SEQ ID NO: 64895 - DNA, 855 bp, Unknown
  Obtained from environmental sample
  misc_feature (1)..(855): n is a, c, g, or t
atgactgacaaactgaggatacttatccccaaagggaggatatttgacggcgtggccagcttgtttgccgaagcgggtttccccattgccctggccgaccgtacctaccggccctcgctgggtgtagactggattgacgcgaagatcatgaagccgcaaaatgtcggcgagcttctggaactgggcagccacgacgcgggttttaccggcattgactggatacaggaaagcggcgccgatgtggaagatgttcttgatcttggcctggacaaggtaaagatagtcgcggcggttccccagtcctttgacagcgcgatgcttcattcccaaaaaatcgtggtggctaccgaatatgtaaatctcgccgagcagtggctaaaatcatcaggctatcaatatcgaattttacgcacctacggcgcgacagaagtttttccgcccgacgacgccgacatgattatcgataacacttcttccggtcagacgctcaaagacaacgggcttaaaattatcgcgaccctgcttgaatcttccacgcgttttgtcgtgtcaaaagcagccgttgccaatgccgaaaaaaaacgccgcatcgatgagcttgtcatgcttttcggcgcagtccttgacggacgagatcgcgtaatgcttgaaatgaatatccccaaagagcaatttgaatctttggcaagccttcccgcgatgcgaagcccgacagtcgctccgctttacggagacgcgggttttgccgttaaaatcgccgttaagaaacatgaagttcccgatattattccaaaactgaaaaatctaggcgcgattgatattgtggaatacgatttgcgaaaagtagtgctgtga

SEQ ID NO: 64896 - protein, 284 aa, Unknown
  Obtained from environmental sample
  DOMAIN (209)...(282): HisG, C-terminal domain
  misc_feature (1)..(284): Xaa is any amino acid
MTDKLRILIPKGRIFDGVASLFAEAGFPIALADRTYRPSLGVDWIDAKIMKPQNVGELLELGSHDAGFTGIDWIQESGADVEDVLDLGLDKVKIVAAVPQSFDSAMLHSQKIVVATEYVNLAEQWLKSSGYQYRILRTYGATEVFPPDDADMIIDNTSSGQTLKDNGLKIIATLLESSTRFVVSKAAVANAEKKRRIDELVMLFGAVLDGRDRVMLEMNIPKEQFESLASLPAMRSPTVAPLYGDAGFAVKIAVKKHEVPDIIPKLKNLGAIDIVEYDLRKVVL

SEQ ID NO: 64897 - DNA, 765 bp, Unknown
  Obtained from environmental sample
  misc_feature (1)..(765): n is a, c, g, or t
atgagcgatttagattattccagttgtattacggattttcaggcgatatacctggaaaaaaggaaacaggccggcaaaggtctgcttgatctgcccctcgcgcagaggccccgcgagcgccttatcagcaaggggccggacgcgctttccgatgccgagcttttggccgtcctcctgaacaccggaatcaaggggaaaggcgttgcggaactggccggggatcttttaaccatccttgacaggaacagggaaattccttctgtcgataagctgtcaaagctttccggcatgggcagttcaaaggcctgcgccgtagcggccatgctggaattcggcagaaggcgatggggcgctgccggttctgttatcaagcgtcccggggaaattttttccctggtgcggcacaatgccgaccggaaacaggagcgttttatcagcctgtccctcaacggcgcacatgaggtaatggctgtccgggtggtaactatcggactggtaaaccgaaccattgttcacccccgcgaggtttttgccgaccttatccaggaccgcgccgccgcttttgccgttgcgcataaccatccttcaggccgtctttctccctcgcccgaagatgatgaaattaccagccgtcttctcagagcatcggaaattctgggtctgcattttcttgatcatgttattttttcggaaaccgcctggtggagctaccgccaaaacggccgcttcaataaacttaccaattatgctacagtaaacccatga

SEQ ID NO: 64898 - protein, 254 aa, Unknown
  Obtained from environmental sample
  DOMAIN (120)...(243): RadC, DNA repair protein
  misc_feature (1)..(254): Xaa is any amino acid
MSDLDYSSCITDFQAIYLEKRKQAGKGLLDLPLAQRPRERLISKGPDALSDAELLAVLLNTGIKGKGVAELAGDLLTILDRNREIPSVDKLSKLSGMGSSKACAVAAMLEFGRRRWGAAGSVIKRPGEIFSLVRHNADRKQERFISLSLNGAHEVMAVRVVTIGLVNRTIVHPREVFADLIQDRAAAFAVAHNHPSGRLSPSPEDDEITSRLLRASEILGLHFLDHVIFSETAWWSYRQNGRFNKLTNYATVNP

SEQ ID NO: 64899 - DNA, 450 bp, Unknown
  Obtained from environmental sample
  misc_feature (1)..(450): n is a, c, g, or t
ttgatggtggaaacacccgagaggatagccaaggcctttgccgatgccggggcggattccattacctttcaccttgaggcgactaatcactcccaccggctgttgcaggagatcaagagttttggaaagaaagccggtataagcatagtgccttccacacccgtcgtaattttgagcgaattactgccctttgtggatatgatccttgttatgactgtaaaccccggctttggcggccagcggctcatacccgaatgcctggacaagatccgttttctggccgaggaacggcaaaaacggggccttaactaccttctttcggttgatggcggcataaacgacgaaaccgccgcttccgccattgccgcaggcgcagacgtactggttgtcggcgcggcgtttttcgccgccaaagataaggcttcatttgtaagccaactgcgccactaa

SEQ ID NO: 64900 - protein, 149 aa, Unknown
  Obtained from environmental sample
  DOMAIN (1)...(138): Ribulose-phosphate 3 epimerase family
  misc_feature (1)..(149): Xaa is any amino acid
MMVETPERIAKAFADAGADSITFHLEATNHSHRLLQEIKSFGKKAGISIVPSTPVVILSELLPFVDMILVMTVNPGFGGQRLIPECLDKIRFLAEERQKRGLNYLLSVDGGINDETAASAIAAGADVLVVGAAFFAAKDKASFVSQLRH

SEQ ID NO: 64901 - DNA, 858 bp, Unknown
  Obtained from environmental sample
  misc_feature (1)..(858): n is a, c, g, or t
ttgtcgggaataagctggatgccgccggacgattatgtgccggaggacagaccgtggtacaaagcggctgtggaagcggaagggaaagtcggggtaacggaaccgtatgtaaatgtagctgaaaatgtggaagttataacatttgcgcgccgtatttttgacgataaagataatccgctcggcgtagtttgtttaaatataaaactggacagaataaggaaatacgcggtcggcacttcaattacccccggcggttacggcttgcttatgaataaaaattttgacgtgttggcccaccctaaccccgcgtatttggggcgtaatataaaattattgaacgacggcgaggctttcgaaagggatttattgcagggaaaagaaattaccgagagaaaagcgtttgattataataaaaaagaatcggtcttgttcgcccgtccccttaagaacggctggtattttgccgtagtggcgtattcggaagaatattataaaagtatatggaatatagcgggtgtctttatcgtgttgggcgtggcgctggcgtcagttttaagcgccatcctgttaagcattgttgccggaaggagaaaagccgaagaacgcacaagggtaatgcttgattctattcccattgtcgcgaatttctgggacaagaaccaccagaatatcgactgcagtcaggaagcgcttaagctgttcggccttacaaacaaaagcgaatacattgataagtattttgacttgtcgcctgaataccagcccgacggaagagtgtcaaaagaaaaggcgttatactacatatcaaaggcgtttaatgaggttactgccgcctgnactggctgcaccgcagactga

SEQ ID NO: 64902 - protein, 285 aa, Unknown
  Obtained from environmental sample
  DOMAIN (32)...(112): Cache domain
  misc_feature (1)..(285): Xaa is any amino acid
MSGISWMPPDDYVPEDRPWYKAAVEAEGKVGVTEPYVNVAENVEVITFARRIFDDKDNPLGVVCLNIKLDRIRKYAVGTSITPGGYGLLMNKNFDVLAHPNPAYLGRNIKLLNDGEAFERDLLQGKEITERKAFDYNKKESVLFARPLKNGWYFAVVAYSEEYYKSIWNIAGVFIVLGVALASVLSAILLSIVAGRRKAEERTRVMLDSIPIVANFWDKNHQNIDCSQEALKLFGLTNKSEYIDKYFDLSPEYQPDGRVSKEKALYYISKAFNEVTAAXTGCTAD

SEQ ID NO: 64903 - DNA, 1368 bp, Unknown
  Obtained from environmental sample
  misc_feature (1)..(1368): n is a, c, g, or t
ttgcgggaacttaaagccatgatgaacaaactgcgcgaggcggacgagtgtacgcaggttctgtttgacgcgacgcctttaagctgttttatgattgacaacaggtttaacattgtggaatgtaatcaggaaattgtaaggcttttcggtctgtcaaacaaacaggaatatataaacaaagttttcgaccttttcccggaatatcagtctacaggcgaatcatcaagagacaggtataataagtatctttacgaggcgtttgaggaaggttattgccgctttgaatggatacaccaaaaaccggacggggagcctatacctacggaagttacgtttgtgcgcgtaaaattcaaaggagaatacgccgtcgccggttacataagggatttaagggagcttaagacaatgattgccgaaatgcggagggcggaaatcgccgaagaaagcaataaggcaaagagcgaattccttgcgaagatgagccacgaaatccgcacgcccatgaatgcgattttaggcataacggagattcagcttcaggatgttaaccttcccaattcaataaaagaggcgctggaaagaatttacaattcaggggacttgctgcttggcattatcaacgacatactggatctttctaaaatagaagccggaaaactggagcttttcccggtacaatacgaagtatcaagcttaatctacgataccgtaaaacttaacattttgcgctacgaaaacaagccgattgagttcgcgcttgaagtaaatgaaaatctgccgtcttcccttatcggcgatgaattgcgccttaagcagattttgaataatttgatttccaacgcctttaagtatacccacgaaggcagaataaatatgcacctgacaacagaaaaaggcggcggcgattatgaagttattcttgttctggttataagcgacacgggccagggaatgacggcggaacaagtgcgcaaacttggcgataaattttccagatttaacactgaggtgaaccgtaaaacagaaggaaccgggcttggcatgaacataacgcagaatttaatacagttgatgaacggcgatatgaaaatcgaaagcacgcccggcatgggatctacctttacggtccgtctgccgcagaagctgaacggctcgccgcctataggaaaagaacttgccgataaccttatgaagctgaatatcaaaaacacttcaaagttcaggaacacgcagataatacaggaatttatgccttacggccgcgttcttgtagtagacgacgtggaatcgaacctctatgtcgcaagaggccttttggctccgtacgggctgtcgattgatatttccatcagcggattgaagcggtga

SEQ ID NO: 64904 - protein, 455 aa, Unknown
  Obtained from environmental sample
  DOMAIN (22)...(135): PAS fold
  misc_feature (1)..(455): Xaa is any amino acid
MRELKAMMNKLREADECTQVLFDATPLSCFMIDNRFNIVECNQEIVRLFGLSNKQEYINKVFDLFPEYQSTGESSRDRYNKYLYEAFEEGYCRFEWIHQKPDGEPIPTEVTFVRVKFKGEYAVAGYIRDLRELKTMIAEMRRAEIAEESNKAKSEFLAKMSHEIRTPMNAILGITEIQLQDVNLPNSIKEALERIYNSGDLLLGIINDILDLSKIEAGKLELFPVQYEVSSLIYDTVKLNILRYENKPIEFALEVNENLPSSLIGDELRLKQILNNLISNAFKYTHEGRINMHLTTEKGGGDYEVILVLVISDTGQGMTAEQVRKLGDKFSRFNTEVNRKTEGTGLGMNITQNLIQLMNGDMKIESTPGMGSTFTVRLPQKLNGSPPIGKELADNLMKLNIKNTSKFRNTQIIQEFMPYGRVLVVDDVESNLYVARGLLAPYGLSIDISISGLKR

SEQ ID NO: 64905 - DNA, 510 bp, Unknown
  Obtained from environmental sample
  misc_feature (1)..(510): n is a, c, g, or t
gtggctgccgctgccaagaatgtcatcgccattgcgttcgggatgctcgacgcctttaagaccatggacggtaattcaggcggcgcttgtgggtatacgaatctgtttggcgacggaaccgaatccatgcttttggcggcgggcctgaacgagatacaaagcctgggtatggcgatgggttctacccatccggaaacttttacctccatttccggcatcggcgacctggatgtcacctgccgttccgtctttggcagaaaccggcgcttcggaaaagatatcattgagaaaaagatccttgagccgttcaaagaccttgacgaccttctggcgcgtataaacgatgttggctatttgccggaaggcgccgcggcggcaaaacatgtcaaggttcttgccgaaaaatacaagttaaaaatgcccattgcgacgggcgtgtataatattttaaaccgcgagatcgagccggctgattttctggagagttttctgcacgagctgggtcgttag

SEQ ID NO: 64906 - protein, 169 aa, Unknown
  Obtained from environmental sample
  DOMAIN (2)...(163): NAD-dependent glycerol-3-phosphate dehydrogenase C-terminus
  misc_feature (1)..(169): Xaa is any amino acid
MAAAAKNVIAIAFGMLDAFKTMDGNSGGACGYTNLFGDGTESMLLAAGLNEIQSLGMAMGSTHPETFTSISGIGDLDVTCRSVFGRNRRFGKDIIEKKILEPFKDLDDLLARINDVGYLPEGAAAAKHVKVLAEKYKLKMPIATGVYNILNREIEPADFLESFLHELGR

SEQ ID NO: 64907 - DNA, 1344 bp, Unknown
  Obtained from environmental sample
  misc_feature (1)..(1344): n is a, c, g, or t
atgtttgataaattaacgcaaaaagttaccgatgccctgcgctttgttaccgggaaatcaaccatcagcgaaaaaaatattgaagacgccgttgacgcgatcaagatggcgctcctggaagctgatgtcaacctgcgcgtggtcaggcgttttgtcaattccaccattgaagaggcaaaaggcgagaaggtactgcgcgctgtgaatccgggccagcagtttgtcaaaattgtccatgacaaacttgtcacatatcttggcggcagcgatcccgaggagcgaaagctaaaactaaaagggccggacgttatttccacagtgctgatgctgggcttgcagggctccggtaaaaccaccagctcagccaagctggccctgcgtctgaaaaaagaagggcgcaaacccctgctggtcgcctgcgacttgatacgtcccgctgcgatggaacagcttgccgtgctgggtaaacaaatcggcgtgtctgttcaccgcgaggaaggagcagcggacagcgcgaaagtctacaggaacgcccttgcttgggcaaagcagaacctgattgataccatgattattgataccacgggccgcctgcagatcgacgaaaccatgatggaggagctttcccggctgaaagaagccgtacagcccgacgagatgcttctggtcgccgactcaatgacaggccagtctgctgttgacatagcaaaaacctttgatgaaaaaatcggcctaacgggcgttgtcttaaccaagttcgattcggacacgcggggcggcgccgcgctttcccttaaaaccattaccggcaagccacttaaatttaccggaaccggggaaaaacccgaagactttgagcctttccacccggaacgcatagccggacgcatcctgggcatgggcgatgttgtaagcctggtggaaaaagcccaggaagttattgaccagaaagaagctctggaactccagaaaaaaatggagaaggaaaactttacccttgaggactggcttacacagcttcgctcggtaaagaaaatgggctcgcttcagtcaatgctggaaatgatccccggaatgcagggccagataagcgaggatgacattgacaaggcggatctgaaacgtcaggaggccatcatctcatccatgacccgcaaggaacgcgccaaccatctaatcataggccccccgcgccgcagccgcatagccaaaggttccggcacctcggtagcggaagtcgcccgccttcttaagcaattcgagaagatgcgcgtcatgatgaaaaaaatggctaaaatgggaaagaatccggcacagctgacacaaatgatagggaacaggtaa

SEQ ID NO: 64908 - protein, 447 aa, Unknown
  Obtained from environmental sample
  DOMAIN (1)...(87): SRP54-type protein, helical bundle domain
  misc_feature (1)..(447): Xaa is any amino acid
MFDKLTQKVTDALRFVTGKSTISEKNIEDAVDAIKMALLEADVNLRVVRRFVNSTIEEAKGEKVLRAVNPGQQFVKIVHDKLVTYLGGSDPEERKLKLKGPDVISTVLMLGLQGSGKTTSSAKLALRLKKEGRKPLLVACDLIRPAAMEQLAVLGKQIGVSVHREEGAADSAKVYRNALAWAKQNLIDTMIIDTTGRLQIDETMMEELSRLKEAVQPDEMLLVADSMTGQSAVDIAKTFDEKIGLTGVVLTKFDSDTRGGAALSLKTITGKPLKFTGTGEKPEDFEPFHPERIAGRILGMGDVVSLVEKAQEVIDQKEALELQKKMEKENFTLEDWLTQLRSVKKMGSLQSMLEMIPGMQGQISEDDIDKADLKRQEAIISSMTRKERANHLIIGPPRRSRIAKGSGTSVAEVARLLKQFEKMRVMMKKMAKMGKNPAQLTQMIGNR

SEQ ID NO: 64909 - DNA, 378 bp, Unknown
  Obtained from environmental sample
  misc_feature (1)..(378): n is a, c, g, or t
atgcccaggatgcgtccggctatgcgttccgggtggaaaggctcaaagtcttcgggtttttccccggttccggtaaatttaagtggcttgccggtaatggttttaagggaaagcgcggcgccgccccgcgtgtccgaatcgaacttggttaagacaacgcccgttaggccgattttttcatcaaaggtttttgctatgtcaacagcagactggcctgtcattgagtcggcgaccagaagcatctcgtcgggctgtacggcttctttcagccgggaaagctcctccatcatggtttcgtcgatctgcaggcggcccgtggtatcaataatcatggtatcaatcaggttctgctttgcccaagcaagggcgttcctgtag

SEQ ID NO: 64910 - protein, 125 aa, Unknown
  Obtained from environmental sample
  misc_feature (1)..(125): Xaa is any amino acid
MPRMRPAMRSGWKGSKSSGFSPVPVNLSGLPVMVLRESAAPPRVSESNLVKTTPVRPIFSSKVFAMSTADWPVIESATRSISSGCTASFSRESSSIMVSSICRRPVVSIIMVSIRFCFAQARAFL

SEQ ID NO: 64911 - DNA, 390 bp, Unknown
  Obtained from environmental sample
  misc_feature (1)..(390): n is a, c, g, or t
atgattaagaaccagccccagcttattgcaaagatcaccactctccttgcggatcggatctggctgatttacaagcagttgtccaataccatgattaagaatccgttaggccggatgtatgacatactgcttatccagcttgaaaaaaaccgtgttcgcgtggacagcacaagcccttatactttcgcctttgggcggcctgaattgattaacatggccggacttcctgagagggacggcaatatactttttgcgcagatgctggaaaacaaaaaagtccggataatggaaaacaagatccatattacatcggtggatgaaatatataaacagtccgaacacttccgcagaatagacaaaatagaaaaagccaagaaagaaagggagtag

SEQ ID NO: 64912 - protein, 129 aa, Unknown
  Obtained from environmental sample
  misc_feature (1)..(129): Xaa is any amino acid
MIKNQPQLIAKITTLLADRIWLIYKQLSNTMIKNPLGRMYDILLIQLEKNRVRVDSTSPYTFAFGRPELINMAGLPERDGNILFAQMLENKKVRIMENKIHITSVDEIYKQSEHFRRIDKIEKAKKERE

SEQ ID NO: 64913 - DNA, 828 bp, Unknown
  Obtained from environmental sample
  misc_feature (1)..(828): n is a, c, g, or t
atgaaagaagacaaccacctacccgagctgctttccccgaaagtggatatagtattcaaattgctgttcggcgatgaacgctacaaggatttgacaatcaacttcataagtgcggtcttgggctacaaagacggcgagttggaagacatattcttttacgatactcacctgaaaagggagaacccaaacgataagctgggggttttggacataaaagccaagctttcaaacggaaatattatagacatagaaatgcaggcacacagcgttcctgacgtaagaggccggatatcgtattacaaatcgcatctgcttaccgagcagctaggtactggagacccgtattcaaagctaaagcctgctaaatccataatagttgcagattttgattttgtccctgaatctgagaaatgccacactatttttcagatgctggaaaaggacgagcattttcctttcaatgatttggaggaaatacacgttctcagcttgaaaaaattatctaatttagataatgagaggttacgtgaatggcttaggttcattaactcggagaaaagagaggaatttatggagttggcaggaatagatccagtgtttgtgaaagccgtagatgttttggctacgttcagcgcggacgaccataatcgtatgctatacgaggcgcgtttgaaggagtggcgtgataataagtctaatatagacggagcacgcaaggatggtcgcaatgaaagagacaacgaaatactggacctcataaagaaaggctatactgcagccgacattgagaaccatatccttaaacaaacccgtactgcaactgcataa

SEQ ID NO: 64914 - protein, 275 aa, Unknown
  Obtained from environmental sample
  misc_feature (1)..(275): Xaa is any amino acid
MKEDNHLPELLSPKVDIVFKLLFGDERYKDLTINFISAVLGYKDGELEDIFFYDTHLKRENPNDKLGVLDIKAKLSNGNIIDIEMQAHSVPDVRGRISYYKSHLLTEQLGTGDPYSKLKPAKSIIVADFDFVPESEKCHTIFQMLEKDEHFPFNDLEEIHVLSLKKLSNLDNERLREWLRFINSEKREEFMELAGIDPVFVKAVDVLATFSADDHNRMLYEARLKEWRDNKSNIDGARKDGRNERDNEILDLIKKGYTAADIENHILKQTRTATA

SEQ ID NO: 64915 - DNA, 384 bp, Unknown
  Obtained from environmental sample
  misc_feature (1)..(384): n is a, c, g, or t
ttgcgatacctacggcaggctctcaactggtcaacagcaatgggcggcgtttgccctgctggttggcatttgcccagcgatgcggagtggacagcactgacgacttttgttggcactaatccaggaaccaagctgaaagcgaactctactctgtggagcacgaacactggcacagacgaattcggtttttcggctctgcctggcggcaacggcggtgccagtggcagcttctactatgtcggctaccgcggcatctggtggtctgccacggagcacgatgcttccctcgcctaccgccggtacatttactacgacttcgcaaatgtgggcagagactacaacgataagatctacttatattcagtgcgttgcgtccaggactag

SEQ ID NO: 64916 - protein, 127 aa, Unknown
  Obtained from environmental sample
  misc_feature (1)..(127): Xaa is any amino acid
MRYLRQALNWSTAMGGVCPAGWHLPSDAEWTALTTFVGTNPGTKLKANSTLWSTNTGTDEFGFSALPGGNGGASGSFYYVGYRGIWWSATEHDASLAYRRYIYYDFANVGRDYNDKIYLYSVRCVQD

SEQ ID NO: 64917 - DNA, 1140 bp, Unknown
  Obtained from environmental sample
  misc_feature (1)..(1140): n is a, c, g, or t
atggacttgcaggaactgcgaaaaaaaattgacgagattgacgacggccttgtccgcctgtttcaggagcggatggacgtatccgccgaaatagcgcgttacaaaaaagagaacaagctgccggtgcatgatccggcgcgcgagcgggaaaaattatacgatctgtcttttaagacaaacccgggacgcgaatcttatattaccgcgttatactatctgctcttcgagttaagccgcgccgatcaggaaaggattttaaaccaaacctgcgagcttacggagaaaatacagaacagcatcaaaaatactgaatggatgtttccctcgcggacggttatcgcctgtcagggaaccgaaggctcatattcccagcttgcggctgaaaaattgtttgatcttcccagcattatgtactgtaacacctttgaaggcgttttttccgcgattgaccacggattgtgccagtacgggcttttaccgctggaaaacagcaccgcgggttctatcaatcaggtatacgatttgatgatgcgatatccgtacagcatcgtgcgcagcgtccgcttaaaaatagaccacagccttcttgcgaaaaaaggcgtaaaaatttccgacattaaagaagttttttcccacgaacaggcaatcgcccagtgcgcgggttatctgaaaacgcttaactgcaaagtgacagcctgcgaaaacacggctattgccgcaaagatggtagccgaatcagacagaaaagacgtggcggccctgtcttccgcaaaatgcgcggccctgtacgacctgcaccgcattgccgattcggtacaggatcgcggcagcaattttacgcgttttatctgcgttaccaaatcgctcgcaatttatcccggagcggacaagaccagccttatgatgacaatcccgcacaaacccggctccctgtaccacgttctgtcgcgtttttacattcacgggattaacctaatcaaacttgaaagccgcccgattccggacagcgattttgagtttatgttttattttgaccttgaaacgccggtttactctcccgctcttttacagacaatccgggaattaagcgaattaagcgacagattttattatctgggaagttattcggaagtagtgtga

SEQ ID NO: 64918 - protein, 379 aa, Unknown
  Obtained from environmental sample
  DOMAIN (298)...(371): ACT domain
  misc_feature (1)..(379): Xaa is any amino acid
MDLQELRKKIDEIDDGLVRLFQERMDVSAEIARYKKENKLPVHDPAREREKLYDLSFKTNPGRESYITALYYLLFELSRADQERILNQTCELTEKIQNSIKNTEWMFPSRTVIACQGTEGSYSQLAAEKLFDLPSIMYCNTFEGVFSAIDHGLCQYGLLPLENSTAGSINQVYDLMMRYPYSIVRSVRLKIDHSLLAKKGVKISDIKEVFSHEQAIAQCAGYLKTLNCKVTACENTAIAAKMVAESDRKDVAALSSAKCAALYDLHRIADSVQDRGSNFTRFICVTKSLAIYPGADKTSLMMTIPHKPGSLYHVLSRFYIHGINLIKLESRPIPDSDFEFMFYFDLETPVYSPALLQTIRELSELSDRFYYLGSYSEVV

SEQ ID NO: 64919 - DNA, 612 bp, Unknown
  Obtained from environmental sample
  misc_feature (1)..(612): n is a, c, g, or t
gtgcaaatcgctgatgtcaaggcagagctctttgatcctgttaatgtcggcgaagccgaaatacgttctcttcaaaacgcggagtttccggttttggatacacaggccggagagcggatgcgcgccgcgatagaggcagctaaaaaagacggcgactcagtcggcggaataattgagtgctgtataataggctatcccgctggtcttggagagccggtttttgacgggatagagaaccgtattgcggcggcgcttttcggcattccggcggttaagggcgtggagttcgggaacggttttgccgccgcttctcttcgcggttctgaaaataacgacgctttttatatgaaggggaatacggtgcagacaaagaccaaccgccacggcggcattttgggtggcataacttccggaatgccggttattttccgagccgcgtttaagcctaccccgtccatcgccaaggagcaggacagcgtgagcctctcccgccgcgaaaatgtaaaacttgccgttacgggccgccatgatccgtgcatagtgccgagggcggttccctgcgtcgaggccgcggcggcaatagcactttatgatattatattatataaataa

SEQ ID NO: 64920 - protein, 203 aa, Unknown
  Obtained from environmental sample
  DOMAIN (1)...(203): Chorismate synthase
  misc_feature (1)..(203): Xaa is any amino acid
MQIADVKAELFDPVNVGEAEIRSLQNAEFPVLDTQAGERMRAAIEAAKKDGDSVGGIIECCIIGYPAGLGEPVFDGIENRIAAALFGIPAVKGVEFGNGFAAASLRGSENNDAFYMKGNTVQTKTNRHGGILGGITSGMPVIFRAAFKPTPSIAKEQDSVSLSRRENVKLAVTGRHDPCIVPRAVPCVEAAAAIALYDIILYK

SEQ ID NO: 64921 - DNA, 1419 bp, Unknown
  Obtained from environmental sample
  misc_feature (1)..(1419): n is a, c, g, or t
atggtacaaaaagtaacactccaaattgccggcaaggaccttgttcttgagaccggcagaatcgccagacaggcaaacggcgctgttttcgcgcagtacgcgggatcggcagttatagcgactgtctgctcatcttcggaaccggtggagggactcgattatgttccccttacggttgattacaatgaaaaatactatgccgcgggaaagatccccgggggcttcattaagcgggaaagcaggcccaaggacaaggaaatcctcgtcagccgccttatcgaccgcccgatgcgcccgcttttcgacaaggctttcggcagggagatacagcttgtccccacaacgctctcaactgatcaggtaaacccgccggatatgctggcgataatcgcctcgtctgccgcggtgcatatttcggacattccctttaacggccccattgccggggtacgggtctgccaggtggacggcgagctggtggtcaatcctacctacgagcagattgaaagctccacaatggaaattgttgtcgccggcacgaaagacggcattacaatggtcgaaggcggggcaaaagaggtcagcgaggatctgatgatacaggctctggataaggcccataatatgatccttgagttatgcgcttttcaggaaaaactgcgcgaactcgccggcaagcctaaacttccgctgactgtccccacccatgttcttgaaaacagcgacgcgatccgcgccaacgcttacccgaaactggaaaaagcctgttttcttgcgaccaagcaggaacgtcatgatggtattaaggcgatacagacggaactggcaacgcagtacgcggcccagcttgaggacgaaaaacagaagaagctctttaacgccctgtttgaggatatgcagtataccatactccgttcatcgatacttaataatggccgccgcgttgacggacgcggtaccgaggacatacgcaatattacctgcgaggtggacatactcgccagaacccacggatcggcgctttttacccgcggcgaaacccaggctttggtggtaacaaccttgggcacggtgtttgacgaacaggtatttgacgacattgaaggcgacaagcgggaacattttatgcttcattataacttccctccctattcagtgggcgaaaccggcaggctgggaacaggccgccgcgagataggccacggcaacctggcccgccgctcgctggaagccgttgttccctccaaagaggaattcccctacacggtgcgggtggtctcggaaataatggagtcaaacggctcatcgtcaatggcctcggtatgcgggggaacgctttcaatgctccacgccggggtgccttttgaaaaaacccgtggcgggcatcccgatgggtcttattacggaaggcgggggtaa

SEQ ID NO: 64922 - protein, 472 aa, Unknown
  Obtained from environmental sample
  DOMAIN (145)...(209): 3' exoribonuclease family, domain 2
  misc_feature (1)..(472): Xaa is any amino acid
MVQKVTLQIAGKDLVLETGRIARQANGAVFAQYAGSAVIATVCSSSEPVEGLDYVPLTVDYNEKYYAAGKIPGGFIKRESRPKDKEILVSRLIDRPMRPLFDKAFGREIQLVPTTLSTDQVNPPDMLAIIASSAAVHISDIPFNGPIAGVRVCQVDGELVVNPTYEQIESSTMEIVVAGTKDGITMVEGGAKEVSEDLMIQALDKAHNMILELCAFQEKLRELAGKPKLPLTVPTHVLENSDAIRANAYPKLEKACFLATKQERHDGIKAIQTELATQYAAQLEDEKQKKLFNALFEDMQYTILRSSILNNGRRVDGRGTEDIRNITCEVDILARTHGSALFTRGETQALVVTTLGTVFDEQVFDDIEGDKREHFMLHYNFPPYSVGETGRLGTGRREIGHGNLARRSLEAVVPSKEEFPYTVRVVSEIMESNGSSSMASVCGGTLSMLHAGVPFEKTRGGHPDGSYYGRRG

SEQ ID NO: 64923 - DNA, 855 bp, Unknown
  Obtained from environmental sample
  misc_feature (1)..(855): n is a, c, g, or t
ttgaaaaaacccgtggcgggcatcccgatgggtcttattacggaaggcgggggtaaaccccgcgaccgttaccccctgttatctgaccttctgggagaggaagacccccttggtgacctggactttaaagttgccggcccccaagaaggcataaccggttttcagatggacattaaaatcgccggcgtcagcccggaaattatgcgcaaggccctggatcaggcgaagcgcggcagaatgcatatcctttcgattatgaacaaaacgatcagccgtccggctgaagagatcagcgaatacgcgcccaagatcgttaccctgcgtattgacatcgacaaaataggcacgcttataggccccggcggaaagaacatcaaggccctgtgcgagcagtacagcgtaaagatcaacaccgaggatgacggcaccgttacaattttcggcaagaacacaaaagacgcggaagatgccaaaatcgccgttatgggcgttacctcagacccggaaattgacagggtgtacaatggcactgtaaaacggattatggatttcggcgcttttgtggagattctgcccggcagggaagggctggtgcatatcagcaaactttcccgccagcgcatagccaatgtcaccgacgtactgaaggaagggcaggaaattcccgtcaagctcaccgaaattgacaaaatgggcaggcttaacctttcgtatattgacgctatcgatccggatggcgccgatcccgccccgaagagccacagcggaaatggcggcagcggtcatacaggcggccattcgggccacgacaacaggggttttaacaagcccggcagggacagacccaggcattaa

SEQ ID NO: 64924 - protein, 284 aa, Unknown
  Obtained from environmental sample
  DOMAIN (3)...(78): 3' exoribonuclease family, domain 2
  misc_feature (1)..(284): Xaa is any amino acid
MKKPVAGIPMGLITEGGGKPRDRYPLLSDLLGEEDPLGDLDFKVAGPQEGITGFQMDIKIAGVSPEIMRKALDQAKRGRMHILSIMNKTISRPAEEISEYAPKIVTLRIDIDKIGTLIGPGGKNIKALCEQYSVKINTEDDGTVTIFGKNTKDAEDAKIAVMGVTSDPEIDRVYNGTVKRIMDFGAFVEILPGREGLVHISKLSRQRIANVTDVLKEGQEIPVKLTEIDKMGRLNLSYIDAIDPDGADPAPKSHSGNGGSGHTGGHSGHDNRGFNKPGRDRPRH

SEQ ID NO: 64925 - DNA, 579 bp, Unknown
  Obtained from environmental sample
  misc_feature (1)..(579): n is a, c, g, or t
atggtaatgggcatgaagcgtttttcaagtcgtgagggtgaaagtccgcgctccatgtcccttactattttcatgtatatcctcagtgaagcgtttttttctttttttatttcatttctttttttcttttttattttttttgtgaaccagctcctgttaatggcccaggacattctgtccaagcaagttccattggggcaggttgcccttttggttctgttttctttaccttccgttatagcattgtccgccccttttgcttcccttgtcggtcttttgatgactgtagggcggctttcaagcgataatgagattctggtatttctgtcatccggactttctttcaggaatgtgtttataccggcaataaccgtaggcattgttatttctattctttcttttattgccaatgacatactgcttcccgggggttatgtgcaatttgcccaattgtacaggcgcatacttgtttccaccccggcgctggaactggaggcaaactcggtaaaaaaatacaagaacacggagataatcaccggtaatgtgacaggaaacgctatcgacaacgtgctgatatga

SEQ ID NO: 64926 - protein, 192 aa, Unknown
  Obtained from environmental sample
  misc_feature (1)..(192): Xaa is any amino acid
MVMGMKRFSSREGESPRSMSLTIFMYILSEAFFSFFISFLFFFFIFFVNQLLLMAQDILSKQVPLGQVALLVLFSLPSVIALSAPFASLVGLLMTVGRLSSDNEILVFLSSGLSFRNVFIPAITVGIVISILSFIANDILLPGGYVQFAQLYRRILVSTPALELEANSVKKYKNTEIITGNVTGNAIDNVLI

SEQ ID NO: 64927 - DNA, 387 bp, Unknown
  Obtained from environmental sample
  misc_feature (1)..(387): n is a, c, g, or t
ttgccgcccgagcctattgcaagcgcgttctccgccggttcaatcacgtcccccgtgcctgaaataagcaaggtttttgacatgtccgctaccagcagaagcgcttccagccgtcttaaagttctgtccagccgccagtctttcgcaagttccaccgcagccctcagcaagtcgcctgagtattctttcagcttcgcttcaaaacggtcaaagagtgtgaacgcgtcggcagtggcgccggcaaacccgcacagcacctttccgtccataaggcggcgcactttacgggcgttgttcttcatcacggtctcgcccattgtcacctgtccgtccccggccatggcgacctttccgtcttttcttacggcgattaccgttgttggatga

SEQ ID NO: 64928 - protein, 128 aa, Unknown
  Obtained from environmental sample
  misc_feature (1)..(128): Xaa is any amino acid
MPPEPIASAFSAGSITSPVPEISKVFDMSATSRSASSRLKVLSSRQSFASSTAALSKSPEYSFSFASKRSKSVNASAVAPANPHSTFPSIRRRTLRALFFITVSPIVTCPSPAMATFPSFLTAITVVG

SEQ ID NO: 64929 - DNA, 480 bp, Unknown
  Obtained from environmental sample
  misc_feature (1)..(480): n is a, c, g, or t
atggccggggacggacaggtgacaatgggcgagaccgtgatgaagaacaacgcccgtaaagtgcgccgccttatggacggaaaggtgctgtgcgggtttgccggcgccactgccgacgcgttcacactctttgaccgttttgaagcgaagctgaaagaatactcaggcgacttgctgagggctgcggtggaacttgcgaaagactggcggctggacagaactttaagacggctggaagcgcttctgctggtagcggacatgtcaaaaaccttgcttatttcaggcacgggggacgtgattgaaccggcggagaacgcgcttgcaataggctcgggcggcaattacgcgtacgcggcggccctcgcgtttttggacggcagtaatttttccgccgccgaaattgcggaaaaaagtttgaaaatagcgggtaacatttgtatttatacaaatttacaaataacattagaggaattaaattaa

SEQ ID NO: 64930 - protein, 159 aa, Unknown
  Obtained from environmental sample
  DOMAIN (1)...(158): Proteasome A-type and B-type
  misc_feature (1)..(159): Xaa is any amino acid
MAGDGQVTMGETVMKNNARKVRRLMDGKVLCGFAGATADAFTLFDRFEAKLKEYSGDLLRAAVELAKDWRLDRTLRRLEALLLVADMSKTLLISGTGDVIEPAENALAIGSGGNYAYAAALAFLDGSNFSAAEIAEKSLKIAGNICIYTNLQITLEELN

SEQ ID NO: 64931 - DNA, 537 bp, Unknown
  Obtained from environmental sample
  misc_feature (1)..(537): n is a, c, g, or t
ttgtatttatacaaatttacaaataacattagaggaattaaattaatggcagagaacaaacaaactgacgataaagcaaataaactgactccgaaagaaatagtttcagagttggataaatatatcgtaggccaaaaaaaagcgaaacgcgccgtagctgtggctttaaggaaccgcataaggcggctgaagcttgatcccgagttacgcgaagatatcgcgcccaagaacatccttatgataggtcctaccggagtcggaaaaaccgaaattgcgcgcagactcgcaaaactcgccggctctcccttcctgaaagtggaagcgacaaaatataccgaagtgggctatgtgggcagggacgtcgaatccatgatccgcgatcttatggccgccggttttcagatggtaaaacaggaaatgcaggaaaccgttttacaggaagcgaaaaaacgcgcggaagaagcgctcttggatttactgcttccgtccaacagcaaaaaaacagaaagagaaaaaaatcccgccccgctccgataa

SEQ ID NO: 64932 - protein, 178 aa, Unknown
  Obtained from environmental sample
  misc_feature (1)..(178): Xaa is any amino acid
MYLYKFTNNIRGIKLMAENKQTDDKANKLTPKEIVSELDKYIVGQKKAKRAVAVALRNRIRRLKLDPELREDIAPKNILMIGPTGVGKTEIARRLAKLAGSPFLKVEATKYTEVGYVGRDVESMIRDLMAAGFQMVKQEMQETVLQEAKKRAEEALLDLLLPSNSKKTEREKNPAPLR

SEQ ID NO: 64933 - DNA, 1062 bp, Unknown
  Obtained from environmental sample
  misc_feature (1)..(1062): n is a, c, g, or t
atgcgccctatgggaactttctcaatcaatcctgaaaattcaaacggcagtattatcgctacgacattacagcttggatttcccgctatgaagaaaaataaagatacgcaggacgaggaaaataccgtcgacgcttcaagcgaaccgcaggaagaaattaaagacggcgaagatgaaaaatttaaagatacaagggaaaaattcagggctatgctcagggaaggaaaattggaagatcgaaaagttgaaattacggttaatcagaacccccagttccccgcgattgaaatgatgggaggcggcatggaagaaattgaggccagcctttcgggaatcgcgggttttttcgggggaaacaagaagaaaaaagtcgttaccgtaagccgcgccagggaaatacttatcaatgaggaatcggaaaaacttattgatagggacagggtaagcgatgaggcccggcagcgggtagaagaaacggggattgtctttatcgacgaaatcgacaagatagccgtaaaaggggatcgcggaggcggccctgatgtttcccgagaaggcgtacagcgcgacatccttcccattgtcgaaggcgctacggtaaacacaaaatggggacccgtcaatacagaccacattctctttatagcggcgggagccttcaacgtaagcaagccttcggatttaatcccggagcttcaagggcgtttccccctgcgggtggaattggattcccttggtaaagacgattttttgcgtatccttaccgagcctaaaaacgcgcttattaagcagtacacggaacttcttgccacggaagacgtaaaaatcaactttacgccggatgccgtggaacaccttgccgctcttgccgccgatgttaactcaaagctggaaaatataggggcgcggcgcctccacacaataatggaagccttgttggaagaactgtccttcgaggcgtccgacattgccccggctaatattgacataaccgtcgattatgtcaacgaaaaactggctgaaatagtcaaggatcaggatcttggcagatatattctataa

SEQ ID NO: 64934 - protein, 353 aa, Unknown
  Obtained from environmental sample
  DOMAIN (79)...(239): ATPase family associated with various cellular activities (AAA)
  misc_feature (1)..(353): Xaa is any amino acid
MRPMGTFSINPENSNGSIIATTLQLGFPAMKKNKDTQDEENTVDASSEPQEEIKDGEDEKFKDTREKFRAMLREGKLEDRKVEITVNQNPQFPAIEMMGGGMEEIEASLSGIAGFFGGNKKKKVVTVSRAREILINEESEKLIDRDRVSDEARQRVEETGIVFIDEIDKIAVKGDRGGGPDVSREGVQRDILPIVEGATVNTKWGPVNTDHILFIAAGAFNVSKPSDLIPELQGRFPLRVELDSLGKDDFLRILTEPKNALIKQYTELLATEDVKINFTPDAVEHLAALAADVNSKLENIGARRLHTIMEALLEELSFEASDIAPANIDITVDYVNEKLAEIVKDQDLGRYIL

SEQ ID NO: 64935 - DNA, 450 bp, Unknown
  Obtained from environmental sample
  misc_feature (1)..(450): n is a, c, g, or t
ttggctaatgccgatgctaaaaagggaggaattttaatgaatgcttttgccaaaacaattgatttactgcaccgcgccatggacgcgcaaacagtgcgccgcgacgtaattgccaataatatggccaatgccacagttcctaactttaaaagatcaaatgtcaattttgaaagcgaactaaaaagggcgctggattcagaaagagacaaaccggctttggaattgaagttgaccaatccaaaacatatccccaactggaaggaaagggattacagggacgtgcagattcgacgggtgcttgattacacaagcacatataacaacaacgggaacaatgttgatcccgaacaggaattaatgctggcgaaccgtaaccagatgacttacacgcttttggcgcagtcagcggcgtttgaattcagccagataaatcaggtattaagagggtaa

SEQ ID NO: 64936 - protein, 149 aa, Unknown
  Obtained from environmental sample
  DOMAIN (20)...(50): Flagella basal body rod protein
  misc_feature (1)..(149): Xaa is any amino acid
MANADAKKGGILMNAFAKTIDLLHRAMDAQTVRRDVIANNMANATVPNFKRSNVNFESELKRALDSERDKPALELKLTNPKHIPNWKERDYRDVQIRRVLDYTSTYNNNGNNVDPEQELMLANRNQMTYTLLAQSAAFEFSQINQVLRG

SEQ ID NO: 64937 - DNA, 462 bp, Unknown
  Obtained from environmental sample
  misc_feature (1)..(462): n is a, c, g, or t
atgggattattcaattcgataaacacggccgccacgggtttaagcgccgacagggtaaggctggacgtaattgcggataacatggcgaacgtgaataccacgcggacaaacgagggcggcccattcaggcgcagccgcgttatcatgcgtccccgcgtggacagcccctactggagatcccccttccttcccgaatccatggataacggaatagggcgcggggtgcgggtcgtggaaattcaaaaggattattcaacggagaaccctcttcgctgggatccgactcacccggacgcgataaaatccggtccgcgggaaggttatgtggaacttccgaacgttgacattgttaccgaaatggtggatatgatttccgctttcgcgtcttacgaagcgaacggagcgataatagaaggttcaaaggcaatgtttttgcgcgccttggacatangctcaagatag

SEQ ID NO: 64938 - protein, 153 aa, Unknown
  Obtained from environmental sample
  DOMAIN (112)...(150): Domain of unknown function (DUF1078)
  misc_feature (1)..(153): Xaa is any amino acid
MGLFNSINTAATGLSADRVRLDVIADNMANVNTTRTNEGGPFRRSRVIMRPRVDSPYWRSPFLPESMDNGIGRGVRVVEIQKDYSTENPLRWDPTHPDAIKSGPREGYVELPNVDIVTEMVDMISAFASYEANGAIIEGSKAMFLRALDIXSR

SEQ ID NO: 64939 - DNA, 738 bp, Unknown
  Obtained from environmental sample
  misc_feature (1)..(738): n is a, c, g, or t
atggaagcggctgctcgagaggacgggaagcctggaggacgagccccgccaggccactttcaagaagctcgacccggagaggctgatagcttacgttggcgagcaccccgacgctacctgaagggagatgggcgaggcgttcggctgttcgggcacggcagtgttcaaggccctgaagcggctgaagatcacgcgcaaaaaaaaaccaggaggttcaaagagcagaaggcggaactggtggaggagtatttagcggagctggagaaggtttccggccgcccggtcgtctatgtggacgagactggcatagacacctgcctctgccgggagtatgggaggtcggagcgcggcgatgcggtgaccggcaagatgagcggccgcaaattcaagagggtcggcttggttgcgggccagacggggaagtccatcgtggccccgatgcagtatggcgggccaatggactcggagcgtttcgagtcgtggttcgatgcctggctgctgccctccctgccggacgggtcggtcgtcgtgatggacaacgcatcgttccaccgcaagggccgcctgcatgcgcttgccgagaaggcggggcacgcgctgcttttcctgccgccttactcccccgagttcaatccgatagagcatttctgggcttggctcaaggggcgcctgcggaagacccttcacctgttcgcttctttcgatgaggcattacatgaagctttccaagttaattga

SEQ ID NO: 64940 - protein, 245 aa, Unknown
  Obtained from environmental sample
  misc_feature (1)..(245): Xaa is any amino acid
MEAAAREDGKPGGRAPPGHFQEARPGEADSLRWRAPRRYLKGDGRGVRLFGHGSVQGPEAAEDHAQKKTRRFKEQKAELVEEYLAELEKVSGRPVVYVDETGIDTCLCREYGRSERGDAVTGKMSGRKFKRVGLVAGQTGKSIVAPMQYGGPMDSERFESWFDAWLLPSLPDGSVVVMDNASFHRKGRLHALAEKAGHALLFLPPYSPEFNPIEHFWAWLKGRLRKTLHLFASFDEALHEAFQVN

SEQ ID NO: 64941 - DNA, 351 bp, Unknown
  Obtained from environmental sample
  misc_feature (1)..(351): n is a, c, g, or t
atgacctacagcacagatttccgagagaaagttcttgagttcctggacagggggcgcaccatgcgggaggcggcggacgcattcggcatcgcgctgggttcggtgaacaactggaagcaaaagttcgtgaggacggggggcctggaggacgcgccgcgcagggcctggttcaggaagctggacccagaaaagctcatggcgcacgtcgcggcgcacccggacgcctacctgaaggagatgggcgaggcgtttggctgcaacgagtcggcggtccgcaaggcgttcgcgaagctgaagatcacgcggggaaaaaaaccaagaggttcagggagcagaggccggagcaggtag

SEQ ID NO: 64942 - protein, 116 aa, Unknown
  Obtained from environmental sample
  DOMAIN (1)...(115): Transposase
  misc_feature (1)..(116): Xaa is any amino acid
MTYSTDFREKVLEFLDRGRTMREAADAFGIALGSVNNWKQKFVRTGGLEDAPRRAWFRKLDPEKLMAHVAAHPDAYLKEMGEAFGCNESAVRKAFAKLKITRGKKPRGSGSRGRSR

SEQ ID NO: 64943 - DNA, 1692 bp, Unknown
  Obtained from environmental sample
  misc_feature (1)..(1692): n is a, c, g, or t
atgaaccaagcgtcaatattaatcgttccctgctgtgaagaaggacgcggcggaggacacttaaacagatgtatttctctcacaaatgatctgcgctcctcaggacgcgaggcatatctttacttacaggaaaataatgaaaagataaacaatcttctgctattaaaaaattttgacacgtcccaaatacttaacaaaaaccaaatcacccgctcctttggacttatcgttttagaccgttttcaaaccccgcatgacgaacttctgcgctggaaaaaaatggctcctgtaatcggcatagacgaaggcggtaaataccgcgattattttgatttccttatagacatactaattccggaaggatttgaaaaaccgtccgcaaatatcacttcctgcggcttacttgaactgccaaaaaaaagaaaaagcggacattatgtaaaaaaatcaaatttaaaaattttaatcacttttggacaggaagacgccgcagggctgggactttccgcaatagaaaaaatcacccaaatgaatttaaaagaagtggaaattaccctgctgaaaggcggtttaaataattcaataaccccaataccggattatgtaaatgttatggactctatccccaaccttgcggatcatctttgcgaatacgacattgtaataactcattacggcatcactgcttatgaggcgttatgcgcaggagcaaaagtttttcttgatcaccctactccctatcacaaaaaaatagccaaggcggccggttttcaggacataaaaaaaataaaacctgtccttaaatctattccgaaacagcagaagaagaaacaaaagttcacccttgtccgcgtgattcgaggcaagattcaaatatatcagacagataccggctcgtggtctaaaaacaacgaaacaacccttgccaaattaattagctctttttcccctcaaataaaccattcctgccccgtctgcgaaaatgaggaaaacaaccgccatggaaacatgagcatagcccgcttccctgaccgcacttaccgtcattgttcaaaatgcggcgtaatatacatggacacaacctgtccgccgcccataacatacgaaagggagtatttttttgattcttacaaaaaacaatacggaaaaacctatctggaagactttcccaaccttatcgcaatggcaaaacgccgcctaaaaattatttcccggatatcttctcaaaaaaaagccgaacctcaaaccgatgaaacgcgggacaaagttaaaactttattggacataggctgcgcatacggccccttcctttccgccgcgaaagaaaaaggatattcacctttgggactggaccccgcgcaggacgccgtgcgttatgtgcaaaatatgctcggccttcccgcggttcagggtttttttcctaactgcccgctcccctctccctcaatctacgacgttgttaccttatggtatgtaatcgaacacttccgcgattgcgcggcaatattatccgaaataaaaaaactgttaactcccggcggcattcttgccttttcaactccttcgtcttcaggcgtaagcggtcgcaaatcactccgtaattatttggaaaaaagccccgccgatcactttacaatctggtctcctaaaatgtgcgtaaaaggcgcttgccctcgccggttttcaagttga

SEQ ID NO: 64944 - protein, 563 aa, Unknown
  Obtained from environmental sample
  DOMAIN (427)...(518): Methyltransferase domain
  misc_feature (1)..(563): Xaa is any amino acid
MNQASILIVPCCEEGRGGGHLNRCISLTNDLRSSGREAYLYLQENNEKINNLLLLKNFDTSQILNKNQITRSFGLIVLDRFQTPHDELLRWKKMAPVIGIDEGGKYRDYFDFLIDILIPEGFEKPSANITSCGLLELPKKRKSGHYVKKSNLKILITFGQEDAAGLGLSAIEKITQMNLKEVEITLLKGGLNNSITPIPDYVNVMDSIPNLADHLCEYDIVITHYGITAYEALCAGAKVFLDHPTPYHKKIAKAAGFQDIKKIKPVLKSIPKQQKKKQKFTLVRVIRGKIQIYQTDTGSWSKNNETTLAKLISSFSPQINHSCPVCENEENNRHGNMSIARFPDRTYRHCSKCGVIYMDTTCPPPITYEREYFFDSYKKQYGKTYLEDFPNLIAMAKRRLKIISRISSQKKAEPQTDETRDKVKTLLDIGCAYGPFLSAAKEKGYSPLGLDPAQDAVRYVQNMLGLPAVQGFFPNCPLPSPSIYDVVTLWYVIEHFRDCAAILSEIKKLLTPGGILAFSTPSSSGVSGRKSLRNYLEKSPADHFTIWSPKMCVKGACPRRFSS

SEQ ID NO: 64945 - DNA, 672 bp, Unknown
  Obtained from environmental sample
  misc_feature (1)..(672): n is a, c, g, or t
ttgacagccattgtactgcaggcaagaatgatttctacaagactgcccggaaaaagcctgcttttacttgacggacaaccgctcatattccgtgtaatggaagcgttaaaccaagtccccgccgatatcagaatactcgcctgccccgaagattcgctttcttctttcacgtctttaacgcagaaagcgggttttcaaatactaacaggaccaaaagaggacgttcttgagcgttactgccttgcaatccgcaaatattcaatagacagggtaatcagggctacaggcgacaatccgtttgtatttgccgacgccgccgcctcgctaaacgatgaagccgtctccctaaaagccgattacgccggctacacggagcttccctacggcgcgggcgtcgaatccgtcgccgcttccgcccttctacgcgcctcagaacaggcaaaactcacttccgaacgcgagcatgtctgcccgtatttatacaatcaccccgaactgtttacccttcaccgccccgccgctcccgcccgctggcatcatcccgatatccgccttaccgtggacactcaggaagattttgaccgcgcaaaagaacttttcggcgcgttaaaaaatgagccaaacaggcacaacggagagacaataataaaaaaatatgcgaaaatgttttaa

SEQ ID NO: 64946 - protein, 223 aa, Unknown
  Obtained from environmental sample
  DOMAIN (3)...(215): Cytidylyltransferase
  misc_feature (1)..(223): Xaa is any amino acid
MTAIVLQARMISTRLPGKSLLLLDGQPLIFRVMEALNQVPADIRILACPEDSLSSFTSLTQKAGFQILTGPKEDVLERYCLAIRKYSIDRVIRATGDNPFVFADAAASLNDEAVSLKADYAGYTELPYGAGVESVAASALLRASEQAKLTSEREHVCPYLYNHPELFTLHRPAAPARWHHPDIRLTVDTQEDFDRAKELFGALKNEPNRHNGETIIKKYAKMF

SEQ ID NO: 64947 - DNA, 462 bp, Unknown
  Obtained from environmental sample
  misc_feature (1)..(462): n is a, c, g, or t
gtgaaacagaggatatacatagatacatctattgtaggcggcttttttgacaaggaatttgcagagccgacaaaagccttgtttgaaaaattaaagaaaaaggaaattgtatttgtaatatccaatgtgttggaaaaggaattattgaaagctccccagcaagttaaagatttgttattgcagtatgaagattgtgagttagaaaaagtggaacttagccaagaggcggaaagtttggctaatgcttatataaatgaaaaagttgttggggcaactagtttggaggactgccagcatatagcaatagccaccataaataaagttgatatattggcaagctggaattttaagcatattgtcaatataaataggataagaggttataatggtacgaatataaaaatgggttatcctacgcttgaaattagaaacccaagggagttaatagattatgaaaactga

SEQ ID NO: 64948 - protein, 153 aa, Unknown
  Obtained from environmental sample
  misc_feature (1)..(153): Xaa is any amino acid
MKQRIYIDTSIVGGFFDKEFAEPTKALFEKLKKKEIVFVISNVLEKELLKAPQQVKDLLLQYEDCELEKVELSQEAESLANAYINEKVVGATSLEDCQHIAIATINKVDILASWNFKHIVNINRIRGYNGTNIKMGYPTLEIRNPRELIDYEN

SEQ ID NO: 64949 - DNA, 1197 bp, Unknown
  Obtained from environmental sample
  misc_feature (1)..(1197): n is a, c, g, or t
gtgaaaagcgtgatgctcccattatggaacgccctcggcttcttcatctccaaccacaacgcagactcctcaaaaggtcagctcaaatggcagcccgcagacgaatggaaaagcgacaacgagctagacctatggataatcgcggtgctgcaagacctgagcaaaaaagtggaaaccgaaatggcagcatacagactatacgccgtagtccccgtaatcctctcgttcatagacgacctcacaaactggtatgtccgccgaagccgccgccgtttctggaaaagcgacaacgacagcgacaaaaacaacgcctacgcaacgctatacaaagcactcgtggatttcagcaaaatcctagccccattcctgccattcttggcagaggagatttatcaaatactcgtgagggaagccaatccaaacgccccagtctcggttcatctcacctcataccccgaacacaacgcagaatacgcaaacgaaaaactagtccgccgaatgtcattggttagaagcgccatagaaaaaggcagagcgatacgcagcgcaaacgaaatcaaaaaccgccagcccctaaaaacattgacattagttccccacaacgaggaagcaaaacaagtagccgagacaatgcaggatttaatccttgaagagctaaacgtagagcaactccatttcgcgggtgatgacaccgagctagccaaaatctccgccaagcccaacttcgcagaacctcccctatccaccgccataaccgccttgaccgccgagcaaatcaagcaaatccaaagcggcacaccgcttgacgttgccggtctccccatagactactcctgcctaatgctagtccgcgaagtagccgaaggtctcgcagttgaagcagacgaaaactacaccatagccttggatttgaaaataacgccagagctacgtcaaagctgcatagcgagagagctggtgaatcgcatacaaaaccgccgcaaggaaatggatttgcaaattacggataagataaagatagcgttgaaagggcttggtgcttacgcggatttgcaggcagcggtggagaagcataggggttatattttggaagagacgcaggggttagagatttccacgagcggtgaagcgagtggggagtgggttgcggttagtgtggaggggtgtgaggtggaggtttgtattgtaaatgcgtag

SEQ ID NO: 64950 - protein, 398 aa, Unknown
  Obtained from environmental sample
  DOMAIN (43)...(197): Anticodon-binding domain
  misc_feature (1)..(398): Xaa is any amino acid
MKSVMLPLWNALGFFISNHNADSSKGQLKWQPADEWKSDNELDLWIIAVLQDLSKKVETEMAAYRLYAVVPVILSFIDDLTNWYVRRSRRRFWKSDNDSDKNNAYATLYKALVDFSKILAPFLPFLAEEIYQILVREANPNAPVSVHLTSYPEHNAEYANEKLVRRMSLVRSAIEKGRAIRSANEIKNRQPLKTLTLVPHNEEAKQVAETMQDLILEELNVEQLHFAGDDTELAKISAKPNFAEPPLSTAITALTAEQIKQIQSGTPLDVAGLPIDYSCLMLVREVAEGLAVEADENYTIALDLKITPELRQSCIARELVNRIQNRRKEMDLQITDKIKIALKGLGAYADLQAAVEKHRGYILEETQGLEISTSGEASGEWVAVSVEGCEVEVCIVNA

SEQ ID NO: 64951 - DNA, 465 bp, Unknown
  Obtained from environmental sample
  misc_feature (1)..(465): n is a, c, g, or t
atgatttgcaaacattttctatcttttatacaaatgaaagtttatttagacaattgctgttttaatcgtccgtttgatgaccagagcgatatgattgtgtatttggaaacgaaatctaaattggctatacaaggaatggtaaaggacaaaggtttggaactagtttggtctgaggttttggattttgaaaataatgaaaatccttttgaggaacggaaaatcaaaattttagaatggaaattattagcggttgaaaatgtagaaatgaatgatttgattttggaaacagctagaaaattgctaagtttgggattgaggcaaaaagatgcttctcatattgcttgtgcaatttttggcaaagtagattttttcgttacaacggaaaagaaaattttgaataaaaaggttcaagacattgaacttataaatcccatagatttagtgaggaggttccatgcttactga

SEQ ID NO: 64952 - protein, 154 aa, Unknown
  Obtained from environmental sample
  misc_feature (1)..(154): Xaa is any amino acid
MICKHFLSFIQMKVYLDNCCFNRPFDDQSDMIVYLETKSKLAIQGMVKDKGLELVWSEVLDFENNENPFEERKIKILEWKLLAVENVEMNDLILETARKLLSLGLRQKDASHIACAIFGKVDFFVTTEKKILNKKVQDIELINPIDLVRRFHAY

SEQ ID NO: 64953 - DNA, 1848 bp, Unknown
  Obtained from environmental sample
  misc_feature (1)..(1848): n is a, c, g, or t
atgataaaacaagcggttattgtcgcggcgggtatgggaacacgccttaaagaaaaaacagtttcaatgccaaaaggattccttgaactgggcggaatcgccattgtcgaatggtctgttcaaaaactgctcgcctgcggtatagaaaaaataattatcggtacgggtcactgcgcacaagcgtacaatgatcttgcgaaaaaatatacggcaattcaaacggttttcagcgcagattatgaaacaaccggcagcatggcaacattgaatgtatgcgccccttatataacagaagattttctgttattagagtccgaccttatctacgacagcatagggctttccgtcctttgcaatgatattcatgaaaatgttattctcgcttccggcgctaccaattcgggagacgaggtttatcttgaaacagctaacggccctttcttaaaagcgctttcaaaaaacaaaagcgaacttgcttcaatttacggcgagcttgtcggaattacaaaaatttctccggctctcctttccgctatgtgcgctaattacgaaaaaaaacgcgcgcagttccctaaacttgactatgaacgcgcaatcatggcgtgtacggacaaacatcaagtattcattcgtaaagttgaatattacgcgtggcgcgaaatcgacgatgatagtcatcttgaaatggctcagcgtgaaatcctgccgcgtattctggaaaatgaatcgatcaggcagatacgccgcgaagtcctgttaaaccctggtccggctacgacgagcgacagcgttaaatacgcgcaagtctgcgccgacatctgtccgcgtgaaaaagaattcggcggcgtgatgaaatgggtatgcagggaacttacttcctttgccgctgatatttctgaatatgaaactgtaattttcggaggttcaggcacagccgccgatgaagtgatgatttcctcctgtgttcctgaaaccgggcatattcttatcgttgacaacggctcttacggagaaaggcttgcgaaaatagcgtccgtttataaaataaaccacacggtttttaaaagctcaacttatgaaagaattgatattgccgcccttgaaaatgaatttaaaacaggcaaatatacccatcttggcattgtgttccacgaaaccacaacaggcctgcttaatcctctgnatataatttgccctctggctaaaaaatacagcatagttacgattgttgacgctgtaagcatatacgcaggaatgcctatggatttgtcaaaactcggcattgattttatggcttcaacttccaataaaaatattcagggaatggccggtataggctttgttatctgcaagaagaacgagcttgaaaaaacaaaaaacattcccatgcggaattattatcttaacctgtatgatcaatacgcgcattttactaaaacaggacaaacgcgttttacccctcccgttcaggcgctctacgcgctgagacaggcaatacttgaaacaaaacaggaaaccgttgaaaaacgccggcagcgttataccgaatgttggcatattcttgttgacgcggttaaaaagttcaatttaaaaatgcttgtaaaagaagaagaccagtctcatttgataaccgccatttttgatcctgaaactccaaaatacagttttgaaagccttcatgaccttgcccgtcaacacgggttcacaatctatctcggaaaacttggaaacatcaatactttcagaatcgcgaatatcggcgatattaaaccgcatgagatgaaaaagtttacagaaattcttaaaagttatcttgattcaattaattgggagagtgtggaaaaatga

SEQ ID NO: 64954 - protein, 615 aa, Unknown
  Obtained from environmental sample
  DOMAIN (250)...(583): Aminotransferase class-V
  misc_feature (1)..(615): Xaa is any amino acid
MIKQAVIVAAGMGTRLKEKTVSMPKGFLELGGIAIVEWSVQKLLACGIEKIIIGTGHCAQAYNDLAKKYTAIQTVFSADYETTGSMATLNVCAPYITEDFLLLESDLIYDSIGLSVLCNDIHENVILASGATNSGDEVYLETANGPFLKALSKNKSELASIYGELVGITKISPALLSAMCANYEKKRAQFPKLDYERAIMACTDKHQVFIRKVEYYAWREIDDDSHLEMAQREILPRILENESIRQIRREVLLNPGPATTSDSVKYAQVCADICPREKEFGGVMKWVCRELTSFAADISEYETVIFGGSGTAADEVMISSCVPETGHILIVDNGSYGERLAKIASVYKINHTVFKSSTYERIDIAALENEFKTGKYTHLGIVFHETTTGLLNPLXIICPLAKKYSIVTIVDAVSIYAGMPMDLSKLGIDFMASTSNKNIQGMAGIGFVICKKNELEKTKNIPMRNYYLNLYDQYAHFTKTGQTRFTPPVQALYALRQAILETKQETVEKRRQRYTECWHILVDAVKKFNLKMLVKEEDQSHLITAIFDPETPKYSFESLHDLARQHGFTIYLGKLGNINTFRIANIGDIKPHEMKKFTEILKSYLDSINWESVEK

SEQ ID NO: 64955 - DNA, 741 bp, Unknown
  Obtained from environmental sample
  misc_feature (1)..(741): n is a, c, g, or t
atgggtatcccttattcaatattggaaaaagatgaggatgccgtaaacaaccaaattgatatctgttttaaaactatcgccgaaacaggctccacttacgcgtttgttatacgcaaagacacattcgcgccttacgcgcttcagaaaaaagaagagcataacgcggtaatgacaagagaagaagcaatcgaagaaattgccgctgtctgcggcggtattatcgtttccactacgggcatgatctcgcgcgaattatacgagttacgtgaaaaaatgtctcttggccatgagcgtgattttcttaccgtaggatcaatgggacacgcgtcttctatcgcgctgtctattgcccttcaaaaccggcagcttaaggttacctgtcttgacggagacggagcggctcttatgcacatgggctcttttgccgcaatcggaacgcaaaagccgcgtaatctttgccatatagttcttaataacggcgctcatgattcagtcggaggccagccgacagttgccccctatattgatatgctgtctatagcgcgctcttgcgggtatataaaagtatatcaggcaaaaacaaaagaagaattaaaaaagattttatcggaaagaaacgatgaacttacatttatcgaagtgaaagtaaaaaaaggctcccgtaaagatttggggcgtccaaaaacaacgccgcaggaaaacaaggcgtcttttatgaaatatatcggagattttaaatga

SEQ ID NO: 64956 - protein, 246 aa, Unknown
  Obtained from environmental sample
  DOMAIN (77)...(214): Thiamine pyrophosphate enzyme, C-terminal TPP binding domain
  misc_feature (1)..(246): Xaa is any amino acid
MGIPYSILEKDEDAVNNQIDICFKTIAETGSTYAFVIRKDTFAPYALQKKEEHNAVMTREEAIEEIAAVCGGIIVSTTGMISRELYELREKMSLGHERDFLTVGSMGHASSIALSIALQNRQLKVTCLDGDGAALMHMGSFAAIGTQKPRNLCHIVLNNGAHDSVGGQPTVAPYIDMLSIARSCGYIKVYQAKTKEELKKILSERNDELTFIEVKVKKGSRKDLGRPKTTPQENKASFMKYIGDFK

SEQ ID NO: 64957 - DNA, 1446 bp, Unknown
  Obtained from environmental sample
  misc_feature (1)..(1446): n is a, c, g, or t
ttgccgcttttttcgctgttgctgtttgcctgtatacaagaagaagaagaagaacctgtaatttacaaaaaattttgggcatgtaatatttcagaaaacatgtattatcagatagatgcgcaaatgcttgcggaaaatgatttatgccgcgtttgggcggaaaaagattcaggtgtgaccgaagaaacagcgcaaaaggttgccgatggatataaaaaagatatttactataaaatgatggaaacttttggttataaaattaatatgacagatgagaaaggaaactcggttgcaataatagataatgtacaatttataaattggctagttactggtaatttaagcggcgggaaattaaccattctgctcatggatataaaagataattaccagcagggggcgaatgaatcctttgtcgccggatatttttgggcaggtaatttgtttaaaaatcgtttgttagaagatgaagtttcaaatgagtgtgatatgatctatattgatatcaatccaggaatccccggttcaaaagaatccaatgaaactctggctcatgaaatgcagcatttaatgaattttgcggggactgttttacgggataaaactacggatctttggattgacgaagggctttctgtaacggcggaatgggtgcatagtaatgaacattccgcacagcgattatattgttatgatacagatatttcagggctgcttggtaagggaaataatttctttgtgtggggcaaccgtgataatgaaaaccaatatgcagtattggacgattactcaaccgtttatctttttttccagtggctgggactgcaatccgacagggaaatctattggaaaataaacgcttcggatgattatgattataaagctgtaattaacgcatttaatgatattgttaacgttgatagatatgaagattgggaatctatgcttaaagactggttagccgcgaattattttaaaaattccgccggacgctatggttacaagagcgatacggaattaaataaaataaagatacattatgcgccgggcggtccgaagactatcaatctgtttccgggagaaggtgtttacagcagggtgacaaattcaacttcaattccagagtcatccggaaatatttattatgccggtttatcaggttcttcgcctgtatcttcaaattctttatcagacggcgctttgcttacatataacgcgaatacagatattaaaggtaattcggaatcaggcgttataaccggcgaggctcctccgccaagcgtgactgttacaacaggcagccgcggcgtcggggccgttacaggcccgtttccaatcagcgcaagcgatatgctcaggcaaaatgggaataaaggcaattttaattatgacggcataaattttaaattaccggaagcttataggggaattattgtaaatgagtaa

SEQ ID NO: 64958 - protein, 481 aa, Unknown
  Obtained from environmental sample
  misc_feature (1)..(481): Xaa is any amino acid
MPLFSLLLFACIQEEEEEPVIYKKFWACNISENMYYQIDAQMLAENDLCRVWAEKDSGVTEETAQKVADGYKKDIYYKMMETFGYKINMTDEKGNSVAIIDNVQFINWLVTGNLSGGKLTILLMDIKDNYQQGANESFVAGYFWAGNLFKNRLLEDEVSNECDMIYIDINPGIPGSKESNETLAHEMQHLMNFAGTVLRDKTTDLWIDEGLSVTAEWVHSNEHSAQRLYCYDTDISGLLGKGNNFFVWGNRDNENQYAVLDDYSTVYLFFQWLGLQSDREIYWKINASDDYDYKAVINAFNDIVNVDRYEDWESMLKDWLAANYFKNSAGRYGYKSDTELNKIKIHYAPGGPKTINLFPGEGVYSRVTNSTSIPESSGNIYYAGLSGSSPVSSNSLSDGALLTYNANTDIKGNSESGVITGEAPPPSVTVTTGSRGVGAVTGPFPISASDMLRQNGNKGNFNYDGINFKLPEAYRGIIVNE

SEQ ID NO: 64959 - DNA, 2619 bp, Unknown
  Obtained from environmental sample
  misc_feature (1)..(2619): n is a, c, g, or t
ttgcatattgttaatactatggattacgacaaattcaccattaaagctcaggaagctttgaacgaggctgccggtatcgcgcagaagagcgaccattcgcagattgagagcgaacatttactactggcgttactgcggcaggagaacggaattgttacgccgattattgagcggatagggggcgatgctgtaaggcttaccgccgatgttgaggcgcttgttaataaaacgcctaaagtttacggagaggcggcgcaggtttttttctcgccggcattgtcgaaggttttggcaaaagccgaagttgaggcttctgcgctgaaagacgaatatgtctctaccgagcatatcctaatcgccattgcggcgagcgagggcaaggcggcggatttgcttaaaaaagcgggcgttaacaaagacgcgattctcggcgcgttgaaactagtcagaggaaacgcgcgagtaaccgaccanaacccggaagaaaaatatcaggcgttggatcgctactgccgcgaccttaccgctcttgcccgtcaggaaaaacttgatccagtcatcgggcgcgatgaagaaatccgcaggtgtatgcaggttctgtcccgccgcacaaaaaataatccggtactcatcggcgaacccggcgttggaaagacggctatagtcgaagggcttgcccgccgcattgtggcgggcgatgtgcccgaaggtttgaaagggaaaaaacttctcgctctggatttaggggctcttgtcgcgggcgctaaattccgcggcgagtttgaggaacgcttaaaaaccgttatccatgacgtgcaggcggaagacggaaaaataattctttttattgacgagcttcatactctcgtgggagccggagccgcagaaggagcgacagacgcatcgaacttgcttaagcccgcgcttgcccgcggggagctacggtgtataggcgcgactactttggacgagtacaggaaacatatcgagaaggacgccgcgcttgaaaggcgtttccagcaggtgtatacggcggaaccttctgtagaagatacgattgcgattttgcgcgggcttaaggagcggtacgaagtccaccacggcgtgcggattaaagatgaggctcttgtggcggcggcgacattgtccagccgttatattacaagccgctttttgcccgacaaggcgatagaccttgttgatgaagccgcaagccgccttaaaatggaattggacagccgcccgacggagcttgataaactggagcgcaaacttttacagctttcgatagaaaggcaggctctttcgcgcgaagaagatacggcttccaaagaccgccttacaaaactggaaaaagaaatcgcggagcttacagccgaacgcaacgcgatgaacacccgctgggaaaacgagaaaatcgatattcagaaaatccgcgaaataaaacaacggatagaagaactgaaaattgacgagacccgttatgaacgcgaaggcaatctttcaaaagcggcggaagtaaaacacggtaaaatccccgaagcgcaaaaacagcttgccgcgcttacggatcaaatggagaaaaaaagggagaacgcgaaaggcggcgaggcttccgcgctgttacgcgaagaagtcagcgaagaagacattgcgggagtagtttcaacatggacgggtattcccgtctctaaaatgctctccggcgaattgcaaaaatatttggacttggaaaaagctcttgaaaaacgtgttgtcggtcaggatgaagcccttgccgcagtcgccgacgccatcagacggaacaagtcaggtctctccgacgcggcgcgcccgctggggtctttcctcttcttgggaccgacgggtgtgggaaaaacggaactcgccaaaacacttgcggattttttgttcaatgacgaaaaagctctcaccagaattgacatgagcgaatacggagaaaaacattcggtaagccgccttatcggcgcgccgcccggctatgtgggttatgagcagggcggtcagcttacagaggcggtcagacgccgtccctacagcgtaattctttttgacgaaattgaaaaaggtcaccccgaagtgtttaatgtgtttttgcaaatactcgacgacggcagattaacggacggtcagggacgcgttgtcgattttaaaaatgtaattatcattatgacaagcaatttaggctctgacttgatactggaagcgaaaaatcccgaatccttgcgtgaatctttaatggaacttctaaagcacagtttcagacccgagtttataaatcgaattgacgagactgtcattttcaaccgtcttggcaaaggcgaaatcggtaaaatagttgatattcaattaatgcggctttcaaagcggcttgcggagcgcaagattacgcttgtgctgacagacgcggcaaaatccctgctcgccgagcgcggatacgacccaatgttcggcgcgcgtccgctgaaacggacaattcaaagcgaccttgaaaatccgcttgcaaaacagattatcgcgggaaccgttcgagaaggcgatactgttacagcggatattgcacctaacaaagaagggattgtttttaagaagaaataa

SEQ ID NO: 64960 - protein, 872 aa, Unknown
  Obtained from environmental sample
  DOMAIN (568)...(807): Torsin
  misc_feature (1)..(872): Xaa is any amino acid
MHIVNTMDYDKFTIKAQEALNEAAGIAQKSDHSQIESEHLLLALLRQENGIVTPIIERIGGDAVRLTADVEALVNKTPKVYGEAAQVFFSPALSKVLAKAEVEASALKDEYVSTEHILIAIAASEGKAADLLKKAGVNKDAILGALKLVRGNARVTDXNPEEKYQALDRYCRDLTALARQEKLDPVIGRDEEIRRCMQVLSRRTKNNPVLIGEPGVGKTAIVEGLARRIVAGDVPEGLKGKKLLALDLGALVAGAKFRGEFEERLKTVIHDVQAEDGKIILFIDELHTLVGAGAAEGATDASNLLKPALARGELRCIGATTLDEYRKHIEKDAALERRFQQVYTAEPSVEDTIAILRGLKERYEVHHGVRIKDEALVAAATLSSRYITSRFLPDKAIDLVDEAASRLKMELDSRPTELDKLERKLLQLSIERQALSREEDTASKDRLTKLEKEIAELTAERNAMNTRWENEKIDIQKIREIKQRIEELKIDETRYEREGNLSKAAEVKHGKIPEAQKQLAALTDQMEKKRENAKGGEASALLREEVSEEDIAGVVSTWTGIPVSKMLSGELQKYLDLEKALEKRVVGQDEALAAVADAIRRNKSGLSDAARPLGSFLFLGPTGVGKTELAKTLADFLFNDEKALTRIDMSEYGEKHSVSRLIGAPPGYVGYEQGGQLTEAVRRRPYSVILFDEIEKGHPEVFNVFLQILDDGRLTDGQGRVVDFKNVIIIMTSNLGSDLILEAKNPESLRESLMELLKHSFRPEFINRIDETVIFNRLGKGEIGKIVDIQLMRLSKRLAERKITLVLTDAAKSLLAERGYDPMFGARPLKRTIQSDLENPLAKQIIAGTVREGDTVTADIAPNKEGIVFKKK

SEQ ID NO: 64961 - DNA, 312 bp, Unknown
  Obtained from environmental sample
  misc_feature (1)..(312): n is a, c, g, or t
ttgcaaaaacacattaaacacttcggggtgacctttttcaatttcgtcaaaaagaattacgctgtagggacggcgtctgaccgcctctgtaagctgaccgccctgctcataacccacatagccgggcggcgcgccgataaggcggcttaccgaatgtttttctccgtattcgctcatgtcaattctggtgagagctttttcgtcattgaacaaaaaatccgcaagtgttttggcgagttccgtttttcccacacccgtcggtcccaagaagaggaaagaccccagcgggcgcgccgcgtcggagagacctga

SEQ ID NO: 64962 - protein, 103 aa, Unknown
  Obtained from environmental sample
  misc_feature (1)..(103): Xaa is any amino acid
MQKHIKHFGVTFFNFVKKNYAVGTASDRLCKLTALLITHIAGRRADKAAYRMFFSVFAHVNSGESFFVIEQKIRKCFGEFRFSHTRRSQEEERPQRARRVGET

SEQ ID NO: 64963 - DNA, 363 bp, Unknown
  Obtained from environmental sample
  misc_feature (1)..(363): n is a, c, g, or t
atgttaaaggataaatacactgttcttccaaccaaatcggaaaaagaagcgctggattatttacttcattttagtaatgttgatttaattttattggacttgataatgcctgaaatggacggctgggaaacattcagccgaataagagatttaggcaatataacagatgtcccaatagcgtttgtaacatctgttcatggaaaagaagaacaagatcgcgccaaagaaatgggagcggctgattatatttttaaaccattttcaagagaagaattaataaaaagaatagacatcatgtttaaaaaacctcacgaaaaaaaagcattcaccgctttgaaactagataatcttactgatatctga

SEQ ID NO: 64964 - protein, 120 aa, Unknown
  Obtained from environmental sample
  DOMAIN (1)...(97): Response regulator receiver domain
  misc_feature (1)..(120): Xaa is any amino acid
MLKDKYTVLPTKSEKEALDYLLHFSNVDLILLDLIMPEMDGWETFSRIRDLGNITDVPIAFVTSVHGKEEQDRAKEMGAADYIFKPFSREELIKRIDIMFKKPHEKKAFTALKLDNLTDI

SEQ ID NO: 64965 - DNA, 1929 bp, Unknown
  Obtained from environmental sample
  misc_feature (1)..(1929): n is a, c, g, or t
gtgaaataccagaatttagagctcgacccgttccaaatggccgcggtcgaggccatcgacaaaggcgagtcgctcatcgtcgccgcccccacgggatgcggcaagacgctcatcgccgagtatgcggtcgaggagtccgtgaagcagggcaagcgcgccgtctacaccgcgcccatcaaggcgctgtcgaaccagaagtaccgcgacttcaggaagcgcttcggcgacgaggccgtgggcatccagactggcgacgtcacgatcaaccaggacgcgcagctcctcataatgaccaccgagatattccgcaacctcattctcgaaaactccgggcggctgaacgacatctactacgtgatattcgacgagatccactacttggacgacccggagcgcggcacggtgtgggaggagagcatcattctcgccccgcaaggcatacgcttcatgtgcctgagcgccacggtccccaacatcggcgaactggccacatggatgggtgcggtgcggaatacgacttttagggtgatcgaagagacgcataggcctgttccgctggagcactcattctatcacccaaagttcgggttcatctccataaaggggatacggcgcaagttcaagagcaatcctgaggtgcgcaagcggtttcaacggcgtaagccgtcgtcgcgaaagatagtgcagttcgcgatacgcgaggggcacctgcccatactctacttctgcttcaaccgccgcgcctgcgagcgcaacgccgagcagcacatgatgcatttagatttgctgacagacgcggaacgcgtccgcgtgtcgcaacttgttgacgagttggtgcatcaatacggcataggcgactacgagcgcctgaactttttgcggcagctctgggagtccggctgcgcctaccaccacgccggaatacttcccgccgcgaaggagattgtggagcgtctctttacaatggggttgataaagctgttattttgcacggagactttcgcgctgggtgtcaacatgcctgccagttcggtgattttcgacgagcttgaaaagttcgacggcgttcagttcaattatttgatgacccgcgagtacaatcagatggcgggccgcgccggacggcgaggtatggacgaggtcggctacgtctactcgcaggtgatcccggaggcgaccgaccccgatcagttggagcgcatactctacggcacgaacgagcgcatcaacagccgtttttacgcttcgtattcgacaatcctctccctctatagccaattcggcgacggcgcgttcgatatctttcgcaagagcctccacaacttccgcaaaggcgtcttttccatgtctaagatatatcaaaaagaggaggcgcagataagaaataggataaagttcctccaatcgagcggtttcttggacggtacgaagctgacgccgaaaggccagctggcggcggcggtgagcggttacgagatccagaccgccgaactttactattgcagggatttcgaggacgtctcggcggcgcagctgccggtgttgcttgccgcgctgatcaccgaggaggcgcgcagccgcaaggttccgccgatcacaaacgtcgccctgaaatttgacgctcagaagacgatacacaaactgcgccagaaagagataaagtacaatatcgccaaccctataagagagatggatttctcaatggccgccccggtattcgcgtgggcgagcggttgcgaccttaaacagttggccggattcggagtgccggaaggggatttgatacgtatactgcggatgacgatccagttattgcgtacgctgcgggatagaattgtcgacccggagataagcgacaagatgcacaacgcgcttgaattggtcaatagagacgtagtggacgctcagaatgaattgaatgtgggataa

SEQ ID NO: 64966 - protein, 642 aa, Unknown
  Obtained from environmental sample
  DOMAIN (5)...(158): Type III restriction enzyme, res subunit
  misc_feature (1)..(642): Xaa is any amino acid
MKYQNLELDPFQMAAVEAIDKGESLIVAAPTGCGKTLIAEYAVEESVKQGKRAVYTAPIKALSNQKYRDFRKRFGDEAVGIQTGDVTINQDAQLLIMTTEIFRNLILENSGRLNDIYYVIFDEIHYLDDPERGTVWEESIILAPQGIRFMCLSATVPNIGELATWMGAVRNTTFRVIEETHRPVPLEHSFYHPKFGFISIKGIRRKFKSNPEVRKRFQRRKPSSRKIVQFAIREGHLPILYFCFNRRACERNAEQHMMHLDLLTDAERVRVSQLVDELVHQYGIGDYERLNFLRQLWESGCAYHHAGILPAAKEIVERLFTMGLIKLLFCTETFALGVNMPASSVIFDELEKFDGVQFNYLMTREYNQMAGRAGRRGMDEVGYVYSQVIPEATDPDQLERILYGTNERINSRFYASYSTILSLYSQFGDGAFDIFRKSLHNFRKGVFSMSKIYQKEEAQIRNRIKFLQSSGFLDGTKLTPKGQLAAAVSGYEIQTAELYYCRDFEDVSAAQLPVLLAALITEEARSRKVPPITNVALKFDAQKTIHKLRQKEIKYNIANPIREMDFSMAAPVFAWASGCDLKQLAGFGVPEGDLIRILRMTIQLLRTLRDRIVDPEISDKMHNALELVNRDVVDAQNELNVG

SEQ ID NO: 64967 - DNA, 1077 bp, Unknown
  Obtained from environmental sample
  misc_feature (1)..(1077): n is a, c, g, or t
gtggcaaagggcaggagcggcgaactgtttagacggatgaatgatacggccgtggcggacggtaaaaatgttaatacaaatataaacgatataaccgacgcatccgttaatacggcggcaggctcgccttgggacggcgctttcgcgtcatatcggaaatcgggtcttgtatcatggccggacgaggacttggacaagccgcttgacatcggttcgaacaagggcgggttcgcggttcgcgggtatccggcgttgataccctgcggcgggattattgacggcggtatcaatacagataacgacaactgtgtcgatttggtcctcttcccgtcaaaaattaaaagcgacatcgcccaccgctacggagtccgcaagttactggaaataactttaatgaaagaactggcgtggaccgaacgcgacatctctttctccaaagaggtgaaggtgatgtgcgccccgttcgcgtcaggagacgagttcgcggcgaggttatacgatatgatatgcgaatccgttctcgatttcgacgacgcgccgagaagcaaagaggggttcgatcagttaataataaaggtcaaagaatcgttaagaggaataggcttccgcatgttatccgtatttgaggagtcactacgcgtatttaccgacaataccgcccgcctatcgtcggcgaaaaagaaattgccggcggacatccacaaagagctggcgaaggcgctaaacggattttttaccgatattttggacgggcggacaacgctcgaaatcttttcccaatacccgcgctacctgaaagtcttcgcggcaatcatcgaaaaagcttctctcgaaccgttcaaataccgccaaaagcgcgccgaggtcaatctgtacgtatcaatttataacgatttatccaaaaaaagcgtaatgcttgaaaacgcccatcgccgtaagcgaatgttgagtgagttggcgttaatggtaagggagtttgagatcaaccaattcgcgcaacacgttaagacgctgtttccggtgtctgaacagcggcttgataagaaagccggggagataaagaaactttgttcgtga

SEQ ID NO: 64968 - protein, 358 aa, Unknown
  Obtained from environmental sample
  misc_feature (1)..(358): Xaa is any amino acid
MAKGRSGELFRRMNDTAVADGKNVNTNINDITDASVNTAAGSPWDGAFASYRKSGLVSWPDEDLDKPLDIGSNKGGFAVRGYPALIPCGGIIDGGINTDNDNCVDLVLFPSKIKSDIAHRYGVRKLLEITLMKELAWTERDISFSKEVKVMCAPFASGDEFAARLYDMICESVLDFDDAPRSKEGFDQLIIKVKESLRGIGFRMLSVFEESLRVFTDNTARLSSAKKKLPADIHKELAKALNGFFTDILDGRTTLEIFSQYPRYLKVFAAIIEKASLEPFKYRQKRAEVNLYVSIYNDLSKKSVMLENAHRRKRMLSELALMVREFEINQFAQHVKTLFPVSEQRLDKKAGEIKKLCS

SEQ ID NO: 64969 - DNA, 2184 bp, Unknown
  Obtained from environmental sample
  misc_feature (1)..(2184): n is a, c, g, or t
gtggcgggaacggaaatcacgcttacggcgacggcaaacagcgggtatcggttcaagtcgtgggaagtgagcgttggcggcgtaacgataactaacaacaagtttaccatgccgtcaagcgctgtaacggtgaaagctgtctttgagttgataccgataccgacctactccatcactgtccaaaacgacggtcacggtacggcgagcgccaatgtaacgtccgctgtggcgggaacggaaataacacttgccgctactccgtcagcagggtataaattcgatagttgggaagtaatcagcggaggggtcacgttaactaacaacaagtttacgatgcccgccggtaatgtaacggtgaaggctatatttgagttgataccgataccgacctattccatcactgtccaaaacgacggccacggcacggcaaacgcaaatgtcacgtccgcgacggcgggaacggaaataactcttgccgttactccgtctgcagggtataaattcgatagttgggaagtaatcagcggaggggtcacgttaactaacaacaagtttacgatgcccgccggtaatgtaacggtgaaggcggtttttgagttgataccgataccgacctattccatcactgtccaaaacgacggccacggcacggcaagcgccaatgtaacgtccgctgttgcgggaactgaaatcacgcttacggcatcgccgagcagcgggtatcagtttaaagagtggcaggtagtaagcggcggagtaacggtagcgagcaacaagtttaccatgccgtcaagcgctgtaacggtgaaggcggtttttgagtctataccgtacacgcctccggtaaccccgccccgtacgcctccggtgacgccgcccccggtgacgccgcctccggtaaccccaccgccggtaacgccgcatccggtaacgccgccgccgaccgcgtacacggtatattttgacgcctccggcggtacggtggccaccgcgtccgccacaacgagcactagcggcaggctctcctctttgcccacgcctgcggcgagggtgggatacacatttgccggttggtatttgggcgataccaaggtatccacgagtacggtgttcagcggagatgccgtcatatatgccaattggacgccggtatcctacacgatatcttacaatttgaacggcggaaccttggattatcccaatcccacccgttacacgattgagaccgcgggctttatgctgaataatccgaccaagaacacctacgcgttcgacggttggacgggttccaacggttcggtcaagcagacgggtgtggcggttgatttcgggacttcgggggggagcaggagttataccgcgaactggacgcttcttatttcccacactattacatttgatcccaacggcggcgcggtctctgccgcgtccggtaagacggcggggggcgagaggttgacgtccttgcccacgcctgcaaagagcggttacgcgtttgaggggtggtacacggaagcgtctggcggcacaaaggtgtctacgagtacggtgttcaatggagacgccgttgtttacgctcattggtcgcttgcctacgttataacatttgacgccgacagcggcgcggtggatgtcgcggccgcccagacggtgtcgggcgggaagttggcgtctttgccggtgcctacaaagagcggttatgattttgaggggtggtatacggcggcgtcgggcggtacggaggtaacgacgagtacggtatttagcgcgagcgctgtcatttacgcgcgttggacgccaagcgtcggcatagcaggcggcgaccgtgtaataccgggcggtgtcggcggcggcgcggcggttgtggcgccggtaaaagtgttgacggttgagctttctgcggggcctagccctgtcgataggcgttcaggcgcggtgtcgttcttccgtgacggcgcggcgattgaggacgcgacgttgtatgtatatgacgcgtcgggcaatttggtgagaaagataaacattcacgacaaggcgtccggtgtaaggcgtgctgtgggcgcgtgggatttgcgcgcggccaacggccgtttggtctccgagggcgcgtatgtggtcaggggcgccataggcgttcacggcggcaaaaaagagcttgtgtcgctgatgttgagcgttagatag

SEQ ID NO: 64970 - protein, 727 aa, Unknown
  Obtained from environmental sample
  misc_feature (1)..(727): Xaa is any amino acid
MAGTEITLTATANSGYRFKSWEVSVGGVTITNNKFTMPSSAVTVKAVFELIPIPTYSITVQNDGHGTASANVTSAVAGTEITLAATPSAGYKFDSWEVISGGVTLTNNKFTMPAGNVTVKAIFELIPIPTYSITVQNDGHGTANANVTSATAGTEITLAVTPSAGYKFDSWEVISGGVTLTNNKFTMPAGNVTVKAVFELIPIPTYSITVQNDGHGTASANVTSAVAGTEITLTASPSSGYQFKEWQVVSGGVTVASNKFTMPSSAVTVKAVFESIPYTPPVTPPRTPPVTPPPVTPPPVTPPPVTPHPVTPPPTAYTVYFDASGGTVATASATTSTSGRLSSLPTPAARVGYTFAGWYLGDTKVSTSTVFSGDAVIYANWTPVSYTISYNLNGGTLDYPNPTRYTIETAGFMLNNPTKNTYAFDGWTGSNGSVKQTGVAVDFGTSGGSRSYTANWTLLISHTITFDPNGGAVSAASGKTAGGERLTSLPTPAKSGYAFEGWYTEASGGTKVSTSTVFNGDAVVYAHWSLAYVITFDADSGAVDVAAAQTVSGGKLASLPVPTKSGYDFEGWYTAASGGTEVTTSTVFSASAVIYARWTPSVGIAGGDRVIPGGVGGGAAVVAPVKVLTVELSAGPSPVDRRSGAVSFFRDGAAIEDATLYVYDASGNLVRKINIHDKASGVRRAVGAWDLRAANGRLVSEGAYVVRGAIGVHGGKKELVSLMLSVR

SEQ ID NO: 64971 - DNA, 792 bp, Unknown
  Obtained from environmental sample
  misc_feature (1)..(792): n is a, c, g, or t
atgagcgtaaacaacggcgtctccattgaacaccgtactcgtagacacctttgtgccgccagacgcttccgtgtaccacccctcaaacgcgtaaccgctctttgcaggcgtgggcaaggacgtcaacctctcgccccccgccgtcttaccggacgcggcagagaccgcgccgccgttgggatcaaatgtaatagtgtgggaaataagaagcgtccagttcgcggtataactcctgctcccccccgaagtcccgaaatcaaccgccacacccgtctgcttgaccgaaccgttggaacccgtccaaccgtcgaacgcgtaggtgttcttggtcggattattcagcataaagcccgcggtctcaatcgtgtaacgggtgggattgggataatccaaggttccgccgttcaaattgtaagatatcgtgtaggataccggcgtccaattggcatatatgacggcatctccgctgaacaccgtactcgtggataccttggtatcgcccaaataccaaccggcaaatgtgtatcccaccctcgccgcaggcgtgggcaaagaggagagcctgccgctagtgctcgttgtggcggacgcggtggccaccgtaccgccggaggcgtcaaaatataccgtgtacgcggtcggcggcggcgttaccggatgcggcgttaccggcggtggggttaccggaggcggcgtcaccgggggcggcgtcaccggaggcgtacggggcggggttaccggaggcgtgtacggtatagactcaaaaaccgccttcaccgttacagcgcttga

SEQ ID NO: 64972 - protein, 263 aa, Unknown
  Obtained from environmental sample
  misc_feature (1)..(263): Xaa is any amino acid
MSVNNGVSIEHRTRRHLCAARRFRVPPLKRVTALCRRGQGRQPLAPRRLTGRGRDRAAVGIKCNSVGNKKRPVRGITPAPPRSPEINRHTRLLDRTVGTRPTVERVGVLGRIIQHKARGLNRVTGGIGIIQGSAVQIVRYRVGYRRPIGIYDGISAEHRTRGYLGIAQIPTGKCVSHPRRRRGQRGEPAASARCGGRGGHRTAGGVKIYRVRGRRRRYRMRRYRRWGYRRRRHRGRRHRRRTGRGYRRRVRYRLKNRLHRYSA

SEQ ID NO: 64973 - DNA, 423 bp, Unknown
  Obtained from environmental sample
  misc_feature (1)..(423): n is a, c, g, or t
ttggcggcaaaccccgcgtatcgcacgagccatcgaaggagtaccccaacaccggcttcaccgcgtcgtccgcggcaattatcgcaaaaccgccgtcaacgccaaagtcaaaaacgtaaaacagcgtatcctccgcgcccgcccccgcgcggccaagagcgccgaccgccggcgctccgcgacgacctgcctccacatgcttcaggcggacatccgccgcggacgcctttccacgcgaaaactcagccacacgccgcgccaacccacgcgccgtctcaggatccaccctctccgcccgcaccgcaaagggcgcggcgagaaacgccgcgcacaccgccgccgataccaaccttaacgccttgcccatataaaccatacccgctttcgggaattttcttatttacgcccccgcgcgctatctaa

SEQ ID NO: 64974 - protein, 140 aa, Unknown
  Obtained from environmental sample
  misc_feature (1)..(140): Xaa is any amino acid
MAANPAYRTSHRRSTPTPASPRRPRQLSQNRRQRQSQKRKTAYPPRPPPRGQERRPPALRDDLPPHASGGHPPRTPFHAKTQPHAAPTHAPSQDPPSPPAPQRARRETPRTPPPIPTLTPCPYKPYPLSGIFLFTPPRAI

SEQ ID NO: 64975 - DNA, 1602 bp, Unknown
  Obtained from environmental sample
  misc_feature (1)..(1602): n is a, c, g, or t
ttgcgcggctataacgcggaaagcgcttctacgcccgcgcccggcggcggcgcgtccggggccggcgcgcccgggggcgcggtcgaagaagcccccgccgcgccgggaacggatcagggaacggggaacggggaacagggaacggggaacagggaacggggaacggggaacaaggaacggggaacaggggacagagaacccgccgcagataaaggcccacgccgtgtttctattgattcccccgccggctccataatatgccttgtgggaccgcccggcgtgggaaaaacatcggtcggcagatccatagcccgcgcccttggcaagcagttcttccgtttttcagtcggcggtatgcgtgacgaggccgagataaaagggcatcgccgcacctatatcggcgccatgccgggcaagatcatacaggggcttaaaatagttaaaacaaaggctccggtgtttatgatcgacgagattgacaaaatgggggcaagttaccagggcgatcccgccagcgcccttctggaagtgctggatcccgagcagaatgtcgagttcagggatcattatctggatatgccttttgacatttcccatatcttctttattgtcaccgcgaacacgctggacacgataccccctccgcttttggaccgcatggagataatacagcttcccggctatatcgacacggagaagctggaaatcgcccgcaggtaccttgtccccaaaagccttgagaaaaacggcctgaaaagaaaccaggtcaagtacaccaaggacagccttttgcatatcgccaactcttacgcccgcgaagccggcgtcaggaattttgaaaaaaaccttgacaagattcaccgcaagctggcgaagcagatagtcgaggagagggagaaatcgtccgcggacggcgccgcctccgcggacggcgccgcctccgcggacggcgccgaaaatgccgcaaagcacgtcatgttcccgatagacaaaaagctgattgaaaaacatttaggcaagcctattttcccggaaggcgacataaaaaaggcggacaggccgggaatgtccgtcgggctcgcctggacaagcatgggcggcgacactctggtaatcgaggcggcctcggttccgggcaaggaagggcttaccctcaccggcaaaatgggcgacacgatgaaggaaagcgccgctatcgccatgaccgttgcgcggaagatggccattgaacgctaccatgtcgcgcaggactggtttgatttcaaccatatacacctgcacattcccgaaggcgcgacgccgaaagacggcccctcggctgggataacaatggccacggccctgctttcgcttatgcgggagaaggttgtcaccgagcggctggtaatgacgggcgagctgtctctgacaggccaggtgcttcccatcggcggcctgaaggaaaaaacagtcgccgcgaggcgcaacaaagcccgccacatcattatcccgcgccagaacgagcgcgatcttgacgagattcccgaccatgtgaagaaaggcatcagcttccaccccgtggaacggtttgaagaagtgctggcgcttgccttacccgaataa

SEQ ID NO: 64976 - protein, 533 aa, Unknown
  Obtained from environmental sample
  DOMAIN (86)...(222): ATPase family associated with various cellular activities (AAA)
  misc_feature (1)..(533): Xaa is any amino acid
MRGYNAESASTPAPGGGASGAGAPGGAVEEAPAAPGTDQGTGNGEQGTGNRERGTGNKERGTGDREPAADKGPRRVSIDSPAGSIICLVGPPGVGKTSVGRSIARALGKQFFRFSVGGMRDEAEIKGHRRTYIGAMPGKIIQGLKIVKTKAPVFMIDEIDKMGASYQGDPASALLEVLDPEQNVEFRDHYLDMPFDISHIFFIVTANTLDTIPPPLLDRMEIIQLPGYIDTEKLEIARRYLVPKSLEKNGLKRNQVKYTKDSLLHIANSYAREAGVRNFEKNLDKIHRKLAKQIVEEREKSSADGAASADGAASADGAENAAKHVMFPIDKKLIEKHLGKPIFPEGDIKKADRPGMSVGLAWTSMGGDTLVIEAASVPGKEGLTLTGKMGDTMKESAAIAMTVARKMAIERYHVAQDWFDFNHIHLHIPEGATPKDGPSAGITMATALLSLMREKVVTERLVMTGELSLTGQVLPIGGLKEKTVAARRNKARHIIIPRQNERDLDEIPDHVKKGISFHPVERFEEVLALALPE

SEQ ID NO: 64977 - DNA, 669 bp, Unknown
  Obtained from environmental sample
  misc_feature (1)..(669): n is a, c, g, or t
atgtttttcaatcagctttttgtctatcgggaacatgacgtgctttgcggcattttcggcgccgtccgcggaggcggcgccgtccgcggaggcggcgccgtccgcggacgatttctccctctcctcgactatctgcttcgccagcttgcggtgaatcttgtcaaggtttttttcaaaattcctgacgccggcttcgcgggcgtaagagttggcgatatgcaaaaggctgtccttggtgtacttgacctggtttcttttcaggccgtttttctcaaggcttttggggacaaggtacctgcgggcgatttccagcttctccgtgtcgatatagccgggaagctgtattatctccatgcggtccaaaagcggagggggtatcgtgtccagcgtgttcgcggtgacaataaagaagatatgggaaatgtcaaaaggcatatccagataatgatccctgaactcgacattctgctcgggatccagcacttccagaagggcgctggcgggatcgccctggtaacttgcccccattttgtcaatctcgtcgatcataaacaccggagcctttgttttaactattttaagcccctgtatgatcttgcccggcatggcgccgatataggtgcggcgatgcccttttatctcggcctcgtcacgcataccgccgactga

SEQ ID NO: 64978 - protein, 222 aa, Unknown
  Obtained from environmental sample
  misc_feature (1)..(222): Xaa is any amino acid
MFFNQLFVYREHDVLCGIFGAVRGGGAVRGGGAVRGRFLPLLDYLLRQLAVNLVKVFFKIPDAGFAGVRVGDMQKAVLGVLDLVSFQAVFLKAFGDKVPAGDFQLLRVDIAGKLYYLHAVQKRRGYRVQRVRGDNKEDMGNVKRHIQIMIPELDILLGIQHFQKGAGGIALVTCPHFVNLVDHKHRSLCFNYFKPLYDLARHGADIGAAMPFYLGLVTHTAD

SEQ ID NO: 64979 - DNA, 543 bp, Unknown
  Obtained from environmental sample
  misc_feature (1)..(543): n is a, c, g, or t
gtggaagctgatgcctttcttcacatggtcgggaatctcgtcaagatcgcgctcgttctggcgcgggataatgatgtggcgggctttgttgcgcctcgcggcgactgttttttccttcaggccgccgatgggaagcacctggcctgtcagagacagctcgcccgtcattaccagccgctcggtgacaaccttctcccgcataagcgaaagcagggccgtggccattgttatcccagccgaggggccgtctttcggcgtcgcgccttcgggaatgtgcaggtgtatatggttgaaatcaaaccagtcctgcgcgacatggtagcgttcaatggccatcttccgcgcaacggtcatggcgatagcggcgctttccttcatcgtgtcgcccattttgccggtgagggtaagcccttccttgcccggaaccgaggccgcctcgattaccagagtgtcgccgcccatgcttgtccaggcgagcccgacggacattcccggcctgtccgccttttttatgtcgccttccgggaaaataggcttgcctaa

SEQ ID NO: 64980 - protein, 180 aa, Unknown
  Obtained from environmental sample
  misc_feature (1)..(180): Xaa is any amino acid
MEADAFLHMVGNLVKIALVLARDNDVAGFVAPRGDCFFLQAADGKHLACQRQLARHYQPLGDNLLPHKRKQGRGHCYPSRGAVFRRRAFGNVQVYMVEIKPVLRDMVAFNGHLPRNGHGDSGAFLHRVAHFAGEGKPFLARNRGRLDYQSVAAHACPGEPDGHSRPVRLFYVAFRENRLA

SEQ ID NO: 64981 - DNA, 384 bp, Unknown
  Obtained from environmental sample
  misc_feature (1)..(384): n is a, c, g, or t
gtgaggtcttcttcttattcgggtaaggcaagcgccagcacttcttcaaaccgttccacggggtggaagctgatgcctttcttcacatggtcgggaatctcgtcaagatcgcgctcgttctggcgcgggataatgatgtggcgggctttgttgcgcctcgcggcgactgttttttccttcaggccgccgatgggaagcacctggcctgtcagagacagctcgcccgtcattaccagccgctcggtgacaaccttctcccgcataagcgaaagcagggccgtggccattgttatcccagccgaggggccgtctttcggcgtcgcgccttcgggaatgtgcaggtgtatatggttgaaatcaaaccagtcctgcgcgacatggtag

SEQ ID NO: 64982 - protein, 127 aa, Unknown
  Obtained from environmental sample
  misc_feature (1)..(127): Xaa is any amino acid
MRSSSYSGKASASTSSNRSTGWKLMPFFTWSGISSRSRSFWRGIMMWRALLRLAATVFSFRPPMGSTWPVRDSSPVITSRSVTTFSRISESRAVAIVIPAEGPSFGVAPSGMCRCIWLKSNQSCATW

SEQ ID NO: 64983 - DNA, 456 bp, Unknown
  Obtained from environmental sample
  misc_feature (1)..(456): n is a, c, g, or t
atgatactgaacaacgattacagagacatattacacgccttgtcagaaagaaaagttaaattcattctggtaggcgcttatgcaatggcggctcatggatacccgcgttcaacaatggatatagatctatggatcatgccggagtatgaaaatgccggtctggttctccaagcccttgaggattttggagcgcccatcggctatctgtctcaggatgatttacaaaacgaagacattgttttccagattggcgtcgccccacggcggattgacattctaacctctgttgacgggctaaagtttaaggatgccttttcacattcagaaatagccgatattgacggtatccccgttcatatcatgtcgattcccgatttaattttaaacaaacgttctaccggaaggctcaaggatttagctgacgcggaaattctggaaaattctaatacgctgtaa

SEQ ID NO: 64984 - protein, 151 aa, Unknown
  Obtained from environmental sample
  misc_feature (1)..(151): Xaa is any amino acid
MILNNDYRDILHALSERKVKFILVGAYAMAAHGYPRSTMDIDLWIMPEYENAGLVLQALEDFGAPIGYLSQDDLQNEDIVFQIGVAPRRIDILTSVDGLKFKDAFSHSEIADIDGIPVHIMSIPDLILNKRSTGRLKDLADAEILENSNTL

SEQ ID NO: 64985 - DNA, 312 bp, Unknown
  Obtained from environmental sample
  misc_feature (1)..(312): n is a, c, g, or t
atgcagaacaatcgtaccgaacgtctgggcggcctgattcaggaacttatcagcggtcttattcttgaaagcagaatcaaagacccaagaatctcacagtttgtctcaataacaagggtaaatgttacgcgtgatctttcatacgccgacgtgtatgtctccaacatccgtgaaacggcgaaccttgaacgcaacgcgcagggttgcaaagcgccgccgttttatccaggcacagctaaacgccgccttaaaaatacggaaaatcccccatctgcgcttccatgccgataccagcattcgggaaggttttga

SEQ ID NO: 64986 - protein, 103 aa, Unknown
  Obtained from environmental sample
  DOMAIN (5)...(83): Ribosome-binding factor A
  misc_feature (1)..(103): Xaa is any amino acid
MQNNRTERLGGLIQELISGLILESRIKDPRISQFVSITRVNVTRDLSYADVYVSNIRETANLERNAQGCKAPPFYPGTAKRRLKNTENPPSALPCRYQHSGRF

SEQ ID NO: 64987 - DNA, 1461 bp, Unknown
  Obtained from environmental sample
  misc_feature (1)..(1461): n is a, c, g, or t
gtgtcgggcgagttcggcggaataactcagcacatcggcgcgtacatggtagaaactccgcacggcaggatcaccttccttgacacgcccggccacgaggcgttcacgcgcatgagggcgcggggcgcccaggtaacggacattgttattcttgttgtcgccgcggatgacggggtaatgccccagactattgaggcgattaaccacgcgaaggaagccgaggttccgataattgtcgctgtcaacaaaatcgacaagccggaggcaaaccccgaccgcgtaaagagccagctttccgagcttggccttatgcccgaggaatggggcggtcagactatgtttgtcgagctttctgccctgcaaaaaaccggaatagacaaactcattgacgccatactccttgagtcggagcttcttgatctcaaggccaatttccaccggggcgccgagggaaagatccttgaatcgaggatcgatcacgggcgcggcattgtggcaaccgtcattgtgcaaagagggactatctccgtgggagactcttttgtcgccggcgtttggcccggaaaagtccgcgcgatcttcaatgaccgcggcgacaaactcaagcacgcgtctccctcaatgcccgttgaaatcctcggatttgagggaatccccaacgcangcgacccattgcaggctgttgatgacgagaaaatcgcccgcgagtattcgtcaaaacgccaggaactaaaacgcttcgaggacgccaagaacttcaagcaggtaacggccgagaccttgcgcgacaggataagcgacggcaccatacaggaactaaaagttatcatcaaggcggacgttcagggttcggcggaggctctcaagagcagccttgaaaaactttccaccaaggaaatccgtctgcatgttatacaggcccttcccgggccgattaacgaaggcgatgtcgatctcgcgattgcgtccaaggccatcattatcggctttaacgtgcggccccttcccaaggcaaagattttggcggagcaggaaaaagttgatatacgcaaatacaacatcatctacaaggcggttgaggaaatccatcaggcgatggagggcatgctaaaacccgataccaaagaggaagttatcgcctcggtagaggtgaggaataccttcaaggtaccaaaagttggtaccattgccggctgctttgtgcagagcggcgtagtcaagcgcagcgccagcgtcaatgtaatccgcgcggagatagtgatccactcgggcaaaatcgcctcgctgcggcgcttcaaggatgacgcccgcgaagtggcggccggttacgaatgcggcatagggctggagggttttgacgacatacaggtaggcgatcaatttgaggtgatcgagattgtagaggtcgcaaggaagttaagtccaaacagggagcagccaccagccgttagtcagggttga

SEQ ID NO: 64988 - protein, 486 aa, Unknown
  Obtained from environmental sample
  DOMAIN (163)...(226): Elongation factor Tu domain 2
  misc_feature (1)..(486): Xaa is any amino acid
MSGEFGGITQHIGAYMVETPHGRITFLDTPGHEAFTRMRARGAQVTDIVILVVAADDGVMPQTIEAINHAKEAEVPIIVAVNKIDKPEANPDRVKSQLSELGLMPEEWGGQTMFVELSALQKTGIDKLIDAILLESELLDLKANFHRGAEGKILESRIDHGRGIVATVIVQRGTISVGDSFVAGVWPGKVRAIFNDRGDKLKHASPSMPVEILGFEGIPNAXDPLQAVDDEKIAREYSSKRQELKRFEDAKNFKQVTAETLRDRISDGTIQELKVIIKADVQGSAEALKSSLEKLSTKEIRLHVIQALPGPINEGDVDLAIASKAIIIGFNVRPLPKAKILAEQEKVDIRKYNIIYKAVEEIHQAMEGMLKPDTKEEVIASVEVRNTFKVPKVGTIAGCFVQSGVVKRSASVNVIRAEIVIHSGKIASLRRFKDDAREVAAGYECGIGLEGFDDIQVGDQFEVIEIVEVARKLSPNREQPPAVSQG

SEQ ID NO: 64989 - DNA, 393 bp, Unknown
  Obtained from environmental sample
  misc_feature (1)..(393): n is a, c, g, or t
atggacagggctgtctcagtccctgaaacatggaagctggatcattgggcggtgaacacaggttccgcattgggcgcggcgggcgtaatccgtttacagcacaaagacggcgaatataaaaaattggtatgccttggcgacggtcccatcgactcgatctttaaagcgatcaacgagattgttggccaagagccggagcttgagctttatgaaatcggcgcggttacaggcggctcgtcatctcagggcgaagctatggtaaaaatcgcgatggacggacggcgctggaacgggcgcggcgtttccaccgacgtaattgaagcttcgataatggcttacctttccgcgattaacgcgatggagtgggacttggcgcagagtagggaagattag

SEQ ID NO: 64990 - protein, 130 aa, Unknown
  Obtained from environmental sample
  DOMAIN (1)...(121): LeuA allosteric (dimerisation) domain
  misc_feature (1)..(130): Xaa is any amino acid
MDRAVSVPETWKLDHWAVNTGSALGAAGVIRLQHKDGEYKKLVCLGDGPIDSIFKAINEIVGQEPELELYEIGAVTGGSSSQGEAMVKIAMDGRRWNGRGVSTDVIEASIMAYLSAINAMEWDLAQSRED

SEQ ID NO: 64991 - DNA, 1158 bp, Unknown
  Obtained from environmental sample
  misc_feature (1)..(1158): n is a, c, g, or t
atgaaattttcagttgcggtagtaccgggagacgggattggaccggaagtaattgcgccaaccatcgaagttctcgacgctgttggagacaagtacggtcatatttttaattatgtcgagcttgaggcgggcggtcttgccattgatcacacgggagagccgcttcccaaagaaacgcttgaagcggcgaagcagtgcgatgcccttcttttgggcgcggtcggcggtcccaagtgggacacgctacccggacatctgcgtcccgaaagagcgctgcttgggcttcgctcggggcttggcgttttcgccaatcttcgccccgccgctctgctccctcaattaaaatcggcttgtcccgttaaggacgaggtgcttatcgcaagcaacagcgaaggaaaagccgctttcgatttattaatcgtaagggaattgacaggcggtctttacttcggcaaacgaggacgaattgacgaaccttccaacggacacactcccggagcggcttttgataccgaaacatattcatggatggaaattgaaagagtactccgagcaggctacgaagcggcggcggtacggcggaaaaaactctgcgtagtggacaaagccaacgtacttgaatcatctcgtttttggcgtgaagtggcggcggtagtttcaaaggactatcccgacatagagacaagttatctctatgttgacaacgccgccatgcagttgatccgcgctcccggacaatttgacgtaatcgttacatcaaatctttttggagacatactttccgacgaagcgtccgtgcttacaggttcaatcggtatgctcgcctcggcgagtctcggcgctcctgtgcagggcggaacaagacccggaatgtacgagcctattcacggctctgcccccgacatcgcggggaaagacatcgcaaatccgctcgccacaattctctcggcggcaatgatgctccgctactccttcggtcttgataaagaagctgttgccattgaaacagcggtaaacaatgtgctggatcagggattgagaacaggagacatcgcaagcagaagtacggcaaacggcgcagcaaacagcggcggtgaaaaaattgtaggtactaaagcaatgggcgaagctgtgctcaaagcgttggagaaattatga

SEQ ID NO: 64992 - protein, 385 aa, Unknown
  Obtained from environmental sample
  DOMAIN (4)...(378): Isocitrate/isopropylmalate dehydrogenase
  misc_feature (1)..(385): Xaa is any amino acid
MKFSVAVVPGDGIGPEVIAPTIEVLDAVGDKYGHIFNYVELEAGGLAIDHTGEPLPKETLEAAKQCDALLLGAVGGPKWDTLPGHLRPERALLGLRSGLGVFANLRPAALLPQLKSACPVKDEVLIASNSEGKAAFDLLIVRELTGGLYFGKRGRIDEPSNGHTPGAAFDTETYSWMEIERVLRAGYEAAAVRRKKLCVVDKANVLESSRFWREVAAVVSKDYPDIETSYLYVDNAAMQLIRAPGQFDVIVTSNLFGDILSDEASVLTGSIGMLASASLGAPVQGGTRPGMYEPIHGSAPDIAGKDIANPLATILSAAMMLRYSFGLDKEAVAIETAVNNVLDQGLRTGDIASRSTANGAANSGGEKIVGTKAMGEAVLKALEKL

SEQ ID NO: 64993 - DNA, 1461 bp, Unknown
  Obtained from environmental sample
  misc_feature (1)..(1461): n is a, c, g, or t
atggaatttttccgtcttgccgaaagcctgaaacttgaacacgcgaaactctgcgccttcggatctaccagaaaaaagggagtcaaggcaggcgaggaccccggcctgctcagcctgcttgacgcgcagactcaggctgtagtgatcttcggcaagagctgggatttccatgtgacggaggtgttacgcgtaagtcacgaggaaaacctcgccatgattgcggaaacaattaagttccttaaagaaaaggagcggcaggttttttacgatgccgagcatttttttgacggctggaaggcaaaccccgaatatgcccttactacactgaagaccgcgatggaagcgggggcggaacgcataatactgtgcgacacaaacggcggcacatttcctgatgccatagagaaggccgttaaagaagccgcaaagattgtatgcgttaacggcgcgtcgcccagcgacgcgaattgccttctgggcatccacgcgcacaacgacgcggacatggcaagcgcgaacacgataaccgccgtccttgcgggctgccgccatgttcagggaacccttgtcggcttcggcgaacgctgcggcaacacaagcctggcggctgtcatgcccagccttgaactcaaactgggattccgctgccttgcggaaggaaaaatggaaaagctctccgaaataacccgcattatcgcggagacggccaatgtcgccgtgccgggtaacatgccttatgtgggaagccacgcctttacccacaaggcgggaatgcacgcggacggaattctaaaagtgagcaagtcctttgaacatatcgatccttcccttgtggggaatgatcggcatatagtaatgagcgaagtcggcggacgctcggcaatagcggagagggcgaaaaaaatcgatccttccattacgagggatcaccctgtaacagccgccctcgctcaaaaattaaaaactctcgaagcggacggctggcagtttgaaggcgcggacggcagttttgatcttatggttcgccgagaacttggtcggtacaagccgctgtttaagattgaggcttaccgtgtggtaagcgaacacccgacgggcgaaacaatcgcctgttcccatgcgtgggttaaagtccatgttgacggacaggaagaaatcgccgcaggcgaaggagacggacctgtcaacgcaatggacggcgcattgcgcagagcgttgaaacatttttaccctgaactgcaagaagttcgtcttaccgattacaaagtcagggtaatagacggcaacgccgcaacagccgcaaaggtgcgagtccttatcacttcttccgacggcaaacaaagctggacaacggttggagtttcggaggacataatcgacgcaagccgtgcggcgcttgtggattcaatagaatacaaattaattgatgacattgaacgacgctttaaggcgtatatgtag

SEQ ID NO: 64994 - protein, 486 aa, Unknown
  Obtained from environmental sample
  DOMAIN (1)...(238): HMGL-like
  misc_feature (1)..(486): Xaa is any amino acid
MEFFRLAESLKLEHAKLCAFGSTRKKGVKAGEDPGLLSLLDAQTQAVVIFGKSWDFHVTEVLRVSHEENLAMIAETIKFLKEKERQVFYDAEHFFDGWKANPEYALTTLKTAMEAGAERIILCDTNGGTFPDAIEKAVKEAAKIVCVNGASPSDANCLLGIHAHNDADMASANTITAVLAGCRHVQGTLVGFGERCGNTSLAAVMPSLELKLGFRCLAEGKMEKLSEITRIIAETANVAVPGNMPYVGSHAFTHKAGMHADGILKVSKSFEHIDPSLVGNDRHIVMSEVGGRSAIAERAKKIDPSITRDHPVTAALAQKLKTLEADGWQFEGADGSFDLMVRRELGRYKPLFKIEAYRVVSEHPTGETIACSHAWVKVHVDGQEEIAAGEGDGPVNAMDGALRRALKHFYPELQEVRLTDYKVRVIDGNAATAAKVRVLITSSDGKQSWTTVGVSEDIIDASRAALVDSIEYKLIDDIERRFKAYM

SEQ ID NO: 64995 - DNA, 876 bp, Unknown
  Obtained from environmental sample
  misc_feature (1)..(876): n is a, c, g, or t
atgaaaagcaaactaacaaaattcgcactctcggcagcctttgggcttgccttaacattcacattatcctgctctggcggagacgagggcggcggcacttcctctacaagcggcagtgacgaattgtcctcgtctagcgttggcggcggagataataacagcagcagttccgtaactggcgggggtgggggttctagttcgtctgccacaacaagcggcggcggttctagcagttccgtaactggtggcggtaattcaagctcgtctatcggtggcggtggtagttatactgagaaaggcaacaatatagcgaattacaaaaccaaacaaattgatagccaagtttggatgttggagaatttggactactatgtagagggcagctattgttacttttctctcgatacccaatgcgaaatattcggtcgcctttacacttgggcaatggcaatggaattatcccccgactgcaatagtagctcttgtgcttcgcaaatatcaccgaaacacaggggcatttgtcctagtggctggcatataccaagctatgacgaatggcaaacactaatagattttgctggcggttcgtctattgcagatggaaagttgaaagcaaattctatttggtgggataacaacacgggcacagacgattatgaattttcggctctccctggcggttaccgcagtcccagtgctaattttatgaatagaggtgtagctggcttttggtggtctgccacagattacgcagagtgggacggcgaagctgacaaagccctctccacacgtataggttacaattcccaaggagttgttagtcctccaaatgataaggtaaattggctttcagtccgttgcataaaagacgactaa

SEQ ID NO: 64996 - protein, 291 aa, Unknown
  Obtained from environmental sample
  SIGNAL (1)...(26)
  misc_feature (1)..(291): Xaa is any amino acid
MKSKLTKFALSAAFGLALTFTLSCSGGDEGGGTSSTSGSDELSSSSVGGGDNNSSSSVTGGGGGSSSSATTSGGGSSSSVTGGGNSSSSIGGGGSYTEKGNNIANYKTKQIDSQVWMLENLDYYVEGSYCYFSLDTQCEIFGRLYTWAMAMELSPDCNSSSCASQISPKHRGICPSGWHIPSYDEWQTLIDFAGGSSIADGKLKANSIWWDNNTGTDDYEFSALPGGYRSPSANFMNRGVAGFWWSATDYAEWDGEADKALSTRIGYNSQGVVSPPNDKVNWLSVRCIKDD

SEQ ID NO: 64997 - DNA, 492 bp, Unknown
  Obtained from environmental sample
  misc_feature (1)..(492): n is a, c, g, or t
atgttcaatgcctttccacacatagcatctatagatataggtagccatagcacaattattttgattgcaaaaaaggaagataatatagtccgggctttggtgcagaagattgaagtatgcagacttaacgaggataacttcggaaagctctgcgaaatattggctgatttcagaaggttggctcattcgcttggcgcggagataaaagccgtagctatgacagaggcggcacgaaaaatcaaaaatcaaaaagaattgttgcaggcggtggaaaaggccgtttgggtgaagcctcgcgtggtgagcggggaagaagaagcggagctttcttataaagcggtttcaaaaatttatgggcaaggggttttaactgttgatgttggcggaggttcaacggagctggcaaatggaaagaattttttgagtcttcctcgttggtgcgcttgcacttttaaacagatgggtgcatactgtcctgcgataaccaactaa

SEQ ID NO: 64998 - protein, 163 aa, Unknown
  Obtained from environmental sample
  misc_feature (1)..(163): Xaa is any amino acid
MFNAFPHIASIDIGSHSTIILIAKKEDNIVRALVQKIEVCRLNEDNFGKLCEILADFRRLAHSLGAEIKAVAMTEAARKIKNQKELLQAVEKAVWVKPRVVSGEEEAELSYKAVSKIYGQGVLTVDVGGGSTELANGKNFLSLPRWCACTFKQMGAYCPAITN

SEQ ID NO: 64999 - DNA, 753 bp, Unknown
  Obtained from environmental sample
  misc_feature (1)..(753): n is a, c, g, or t
atgcaaaaaatatttaaatatccatggttagttaccgctattatcgtagttattacaatattcttcggtcttcaactgcctaaggcggaattggaaaacaataaccttcgctttgtgccgccggatgatcccgctcttttaacatctaaatggattgacgaacagtttggaagctcgttttttattcttgtaggactccagcggcagtacggcactgtttttgacgcagactttattaaccgcataagcgattacgccgctgaggttgaagaaatacccattgtaaaaagcgttacttcattaatcaacgccgaatatattacttcaaaagacgattccattgtagtagaaaaacttttaaaaagcggttttacaggcgcgcaggaagaaatagcggaattaaaacgccgtcttttatcatgggatatgtacgagcgcgcgcttttttccgatgattttaccgcgactcaaattttaattccgttgtcgataaattcggaacaggcaagttctaagcaaacaaacgaatattttattaagatcagagacattgcgcacaaatattttgacagttacgcgacagtccatgtcacgggaatgcccgtaattatcgctacggtcaacgaggcgatgaacgccgacttaaaactgcttatccccgtagtaattcttgttgtactttttatactttttatctctttccgcgcgtttactccggttatactgcctcttatatcggtagtatatctgtaa

SEQ ID NO: 65000 - protein, 250 aa, Unknown
  Obtained from environmental sample
  DOMAIN (148)...(250): MMPL family
  misc_feature (1)..(250): Xaa is any amino acid
MQKIFKYPWLVTAIIVVITIFFGLQLPKAELENNNLRFVPPDDPALLTSKWIDEQFGSSFFILVGLQRQYGTVFDADFINRISDYAAEVEEIPIVKSVTSLINAEYITSKDDSIVVEKLLKSGFTGAQEEIAELKRRLLSWDMYERALFSDDFTATQILIPLSINSEQASSKQTNEYFIKIRDIAHKYFDSYATVHVTGMPVIIATVNEAMNADLKLLIPVVILVVLFILFISFRAFTPVILPLISVVYL

SEQ ID NO: 65001 - DNA, 1827 bp, Unknown
  Obtained from environmental sample
  misc_feature (1)..(1827): n is a, c, g, or t
atgaaaataatcgccggaaaaattaccgccgattcaggagaccgcgccgtacaaaaggacgcccgtatctcttatttgccgcaatcgggaatagtccatcaaggtaaaactctccgagatgaggttgagggcgcttttggttttgttcacgcgttacttgaaaaaatggaaaaaacaggggaacttcttgaaaaatcaaataacaatgattccgctactcaaacattgatagaagaacaccacaatttacaagagcgaattgaagaaacaggcttttacagacgcgagggcgaaattgcggcggttctttccggtcttggtttttccgtaaaagatattaaccgcaacacggaagaattttcgggcggctggcaaatgcgtatcgcgctcgcgaaagttcttttggaaaaaccggatattctgcttttggacgaaccgacaaattaccttgacatagaagcaagatcgtggcttgaaaattggcttaacgattttaagggcgggtatcttttagtttcgcatgacaggtattttcttgatacgtgcgtaaatgaggtttatgaactttataacggagagctaaaacgatacgccggaaattacagcgcgtatgaaaaaacacgcaaggtagagctcgcgacccttttaaaacgctacaatgaacagcaggaagaaattgaaaagacagaagcgcttatccgccgtttccgttacaaggcaagcaaagccgcttttgcgcaggaattgataaaacgtctcgaaaaaatggaacgcgtcgaaatacctgaatcctttaaaaaaattgacattagttttccgcctccgccgcattcgcctaacattgcccttacgctggaaggaatcggcaaaagttacgggaaacatcccgtcctgtccgcgcttgacttgtgccttgacgcagaggagcggctcgttgtcgcgggtccaaacggcgcgggcaagactaccctgctgcggataatcgcgggcgcggataatgattttacgggcaacgtaaagctcggaacgggaataaagacagggtacttttcacaggacgcggcggaggcgatggactccaatttatccatacttgaatttatggaagaagaagcgcctttttcccttgtaccgaaattacgcgatatgctcggcgcttttttattcaggggggacgacgtatacaagagcgtatcggtattaagcggaggagaaaaaagtcgtcttgccctgctaaaaatgtttttaaaaccgatgaacctgctcattcttgacgagccgacaaaccaccttgatctgtattcaaaagatattttactggacgctttaaaaaaaatctccggaactataatttttgtttcgcatgatcgcgcttttatggaagatctttctacaaagacgctggagcttatgcctggcagtgataacactcccgctaaagcaaaactattttacggcaattacgcgtattatctggattcaaaaacaaacgcggagtttaaagacagcgaacgtcaacaaacgtcaaaaacaaaaaattttatagatgataaaaatcagcataacatgaccaatattgaaaaaagagcgctggacaaacaagaacaggcaagaatccgcaggcttgaaagacaggaagcggaaattattaaaacgctggaagaacttgaaaaagaaaaaataaaacttgaggaagaacttgcccgccctgatgtttattcaaacggagagaaagcaagggctgtaaaaataaaacttgacgaatgtaccgcgaatatcgaagtaaaaacccgcgaatgggaagctgtttcagccgaacttcaatga

SEQ ID NO: 65002 - protein, 608 aa, Unknown
  Obtained from environmental sample
  DOMAIN (1)...(192): ABC transporter
  misc_feature (1)..(608): Xaa is any amino acid
MKIIAGKITADSGDRAVQKDARISYLPQSGIVHQGKTLRDEVEGAFGFVHALLEKMEKTGELLEKSNNNDSATQTLIEEHHNLQERIEETGFYRREGEIAAVLSGLGFSVKDINRNTEEFSGGWQMRIALAKVLLEKPDILLLDEPTNYLDIEARSWLENWLNDFKGGYLLVSHDRYFLDTCVNEVYELYNGELKRYAGNYSAYEKTRKVELATLLKRYNEQQEEIEKTEALIRRFRYKASKAAFAQELIKRLEKMERVEIPESFKKIDISFPPPPHSPNIALTLEGIGKSYGKHPVLSALDLCLDAEERLVVAGPNGAGKTTLLRIIAGADNDFTGNVKLGTGIKTGYFSQDAAEAMDSNLSILEFMEEEAPFSLVPKLRDMLGAFLFRGDDVYKSVSVLSGGEKSRLALLKMFLKPMNLLILDEPTNHLDLYSKDILLDALKKISGTIIFVSHDRAFMEDLSTKTLELMPGSDNTPAKAKLFYGNYAYYLDSKTNAEFKDSERQQTSKTKNFIDDKNQHNMTNIEKRALDKQEQARIRRLERQEAEIIKTLEELEKEKIKLEEELARPDVYSNGEKARAVKIKLDECTANIEVKTREWEAVSAELQ

SEQ ID NO: 65003 - DNA, 507 bp, Unknown
  Obtained from environmental sample
  misc_feature (1)..(507): n is a, c, g, or t
atgaccgaggtccttgccgaaataaacggcgcgggaaaatacgtgagccttgacctctctcccatgacaggcaatgtatttgatcttacatttcttcaaataaacggccaggaatatatcgtgtcgctgaagcttcccgacaccgccacaaacattgtcggctctggtagtggactttatgtggatcgcttttccagccttataaacgtatctataccgagcagcgttatcggtattgggataggcgctttttctggctgctccggcctttccgcaataaatgttgacgcggcaaacacagcatatagctcccaggacggagtgctttataacaaagacaaaaccgctttgcacacgtatcccccaggaaagccagtctcttcatttaccataccggacggcgttacctccattggggaagccgcttttttctactgcaccaaccttataagcgtaacaataccggacaaaaggaaaatgacacattttacccaattacagagttag

SEQ ID NO: 65004 - protein, 168 aa, Unknown
  Obtained from environmental sample
  misc_feature (1)..(168): Xaa is any amino acid
MTEVLAEINGAGKYVSLDLSPMTGNVFDLTFLQINGQEYIVSLKLPDTATNIVGSGSGLYVDRFSSLINVSIPSSVIGIGIGAFSGCSGLSAINVDAANTAYSSQDGVLYNKDKTALHTYPPGKPVSSFTIPDGVTSIGEAAFFYCTNLISVTIPDKRKMTHFTQLQS

SEQ ID NO: 65005 - DNA, 1050 bp, Unknown
  Obtained from environmental sample
  misc_feature (1)..(1050): n is a, c, g, or t
gtgcctaccttcggcgaatacgccgcgaactggtgggattgggaaaaatgcgagtacctgagaaaaaggcggaagcgggctaacctgacccaaagctactccgaccacatgaagcggaatttggacaaagtagtgctgccgtatttcaaaaacatgaaaatggacgcgattaccccagcggcgattgaagcgtttctggacagtcttataaaacaaaaatacaagaataccacgatcaacggctactacgggactttcaaaaccatgatgattgaagccgtcgagcgcggggttatagccacagaccctaccgccaaagtcgagcgcctgataaatgaccgcaatgaaataaagattatcactccccttgaattcaagaagttatttgtgacggattggcgcaaagtttgggaagacaatttcatcgcctgtaccgtgaacaggctggcggcactttcgggcatgagggtatcggagattttggggcttaaagggagctgcctgttcgacgaccacatctacgtctgtatgcagcatgacatatacggctacaggccgactaaaacaaaagacaggcataacataccgcttccggcttccctgattagcgatttgaagctgctgaaagaaacaagcggggacggctacctgttttccactaacggcgggggcagccctatttgccggaaaactgttttgatgtatctgcgaaaggctttgataaatatcgggattaccgccgccgaaattaaagcccggaacttgcatatccacgcatggaggcattttttcaatacggaaatgctgaagggcgggatgactaccgaacaggcgcaagcgataaccacgcataaaagcgaaaggatgacggaacgctacacgcattttgacccgcttgaatttgtaaaggcgaaagaaatacaagaagccttgttgcagcctgtcggcgataaaccgcaagtgctggaagcggaaaaaaaggaaatgccgctgaatgtgttttccttccctgtgtccggaactccgcaagatgaccggaaacaagcctag

SEQ ID NO: 65006 - protein, 349 aa, Unknown
  Obtained from environmental sample
  DOMAIN (130)...(303): Phage integrase family
  misc_feature (1)..(349): Xaa is any amino acid
MPTFGEYAANWWDWEKCEYLRKRRKRANLTQSYSDHMKRNLDKVVLPYFKNMKMDAITPAAIEAFLDSLIKQKYKNTTINGYYGTFKTMMIEAVERGVIATDPTAKVERLINDRNEIKIITPLEFKKLFVTDWRKVWEDNFIACTVNRLAALSGMRVSEILGLKGSCLFDDHIYVCMQHDIYGYRPTKTKDRHNIPLPASLISDLKLLKETSGDGYLFSTNGGGSPICRKTVLMYLRKALINIGITAAEIKARNLHIHAWRHFFNTEMLKGGMTTEQAQAITTHKSERMTERYTHFDPLEFVKAKEIQEALLQPVGDKPQVLEAEKKEMPLNVFSFPVSGTPQDDRKQA

SEQ ID NO: 65007 - DNA, 576 bp, Unknown
  Obtained from environmental sample
  misc_feature (1)..(576): n is a, c, g, or t
atgggcggggtgttgatgctgtccagggcggcggaactgcaaactgagataaaagggtggcttgaagcgttagggtttgaagatgttgcggttacgggcaaggaaaatgaggagcttaatacggctatctgcaacaagaagccccgtctggtcattattgacagttggttttatcaagatgggacgcccaataggattggcgaactggtgaagctgtttcctaagctgaatgtcgccgttgtttctttccatgacttcgatgcgagccgtgcaccgtggttcatctgggagggggcgaagtcataccttagcttgtgggaagggtatggggaatttcaacggggcttgcggattgtgcgggagggtgggcagtatatttcgccgaaggttcagcgcctgattgaccattgcggggaatggccggataccaaaaataaaatgaccaagcggcaaaaggaatgccttgtaatgctgtgctgcgggattatccctctccaaattgggaaaatactgaatatatccaaaagtacggttgacagacatctgaagattatacagagcctttcatgtcggtag

SEQ ID NO: 65008 - protein, 191 aa, Unknown
  Obtained from environmental sample
  misc_feature (1)..(191): Xaa is any amino acid
MGGVLMLSRAAELQTEIKGWLEALGFEDVAVTGKENEELNTAICNKKPRLVIIDSWFYQDGTPNRIGELVKLFPKLNVAVVSFHDFDASRAPWFIWEGAKSYLSLWEGYGEFQRGLRIVREGGQYISPKVQRLIDHCGEWPDTKNKMTKRQKECLVMLCCGIIPLQIGKILNISKSTVDRHLKIIQSLSCR

SEQ ID NO: 65009 - DNA, 447 bp, Unknown
  Obtained from environmental sample
  misc_feature (1)..(447): n is a, c, g, or t
atggaatataaggcgtttaaggagctctaccacaagaggtgggggatagagacaaagtataaaacggtgaaacagaagctggaattggaaaacttttctggaaggctggtagaaaacatcaagcaggacttttatgcgatgatgacggtatcgaatatgatagccagttgcaggcgggtggcagacctcaaagtaaagaaggatcgagaagggctagggaataaatatgagtatcaggtaaatgtgaatcatgcgataggagtatataaggatcgtctgatacggataataatagaggaagaccgggtaagtcgacggcatttgatgaatgagctgttacgtgaaatggaacggcgggtagtaccgatacgaccgaatcgagaagttgtccgtaaagatatcaatcggaaagcaaaattccatcataaccataaatcaaactgctga

SEQ ID NO: 65010 - protein, 148 aa, Unknown
  Obtained from environmental sample
  misc_feature (1)..(148): Xaa is any amino acid
MEYKAFKELYHKRWGIETKYKTVKQKLELENFSGRLVENIKQDFYAMMTVSNMIASCRRVADLKVKKDREGLGNKYEYQVNVNHAIGVYKDRLIRIIIEEDRVSRRHLMNELLREMERRVVPIRPNREVVRKDINRKAKFHHNHKSNC

SEQ ID NO: 65011 - DNA, 861 bp, Unknown
  Obtained from environmental sample
  misc_feature (1)..(861): n is a, c, g, or t
ttggaacgccaagcggcatattactattatttcgttgtagacgccgaacttaaacgcggaataatcgcaagaacggcggaattggaaaaaggaagaaattatcttaacggtcaaaaacgaacaagagccgacggttcctcagtaaccgatctgtttccctcggaagcgttggaaacgcttaccgcaatgctcgcgtcgttatcaaatgatttggaacgaggtaattcagcgattgcctattacagaaatgaaacaaaattggtactgaccgacgaacagattaccgctataaagacaagctgtgaaaaaagcatagccgaactgaacacgctgcgcaatcagggcgtaacgcttcgtaccaccgcgaattcaaggacaacacaggccgaagccttcaggcaggaaggagaacggcttttaagagaagcgcaagccgcctaccgttctcagaactttgataccgcaagggacaggcttcaaagggcgtcggaacgttttaacagttcgcttgaggtacaacagtccgcgtctcttcgccagtcatgggatacccagcttttcaatttagggcaggcgatcaacgcgtccgaaaacgagtctataatcgcggaagtgcgtaatcttgtaaaccgcgcccgcgcctcttactttgagggaaattttcaacaggcggaagacggtcttatcagagcaagaagccgatggcgcataacaaatgtggatgaaaacgaggaaattctttactggctgggcatagtcaggggagcgatgtccgcacgctccggcagggtaattcccgttaccgcgcctttgtaccccgaaatgagccagcttttaaagcaaggccagaatgaattatga

SEQ ID NO: 65012 - protein, 286 aa, Unknown
  Obtained from environmental sample
  misc_feature (1)..(286): Xaa is any amino acid
MERQAAYYYYFVVDAELKRGIIARTAELEKGRNYLNGQKRTRADGSSVTDLFPSEALETLTAMLASLSNDLERGNSAIAYYRNETKLVLTDEQITAIKTSCEKSIAELNTLRNQGVTLRTTANSRTTQAEAFRQEGERLLREAQAAYRSQNFDTARDRLQRASERFNSSLEVQQSASLRQSWDTQLFNLGQAINASENESIIAEVRNLVNRARASYFEGNFQQAEDGLIRARSRWRITNVDENEEILYWLGIVRGAMSARSGRVIPVTAPLYPEMSQLLKQGQNEL

SEQ ID NO: 65013 - DNA, 705 bp, Unknown
  Obtained from environmental sample
  misc_feature (1)..(705): n is a, c, g, or t
atgaattatgaggaaggggtgcggttaataaacgcgggtaaccgcataaacggacttgcgaaatttgacgaagcgcgccggcagacaagggaagtaaggcttatattcccattcaatcaggatgcgggaattctggaactcaggatggaacagtatacggatcccgcggcgtttaacgcttcttttgaacaacgccttagaaccgcaattgcggggacaaaacgccgttctatcgaatctttcgcggaacttcaaaacttagctgaaattaactcaaaatatcccgggataaaaggcatcattacgcaggcggaaattgacatgggctaccgtccgccgccgcccgatccgcaggctttggcgcgttcaagggaattatccgcttcggcaaaccgtattctgacggaaaataactcaacgctgtttgaagtcgccctgacacaggttaacgaggcaatcgccctgaatccggaaaacgccgaagcgatgcgcgtaaaagaccgcctcttaaacaggatgagcgttccgggggcaatcgttctttccaacgaggacgaacttgaatatcaaagggctgttaaggaattacaggcgggcaataaccttgtcgccttcgcggtcgtggaaaggcttatgcaaaatcccagaaaccgcaacatcacaaaactgattgaattacagcggaggatacagtcggttttatga

SEQ ID NO: 65014 - protein, 234 aa, Unknown
  Obtained from environmental sample
  misc_feature (1)..(234): Xaa is any amino acid
MNYEEGVRLINAGNRINGLAKFDEARRQTREVRLIFPFNQDAGILELRMEQYTDPAAFNASFEQRLRTAIAGTKRRSIESFAELQNLAEINSKYPGIKGIITQAEIDMGYRPPPPDPQALARSRELSASANRILTENNSTLFEVALTQVNEAIALNPENAEAMRVKDRLLNRMSVPGAIVLSNEDELEYQRAVKELQAGNNLVAFAVVERLMQNPRNRNITKLIELQRRIQSVL

SEQ ID NO: 65015 - DNA, 861 bp, Unknown
  Obtained from environmental sample
  misc_feature (1)..(861): n is a, c, g, or t
ttgccggttgattttatgnaagagaaggttggaaagtcttccaaagaaaggaaccataataaaatgtacagcgaaaacagcaaaaagtcgatatattttcacaatcggacggatatatttatcataattttggtttttattttagcggtatgcccggttgttatttccgtcttttcgcggttaaacgccaaaagcagacagatagatatttatctttccgcaagctgtgaagaatttttcggcagtaaaaccatggaaacgcttatgcgggaatttaacgagcagaatccggatttgcggattttggtgttgaatgttcccggcgaaaaaatcaaagagcctgacattttattctttgacgaaagcgaatttaacgatcttctcgccggggaggcgcttttaccgctcggctctttgtctgaggttgaaaccggcgctctgaggcccgcgattcctttggtctcttttatggacatgctttttttcaatattgaacttttacaagccgccggttttgaccgccctcctaaaaccacagaagatttcctcttatacgcgaaaaccataacaacagccaataacggtattttggcggatgcggcgggcgcggcaatggctctgagtcccgcgaacaaacagtccctgtccagagatattttttcgtggatatgggcgtcaggatggaatttttggcctgatgaaggttcttcttcctccgcgccggttataaacacaaagcctgtgattaacgagttaaatttcctcagtaagctctaccatggcggagttctgtcccctgaatcgggctctgtcccccaaaatcgagttttgtccctaaatagcttgactcggccgatctga

SEQ ID NO: 65016 - protein, 286 aa, Unknown
  Obtained from environmental sample
  misc_feature (1)..(286): Xaa is any amino acid
MPVDFMXEKVGKSSKERNHNKMYSENSKKSIYFHNRTDIFIIILVFILAVCPVVISVFSRLNAKSRQIDIYLSASCEEFFGSKTMETLMREFNEQNPDLRILVLNVPGEKIKEPDILFFDESEFNDLLAGEALLPLGSLSEVETGALRPAIPLVSFMDMLFFNIELLQAAGFDRPPKTTEDFLLYAKTITTANNGILADAAGAAMALSPANKQSLSRDIFSWIWASGWNFWPDEGSSSSAPVINTKPVINELNFLSKLYHGGVLSPESGSVPQNRVLSLNSLTRPI

SEQ ID NO: 65017 - DNA, 1578 bp, Unknown
  Obtained from environmental sample
  misc_feature (1)..(1578): n is a, c, g, or t
atgggcttaaaaaaacccaaatgtatagcgtggacagagattcccaaccgcgaatatcacgatcatattatcgaggccgtaattcgtctggacagcatgggcggctacgcggcggcgggtcttacttttcatataagggatgacgaagcttactatatcgtacttttttccggcaaaggctatttccgccttgacgttgtaagagacggttctcccaagccgttaatcgcatggaccgatatttttgaatttgacggaaaaaatataaatttgagcgttatcacttacggtacattcataattttgtttgtcaacggcaaatgggttggggaaacaagcgacgactcaattaactcgggcaaagttgggttcgcgcttgcttcttatgaaacagcggaaggaacatcttcggatgaggccgaagacggcgaatatgtctgcaaggcttttcttgaatatatttccatagacacaagaataaaaagtatcgagggaaaatacaaaaaatggtctgataatattaacataaacgcggaaagccgcctgcggctggcggaaactttcgcggttatgggcgaacctttaaaagctctggaacagattaacaaggcatgggaacgcagggacaaagccatcccgggagtttccgcangagaagagggagtaagaacaaaaaaagaacttctcctcgcggcgcacatgtcgttacggcttggtcaatacaatgaagcggaaagttacctgaacgcaattcttgaacaatgggcggactccgccgagggaaaagaagccgtaaaagaaaaaataaagatactgggcgaacttaaaaaatacggcgaattaaaagaatttgttttaaaacatataaataacaaaaaagatattaattatcacacgcttcttgcgcgctgttattttgaattaaaggaatataaaaaatccgcggcggcgtgggacaaggcttttgagatgaacaaaaaaaacggagtttacgccgcaaacgccgcaaacgcgcttgagttaagcgggaaaaaagaagaagcgcttttgcggtttattaaagcaggcaaaatttttcttaatcaggataatcaggcggaacttggcgcgataatgccgaagattttatcttttggcggcggcaactgggaagcccgcgtccttgccggaaaatgggcttacagcatagaagattacaaccgctgtatagttgaatttaccgccgcgaataagctcagatgttccataaaaccccggcctgaagcagacccggctcattattatttgtgggggcttgccttaaacgtacagagaaaaaacagcgaggctgtccgcttgattgaaaaagccgtaaggctggcgcctgactacggtcttttccgtttcaaacttgcggaaataaaactggcgtccggagcaaaagatttaagtctagcggaagaatttaagcttgcgttaaacaacatggatgatcctgacgggaagatggcggaacacgcgggaaatcttctgcgtaaagccggaaatactaagggcgcgaaatactttctcggcaaagcgggaaaagatgctggttga

SEQ ID NO: 65018 - protein, 525 aa, Unknown
  Obtained from environmental sample
  DOMAIN (295)...(328): Tetratricopeptide repeat
  misc_feature (1)..(525): Xaa is any amino acid
MGLKKPKCIAWTEIPNREYHDHIIEAVIRLDSMGGYAAAGLTFHIRDDEAYYIVLFSGKGYFRLDVVRDGSPKPLIAWTDIFEFDGKNINLSVITYGTFIILFVNGKWVGETSDDSINSGKVGFALASYETAEGTSSDEAEDGEYVCKAFLEYISIDTRIKSIEGKYKKWSDNININAESRLRLAETFAVMGEPLKALEQINKAWERRDKAIPGVSAXEEGVRTKKELLLAAHMSLRLGQYNEAESYLNAILEQWADSAEGKEAVKEKIKILGELKKYGELKEFVLKHINNKKDINYHTLLARCYFELKEYKKSAAAWDKAFEMNKKNGVYAANAANALELSGKKEEALLRFIKAGKIFLNQDNQAELGAIMPKILSFGGGNWEARVLAGKWAYSIEDYNRCIVEFTAANKLRCSIKPRPEADPAHYYLWGLALNVQRKNSEAVRLIEKAVRLAPDYGLFRFKLAEIKLASGAKDLSLAEEFKLALNNMDDPDGKMAEHAGNLLRKAGNTKGAKYFLGKAGKDAG

SEQ ID NO: 65019 - DNA, 756 bp, Unknown
  Obtained from environmental sample
  misc_feature (1)..(756): n is a, c, g, or t
atgatcctgacgggaagatggcggaacacgcgggaaatcttctgcgtaaagccggaaatactaagggcgcgaaatactttctcggcaaagcgggaaaagatgctggttgaatggcctctatttacgaaagaaggcttgcctggcatacaaggtatgccttcgggagaaaaaaaagcgtcggtaacgataggcgtttttgacggggttcaccgggggcataaggcgctgatagagcgggtggtttcgcataacgctgataatgtgccggttgttattacttttcgggaaaaccataagacaggtaacagagaacaattaacagttaacagagaacagagaacagagaacagagtaattagcaatgagcaattagcaatgagcaaaggacagagggatattcaaacttttgagcaaagaataaagttattggaggaattgggggtacaaataattatcgttattgattttacggaatcatttaagcgaatggcgggaattgaatttttagagatgttggtaaagcgctgtaatattgggtttttcgcggtcgggagcgcttttcgctgcggatacaggcttgatacggacgcggcggctattcaaaaatttttcgcctcgcgcggcattcccgcgggaattgtcccggaagttatggaagattccctgcctatcagttctagccgtatacgcgcggcaatcgcggcgggaaatattgagctggcggaaataatgctggggagggcgttggcggggtga

SEQ ID NO: 65020 - protein, 251 aa, Unknown
  Obtained from environmental sample
  DOMAIN (61)...(232): Cytidylyltransferase
  misc_feature (1)..(251): Xaa is any amino acid
MILTGRWRNTREIFCVKPEILRARNTFSAKREKMLVEWPLFTKEGLPGIQGMPSGEKKASVTIGVFDGVHRGHKALIERVVSHNADNVPVVITFRENHKTGNREQLTVNREQRTENRVISNEQLAMSKGQRDIQTFEQRIKLLEELGVQIIIVIDFTESFKRMAGIEFLEMLVKRCNIGFFAVGSAFRCGYRLDTDAAAIQKFFASRGIPAGIVPEVMEDSLPISSSRIRAAIAAGNIELAEIMLGRALAG

SEQ ID NO: 65021 - DNA, 771 bp, Unknown
  Obtained from environmental sample
  misc_feature (1)..(771): n is a, c, g, or t
atgtcagcattttttcgtccgactatggataccgaagctatattaccggcgcccatgagatattttaaaattgaaaaagccagaagttacctgaaaggaaacggcgatgccttaaataacaattttgtatttggtacattttctgtcaattctgatataggctacatttatatttctgaatttttcaatgagaacaccgaaccggaagatcccgaaagcgcgaacgcgattgatagtattatcagcgcccttgaaaaaacaaaagctcttgttttggatgttcgcaataacagaggaggcgatatatatgtaatggaatatattgccgcccgtttcgcgtccgaatcaaaagattattgtaagttaataaccaaaaaaggccccggcccgaatgatttttccgcgccaattgtttatacaataaaaagtattaaaaaagcgtctgataacatgtatggttatacaaaaccaattgtgcttttaacaaataaaaacacagtttccatggcggaatggtttaccatggcgctgcggactcagagtcatgtaacgcacataggaacggcgacatgcggagccttctctccgcgcaaggagcgttttatgatcaacggctgggtgtattcgatatcgcccggaagggtaacggacatgaacggaaataattatgaagggctgggaatatcaccggataaggaaatagcaaatacggagaatcaaacggataaacagcttgaggaagccgttaaaatagcggcgggcgcggaataa

SEQ ID NO: 65022 - protein, 256 aa, Unknown
  Obtained from environmental sample
  DOMAIN (52)...(234): Peptidase family S41
  misc_feature (1)..(256): Xaa is any amino acid
MSAFFRPTMDTEAILPAPMRYFKIEKARSYLKGNGDALNNNFVFGTFSVNSDIGYIYISEFFNENTEPEDPESANAIDSIISALEKTKALVLDVRNNRGGDIYVMEYIAARFASESKDYCKLITKKGPGPNDFSAPIVYTIKSIKKASDNMYGYTKPIVLLTNKNTVSMAEWFTMALRTQSHVTHIGTATCGAFSPRKERFMINGWVYSISPGRVTDMNGNNYEGLGISPDKEIANTENQTDKQLEEAVKIAAGAE

SEQ ID NO: 65023 - DNA, 897 bp, Unknown
  Obtained from environmental sample
  misc_feature (1)..(897): n is a, c, g, or t
gtgttggtgacatttaacatgtcgcgcagcgcgtcttattttgaatcgggaatcgggcgcggcatgggtttccgtgattcaaatcaggatttattgggctttgttcatcttgttcccggacgcgcccgcgcccgcattttggacattgcggcgacacagttccccgacggcagcgcgtatcatcagtatcagccgcttacaaagcgcggcaataacgagattggttcaggttttaacgacgatcctctgtggctcatctgcggagcggcggcgtacatcaaagagacgggcgattacagcatacttaatgaaaaagtgccttttgataacaacgatgagttagctgacactctctttattcatcttaaacgctcattttattacaccgtaacgcacaccggaccgcacggcttgccgttaatcggacgcgcagactggaacgactgtttaaatcttaactgcttttccaaaacccccggcgagtcttttcagacaaccgccaactatgaaagcggcgttgcggaatcagttttaatagcggcaattttcgtatttgtcggtcccgactatgttgagatttgcaaaagaacaggccgtacagaagaagcgcagcgcgccgaaaaagccattgccgacatgattgaggcgattaaaacgcacggctgggacgggaaatggttcctgcgcgcttatgacgcatacggtaaaaaaatcggaagccgcgagtgcgaggacggaaaaatatttatcgaatccaacggcttcgcggtaatggcggacatcggcattaaagacggacgcgcgcaaaaagcgcttgattccgtaaagagcatcttgacaccaaatacggcattgtcctgttacagcccgcttacaaggactaccatcttgagttag

SEQ ID NO: 65024 - protein, 298 aa, Unknown
  Obtained from environmental sample
  misc_feature (1)..(298): Xaa is any amino acid
MLVTFNMSRSASYFESGIGRGMGFRDSNQDLLGFVHLVPGRARARILDIAATQFPDGSAYHQYQPLTKRGNNEIGSGFNDDPLWLICGAAAYIKETGDYSILNEKVPFDNNDELADTLFIHLKRSFYYTVTHTGPHGLPLIGRADWNDCLNLNCFSKTPGESFQTTANYESGVAESVLIAAIFVFVGPDYVEICKRTGRTEEAQRAEKAIADMIEAIKTHGWDGKWFLRAYDAYGKKIGSRECEDGKIFIESNGFAVMADIGIKDGRAQKALDSVKSILTPNTALSCYSPLTRTTILS

SEQ ID NO: 65025 - DNA, 378 bp, Unknown
  Obtained from environmental sample
  misc_feature (1)..(378): n is a, c, g, or t
atggagccgtatgtgtacgcgcaaatggtagcgggaaaagacgcggttaaccacggcgaggctaaaaactcatggcttacgggaaccgcggcgtggacctttgtcagtatttcccagtacatcctcggagtgcgccccggctttgacggccttatactcgacccctgcgttccctcaaatatgaagggcttcaccgtcatgcgtcatttcagggacgctgattatcacataacggtggacaacagcgccggagtggaaaagggagtaaagtcaataaccgttgacggcaatcagctgcatgggagcgcgttggataacgcgataataccagcttttggcgacaataaggtacataaagtcgttgtggtaatggggtaa

SEQ ID NO: 65026 - protein, 125 aa, Unknown
  Obtained from environmental sample
  misc_feature (1)..(125): Xaa is any amino acid
MEPYVYAQMVAGKDAVNHGEAKNSWLTGTAAWTFVSISQYILGVRPGFDGLILDPCVPSNMKGFTVMRHFRDADYHITVDNSAGVEKGVKSITVDGNQLHGSALDNAIIPAFGDNKVHKVVVVMG

SEQ ID NO: 65027 - DNA, 1068 bp, Unknown
  Obtained from environmental sample
  misc_feature (1)..(1068): n is a, c, g, or t
atgcgccttccaatgaaagaagttgacggcaagaaaattgtaaacgaagaccttgccgtcccccttatgcagaaagcttttgacatgggcataaattatgttgacaccgctccgctttactgcgagaccttaagcgaagtcgcggtgggcaaagcgctgaaaggttaccgcgacaaggtttatctgtccacaaagaaccccattgaggatgcggacggcgatcactggatgggaaggctggaaaaatctcttaaacaacttgacacggactacatagacttttatcacttttggggtatttcgttaaaaagtttcgaatcatggcagggattaaagttcggtcccatcgaggcggcgtataaagccaaagagcaggggctaatcaaacacatttctttttcgtaccacgacgctgcggaaaattacaaaaagatagtggactcaggccattttgaaacgactcttgttcagtacaatatgcttgatcgttccaatgaggagaacatcgcctatgcaaagtcaaaaggcctgggcgttgtggtaatgggacctgtcggcggcggtcggttaggcgcgccaagcgaacaaatacagagcttacttaaaagcaaatctacaagcacggcggaaatggctcttcgttttgttcttgcgaacgagaacgtggacatggctctttctggaatgggtaacatggacatgttaaaggaaaattttgagatcgcctcacgcacgggacacttaacggaagaagaaataagccatgtaaaatccatgatggaagaaaataaaaacctcgcgaagttgtactgcacgggctgtaattactgcaaaccctgtccgcagggcatagacatcccgtatctttttgagatcatgaaccgctaccgcgtttacgatttaaaggaacacgcaaagagcgcgtacaaggaagtgatcaacggcaggagctggataaagagcgccgacgcttcaaagtgcgcggcctgcggcgtatgcgaggaaaaatgcccgcagaaacttccgattatcaagcagctacaggagactcacgcgacccttgcgtaa

SEQ ID NO: 65028 - protein, 355 aa, Unknown
  Obtained from environmental sample
  DOMAIN (320)...(343): 4Fe-4S binding domain
  misc_feature (1)..(355): Xaa is any amino acid
MRLPMKEVDGKKIVNEDLAVPLMQKAFDMGINYVDTAPLYCETLSEVAVGKALKGYRDKVYLSTKNPIEDADGDHWMGRLEKSLKQLDTDYIDFYHFWGISLKSFESWQGLKFGPIEAAYKAKEQGLIKHISFSYHDAAENYKKIVDSGHFETTLVQYNMLDRSNEENIAYAKSKGLGVVVMGPVGGGRLGAPSEQIQSLLKSKSTSTAEMALRFVLANENVDMALSGMGNMDMLKENFEIASRTGHLTEEEISHVKSMMEENKNLAKLYCTGCNYCKPCPQGIDIPYLFEIMNRYRVYDLKEHAKSAYKEVINGRSWIKSADASKCAACGVCEEKCPQKLPIIKQLQETHATLA

SEQ ID NO: 65029 - DNA, 858 bp, Unknown
  Obtained from environmental sample
  misc_feature (1)..(858): n is a, c, g, or t
atgatccgtttcgcgaagttcaaaaaagattccgcgacggagcaggaaatgacgaagcaaaaaacccgttttggaaaaatcatcgaaaagtattgctggaaagacgaccgctttgtgcgcggcatcaccgaacacgacgttacggtcgggaagaagggcgatcccgaagcgagcgtctggcttaatccgcagagttgggcggtaatcagcggctacgcggataaagagcgcggtaaaaagatacttgatttagtccacaaacaccttaacacaaaatacggcgcgcgccttatgtcccccccttaccgcaaacacgcttttgacggggcgctcgccctgctgttcaacccgggcacaaaagaaaacggcggcatcttcctgcaaacccagggctggataatccttgccgaagcgctgcttggacacggaaaccgcgcagttgaatattatctggaaagctgccccgccgcgcaaaacgaagatgcggacacccgccttatggagccttacgtttattcgcaatttacggaaagcgtggacagcccctttgagggacgcagccacgttcactggctgacaggcactgcaagcacggtaatggtcggctgtgtggagggcattttgggattaaggccggacattgaagggctgcacctggcgcccgctattccctcatcgtggaagtctttttcaatggaaaaagttttccggggcaaaaaacttaaaattattgtgaataaccccaacgggcgggaaagcggctgtcaaaaactgactgtcaacgggaaagaggttgagagcaattacatttccgcttctaccttgaaagcgcagaacgagataattttggatatgtag

SEQ ID NO: 65030 - protein, 285 aa, Unknown
  Obtained from environmental sample
  misc_feature (1)..(285): Xaa is any amino acid
MIRFAKFKKDSATEQEMTKQKTRFGKIIEKYCWKDDRFVRGITEHDVTVGKKGDPEASVWLNPQSWAVISGYADKERGKKILDLVHKHLNTKYGARLMSPPYRKHAFDGALALLFNPGTKENGGIFLQTQGWIILAEALLGHGNRAVEYYLESCPAAQNEDADTRLMEPYVYSQFTESVDSPFEGRSHVHWLTGTASTVMVGCVEGILGLRPDIEGLHLAPAIPSSWKSFSMEKVFRGKKLKIIVNNPNGRESGCQKLTVNGKEVESNYISASTLKAQNEIILDM

SEQ ID NO: 65031 - DNA, 750 bp, Unknown
  Obtained from environmental sample
  misc_feature (1)..(750): n is a, c, g, or t
gtgaaacttttattggattcccttttaaacagctattcggaattaaaaaactctgtcccgatagaacccaattgccaattcggtaaaaacgatgttgtggaactcatagacaaattgcgcagtttgctgttccccggctactttgacgatgagtacacagaagtgcttttggaaaaagtcaagcgcttattgctccgtctgctggctggcaaaaaagagcaggagaataaagaggaatccgtaaaattagtgatggattttttgacaaaactcccaaaaatcagggcaagcctcgccaccgacgttgaagccgcgtttgatagcgaccccgcagctataggcaaagaggagattatcatttcttatccgggcatttatgccatatcaatttacaggcttgcgcatgagcttcacctattcaacattccaatgctcccacggataatgaccgaatacgcccattcagtgacgggaatagatattcaccccggagcgcaaataggcgagtattttttcatagaccacggaacaggcattgtgataggtgaaacgacggttataggcgagcacgtgaaaatttaccaaggggtaactttgggcgcgctctccacaaaaggcgggcagagcttgagagggaaaaagagacacccaacggtagaagacaatgtgaccatatattctggagcttccatttttggcggagatacggttataggcaaaattccgtgctgggtagcaatgtgtttgtaa

SEQ ID NO: 65032 - protein, 249 aa, Unknown
  Obtained from environmental sample
  misc_feature (1)..(249): Xaa is any amino acid
MKLLLDSLLNSYSELKNSVPIEPNCQFGKNDVVELIDKLRSLLFPGYFDDEYTEVLLEKVKRLLLRLLAGKKEQENKEESVKLVMDFLTKLPKIRASLATDVEAAFDSDPAAIGKEEIIISYPGIYAISIYRLAHELHLFNIPMLPRIMTEYAHSVTGIDIHPGAQIGEYFFIDHGTGIVIGETTVIGEHVKIYQGVTLGALSTKGGQSLRGKKRHPTVEDNVTIYSGASIFGGDTVIGKIPCWVAMCL

SEQ ID NO: 65033 - DNA, 621 bp, Unknown
  Obtained from environmental sample
  misc_feature (1)..(621): n is a, c, g, or t
atgaattttcttgaagaatttcacaaaaaaccttttctaggaatcatccgtggcttgccacctgagcaggttgcaagctgcgctgaaatttgcaaaagcacagggttgaaattcgtagaggttccattaaacacggcgagtgcggcagcagctttggaaaaattgtgcgaggaaggcgggaaaaacggcttaattgtcggtgcggggacggttatcaccgaacaggatttgcaaaccgcccttggctgcggagctaaattcatagtcactccgggtacaaatcccgctgtggtaaaattatgcgttcagaaaaacatcccctgcattccgggtgccttaacaccaacggaaatcatgcaggctcatgctttgggagcaactgctataaaaattttcccggtatcttccctaggtggtacacaatacataaaggagttgcgagggccattcaaaaatatacctttgctagcctgtggcggggttaaagcagaaaatgtccagactttttttgatgcgggttgcgactttgtctcttttggggcaagcgtattttccgtttctgatatggaaggcggaaattggcagagcattgaaaagagaattattcagctactgcattga

SEQ ID NO: 65034 - protein, 206 aa, Unknown
  Obtained from environmental sample
  DOMAIN (5)...(200): KDPG and KHG aldolase
  misc_feature (1)..(206): Xaa is any amino acid
MNFLEEFHKKPFLGIIRGLPPEQVASCAEICKSTGLKFVEVPLNTASAAAALEKLCEEGGKNGLIVGAGTVITEQDLQTALGCGAKFIVTPGTNPAVVKLCVQKNIPCIPGALTPTEIMQAHALGATAIKIFPVSSLGGTQYIKELRGPFKNIPLLACGGVKAENVQTFFDAGCDFVSFGASVFSVSDMEGGNWQSIEKRIIQLLH

SEQ ID NO: 65035 - DNA, 891 bp, Unknown
  Obtained from environmental sample
  misc_feature (1)..(891): n is a, c, g, or t
gtgcccagtatgttgggatgggcaaagttttgtccgaaacttttgaacctgcaaaacagccttcttaaaaaagctgacgaggttcttggctttgagctttccaagattatgcaggaaggccctgaggatacgcttaaaagcacagataacacacagcccgctctttatgtctgctcttgtatggcgatggagcttttgaagagcaaaaatctttcctttgactatgtggcagggcattcgcttggcgagtattccgcgatatatgcagcaggcggtttttcttttgaagacgggctccgcttggtgcgtgttcgcggcgagcttatggcaaaggcaggcgagttaaagccgggtgcgatgtctgcggtgctgggtctctcggaggcggatttgaacgccgtgctgagcgaagcgcagagcgcaggcgttgttgttgcggcaaacttcaattcacccgggcaaatagtcatcagcggctcaaaagagggcgttgccaaagctggcgaaatagcaagcgcaaagggtgcaaaaaaggttgttccgctgccagtttccggtgcgttccacagcccgttgatggaatacgcattgccaaaattaaaagaagcaattgaaaaaaccgctttcagcgatttgaaagttcccgtgatagccaacgtgacttcggagcctgtgagcaagggcacagagcttaaagagcttttggctaaacagcttctttctccagtgcgttggcagcaaggtatggaaaaagctatctcgctcggcgttcaaagaggcattgaggttggctctggcaaggtgctgatgggcttaatgcgtagcatcaaccgcgaagtccgtgtttatccggtggaaactgaagagcagttcaatgcagtagctgaataa

SEQ ID NO: 65036 - protein, 296 aa, Unknown
  Obtained from environmental sample
  DOMAIN (7)...(296): Acyl transferase domain
  misc_feature (1)..(296): Xaa is any amino acid
MPSMLGWAKFCPKLLNLQNSLLKKADEVLGFELSKIMQEGPEDTLKSTDNTQPALYVCSCMAMELLKSKNLSFDYVAGHSLGEYSAIYAAGGFSFEDGLRLVRVRGELMAKAGELKPGAMSAVLGLSEADLNAVLSEAQSAGVVVAANFNSPGQIVISGSKEGVAKAGEIASAKGAKKVVPLPVSGAFHSPLMEYALPKLKEAIEKTAFSDLKVPVIANVTSEPVSKGTELKELLAKQLLSPVRWQQGMEKAISLGVQRGIEVGSGKVLMGLMRSINREVRVYPVETEEQFNAVAE

SEQ ID NO: 65037 - DNA, 465 bp, Unknown
  Obtained from environmental sample
  misc_feature (1)..(465): n is a, c, g, or t
gtgcccttgctcacaggctccgaagtcacgttggctatcacgggaactttcaaatcgctgaaagcggttttttcaattgcttcttttaattttggcaatgcgtattccatcaacgggctgtggaacgcaccggaaactggcagcggaacaaccttttttgcaccctttgcgcttgctatttcgccagctttggcaacgccctcttttgagccgctgatgactatttgcccgggtgaattgaagtttgccgcaacaacaacgcctgcgctctgcgcttcgctcagcacggcgttcaaatccgcctccgagagacccagcaccgcagacatcgcacccggctttaactcgcctgcctttgccataagctcgccgcgaacacgcaccaagcggagcccgtcttcaaaagaaaaaccgcctgctgcatatatcgcggaatactcgccaagcgaatgccctgccacatag

SEQ ID NO: 65038 - protein, 154 aa, Unknown
  Obtained from environmental sample
  misc_feature (1)..(154): Xaa is any amino acid
MPLLTGSEVTLAITGTFKSLKAVFSIASFNFGNAYSINGLWNAPETGSGTTFFAPFALAISPALATPSFEPLMTICPGELKFAATTTPALCASLSTAFKSASERPSTADIAPGFNSPAFAISSPRTRTKRSPSSKEKPPAAYIAEYSPSECPAT

SEQ ID NO: 65039 - DNA, 429 bp, Unknown
  Obtained from environmental sample
  misc_feature (1)..(429): n is a, c, g, or t
atgaagtcgcataaagaacgctatttgttagacacaaatataattttgtattccctttttaaccaaaaagaattggaagctcatatattggatttattggatgattactataataaattttatatcagcgtaatctctgtgcaagaaatcatacatctgcacaaacagaataaaataaaaacaacttggaaaaatccagaagatgtattgccagcaataaaagctactggttttgaatttctccttctaagagaagaacatttatctgcttatgcgatgttgaatactgctaaaaatcacaatgacccccaagaccatttgattatatctcaggctattacagaacgtatgacgcttatcagctcagataccaaatttgcgttttatacaaaacaaaaactaaatttactattcaacagcagaagttaa

SEQ ID NO: 65040 - protein, 142 aa, Unknown
  Obtained from environmental sample
  DOMAIN (8)...(137): PIN domain
  misc_feature (1)..(142): Xaa is any amino acid
MKSHKERYLLDTNIILYSLFNQKELEAHILDLLDDYYNKFYISVISVQEIIHLHKQNKIKTTWKNPEDVLPAIKATGFEFLLLREEHLSAYAMLNTAKNHNDPQDHLIISQAITERMTLISSDTKFAFYTKQKLNLLFNSRS

SEQ ID NO: 65041 - DNA, 1008 bp, Unknown
  Obtained from environmental sample
  misc_feature (1)..(1008): n is a, c, g, or t
ttgtccttttattcatattatcaatattttcctgtacaaaaaaaaataaagagcaggcgcaaaaagagctttccgtcctgggtttttattacaggcgttacggccggaagcgtgccttatgaacaaatggcgcagggagcgctggaatttgccgccgcaaaccctaaggtaagcgtaaaaatttatgaagcgggatttaatcaggcggaatgggaacaacagcttgccgaaatggtttcaagcggcgtatatgacattgttttgggatccaatccgtccctgccgcagttatgcgtaaacgtggggcaaaaatttcctaaccagaaatttattatcgcggacgctcagtacgagggaaatccgcaaatacggacctttctttacaatcaatacgaacaatcgctctttcttggatatttggcagggcttgtaactgtaagcgacatgccttacgccaacaagcagaaacgaatcggttttatagcggcgcaggaatatccgctgttgacaaagcagatggtgccgggttttcttgatggcgcaaagcttgtcgacaaagaaatagaaattgacaagcgggtaataggctcgtgggcggacgccggcaaagcggcggagttgtgcaccgctatgattgattccggcgttgacgtgttcacggctatagccggcggggcggcgcagggaatgataaaaaccgcgtctgaaagaaataaatacatagtaagttacaacacaaatgaatacaaagcggcggacggccttgttcttggctgcggaataatggaacaaaaaaaacttgtaatggaaatccttaaagacgctcttgagggcaagatccaatacggcaaagcgcagactgtaggggtaaaagaaggctatcttggctttatttttgacgatcccgcgtataagaacaacctgcctgttgaaatacgggaaaaatttgaaaaattctacaatgatcttaaagaaggcaagattagctatacgataccgcctctttaa

SEQ ID NO: 65042 - protein, 335 aa, Unknown
  Obtained from environmental sample
  DOMAIN (1)...(329): Basic membrane protein
  misc_feature (1)..(335): Xaa is any amino acid
MSFYSYYQYFPVQKKIKSRRKKSFPSWVFITGVTAGSVPYEQMAQGALEFAAANPKVSVKIYEAGFNQAEWEQQLAEMVSSGVYDIVLGSNPSLPQLCVNVGQKFPNQKFIIADAQYEGNPQIRTFLYNQYEQSLFLGYLAGLVTVSDMPYANKQKRIGFIAAQEYPLLTKQMVPGFLDGAKLVDKEIEIDKRVIGSWADAGKAAELCTAMIDSGVDVFTAIAGGAAQGMIKTASERNKYIVSYNTNEYKAADGLVLGCGIMEQKKLVMEILKDALEGKIQYGKAQTVGVKEGYLGFIFDDPAYKNNLPVEIREKFEKFYNDLKEGKISYTIPPL

SEQ ID NO: 65043 - DNA, 1542 bp, Unknown
  Obtained from environmental sample
  misc_feature (1)..(1542): n is a, c, g, or t
atggaagccctcccatatgcagaacttcgcaatataagcaaaacttattccggcagcgcgaaaaaagcaaataataacataagtttacagctgcaaaaaggagaaattctatgtatcgccggagagaacggggcgggtaaaaccaccttgatgaaaatactgtcagggcttgaaactcccgacacgggagatgtttttataaacggaaaaaaagagaagataaattcccccttggaagcaaaaaaactgggaataggcatggtgcatcagcattttatgctctttcccgaatataccgttgcggaaaatatcgcgatgggggcggagcctaaaagatttaaaatttttcttgatgaaaaaaaaattaatcaaaacgcggaaaaaataattaacgcgcataatttcgcggtagaaagcgctcaaactgtaaatgaattaagccaggggcagatgcagcaggttgaaatttgccgcgtgcttgcgaataacgcgcgaataattattttagacgaacctaccgccatacttacggaacaggaaacgctttcgttatttaagaccttaaaaaaccttgtttcaaagggcttatccctgatccttataacgcataaactgcgcgaaataaagcaaatctgcgacagagtcgctgtattaagaaagggagagcttgtaggaattcgcggctctgcggatattgatgaatacgatatagcgcgaatgatgatggggaatgattatgccgcagcggaatgtgaaaaaaaacctgaaaaaacgggcgttaaagacgaaactgtcattgtttttgacaatgtcaccgtaagaagaagagggcagaagcgacccctattggacaaagtttcttttcaggcaagaaaaggcgaaattctcgggtttgcgggcgtcggcgggaacggacttggtgtaattgaagcggttctgggcggttttcttcatccttcgcagggaaaaatccttcacaacggcagggatatttccgctcttgggattcgcgcattgcgaaaacaggggcttagttatgttcccgccgacagactgcgggtaggaagcgcgagagacgccttaatcgaggaaaatttgattattaactgccgcgatgaattctctaaaggaatgataatcaggaaaaaagccgtaagggaattcgctcaaaggctggcggaatgttacggcattgagggcgctaaggtaaatgaaaaggcggcttttctttcaggcggcaatctgcaaaaactaattcttgcgcgggaaattaacaagttaagcgattatatagttttttcagagcccgcgtgggggctggacatagcctcaagcaatttcatttacagggaaatcgaagcgttacgcgaaaaaaacgcggcggtaattttaatctcaacaaaccttgatgaaataatttctcttgcggaccggatagcggtaatgtacaggggaaaaatagccggtatttatgaaaatacgggcgaagcaataaaaaaaataatcggcgattcaatgcaggggatagtaataaaagaatga

SEQ ID NO: 65044 - protein, 513 aa, Unknown
  Obtained from environmental sample
  DOMAIN (293)...(485): ABC transporter
  misc_feature (1)..(513): Xaa is any amino acid
MEALPYAELRNISKTYSGSAKKANNNISLQLQKGEILCIAGENGAGKTTLMKILSGLETPDTGDVFINGKKEKINSPLEAKKLGIGMVHQHFMLFPEYTVAENIAMGAEPKRFKIFLDEKKINQNAEKIINAHNFAVESAQTVNELSQGQMQQVEICRVLANNARIIILDEPTAILTEQETLSLFKTLKNLVSKGLSLILITHKLREIKQICDRVAVLRKGELVGIRGSADIDEYDIARMMMGNDYAAAECEKKPEKTGVKDETVIVFDNVTVRRRGQKRPLLDKVSFQARKGEILGFAGVGGNGLGVIEAVLGGFLHPSQGKILHNGRDISALGIRALRKQGLSYVPADRLRVGSARDALIEENLIINCRDEFSKGMIIRKKAVREFAQRLAECYGIEGAKVNEKAAFLSGGNLQKLILAREINKLSDYIVFSEPAWGLDIASSNFIYREIEALREKNAAVILISTNLDEIISLADRIAVMYRGKIAGIYENTGEAIKKIIGDSMQGIVIKE

SEQ ID NO: 65045 - DNA, 342 bp, Unknown
  Obtained from environmental sample
  misc_feature (1)..(342): n is a, c, g, or t
atgaaagaacgctctaaactgtcaggcgggcctcctcaatcgcagataacagggcaaaactcgggaattttccgcccgcttacggttttctcttatctttttatcccgtttatttcgcttttagttcttgtgctgcttgtttttattttaagcgatactccgggaaaggcgctttactttttcttccttggccctttcaggaatttattcagtttcggaaatatgttaaacgccgcgatcccgcttataatcggggccttaggcgtatctgtagcgatgaaagccggaagctttaacttgggcggggaagggcagattacctcggcgtctcggccaatctga

SEQ ID NO: 65046 - protein, 113 aa, Unknown
  Obtained from environmental sample
  misc_feature (1)..(113): Xaa is any amino acid
MKERSKLSGGPPQSQITGQNSGIFRPLTVFSYLFIPFISLLVLVLLVFILSDTPGKALYFFFLGPFRNLFSFGNMLNAAIPLIIGALGVSVAMKAGSFNLGGEGQITSASRPI

SEQ ID NO: 65047 - DNA, 1005 bp, Unknown
  Obtained from environmental sample
  misc_feature (1)..(1005): n is a, c, g, or t
ttgaatggtgaggaattctacgacgagcttaaaaaaactgccgactacagggaacggatggacattgaaaaggcagcgatgatgagcgagagcgtaaggcggcggaaggcttttgttgaagcggcaacatgggtttccgctttgcgggttagaacagatgaacttgatcctaatccgtggctcttgaatgtaaaaaatgggactgtagatattcaaagcggcgaattcagggagcataggcaagaggacatgattacgaaaatcgctaatgtggaatatgacccgaaagcagactgcccgatgtggaagaagtttgtccgtgaaatcatggactacaaagcggacataataaaattcgtccagactgctgcggggtggtctttatccggcgacatatcagagcaaacgatgtttattctgtacggtactggcgcaaacggcaaatccacctttttgaatacgataatgtatctgcttggcgattacgccatcgccacgccgacagaaacttttatgaagaaatcgggggacaattattcaaatgacgttgcgcgtctgcgaagcacacggtttgtaacgactactgaagttgagcaggggcggcggctgtccgagccgctaataaaaaagataacaggcaacgacgaaatgacggcaaggtttttgtatggggagttctttaattttaagcctactttcaagatattcatggcgaccaaccataagcctgttattaaaggcactgatcatgggatatggcgaaggataaagctaattccttttacgacaaggataccggaagaaaaacaggacaagcatcttgaattgaaactgcgtgaagaagcaagtgaaattttaaactggctgttggaagggatagcgaattggaaacaggaacgcttaaaaacgccaaaggccgtattgtttgccactgacgaatacagggatgaaatggacgttatcggaaattttattaaagaaaaatgcggacaaaaaaggaaatga

SEQ ID NO: 65048 - protein, 334 aa, Unknown
  Obtained from environmental sample
  DOMAIN (62)...(334): Poxvirus D5 protein-like
  misc_feature (1)..(334): Xaa is any amino acid
MNGEEFYDELKKTADYRERMDIEKAAMMSESVRRRKAFVEAATWVSALRVRTDELDPNPWLLNVKNGTVDIQSGEFREHRQEDMITKIANVEYDPKADCPMWKKFVREIMDYKADIIKFVQTAAGWSLSGDISEQTMFILYGTGANGKSTFLNTIMYLLGDYAIATPTETFMKKSGDNYSNDVARLRSTRFVTTTEVEQGRRLSEPLIKKITGNDEMTARFLYGEFFNFKPTFKIFMATNHKPVIKGTDHGIWRRIKLIPFTTRIPEEKQDKHLELKLREEASEILNWLLEGIANWKQERLKTPKAVLFATDEYRDEMDVIGNFIKEKCGQKRK

SEQ ID NO: 65049 - DNA, 1416 bp, Unknown
  Obtained from environmental sample
  misc_feature (1)..(1416): n is a, c, g, or t
atgaaactgatctttgaaaaaagtaaaaaaggaaggggctgttctattcttcctccatgcgatgtaagctaccacgagcttcctgaaaatatgcttagaaaggtgaaagcccgccttccttctatggacgagaacgaaatatcccggcattacagcgcgatggcaaaacgggccttcggcgtcaacgacggcttttatccgctgggttcctgcactatgaagtacagcccaaaggtaaacgaggaaatcgcttctctgccgggtttcgcgaatattcatccccttcagccggcgcacaccgttcagggctgccgtaagattctggatattgcctcggaatacctgaaggaaattaccggtatggacgcgttctgcttccagcccgccgccggggcgcacggcgagcttaccggcctgcttcttttcaaggcgtaccacgttagcaggggagattctgcccgtaaaaaaataattattcccgacagtgcccatggaaccaatccggcgaccgcaaacatggtgggctacgaagtaatcaatatcgcttcaaacagctctggctgtgtagacctcgaatctcttaaagcggttcttggtccggatactgcgggcctaatgctgaccaatcccaacacgcttggaattttcgatccgaatattctcgaaattacccggcttgtacacgaagctggcggactaaactattacgacggggcaaacctaaatgcaatcatgggcattgtccgtcccggggacatgggctttgacgcggttcacctcaacctgcataaatccttctccaccccgcacggcggcggcggccccggttccggcgctgtgggatgcaaaaaagaactcatcccctttatgcccattgattccatggatgacgcagaaacccatcaacaaagcataggaagggttaaggcgttctacggtaatttccttgtggtggtaaaagccgccgcctacctgctcatgctcggcaaagagaatattcccgaagccgcaagaactgcagtcctaaacgcaaactatctaatgaaaagattaagcgaaaaattccacatttcgacagccagcccatgcatgcatgaatttgtaatttcgcttgagaaactcaaagagagctgtggagtctccgccatggacatggccaaggccctgcaggacaagggcatgcaccccccgacaatgtacttcccgcttatagtgcatgaagctctgatggtggagccaacggaaaccgaatcaaaggaaacgctggacgaagccgccgacgctttcatcgccatctatgaaagggctaccaaagagcccggcgttttcagtgccgcgcccttaacgacggctatcggaaggcccgatgatgtaaaggcggcgcgacagcctgttgtctgttattgcatggattaa

SEQ ID NO: 65050 - protein, 471 aa, Unknown
  Obtained from environmental sample
  DOMAIN (73)...(429): Glycine cleavage system P-protein
  misc_feature (1)..(471): Xaa is any amino acid
MKLIFEKSKKGRGCSILPPCDVSYHELPENMLRKVKARLPSMDENEISRHYSAMAKRAFGVNDGFYPLGSCTMKYSPKVNEEIASLPGFANIHPLQPAHTVQGCRKILDIASEYLKEITGMDAFCFQPAAGAHGELTGLLLFKAYHVSRGDSARKKIIIPDSAHGTNPATANMVGYEVINIASNSSGCVDLESLKAVLGPDTAGLMLTNPNTLGIFDPNILEITRLVHEAGGLNYYDGANLNAIMGIVRPGDMGFDAVHLNLHKSFSTPHGGGGPGSGAVGCKKELIPFMPIDSMDDAETHQQSIGRVKAFYGNFLVVVKAAAYLLMLGKENIPEAARTAVLNANYLMKRLSEKFHISTASPCMHEFVISLEKLKESCGVSAMDMAKALQDKGMHPPTMYFPLIVHEALMVEPTETESKETLDEAADAFIAIYERATKEPGVFSAAPLTTAIGRPDDVKAARQPVVCYCMD

SEQ ID NO: 65051 - DNA, 1392 bp, Unknown
  Obtained from environmental sample
  misc_feature (1)..(1392): n is a, c, g, or t
ttggggaagcgcttctttcagccggggactacgaggcgttgctatccaaataattacaggagaataaccatgggttcctatctggcactcaccgacaaagacaggcaggagatgcttgccgttttaggaattaaaaaagtagatgagcttttctcccaagtacccgaaaaggtcaaggtaaaagagttaaagattccatcggggctttcagaaatggaagtaagccggaaactatccggcctggcggcggaaaacaaaacctttccggtgatttttcgcggtgccggtgcttacaggcactacattcccgccgcagtaaaacgcataacgtccaacgagaccttcatcaccgcctacacgccctaccaggcggaaataagccagggaatactccagtcaatttttgaataccaaagcatgatctgcgagcttaccgggatgaacgtttcaaacgcatcgatctatgatggagcaagcgcggcggcggaagcggtaaacatgtgcagggacagacaaaggcaaagcatttttgtctcatcctgcgctcacccccaggtgattcagacaattcgcacctactgcatgggctacggtattcccgtaaccgttgttccaaaaggccccgacggcaaaaccgatgcggatgctttaaaagaattgctttcggagtcaaatgacacagccgctggattttacatccaaagccccaacttttacgggcttatcgaggacatacccgcttttgccgatattacccattcggctggcgcaacgctcgttgccggtgttaatcccatttccttgggaatacttgaaagtcccggcaatcttggcgctgatatagcggtcggcgaaggccaacccctgggaatgccgctggcttacggcggcccttacctcggctttatggcctgcaaaaccccctggatgagaaaacttcccgggcgcatcatcggcgaaaccaccgacaccaggggcgggcgggcctttgtgcttaccctgcaagcaagagaacagcacatacgcagggaaaaggcgtccagcaacgtctgctcgaacgaggcgcactgcgccctaactgcggcggtgtaccttgcgataatgggcgaggaaggctttgcggaagccgcccgccaatgccacgccaaggcagtctacgccgcgaaccaaatctcgggaattcccggtttctcccttgtctacaacggagagttctttcacgagtttgttgcccgctgcccggatacgggaaagaccctgaaattgctggaaggccacggaatactcggaggttatcccctttccaaaaatgagcttctctggtgcgttacggaattaaacaccaaagaggagatcgataatttggtgaaaattctaagggaggggaaataa

SEQ ID NO: 65052 - protein, 463 aa, Unknown
  Obtained from environmental sample
  DOMAIN (25)...(459): Glycine cleavage system P-protein
  misc_feature (1)..(463): Xaa is any amino acid
MGKRFFQPGTTRRCYPNNYRRITMGSYLALTDKDRQEMLAVLGIKKVDELFSQVPEKVKVKELKIPSGLSEMEVSRKLSGLAAENKTFPVIFRGAGAYRHYIPAAVKRITSNETFITAYTPYQAEISQGILQSIFEYQSMICELTGMNVSNASIYDGASAAAEAVNMCRDRQRQSIFVSSCAHPQVIQTIRTYCMGYGIPVTVVPKGPDGKTDADALKELLSESNDTAAGFYIQSPNFYGLIEDIPAFADITHSAGATLVAGVNPISLGILESPGNLGADIAVGEGQPLGMPLAYGGPYLGFMACKTPWMRKLPGRIIGETTDTRGGRAFVLTLQAREQHIRREKASSNVCSNEAHCALTAAVYLAIMGEEGFAEAARQCHAKAVYAANQISGIPGFSLVYNGEFFHEFVARCPDTGKTLKLLEGHGILGGYPLSKNELLWCVTELNTKEEIDNLVKILREGK

SEQ ID NO: 65053 - DNA, 1785 bp, Unknown
  Obtained from environmental sample
  misc_feature (1)..(1785): n is a, c, g, or t
atgatcagatcggccgagagggcgctggccagtgacattgcggaagtcggaagcactaccgcgaaggcggtggaaaaagcggaaagggctcttgcgtcattggaagcggaagcgaagagctttgaattcctctgcgttggccacgcacacatggatatgaactggatgtggggttacaacgaaacagtatctttaaccctgggaactatagaaaccatgctggacctgatggaagaattccccagtttcacgttttctcagtcgcaggcgtcggtttatgaaattgtcgaaaagttctctccctctatgctggaagaaatcaaaaaaaggattaaagaaggccggtgggaagttctggcttccacctgggtagagacagacaagaatatgccttcaggggaaagccttacccggcatattctgtatacaaaaaaatatttccagcggcaattcggcattaaaagcgatgagctggtcattgactttgagcctgatacttttggtcataaccgcaacgtgcctgaaatttgcgcttcaggcggcgtgaagtattattaccactgccgcgggcatatcggggataaaatcgcttaccgctggcaatccccttccggcgcggagcttctgatctacaccgaacctttctggtatatcgccagtgcggacaatctcagagccgaatacgcgcctgagctttcccggctcacttttaataaaaccctgcttaacgtttacggcgtaagaaaccacggtggaggggctacccgcctggaccttaaacgctttatcgaaatgaattcctggccgctctaccccaaatttactttcggaaaacttaaagattactttgagattcttgagaaatccagggggaaatttacccttcttaacgatgaaattaatttcttttgcgacggctgttatacaactcagacccgcatcaaggcgggaaaccgaaaatccgaaaggctgttggcggacgctgagttctatgccgcttccgccgcgagctgggctaaaaatccctatcccggagagcttttgtcaaaggcatggcgaaaagttcttttcaatcacttccatgacatcatccccggttccggtgttacagaaacacgggaatatgcctcagctctttatcagcaagttttcgcaacctctgaatccgtgcggactttggccctggaagccgtggccgccagaattaagcggcagggactagccggggaagatctgatagatacggataattccagagggcagggcgccggggtgggtactgaccaaaccggcaggaacaccggcgtaaggcggctataccatgtttttaattccctgccatatgatcgggaggaaacaatttctataacggtttgggattacgagggcgacatcaacaatatcgggctcgaagattgccacggtaaaaacctgccggtgcagcttggggaatcgggaagatactgggggcatcaatttaacaaggtgataaccagtgtgtccgtaccttcgtgcggctatactacagtaattctggacaggaaagttaattatgaacccaaaactgttttcacaaataactcgctatgtcagtgccccgatacatttattttggaaaatgaattgatccgcgcagttctcaaccccctggacggcagcatagcgtcctttatcgacaagaaaaccggaaccgattttgccccgcctgacgggggctttgggtttttcaggctggcacccaggaggctcatcagaaaagcattaccgctgggaaagggggaatga

SEQ ID NO: 65054 - protein, 594 aa, Unknown
  Obtained from environmental sample
  DOMAIN (42)...(298): Glycosyl hydrolases family 38 N-terminal domain
  misc_feature (1)..(594): Xaa is any amino acid
MIRSAERALASDIAEVGSTTAKAVEKAERALASLEAEAKSFEFLCVGHAHMDMNWMWGYNETVSLTLGTIETMLDLMEEFPSFTFSQSQASVYEIVEKFSPSMLEEIKKRIKEGRWEVLASTWVETDKNMPSGESLTRHILYTKKYFQRQFGIKSDELVIDFEPDTFGHNRNVPEICASGGVKYYYHCRGHIGDKIAYRWQSPSGAELLIYTEPFWYIASADNLRAEYAPELSRLTFNKTLLNVYGVRNHGGGATRLDLKRFIEMNSWPLYPKFTFGKLKDYFEILEKSRGKFTLLNDEINFFCDGCYTTQTRIKAGNRKSERLLADAEFYAASAASWAKNPYPGELLSKAWRKVLFNHFHDIIPGSGVTETREYASALYQQVFATSESVRTLALEAVAARIKRQGLAGEDLIDTDNSRGQGAGVGTDQTGRNTGVRRLYHVFNSLPYDREETISITVWDYEGDINNIGLEDCHGKNLPVQLGESGRYWGHQFNKVITSVSVPSCGYTTVILDRKVNYEPKTVFTNNSLCQCPDTFILENELIRAVLNPLDGSIASFIDKKTGTDFAPPDGGFGFFRLAPRRLIRKALPLGKGE

SEQ ID NO: 65055 - DNA, 912 bp, Unknown
  Obtained from environmental sample
  misc_feature (1)..(912): n is a, c, g, or t
atgaccgcctggatgatcggtcgttttaagaacatcgaaaacctcggcaagggttttgagataaaatccagcgcccagggcgggctgcggaatgcctggcatttgaaatttagttttggcaaagcctctaccatggaagcggtgatttctctggattcaggttcaaggctgctgcgttacgatataacctgtgattggaaagaattcggttcagataaggaaatacccaaccttcatttccatttaccattggggtggaaaccggaatatctttttgatgttccctttggcgtaaaagaacggaaacctgtagacatggatcttcccggggaaagttttgttatcgcgaaaaattccgccggcccttctttgggccttttgtccatggataaatacggtttccgctgcaaagaagacagcctttccctcaccttaatcaggagttctattgaccctgatccgacacctgaaacaggcagacaccgcatctcctttgccctgattccattcggggcttcggaaagcagcgaggacattgttcgcgaaagccttacctaccgccgtgccatgacgattatttccgggaaaaacaaaggcggaaaaactcaagacctcgaaccttcaggcagtttcctcaagcttaagggcggcgttctttcagccgttaaacgtgcggaatctgaaactactgggactcaggaagataagaaacttatctttaggatttatgaaatccagggaaaggacaccaccgctgaattgtcccttgcctttgccgcatcttccgctttcacaagcaacgcccttgaggaaaagcatctggaagattgtaagctttccggggatggaaaaacagttacatttaaactgccaaagtacagcgtcaagactttgtttgtcgagctgaagtaa

SEQ ID NO: 65056 - protein, 303 aa, Unknown
  Obtained from environmental sample
  DOMAIN (4)...(299): Glycosyl hydrolases family 38 C-terminal domain
  misc_feature (1)..(303): Xaa is any amino acid
MTAWMIGRFKNIENLGKGFEIKSSAQGGLRNAWHLKFSFGKASTMEAVISLDSGSRLLRYDITCDWKEFGSDKEIPNLHFHLPLGWKPEYLFDVPFGVKERKPVDMDLPGESFVIAKNSAGPSLGLLSMDKYGFRCKEDSLSLTLIRSSIDPDPTPETGRHRISFALIPFGASESSEDIVRESLTYRRAMTIISGKNKGGKTQDLEPSGSFLKLKGGVLSAVKRAESETTGTQEDKKLIFRIYEIQGKDTTAELSLAFAASSAFTSNALEEKHLEDCKLSGDGKTVTFKLPKYSVKTLFVELK

SEQ ID NO: 65057 - DNA, 747 bp, Unknown
  Obtained from environmental sample
  misc_feature (1)..(747): n is a, c, g, or t
atgctcaaattaaaggtaattgcctgcgatgtgatgaggagggagattttctttcttgcaagtaaatctccctgttatgtagatgtcacgtttttgtctcaggggcttcatgtaactcctgacaagttgcgggctgtactgggcgaaaacattgaaaaggcaaatcaggaattcccctatgaccattacggtgaaaaggcatattacgattatataattattatctacggtctctgcgataacggtattaccaatctttccagtccgaaaattcccctggtgatcccacgggcccacgattgtataagtttgcttcttggctccagggaacgctacaatgagctttttaatcaaagccccggaacctactggtattcccgtggctggattgaatgttccctacagccaggagaggaacgttacctaaaaaccaggcaaagttatgtggaaaaatacggagaggataacgcggattacctgatggaaatggaacagggctggtttaaatcctatgatcgtgcgttttttatcgactgggaagagctgggcaattccgagtactaccgttcatacacgaaaaaatgcgccgcctatctgaagtggaaatatgaggaataccagggctcgcctattctcctggaaaagatcctctcaggctgttttgacgaggaagaggttctggttgtcccgccgggaatgaaagtcgccgccagttttgatgacaaaataataaaagcctcgccataa

SEQ ID NO: 65058 - protein, 248 aa, Unknown
  Obtained from environmental sample
  misc_feature (1)..(248): Xaa is any amino acid
MLKLKVIACDVMRREIFFLASKSPCYVDVTFLSQGLHVTPDKLRAVLGENIEKANQEFPYDHYGEKAYYDYIIIIYGLCDNGITNLSSPKIPLVIPRAHDCISLLLGSRERYNELFNQSPGTYWYSRGWIECSLQPGEERYLKTRQSYVEKYGEDNADYLMEMEQGWFKSYDRAFFIDWEELGNSEYYRSYTKKCAAYLKWKYEEYQGSPILLEKILSGCFDEEEVLVVPPGMKVAASFDDKIIKASP

SEQ ID NO: 65059 - DNA, 2046 bp, Unknown
  Obtained from environmental sample
  misc_feature (1)..(2046): n is a, c, g, or t
gtgttggtatcggcgttgcccacgcccacgcggagcggttacgccttcgacagttggtacacgaggcctgttaccggcgctaaagtgacgcagagcacggcgtatacatcgaacgatacaatttacgcccattggacgcttgcgacctacactgtaacgttcctacccaacggcggcgcggttactccgacgaccgtcttggtaaactccgacgacggcaagttaccgtatttgcccataccgaaactcaacctttacgcctttgacggctggtacaccgcgccgacgggaggtactaagataacgctgaacacggtgttcaattcggacgaggctgttttcgcccattggatccctctctacattataaggttcaacgccaacggcggcacggtttccatcgctgcggacacaaccggcgcggacgggaaattggcggctctgcctacgcctgtccccgccaataacggcgagacgttcaagggctggttcacggcgccggcgagcggcacggaggtaacgacaagcactgtgttcaccggcgacgccacgctctacgctcagtggtcgcccgccgctgtgtcttacaccgtgacgttcaaccccaacggcggtttggtgaacccgacctcccgcgtaacgaccggcgacggaacgctcgcggcgctgccgaccccggcgagagagaattacgcctttaccggctggttcacgtcggcgacggtaggcagcacggaggtgacgacggattacgtgttcaccggaaacacgacgatctacgcccgatggacgcctatctatactgtaactttcaatcccaacaacggcgttgtcaacccgacatcggcgaagatcaacgccgaagggctgattgatggaacattgccgacgccgacgagggccggttacaagttcgacggctggttcacgacgtcggcggcgaccggcggtttggaggtgacggaggattacgtgttcagcgcgaacaccaccatctacgctcggtggacgcttgttgtgtacacgataatcttcgacgccaacggcagcacggttaccgtgtcctccggcttgactggaaccggcggcaggttagcgtcattgcccacgcctgcggcgagaaccggttacacgttcgacggttggttcaccgaggagattggcggcacgagggtgacgaccagcacggcgtttaccggcgacgcgacggtctacgcccagtggtcgcctatctacaaggtgactttcgatcccaacggcggtgtagtgacgacggcgtccgccaatacgggtgttggcggaaaacttactacgttgcctacgccaacgctgaaggattacactttcgtaggttggtacactgagaaagagggcggtgtgcgtgtaacgacgagcacggtgtttgacgacgacgcgacaatttacgcccagtggtcgttgttcacccacgctaaggtgacattcagcgccggcgtcaacggtacattgagggcgaccgtaggcggtctcccgattacccccggcgattcggtcgccatcggcaaggacatagtgttcacggcagtccccaacgacgggtacaaggtagccggttggacgatcaacggcgcggttgtagtagacaccttctttacgtatgtacacgcgggtctgtcgaacacgaccacggtatcggtgacgtttgagcggagggtatccgtggcctcgcccaaccgcgagattccgagcggcgcggcgggcggtgatgtggccgccatagcgccggtaaaagcgctgtcgggcgttgtgacagtaggcccgaatccggtaagggtcggcggagacgccgcgatctactggacaggcggcaaggcggttaaaggcagtttgtcggtgttcaacgccgtaggtcaaaaagtagcggctgttaatgtcaacggcacgaataagataggtacgtggaaagtaggcgacgtagccgagggcacgtatttaatcaaaggcgtgttgaaggataaaaacggggttagggttgttgtgtcggcgttggttggtgtggttaggtag

SEQ ID NO: 65060 - protein, 681 aa, Unknown
  Obtained from environmental sample
  misc_feature (1)..(681): Xaa is any amino acid
MLVSALPTPTRSGYAFDSWYTRPVTGAKVTQSTAYTSNDTIYAHWTLATYTVTFLPNGGAVTPTTVLVNSDDGKLPYLPIPKLNLYAFDGWYTAPTGGTKITLNTVFNSDEAVFAHWIPLYIIRFNANGGTVSIAADTTGADGKLAALPTPVPANNGETFKGWFTAPASGTEVTTSTVFTGDATLYAQWSPAAVSYTVTFNPNGGLVNPTSRVTTGDGTLAALPTPARENYAFTGWFTSATVGSTEVTTDYVFTGNTTIYARWTPIYTVTFNPNNGVVNPTSAKINAEGLIDGTLPTPTRAGYKFDGWFTTSAATGGLEVTEDYVFSANTTIYARWTLVVYTIIFDANGSTVTVSSGLTGTGGRLASLPTPAARTGYTFDGWFTEEIGGTRVTTSTAFTGDATVYAQWSPIYKVTFDPNGGVVTTASANTGVGGKLTTLPTPTLKDYTFVGWYTEKEGGVRVTTSTVFDDDATIYAQWSLFTHAKVTFSAGVNGTLRATVGGLPITPGDSVAIGKDIVFTAVPNDGYKVAGWTINGAVVVDTFFTYVHAGLSNTTTVSVTFERRVSVASPNREIPSGAAGGDVAAIAPVKALSGVVTVGPNPVRVGGDAAIYWTGGKAVKGSLSVFNAVGQKVAAVNVNGTNKIGTWKVGDVAEGTYLIKGVLKDKNGVRVVVSALVGVVR

SEQ ID NO: 65061 - DNA, 1104 bp, Unknown
  Obtained from environmental sample
  misc_feature (1)..(1104): n is a, c, g, or t
gtgttcccgataaagaatgtgacgtctgacatcacgctctacgcgaagtgggagatcaacagttatgtgataacgtggtggaccaacggcgggacttccgcgccggtttttgtgtcggctgtcacttacggcggcagcatagatagcgcgatgtcggcgggttcaaaggcggggtatgcgtttgacggctggtatacagacgaagcgttaacggctccggctgtgtttccggtaccggatgttacgggggaaaaatcgttctacgctaagtgggtgcccgcttatactgtaacgttcaacgccaaaggcggcacggtgactcctacgtccgccgtgacgggcgcgggcgggaaattggattcgttgccgacgcctaagagggacggttacacgtttgacgattggtacaccgatacgacgtacatcacaaaggtaacggtaaatacggagttcagcaagaacgatacaatttacgctcattgggcgcctataacctatacggtaaggttcgtcctatattccggcacggcgactccgacgtctatagcggtaggtacaaacggtaaactcccgtattggcctacaaccacgccgccaaccggcggtaattacgtttttgccggttggtatacggcggcgaacgtcacggacggcgtgaaggtggatacaagcacggcggtattcagtaaggactctactatctacggccggtggactaccgttcctatttttgcgataacgttcaatcccgccggcggtacggtaagcccggctgtcggcgcaaccggccccgacagtacgctgtcaatctcgttgcccgtacctgcaaaggacggttacacctttgacggctggtggacggattcgaccggcggcgagagggtgacgtcgagcacgaagttaccgcgaacggcacgatttacgctcatggacgaccggcgccgccgtcccgtacaccatctggttcaacgccaacggcggcacggtaagccccgcgtccggcacgacgggaaccgggggagtgttggtatcggcgttgcccacgcccacgcggagcggttacgccttcgacagttggtacacgaggcctgttaccggcgctaa

SEQ ID NO: 65062 - protein, 367 aa, Unknown
  Obtained from environmental sample
  misc_feature (1)..(367): Xaa is any amino acid
MFPIKNVTSDITLYAKWEINSYVITWWTNGGTSAPVFVSAVTYGGSIDSAMSAGSKAGYAFDGWYTDEALTAPAVFPVPDVTGEKSFYAKWVPAYTVTFNAKGGTVTPTSAVTGAGGKLDSLPTPKRDGYTFDDWYTDTTYITKVTVNTEFSKNDTIYAHWAPITYTVRFVLYSGTATPTSIAVGTNGKLPYWPTTTPPTGGNYVFAGWYTAANVTDGVKVDTSTAVFSKDSTIYGRWTTVPIFAITFNPAGGTVSPAVGATGPDSTLSISLPVPAKDGYTFDGWWTDSTGGERVTSSTKLPRTARFTLMDDRRRRPVHHLVQRQRRHGKPRVRHDGNRGSVGIGVAHAHAERLRLRQLVHEACYRR

SEQ ID NO: 65063 - DNA, 588 bp, Unknown
  Obtained from environmental sample
  misc_feature (1)..(588): n is a, c, g, or t
atgaaagaacaattttcaggcgagacaagggcggggatactgattcacgcgcttccgtacattcaaaattttcaaaataaagtaattgtcgttaaatacggcgggaacgccatgcggagcgaagaactgaaaaaagccgttatcgacgatataatccttatggcctgcgtgggaattcacaccgtgcttgtgcatggcggaggccctgaaatcgaggcaatgctgaaaaagacgggaaaggagagccgctttatcaacgggcttcgctacaccgacgaagagacgatggacattgtccagatggttctgtgcggaaaagttaataaggagatagccgcccttatagaaaagaacgggggcagcgcgatcggcttatgcggcattgacggcgcaatgttgaaagcgcgccggatgaagggcgatgccgaccttgggcttgtaggagaaattgaacaggtaaacgtggagttgttaacgtcaatcttgaattccggcgctattccggttatatcatcggtcgcctacgggacgggggaggacgaaggaaaagccctcaatataaacgccgatatgccgccgcaaaaatag

SEQ ID NO: 65064 - protein, 195 aa, Unknown
  Obtained from environmental sample
  DOMAIN (27)...(195): Amino acid kinase family
  misc_feature (1)..(195): Xaa is any amino acid
MKEQFSGETRAGILIHALPYIQNFQNKVIVVKYGGNAMRSEELKKAVIDDIILMACVGIHTVLVHGGGPEIEAMLKKTGKESRFINGLRYTDEETMDIVQMVLCGKVNKEIAALIEKNGGSAIGLCGIDGAMLKARRMKGDADLGLVGEIEQVNVELLTSILNSGAIPVISSVAYGTGEDEGKALNINADMPPQK

SEQ ID NO: 65065 - DNA, 942 bp, Unknown
  Obtained from environmental sample
  misc_feature (1)..(942): n is a, c, g, or t
atgaaagaaattaaaggcggagtttgcgccccaaagggattttcagccggcggtatacggtgcggcatcaagcccggttcccaaaaaaaagatttggctcttatttactctgaaaaagaatgtaacgcggcggctatgtttacgtctaacaaggtgtgcgccgcaagcgtgcaggtaagccgcgaaaatatcgcagatggaaagttacgcgccataatagccaattcaggcaacgctaacgcctgcacgggacaggcgggaatggacgcggcgaagcgcatggttaagcttgccgctagcgctctttcaatcccgcaatcgcaagtcgccgtcgcttctaccggagttatcggcgtaccactgccggttttcgtgatagaggaaaatatagccgcgttaaaggcaagcctgcaaaatgacgaacagggtcacgccgccgcgcttgaggccattatgacgaccgatgtccgcaaaaaggacattgccgtggaagcggaaataggcggagagcttgtgcgtatcggagccatgacaaaaggttcaggaatgattcatcccaacatggcgactatgctcgcttttatcaccacggatgcggcggttgaaaataccgcgcttgagtccgctctgcgcctcgccgtgaaacgatcctttaaccgcctgacggtagacggagacacctcaaccaacgatatgattgtaataatggcgaacggcgaggcggataatactcccgttaactcttcaaacaaatgcccgcattgcaccgcggattataacgctttttacgaagctcttgaatatgtatgcgtttccctcgcccgccaaatggcacgggacggggaaggcgccactaaacttgtaacggttacggttacaaatgccgcaagcgaggacgcggcggaaactctcgctaaatccgtcgcctcatccagtctgtaa

SEQ ID NO: 65066 - protein, 313 aa, Unknown
  Obtained from environmental sample
  DOMAIN (14)...(313): ArgJ family
  misc_feature (1)..(313): Xaa is any amino acid
MKEIKGGVCAPKGFSAGGIRCGIKPGSQKKDLALIYSEKECNAAAMFTSNKVCAASVQVSRENIADGKLRAIIANSGNANACTGQAGMDAAKRMVKLAASALSIPQSQVAVASTGVIGVPLPVFVIEENIAALKASLQNDEQGHAAALEAIMTTDVRKKDIAVEAEIGGELVRIGAMTKGSGMIHPNMATMLAFITTDAAVENTALESALRLAVKRSFNRLTVDGDTSTNDMIVIMANGEADNTPVNSSNKCPHCTADYNAFYEALEYVCVSLARQMARDGEGATKLVTVTVTNAASEDAAETLAKSVASSSL

SEQ ID NO: 65067 - DNA, 1116 bp, Unknown
  Obtained from environmental sample
  misc_feature (1)..(1116): n is a, c, g, or t
atgaaagccggtgttatcggcgctacaggttatgccggcgccgagttggtcaggctcctttcggggcatccaaaaattgaaaaattatacctttcctcggtaagttttgaaggggagaatatagaagaagtctacccgaactttttgggcagaatctcctgcaagcttcaaaaagccgaagaagtagttgccgccgccgatgtggtttttgccgctttgccgcacggagtaggggagaccttcgccgccgcctgtatggaaaggaaaattcattttatcgacttttcagccgattttcggtttgacgatgacgagcctgtttacaccgcgtggtacggaaaatcctataaatatccagaattacacaagagttcaatttacggccttgttgaattaaacaggcaaaaaataaaagccgttgccgcgaagggacccgttatcataggcaaccccggctgttatcccacaggcggctctctaggcgcgtttcccgctctggcaaagggacttaacagcgaagaaatgccagtcatcgttgacgccgtcacaggcgttacaggcggcggcagggagccgtcccgctcttttcattacgccgaatgcgccgattccgtctcgccgtacaaagtcgcctcccacagacattcgccggaaattgcgcgtaacctcgcggcgatggccgcagttggaaacaatcccgctccactattgatttttacgcctcgcctcgctcccgtaaacaggggaatcttaagcgttatttatattcctcttaaaccgcagtggcgcgtaaaagtggacaacgccaatcttcctccgtcaaaagaaattgaggcgaaggccgccgaaatccgcaagctttattctgatttttacaaggatgaaccgtttgtgcgggtgcttccggcgggccttacagccgccaccaaccgcgtgcgccagtcaaatttctgcgacatctccgtccatcttgatttaaacggctccacattgattgtcactacagccatagacaacatggtaaaaggcgccgccggacaggcggttcagaatatgaacgtcttgttcggttttgacgaaaaagccggtcttgacgcgataccggccctgttttag

SEQ ID NO: 65068 - protein, 371 aa, Unknown
  Obtained from environmental sample
  DOMAIN (167)...(342): Semialdehyde dehydrogenase, dimerisation domain
  misc_feature (1)..(371): Xaa is any amino acid
MKAGVIGATGYAGAELVRLLSGHPKIEKLYLSSVSFEGENIEEVYPNFLGRISCKLQKAEEVVAAADVVFAALPHGVGETFAAACMERKIHFIDFSADFRFDDDEPVYTAWYGKSYKYPELHKSSIYGLVELNRQKIKAVAAKGPVIIGNPGCYPTGGSLGAFPALAKGLNSEEMPVIVDAVTGVTGGGREPSRSFHYAECADSVSPYKVASHRHSPEIARNLAAMAAVGNNPAPLLIFTPRLAPVNRGILSVIYIPLKPQWRVKVDNANLPPSKEIEAKAAEIRKLYSDFYKDEPFVRVLPAGLTAATNRVRQSNFCDISVHLDLNGSTLIVTTAIDNMVKGAAGQAVQNMNVLFGFDEKAGLDAIPALF

SEQ ID NO: 65069 - DNA, 414 bp, Unknown
  Obtained from environmental sample
  misc_feature (1)..(414): n is a, c, g, or t
atgatttttattaaacggccccgtatattggccgcgcttgtttttattttacttttttccgcctgtaatactacgataaatatcagcgaagatatgtctccggcggagttaatacaacgcgcgcaggaggcatcagataaaaaccgttacaatgccgcccttcagtattataaggctttaagcgaacgcaaccgaagcaatatcgatcttgttatcacatcagaatatgaaatcgcctttattcactacaaacaaaaaaagtaccaacaggcaaaaaacgaattaacggaagtactggagtactacaacacccccgacgaagaactcctaccccaacactacaagaaactctcaaaaatcgtcattgaccgaatagacaacagggataaaaaacccgctcttactgagaaataa

SEQ ID NO: 65070 - protein, 137 aa, Unknown
  Obtained from environmental sample
  SIGNAL (1)...(21)
  misc_feature (1)..(137): Xaa is any amino acid
MIFIKRPRILAALVFILLFSACNTTINISEDMSPAELIQRAQEASDKNRYNAALQYYKALSERNRSNIDLVITSEYEIAFIHYKQKKYQQAKNELTEVLEYYNTPDEELLPQHYKKLSKIVIDRIDNRDKKPALTEK

SEQ ID NO: 65071 - DNA, 480 bp, Unknown
  Obtained from environmental sample
  misc_feature (1)..(480): n is a, c, g, or t
atggtcgatataaaccacgtagtgcttgtcgggcggctgacaagggatgcggaacttaaatcaatcgcgagcggacaggcggtctgtaaattttctattgcggtgaaccgccgtagaaaaaacggcgagcaatgggaagacgagccgaatttctttgatgtcgtggtctgggggcggcagggcgagtccctacaccagtacctgattaaaggaaaactggtcggcgttgaaggagagttgcgccaggatcgctggcagcaggacgggcaaaaccgttccaaggtggagatagtggccaattacctccaactgcttggaggcaaccccagcggcaattcctccggaggaggaacctcttcgggcggaggcagtccctccttcggagggggcaataattcccatacccagcagcaaggacagaactggcagacccagggcgccccgtcggaagacggctttgccgatgatattccattttaa

SEQ ID NO: 65072 - protein, 159 aa, Unknown
  Obtained from environmental sample
  DOMAIN (4)...(105): Single-strand binding protein family
  misc_feature (1)..(159): Xaa is any amino acid
MVDINHVVLVGRLTRDAELKSIASGQAVCKFSIAVNRRRKNGEQWEDEPNFFDVVVWGRQGESLHQYLIKGKLVGVEGELRQDRWQQDGQNRSKVEIVANYLQLLGGNPSGNSSGGGTSSGGGSPSFGGGNNSHTQQQGQNWQTQGAPSEDGFADDIPF

SEQ ID NO: 65073 - DNA, 333 bp, Unknown
  Obtained from environmental sample
  misc_feature (1)..(333): n is a, c, g, or t
atgtctgaagaaaaatatatggatggcgaacgatctttccggcgcgaccgtgggatggacagccagatggacggacgagacggcgacgacaggatgggccgcggcgggaaaggcggaaaggcgttcttcaataaaaagaaggtatgcaaattctgcgtgcaaaaactcaaaatagattataaggacgtggatacgctgcgccgctttatcaccgagcgcgggaagatcctgccacggcgcataaccggaacctgcgcgaagcaccagcgcgccctggccgtcgccatcaagcaggccaggatcatagctttacttccatttgtagcggaataa

SEQ ID NO: 65074 - protein, 110 aa, Unknown; identical to SEQ ID NO: 55826
  Obtained from environmental sample
  DOMAIN (52)...(105): Ribosomal protein S18
  misc_feature (1)..(110): Xaa is any amino acid

SEQ ID NO: 65075 - DNA, 612 bp, Unknown
  Obtained from environmental sample
  misc_feature (1)..(612): n is a, c, g, or t
atgaaagttattttgaacaaggatctggcccccctcggcgaagaaggggacgtgaaagacgttgccaagggctatgcccggaactatcttttcccaagaaacattgcccttccttataacccgcagacagtcaagctgtttgaggcgaggaaggatgagattgaagcgaagaaagcccagaagcggcaggacgcgatgggccttaaagaacgtcttgaaagccttgagatttccattacaatgcctgcgggcgccaatggaaaactttatggttctgttaccagccacaccgtggcggatgaaatggcaaaacttggcttccagatcgaccgcaagaggatcgaccttgcaagctcgggcattaagaatgtcggcaagtacaaagcggtgattcggctgtacgaaaattcacaggcggaaatccaactgaacatcatcgggcaggaaataaaaaccgaaacccatgaagcgccgccggctcgtccccaccgccgccgcaaggatgaagccgccccggctgcggataaacccgccgccgaaggggaagccgtaacaccggcgccggcggaaacgcatgcttccgcggaaacgcccgcagatggccaagcttag

SEQ ID NO: 65076 - protein, 203 aa, Unknown
  Obtained from environmental sample
  DOMAIN (62)...(148): Ribosomal protein L9, C-terminal domain
  misc_feature (1)..(203): Xaa is any amino acid
MKVILNKDLAPLGEEGDVKDVAKGYARNYLFPRNIALPYNPQTVKLFEARKDEIEAKKAQKRQDAMGLKERLESLEISITMPAGANGKLYGSVTSHTVADEMAKLGFQIDRKRIDLASSGIKNVGKYKAVIRLYENSQAEIQLNIIGQEIKTETHEAPPARPHRRRKDEAAPAADKPAAEGEAVTPAPAETHASAETPADGQA

SEQ ID NO: 65077 - DNA, 993 bp, Unknown
  Obtained from environmental sample
  misc_feature (1)..(993): n is a, c, g, or t
atgaacctgtaccgccctgtaacaataggaaatctcaaacttgacggncatctttttcttgccccggtagccggttactcagaccgcagcttcaggtcgctgtgcgttgagcagggggcgaattttacctttaccgagcttgtctccgccgaggccttatggcgcaatcccgggcattacgggctggatgccggctccgccgccggcagcaaagccgccgccataagcctggtaagccgcggtgccaacgagcggcgttatgcgattcaactgttcggcggcgaaccggaggcggtttacaaagcggcgctgctcctcgccccgctgagaccggacgccgtggacattaacgccggctgcccggtgccgaaagtggtaaagaacggcgcgggctgcgccttgatgaaagaccccgccaacctgggcagggttgtggaagcggcggcaagggcatcaagggaaaccctgggaaacatcccggtaacgataaagatgcgctccggctgggattccgcttcgataaattatgccgaatgcgcccgtattgccgttgagagcggcgccgctatggtcagcctgcaccctcgcacccgcggccagcaatacggcggcaaaagcgactggtcacgcatcgccgatcttgtatcgcggctttctgtgcctgtcaccggttcgggcgatctgtacgcgccggaggacgcaaagcgcatgctggaggaaacaggctgcgccgcggtaatgttcgcgcggggcgcgatgggcaacccgtttatttttcccgagacgcgttctttccttgagacgggcgggtgggaacccacccctttcccggcgcggatggcggcggcttttccgtcatctggaaatgcttgccgcggacatcggcgagcggacggcctgtctggaaatgcgcaagcagttctgcgcctacaccaaaggcatgaaaggcggcgcgccgatacgggagcgggcggttcacgcgcagactattga

SEQ ID NO: 65078 - protein, 330 aa, Unknown
  Obtained from environmental sample
  DOMAIN (19)...(324): Dihydrouridine synthase (Dus)
  misc_feature (1)..(330): Xaa is any amino acid
MNLYRPVTIGNLKLDGHLFLAPVAGYSDRSFRSLCVEQGANFTFTELVSAEALWRNPGHYGLDAGSAAGSKAAAISLVSRGANERRYAIQLFGGEPEAVYKAALLLAPLRPDAVDINAGCPVPKVVKNGAGCALMKDPANLGRVVEAAARASRETLGNIPVTIKMRSGWDSASINYAECARIAVESGAAMVSLHPRTRGQQYGGKSDWSRIADLVSRLSVPVTGSGDLYAPEDAKRMLEETGCAAVMFARGAMGNPFIFPETRSFLETGGWEPTPFPARMAAAFPSSGNACRGHRRADGLSGNAQAVLRLHQRHERRRADTGAGGSRADY

SEQ ID NO: 65079 - DNA, 759 bp, Unknown
  Obtained from environmental sample
  misc_feature (1)..(759): n is a, c, g, or t
ttgaatatcatacttgataccatcaaacaaacgctgattgaaaagcatatagcgatagcgaaaactatcgtggaaatactggacaatacaccgggtcagatgtcgtccgagagtttgttgcggatcgcggaaccgctggatattatagaattgagcgttgccaattcaaacggtatcattatagccagcagcgtccctaaatacataggctttgattataagttatacgaagccacaaaagtgtatatgaagctgatcgacggatctttgactgtgttaagcgaggaaccgcgagcgtccgtactcaatgacgatgtgggcgatataattctgggcgacattaatcattataccggtgtcgcacgtaaaaacggcggcttcatccaaattggttttaacgccagcgtaataggcaggttgcaggaagaaatcaatatttacaaaacaataaaggagacgaaaatagggcaaaatggttttggaatggtgttgtctaatgggtttataacagctcacccttacaaagatacaccagtcaacaatttgtcggatgtatcgggcgaggattggtataaaaccgtaagttacggcaacggctacgcgtggctcaatatagatggtaaacaatattatgtgggatacaagaacgaaaacggcaatactgttgtcgctcttgtgcctgagcaggatttttatatggaacgcaaccgccttctgcttgatacggtaatactcttgttaatacggccgttatcgtaa

SEQ ID NO: 65080 - protein, 252 aa, Unknown
  Obtained from environmental sample
  misc_feature (1)..(252): Xaa is any amino acid
MNIILDTIKQTLIEKHIAIAKTIVEILDNTPGQMSSESLLRIAEPLDIIELSVANSNGIIIASSVPKYIGFDYKLYEATKVYMKLIDGSLTVLSEEPRASVLNDDVGDIILGDINHYTGVARKNGGFIQIGFNASVIGRLQEEINIYKTIKETKIGQNGFGMVLSNGFITAHPYKDTPVNNLSDVSGEDWYKTVSYGNGYAWLNIDGKQYYVGYKNENGNTVVALVPEQDFYMERNRLLLDTVILLLIRPLS

SEQ ID NO: 65081 - DNA, 624 bp, Unknown
  Obtained from environmental sample
  misc_feature (1)..(624): n is a, c, g, or t
atgctggagccgcttaaccagatggtaaaaacaataaatcaaacattcaccgacctggatttgaagccgcaagaaggcgaacaatacaaagacgaagttggaacattaggcgattttttacatttgaccataatcgatcagctgaccggtatttacaacaggcggtatcttgacggcagcttaaaaaagataattaaattactttcccgtaccggcagcagcctgagcgtattaatgatagacattgattatttcaaaaaatacaacgacgcttacgggcatgacgctggggatgaatgcctcagagcggttgcagatgctctttcccaatgtgtaataagggaagaagattttgtcgcaaggtacggcggggaggaattcgccgttgtcttgccgaataccgatgaaaatggcgctaagttggttgcggaaagaatgttggtaaaaatacgtgaatgtaatataccccacgaaaaaagtgatatagccagtcatgttactatctccattggcggtgcgaccaatgtcgttaatcattttcagcatggaaaagactacataaagcttgccgatgaaggcttatacgaatctaagaaaatggccgtaacaggtatacatttttga

SEQ ID NO: 65082 - protein, 207 aa, Unknown
  Obtained from environmental sample
  DOMAIN (39)...(204): GGDEF domain
  misc_feature (1)..(207): Xaa is any amino acid
MLEPLNQMVKTINQTFTDLDLKPQEGEQYKDEVGTLGDFLHLTIIDQLTGIYNRRYLDGSLKKIIKLLSRTGSSLSVLMIDIDYFKKYNDAYGHDAGDECLRAVADALSQCVIREEDFVARYGGEEFAVVLPNTDENGAKLVAERMLVKIRECNIPHEKSDIASHVTISIGGATNVVNHFQHGKDYIKLADEGLYESKKMAVTGIHF

SEQ ID NO: 65083 - DNA, 741 bp, Unknown
  Obtained from environmental sample
  misc_feature (1)..(741): n is a, c, g, or t
atgctgtctgacaggcataccggcattggcggtgacgggatcgtattgatcctgcgttccggcattgcggatgcacgaatgcggatgttcaatgctgatggaagcgaaggcagtatgtgcggaaatgccatccgctgtatcggaaaatatctttatgataacgggatagtaaagaaacggcgtatgcgaatggaaacgcaaagtggtattaaggagctttacctttcaataaaaaacgcacttgtatcatctgtcacggtagacatgggacaagccgaattgaagccgggaaaaatccctgtaaggctcaagggagaaagcgttgtcggaagaaaagtaacaattggcggcaagggatatgccattacctgcgtttccatggggaatccgcatgtcgttgttttttgtaaaaatgtcgataaacttgatttactcaagatcgggccgtcgtttgaaaacgactccatatttccagacaggataaacgccgaatttgtcgaaaacattgccgagggtcaccttaaagtacgtgtatgggaacgaggcagcggtgaaactcaagcctgcggtacaggtgcctgcgcttcagtcacggccgccgtcctaaacggatattgtaacaaaaacacggatgtcaaagtacagcttcctggcggcgaactcattattaaatatacagacaagactgtatacatgacgggtgaatgtgtaaaggtattcgacgggacggcggaaatataa

SEQ ID NO: 65084 - protein, 246 aa, Unknown
  Obtained from environmental sample
  DOMAIN (2)...(95): Diaminopimelate epimerase
  misc_feature (1)..(246): Xaa is any amino acid
MLSDRHTGIGGDGIVLILRSGIADARMRMFNADGSEGSMCGNAIRCIGKYLYDNGIVKKRRMRMETQSGIKELYLSIKNALVSSVTVDMGQAELKPGKIPVRLKGESVVGRKVTIGGKGYAITCVSMGNPHVVVFCKNVDKLDLLKIGPSFENDSIFPDRINAEFVENIAEGHLKVRVWERGSGETQACGTGACASVTAAVLNGYCNKNTDVKVQLPGGELIIKYTDKTVYMTGECVKVFDGTAEI

SEQ ID NO: 65085 - DNA, 879 bp, Unknown
  Obtained from environmental sample
  misc_feature (1)..(879): n is a, c, g, or t
gtggagaacgttcccgaaaacgccgactgcgaaaaggctattcgtgacctcatcgatcagggctgtaacgtgatctacaccaacagctttggttttatggactggacgctgaaagtcgccaatgaatttcccaatgtgtatttcgggcattgctcgggctacaagagggcggaaaacatgtccacctacttcggcaaagcataccaggcgcgctacctttcggggattgcggccggttataagaccaaagtgaacaaaataggctatgtcgccgccttcccgatccccgaggttatccgcgggatcaacgcctttaccctcggcgtccagtcggtgaaccccgacgcgacggtggaggttatctggaccagcacctggtatgatccggctgtcgaaaagcagggggccattgagcttcttaacaagggctgcgacgtaattgcccagcatcaggatacaaccgcgccgcagattgccgcccaggaaagaggggctttcgccgtaggctacaatgtgtcaactccggacgccgcgcccaaggcatacctgaccgcgcccctgttccactgggaggtgttctatgtggatgacgtgaaccaggttatcaatggcacatggaaatcgcgcgcctattgggaaggtttcagcaacggtacggtcacgctggacgatcttaccgccaataatgatccccgcgcgaccgccgcgattaatacggccagggacggaataaaagctggcgcgttagagccctttaccggccccctaagcgatcagagcggcgcggtaaaagttcccgccggcgtaaaaatgaccgatgatgaaatctggaacatgggctggtttgtaaaaggcgttatcggcgtcattcccagctga

SEQ ID NO: 65086 - protein, 292 aa, Unknown
  Obtained from environmental sample
  DOMAIN (1)...(250): Basic membrane protein
  misc_feature (1)..(292): Xaa is any amino acid
MENVPENADCEKAIRDLIDQGCNVIYTNSFGFMDWTLKVANEFPNVYFGHCSGYKRAENMSTYFGKAYQARYLSGIAAGYKTKVNKIGYVAAFPIPEVIRGINAFTLGVQSVNPDATVEVIWTSTWYDPAVEKQGAIELLNKGCDVIAQHQDTTAPQIAAQERGAFAVGYNVSTPDAAPKAYLTAPLFHWEVFYVDDVNQVINGTWKSRAYWEGFSNGTVTLDDLTANNDPRATAAINTARDGIKAGALEPFTGPLSDQSGAVKVPAGVKMTDDEIWNMGWFVKGVIGVIPS

SEQ ID NO: 65087 - DNA, 1560 bp, Unknown
  Obtained from environmental sample
  misc_feature (1)..(1560): n is a, c, g, or t
atgtatattgaaatgcggcacgtctcaaagcgatttgggactgtgctcgcaaatgacgacgcggccctctcggcagaccggggggaagtgcttgccctgttaggtgaaaacggatcgggaaaaagcacgctggtgaatatgctcgccggcatctaccttcccgattcgggttccatatacattgacggcaagcgccgtcatctccggtcgccgcaggaggctattgaggccggaatcggcatggtgcaccagcacttcaagctgatcccggtgatgaacgcctgggaaaacataagcctgggcgaaaagcctaaaagggggcggcccctttcccggtttaaccctttaatcgaaaaacagcgcattaataaaaaaatcgccgcgctggaagagcgtttcggccttaccgtcccgcatgacaagaaaatttacaatatgtcagtgggtgaaaaacagaccgtagaaattatcaaaatgctgtacaggggggcggtcacgctgatccttgacgaaccgactgcggtgctcgcgccccaggaaattgagcggctcttttncatgctcaggaacatgaagcaggaaggctgcgccgttattatcataacccacaagctcaatgaagtaatggaaataagcgaccgcataaccgttatgcgaaaagggaagacgattgggacggttaaaaccgccgatacaaaccccggcgagcttacaaaaatgatggtagggggggcgagcgtttccctggagattaagcgtgacaaacccgccccgcgcgtgaagcccctgctggaaatttacggcctttgcagtcagggcgaggaaggcgagcccgtgcttgacggcgttaatttctccctgtacggcggtgaaattctcggcgtcgccggcatcgcgggcagcggccagaaagagctctgcgaaataatagcgggcctgcggaaatccgacgccggggacattcttttccagggagacagcatttccactctttctccccgggagataacggaacgcggcgtttcgatgagcttcgtcccggaagacaggctcggcatggggcttgccggcggcatgagcatttcggccaatatccttttgcgctcatacgataaaaatccgggccttttcgttgactatgcctcaggggatcttttagcggagcaaattgtcagggattatgacgtttccaccccttcgatccgtcagataataaggaaactttccggagggaatatccagaaggtcctgcttggcagggaaatacatttttcgccaaaagttcttattaccgcgtatcccgtgcgggggctggacgtaggcgcgtcttattttatttataacctgttgaacgagcagaagaagaagggcgtcgccgttttgtatatcggcgaagacctggacgtgttaatggaaatttgcgacaggcttatggtgattcaccacggaaaaattatgggcgttgttgatccccaagataccacgaaagagcgtatcgggcttatgatgttaggtgaaaaacttcccggcggcgtgaccggcgcgggagcggctcaatga

SEQ ID NO: 65088 - protein, 519 aa, Unknown
  Obtained from environmental sample
  DOMAIN (290)...(483): ABC transporter
  misc_feature (1)..(519): Xaa is any amino acid
MYIEMRHVSKRFGTVLANDDAALSADRGEVLALLGENGSGKSTLVNMLAGIYLPDSGSIYIDGKRRHLRSPQEAIEAGIGMVHQHFKLIPVMNAWENISLGEKPKRGRPLSRFNPLIEKQRINKKIAALEERFGLTVPHDKKIYNMSVGEKQTVEIIKMLYRGAVTLILDEPTAVLAPQEIERLFXMLRNMKQEGCAVIIITHKLNEVMEISDRITVMRKGKTIGTVKTADTNPGELTKMMVGGASVSLEIKRDKPAPRVKPLLEIYGLCSQGEEGEPVLDGVNFSLYGGEILGVAGIAGSGQKELCEIIAGLRKSDAGDILFQGDSISTLSPREITERGVSMSFVPEDRLGMGLAGGMSISANILLRSYDKNPGLFVDYASGDLLAEQIVRDYDVSTPSIRQIIRKLSGGNIQKVLLGREIHFSPKVLITAYPVRGLDVGASYFIYNLLNEQKKKGVAVLYIGEDLDVLMEICDRLMVIHHGKIMGVVDPQDTTKERIGLMMLGEKLPGGVTGAGAAQ

SEQ ID NO: 65089 - DNA, 690 bp, Unknown
  Obtained from environmental sample
  misc_feature (1)..(690): n is a, c, g, or t
atgacaggcatacggatagccgcgcgagcggagttaagccggcggaacgaaatgctgctccggctttttgcggctgtgagcgcccttgctgcctcgggcctgattatggcggttatgggctacaacccctttgacgtttacgcgaagatcatatcaggttcgcttggttcggcttaccgcttcagggaaacgattaacaaagccatacctttgtgcgttctttcactgggaaccgcgattgccttcaggatgaaattctggaacataggccaggaagggcagttttaccttggggcttacggagcgtccctggcggcctttgccttcccaaaccttcccgtgccgatcctcctgtcaataatgctgataatgggcatggtatttggcggcctatgggctttgattccagcgttattgaaaataaaattttcaacaaatgaaacgctggtgacgttgatgctgaattacatagcaatcaagtggatttcctttttacaatacatcgcctggaaagacccaacggccctcggtttccccaaaatttccccctttagccgcaatgcgggtactgccatccctgttcggagtgcacatcggctggatcatcactttgtgtctggctgcgctgctttacgtcttgctgaagcgtaccaaactcggttacgagatcgacgtaataggagagagtga

SEQ ID NO: 65090 - protein, 229 aa, Unknown
  Obtained from environmental sample
  misc_feature (1)..(229): Xaa is any amino acid
MTGIRIAARAELSRRNEMLLRLFAAVSALAASGLIMAVMGYNPFDVYAKIISGSLGSAYRFRETINKAIPLCVLSLGTAIAFRMKFWNIGQEGQFYLGAYGASLAAFAFPNLPVPILLSIMLIMGMVFGGLWALIPALLKIKFSTNETLVTLMLNYIAIKWISFLQYIAWKDPTALGFPKISPFSRNAGTAIPVRSAHRLDHHFVSGCAALRLAEAYQTRLRDRRNRRE

SEQ ID NO: 65091 - DNA, 516 bp, Unknown
  Obtained from environmental sample
  misc_feature (1)..(516): n is a, c, g, or t
atgcgggtactgccatccctgttcggagtgcacatcggctggatcatcactttgtgtctggctgcgctgctttacgtcttgctgaagcgtaccaaactcggttacgagatcgacgtaataggagagagtgaggcgaccgcgcactacgccggcatgggggtgttcagaattaccgtcatcgccattacgctttcgggcggcctctgcggtgcggcgggaatgatgcaggcctccgctgttgagcgttccctttcggatcagctttcaggcggcctgggctttacctcggtcatcgttacctggcttgcccggctggaaccctcggcaatactcgtcatagcttttatcttttcgctgctgatccagggcggtaattttttgcagtccagcctccagattccagcttccatttcactggttttgcaagggatcatcattttctttgtgcttggatcggagttctttatccgttaccgcctgatgtggaaaagcggctccgaaaaggaagaagcgtga

SEQ ID NO: 65092 - protein, 171 aa, Unknown
  Obtained from environmental sample
  misc_feature (1)..(171): Xaa is any amino acid
MRVLPSLFGVHIGWIITLCLAALLYVLLKRTKLGYEIDVIGESEATAHYAGMGVFRITVIAITLSGGLCGAAGMMQASAVERSLSDQLSGGLGFTSVIVTWLARLEPSAILVIAFIFSLLIQGGNFLQSSLQIPASISLVLQGIIIFFVLGSEFFIRYRLMWKSGSEKEEA

SEQ ID NO: 65093 - DNA, 2007 bp, Unknown
  Obtained from environmental sample
  misc_feature (1)..(2007): n is a, c, g, or t
atgtttccggttacccacaagaccggaaaattttttccggtcttggcgctattgattttttctctttgttttcccgacatcgcagccgggcagtccgccgaagaggaagatgaattacttttttccgaggaaaaaggtattaccgttacgggaacaaaacagacaagccaacagatggcggttattgaaaaagaagaaattgaacgccgtaacgcgccggatgttgcgtcgctgctgcaggagactctcgatcttaaccttacacggtacggaacttacggaaatatgactctgcttaatctgcgcggacttgattcaaaacggttggcgattcttatagacggagttcctgtaaattcttctattgacggaaaatttgatattgagcaaatcgatcttaattcggtagagcgtatcgaagttatttacggcggttccgatagcaagttcaatgtttcaggagcgatgggcggagtgattaatattgtcacagtcaagaaacaaaaaccggggctgcggcttggcgcttctgtttccaataccggagcaatgcccggcgaataccggggacgagacggacaaacgcagggaccgaattgggaagatttggcggatacccaaaatgttgacatttcagccgcttacgggggagacgctttttcctttacagctaacgtgttcgcaaaccgcgcgcagaatcactatttatttgttgatagctataaatactcccgccgcaaagacaacaacgaagtgtgggacgcggggggcgcggtatccgtaacaggggaacttcccgatctttcaaaatggatcgcttcatcaactttttattacggcgataaaaacctgcccacatcgggtttttcaagcagtgtcggcagtcagcaggatatttcttcgcgtaacaatttaatgcttgatatgcctcgcgcctttcacgacgatcttgcgatggaagcgtctttggggtggcattttatcagaaaggattatacgtcgcctgcggacgttttttcccggcacgatcagcaaaactttacggcgataaaccgctggaattgggatacaagtgaacacttgtcgcttagaagcggttttgattatcggtttatctatcttgattccactgatattggaaatagggatcggcatgacggcggagtctacctgactgcggaaatcaaacctgtacaacaatttatgatcattccttccgtaaaagccgtgttcgcaaacaagggagacacacaatttaccgcagttcccaaacttggcttgctttggaatgtaacggattcgtttgctattaagaacaattatttccgcagttttaagttccccgattttgaagaattgtactggggcgaggacggcggtaacggcaatcccgatctaaaacccgaagacggctggggcggagacattggtttctcgtggcgttttagggaactatttaattttgaaagcacattctttacacaatggctgaaaaattcaattcactggtatcagggggcggggggtatctggcgtcctgaaaatgtcggagaggcggttttcttcggcgcagacagcaaactgcgttttgagattcccgttaaattgggatcgataaaaaaaattatcccctcggtctcgtatcagtatcttttaagttacctgctgagtttcggctatgatttcgctgacggcaaaagaatcccctatagtcccatgcatacaatcggcgcatctcttgacgttccatggaaaagcggctctgtaattatcagcggacactatgaaagtctgcgctacgaagacagagccaacctcacgcagttaaaaccgatctttctgctcaacgcctcggttaatcaaaagataggaaaaagccttacggtattcggcgcactgcggaatatcctgaacaaatcgtatgagtcattcagcggctactatatgccggggattacgttgacggttggaatgaaatttaaatttgatgtaaaaggaagtgaatag

SEQ ID NO: 65094 - protein, 668 aa, Unknown
  Obtained from environmental sample
  SIGNAL (1)...(28)
  DOMAIN (51)...(159): TonB-dependent Receptor Plug Domain
  misc_feature (1)..(668): Xaa is any amino acid
MFPVTHKTGKFFPVLALLIFSLCFPDIAAGQSAEEEDELLFSEEKGITVTGTKQTSQQMAVIEKEEIERRNAPDVASLLQETLDLNLTRYGTYGNMTLLNLRGLDSKRLAILIDGVPVNSSIDGKFDIEQIDLNSVERIEVIYGGSDSKFNVSGAMGGVINIVTVKKQKPGLRLGASVSNTGAMPGEYRGRDGQTQGPNWEDLADTQNVDISAAYGGDAFSFTANVFANRAQNHYLFVDSYKYSRRKDNNEVWDAGGAVSVTGELPDLSKWIASSTFYYGDKNLPTSGFSSSVGSQQDISSRNNLMLDMPRAFHDDLAMEASLGWHFIRKDYTSPADVFSRHDQQNFTAINRWNWDTSEHLSLRSGFDYRFIYLDSTDIGNRDRHDGGVYLTAEIKPVQQFMIIPSVKAVFANKGDTQFTAVPKLGLLWNVTDSFAIKNNYFRSFKFPDFEELYWGEDGGNGNPDLKPEDGWGGDIGFSWRFRELFNFESTFFTQWLKNSIHWYQGAGGIWRPENVGEAVFFGADSKLRFEIPVKLGSIKKIIPSVSYQYLLSYLLSFGYDFADGKRIPYSPMHTIGASLDVPWKSGSVIISGHYESLRYEDRANLTQLKPIFLLNASVNQKIGKSLTVFGALRNILNKSYESFSGYYMPGITLTVGMKFKFDVKGSE

SEQ ID NO: 65095 - DNA, 396 bp, Unknown
  Obtained from environmental sample
  misc_feature (1)..(396): n is a, c, g, or t
atggaattgaatgaaaatgaaattggttctatcgtagttgatactgccgtaaatttacataaaaaactaggaccaggattgctggaaagcgtttatgaagtaattttaacgaaacaattgtctaaaaagggtttatctgttcaaagacaagtttctatacctatagaatatgaaggtgattttttcgatgaagggtttaggatagatatatttattgaaggtaaagtaattattgaattaaaatccgtagaaaaaattacaggtgcgcacaaaaaacaattattaacctatttaaaattgaccaatacaaaacttggctttattataaattttggaacagaaataatgaaagagggaataatcagaatcgttaatggacttaaagacaaatcttga

SEQ ID NO: 65096 - protein, 131 aa, Unknown
  Obtained from environmental sample
  misc_feature (1)..(131): Xaa is any amino acid
MELNENEIGSIVVDTAVNLHKKLGPGLLESVYEVILTKQLSKKGLSVQRQVSIPIEYEGDFFDEGFRIDIFIEGKVIIELKSVEKITGAHKKQLLTYLKLTNTKLGFIINFGTEIMKEGIIRIVNGLKDKS

SEQ ID NO: 65097 - DNA, 750 bp, Unknown
  Obtained from environmental sample
  misc_feature (1)..(750): n is a, c, g, or t
ttgcgcctgcgaaccaaaggttcgatgcgcctttacgagatatctcctcgtaatcctgacatacttgcccgttttaacaattttaaatatagtatcaatatggcagcatacattgaacctaagattttaaagggttttagagattttctcccgtcagcggaaattgcgcgcaggggattgatcgaaaatattgaaaatacgtttcgctcttttggctttgttccgattgacactcccgctcttgaatacgcggaaatcctgcttggcaagggcggcggtgagacggaaaaacaaatttaccgctttaaggataatggggagcgcgatgtcgcactgcgtttcgatttaacagtcccctttgcgcgttttgtcgctcttcaccgcgctgagcttgctttcccgtttaaacgctaccatataggcaaggtgtggcgcggcgaaaatacccagcggggacgttatcgcgaatttacgcagtgcgattttgacatcatcggcagcgacggcgcggcgtctgattttgaaattatatttttaatccgcgccgccatgttaaaccttgggcttgatgttgccattcatgtaaaccaccgggggctttttaaccgttttctttcacacatcgggcaaagcgaaaaatcagcagacgttcttcgcgccgttgacaaactctcaaaagtgggcgcggacgagacaaaaaaaacattaaccgagcttgccggtgaaaaaaacngcggaaaagatacttga

SEQ ID NO: 65098 - protein, 249 aa, Unknown
  Obtained from environmental sample
  DOMAIN (60)...(217): tRNA synthetase class II core domain (G, H, P, S and T)
  misc_feature (1)..(249): Xaa is any amino acid
MRLRTKGSMRLYEISPRNPDILARFNNFKYSINMAAYIEPKILKGFRDFLPSAEIARRGLIENIENTFRSFGFVPIDTPALEYAEILLGKGGGETEKQIYRFKDNGERDVALRFDLTVPFARFVALHRAELAFPFKRYHIGKVWRGENTQRGRYREFTQCDFDIIGSDGAASDFEIIFLIRAAMLNLGLDVAIHVNHRGLFNRFLSHIGQSEKSADVLRAVDKLSKVGADETKKTLTELAGEKNXGKDT

SEQ ID NO: 65099 - DNA, 747 bp, Unknown
  Obtained from environmental sample
  misc_feature (1)..(747): n is a, c, g, or t
ttgccggtgaaaaaaacngcggaaaagatacttgagtttataggggcaaagggcggctttactgaaactttaaatcgcataacggagctgtccggcggcgattgcgaggaatcgcggcggcttattgccatcaatcaatttatgcgtgatgcctgtgtctccgctggagccacctgtgtctccgctggagacacttgcggctgtgaagcggccggcagcggcgcggcagatccattcgttcttgatccttccataacacgcgggcttgattattacaccggcgtagtgtttgaaacatttttaaaagagcttcccggcataggatcgatatgctccggaggacgctacgacaacctcgccggattatactccaaagacaaggattcaatcagcggagtcggatcgtcaatcggccttgatcgccttcttgccgcccttgaaagccttaacaaactgcccgatgcaaacaactgccgcgccgccatagcctgcattgacgctgaaaaatcggggcagtatcaggcgctggcggagaaactgcggaaagagggactgccctgtgaagtttttacagagcgccttgacattgttaaacaattcatatttgcggaaaaaaagggactgcgttatgtgataataccgggtgaaaacccgcttgacggcgctcttacattgcgtgatcttgcgggaagacgaaatattgaaacgtcaattcaagatattaaagatacccttttaaggggataa

SEQ ID NO: 65100 - protein, 248 aa, Unknown
  Obtained from environmental sample
  DOMAIN (159)...(248): Anticodon binding domain
  misc_feature (1)..(248): Xaa is any amino acid
MPVKKTAEKILEFIGAKGGFTETLNRITELSGGDCEESRRLIAINQFMRDACVSAGATCVSAGDTCGCEAAGSGAADPFVLDPSITRGLDYYTGVVFETFLKELPGIGSICSGGRYDNLAGLYSKDKDSISGVGSSIGLDRLLAALESLNKLPDANNCRAAIACIDAEKSGQYQALAEKLRKEGLPCEVFTERLDIVKQFIFAEKKGLRYVIIPGENPLDGALTLRDLAGRRNIETSIQDIKDTLLRG

SEQ ID NO: 65101 - DNA, 1032 bp, Unknown
  Obtained from environmental sample
  misc_feature (1)..(1032): n is a, c, g, or t
atggcaaaaataaacatgacaaaccttatcgtcgaaattgacggagacgagatgacccgcgttttgtgggcggttattaaagataaaatgttactcccttttatcgatctaaaaaccgaatactacgatcttggtcttacaaacagggataataccaacgatgaagttaccgtaaaatccgcggaggcgataaaaaggctgggcgtaggggtaaagtgcgcgacaataactgcaaacgccgctagaaagacagaatataatttaaaatatctgcttccaagcccaaacgcgacaatcagagcaatgcttgacgggactgtattccgcaaacctatttccgttagccgcataaagccgactgttaccacttgggaatcccccatagttatcggtcgtcacgcttacggcgacgtttacaaagcggcggaaatggaaattgacggacccggcatggtggagctggtttacactaaaaccgacggaacagaacgacgtataaaagtagccgattttaacggtaacggcatagttcagggaatgcataactttgacgaatcaattaaaaatttcgcccgcgcctgttttatttacgcaatctcggaaaaacttcccatttggtttgcgacaaaagatacaatttccaaaatatacgacggtcgctttaaagctatttttaatgatgtatacgaaaccgaatttaaagaaaaatgcaaagacgccggcgttgattattattacacattgatagacgacgctgtcgcgcgcgtggtaaaaagcgaaggcggatttttgtgggcgtgtaaaaattacgacggcgacgttcaaagcgacatgatagcaagcgcgtcgggaagtcttgccatgatgacaagcgttcttgtttcaccttccggtatttttgaatatgaagcggctcatgggactgttcaacagcattactatcgctataaaaaaggggaaaaaaccagcacaaacccaaccgcgcttattttcgcgtggagcggcgctctcgcgaaacgcgctgaactttga

SEQ ID NO: 65102 - protein, 343 aa, Unknown
  Obtained from environmental sample
  DOMAIN (5)...(343): Isocitrate/isopropylmalate dehydrogenase
  misc_feature (1)..(343): Xaa is any amino acid
MAKINMTNLIVEIDGDEMTRVLWAVIKDKMLLPFIDLKTEYYDLGLTNRDNTNDEVTVKSAEAIKRLGVGVKCATITANAARKTEYNLKYLLPSPNATIRAMLDGTVFRKPISVSRIKPTVTTWESPIVIGRHAYGDVYKAAEMEIDGPGMVELVYTKTDGTERRIKVADFNGNGIVQGMHNFDESIKNFARACFIYAISEKLPIWFATKDTISKIYDGRFKAIFNDVYETEFKEKCKDAGVDYYYTLIDDAVARVVKSEGGFLWACKNYDGDVQSDMIASASGSLAMMTSVLVSPSGIFEYEAAHGTVQQHYYRYKKGEKTSTNPTALIFAWSGALAKRAEL

SEQ ID NO: 65103 - DNA, 750 bp, Unknown
  Obtained from environmental sample
  misc_feature (1)..(750): n is a, c, g, or t
ttggaaggcgggacgctgtttatcagccgtaatattaatgttttctcgtggcttgaaaacgcctttgaagattgcggattttatgacgtaattccaatatcgttgtgcagggacgctctggcgtttaaaattaatgaactgaaaccaaaaaatgtttttatacacagcgaattctggtcatgcgtaacgccttttatgacaggccgcctacatgataattttcccgaaataaatatcagcgttgtaaatttttgtaattttcccgatagccttgcggtgcgcttcatttttcatggggctaaatcttatcttgatattaatgacggcactaaagaatttaaaaaaggtttaaatatgattaagactggtgaagtttattattccccgggcgtttataagctaatcatggaattagatgaaataaaaaaaattaaaaattatacgactgatcgggaatggcaggttttatttcttctctgtaacgggtttattaataaggagattgaattctggcttgagataagcgagaagacggtagaaaatcacatcaatagtttgtttaaaatatttgacgttgccaacaaattagatttggcgaaaaaagccgagaaattgaaatgggtcaataaaaaagaagtggtctttaacggtaataatttaaaaattccgaaaaatcctttaaagaaaataataaaaaatccccccgcgcatggcggagggcggttgattaggcggtttgctgttggttaa

SEQ ID NO: 65104 - protein, 249 aa, Unknown
  Obtained from environmental sample
  DOMAIN (145)...(202): Bacterial regulatory proteins, luxR family
  misc_feature (1)..(249): Xaa is any amino acid
MEGGTLFISRNINVFSWLENAFEDCGFYDVIPISLCRDALAFKINELKPKNVFIHSEFWSCVTPFMTGRLHDNFPEINISVVNFCNFPDSLAVRFIFHGAKSYLDINDGTKEFKKGLNMIKTGEVYYSPGVYKLIMELDEIKKIKNYTTDREWQVLFLLCNGFINKEIEFWLEISEKTVENHINSLFKIFDVANKLDLAKKAEKLKWVNKKEVVFNGNNLKIPKNPLKKIIKNPPAHGGGRLIRRFAVG

SEQ ID NO: 65105 - DNA, 585 bp, Unknown
  Obtained from environmental sample
  misc_feature (1)..(585): n is a, c, g, or t
gtgcggcatcagcttgaggagtacggcgaaccgggcaagaaatacgaggtttggctgacggagtggaactcggtcgactttgatccgggcccccagacgctgggcatagtaaacgccctcttcgtggccgactatttggggatgctcacgcaccacaacatagatcaggcgtcgtactgggacgtccacaacagcatcaccccgcagggcggcgattacggctacctctcgcgcaccggcgcgccggacggcgacaacgtgccgcgcccctcctactgggcgttcaagatggcgagccacagtttgggccgcgggtcgttgttggagtccggcacaggaaacgatcgcgtgtcgagctattacacgcttgacggcaagaaaaagtcgctcctgatcgtcaacaagcaccccaagagcgtggcggatatcacgatcaacattccgggcttccagggcaaggccaagaagctcttcctgaacgcggaaaacgccaagaaggggccaaaagaggagtctattgatgttaagccggggatgaagctctctatgccggcgcactcggtggttacgattacgattgagtaa

SEQ ID NO: 65106 - protein, 194 aa, Unknown
  Obtained from environmental sample
  DOMAIN (20)...(187): Alpha-L-arabinofuranosidase C-terminus
  misc_feature (1)..(194): Xaa is any amino acid
MRHQLEEYGEPGKKYEVWLTEWNSVDFDPGPQTLGIVNALFVADYLGMLTHHNIDQASYWDVHNSITPQGGDYGYLSRTGAPDGDNVPRPSYWAFKMASHSLGRGSLLESGTGNDRVSSYYTLDGKKKSLLIVNKHPKSVADITINIPGFQGKAKKLFLNAENAKKGPKEESIDVKPGMKLSMPAHSVVTITIE

SEQ ID NO: 65107 - DNA, 1626 bp, Unknown
  Obtained from environmental sample
  misc_feature (1)..(1626): n is a, c, g, or t
atgtttgcttttcccaacaagaccggaaaacatttttcggtcttggcgctattaattttttccctctcttttccctacagcgtaaacgggcaatccgccgaagatgacgaattgtatttttctgatgaaaaaggcattaccgttacagggactatgcaaaccacacagcaaatggcggttatcgataaagaagaaattgaacgccgtaatgcgcctgacgttgcttcgttactgcaagagacgctcagtcttaatattacccgatacggaacttacggaaatatgtccctgcttaacctgcgcgggcttgattcaaagcgggtagcaattctcatagacggggttcctgtaaattcttcccttgacggaaaatttgatattgagcaaattgatcttaattcggtagagcgtatcgaggtaatttacggcggatcagacagcaagttcaatgtttcaggagcgatgggcggagtgattaatattgtcaccgtaaagaaacaaaaacaggggctgaggcttggcgcttctgtttccaacaccggagcaatacccggcaaatatcgnggacgagacggacaaacgcatgatccgaatagggaagatttggcggatacccaaaacgtcgacatttcagccgcttacgggggaaatgagatttcttttacagccaacattttcgcaaaccgcgcgcagaatcattatttatttctggatagctataattattcccgccgcaaagacaacaatgaagtatgggattcagggggcgcggtatctgtaacaagggaactccccgatctttcaaaattgattttctcatcaaacttttattacggcgataaaaacctacccacatcgggtttttcaagcaatgtcggcaatcagcgggatacttcttcgcgtaacaatttaatgcttgatatgcctcgcgcttttcacgacgatcttgcgatggaagcgtctttggggtggcattttatcaggaaggattatacgtcgcctgcggacgttttttcccggcacgatcagcaaaactttacggcgataaaccgttggaattgggatacaagtgaacacttgtcgcttagaagcggttttgattatcggtttatctatcttgattccacggatattggaaatagggatcggcatgacggcggagtctacctgactgcggaaatcaaacccgtacaacaatttatgatcattccttccgtaaaagccgtgttcgcaaacaagggagatacgcaatttaccgcagttcccaaactgggcttgctttggaatgtaacggattcgtttgcgcttaaaaacaattatttccgcagttttaaatttcccgactttgaagaattgtactggagtgacggtgatggcggaagcggcgcagttttcgtcaatgcaggttatcccgatgttaagccggaagattgttggggagcggatattggtttgtcgaggcgttgtaaggaattgtttaatattgaaagtactttctttactcaccggttaaaaatctcgattcactgttatccagcagccggaggaatctggcggcctgaatatatcggagaagcaatgttcttcgggctggacagcaaagtgagttttgaaattcgctgttaa

SEQ ID NO: 65108 - protein, 541 aa, Unknown
  Obtained from environmental sample
  SIGNAL (1)...(28)
  DOMAIN (50)...(158): TonB-dependent Receptor Plug Domain
  misc_feature (1)..(541): Xaa is any amino acid
MFAFPNKTGKHFSVLALLIFSLSFPYSVNGQSAEDDELYFSDEKGITVTGTMQTTQQMAVIDKEEIERRNAPDVASLLQETLSLNITRYGTYGNMSLLNLRGLDSKRVAILIDGVPVNSSLDGKFDIEQIDLNSVERIEVIYGGSDSKFNVSGAMGGVINIVTVKKQKQGLRLGASVSNTGAIPGKYRGRDGQTHDPNREDLADTQNVDISAAYGGNEISFTANIFANRAQNHYLFLDSYNYSRRKDNNEVWDSGGAVSVTRELPDLSKLIFSSNFYYGDKNLPTSGFSSNVGNQRDTSSRNNLMLDMPRAFHDDLAMEASLGWHFIRKDYTSPADVFSRHDQQNFTAINRWNWDTSEHLSLRSGFDYRFIYLDSTDIGNRDRHDGGVYLTAEIKPVQQFMIIPSVKAVFANKGDTQFTAVPKLGLLWNVTDSFALKNNYFRSFKFPDFEELYWSDGDGGSGAVFVNAGYPDVKPEDCWGADIGLSRRCKELFNIESTFFTHRLKISIHCYPAAGGIWRPEYIGEAMFFGLDSKVSFEIRC

SEQ ID NO: 65109 - DNA, 522 bp, Unknown
  Obtained from environmental sample
  misc_feature (1)..(522): n is a, c, g, or t
ttgattgacagtcatccagccagcaaggataagatcaaaaaaggagaatatatggctgaaatcaaaaaattcgcgggctccgatattgaaatcgcgcagacggtatatccggagcacgcgctccacatcgacaaaatcgtagaaaaagccggcattccggacgagtatatagaacattatggaaaatacaaagcaaaggttgactacaaattcctccaaaaaagacaggaaggtgtgccttccatggaaggcaaattgattctggtgacggccataaccccaaccccggcaggcgagggcaaaactaccacaacggtaggcgtcgccgacgggctttcgagaattggaaaaaaagtgatggtcgcgctgagggagccttccctggggccggtctttggcgtaaaaggcggcgcggcgggcggcggctgggcgcagattatcccaatggaggacatcaacctccattttaccggcgacttccatgccatcggcgcggcaaacaatcttctcgccgcccgatag

SEQ ID NO: 65110 - protein, 173 aa, Unknown
  Obtained from environmental sample
  misc_feature (1)..(173): Xaa is any amino acid
MIDSHPASKDKIKKGEYMAEIKKFAGSDIEIAQTVYPEHALHIDKIVEKAGIPDEYIEHYGKYKAKVDYKFLQKRQEGVPSMEGKLILVTAITPTPAGEGKTTTTVGVADGLSRIGKKVMVALREPSLGPVFGVKGGAAGGGWAQIIPMEDINLHFTGDFHAIGAANNLLAAR

SEQ ID NO: 65111 - DNA, 387 bp, Unknown
  Obtained from environmental sample
  misc_feature (1)..(387): n is a, c, g, or t
gtggtgcttgtaggcagatttagaaacgaaagcgacgagcatattgataccagcataatttccaatactatggaagtaatgctttctaaaagcggcaaactggagcttgtcgccggaggcagcgtaagggatgaaatccgcgccgaaagacatgatcagcagagcaacgccggtgaagccagcgccgcggcattggcaaaagaaaccggcgctgacttcctgctcaccggagcggtaaggactatagttgataaaatcggtgaaaagaccctgaggtcatactttgttaacgccgaaatgtcgaatatagaaaccaatcagcgtatgtggatggggcagaacagcgatataaaaaaagtaattacaaggcccagggtgagaatataa

SEQ ID NO: 65112 - protein, 128 aa, Unknown
  Obtained from environmental sample
  misc_feature (1)..(128): Xaa is any amino acid
MVLVGRFRNESDEHIDTSIISNTMEVMLSKSGKLELVAGGSVRDEIRAERHDQQSNAGEASAAALAKETGADFLLTGAVRTIVDKIGEKTLRSYFVNAEMSNIETNQRMWMGQNSDIKKVITRPRVRI

SEQ ID NO: 65113 - DNA, 678 bp, Unknown
  Obtained from environmental sample
  misc_feature (1)..(678): n is a, c, g, or t
atgaaatctgtcaaagtatttacgctgatagcggcgttaatggtaattgttgttcttgccggctgtcccactacggacaaagcaaaggacattagcctgaagtccacggccaaagtcgaaacagtcgagcataagggaaccgcctttggtatcgcgtctataccgccgtggctgtcgacctttattcagcgcaacggaacgcgttccgtcgaggaaatgcccgagtataagggaaagtatgtaattatcggccaggcgaacggggccggattacagcaggtggagacctgggccaagaattttgacgcccagcagcagattggcgccaccatcgaaacccgcgtggcgtcgatatttaaggcccatgaaaacctgctccccggcgataccgacgcgaaacgcaaatacgacaacgcgattaacacgttggtaagggcgacatacaccggagccaaacaggaagccgactggtggctgcaccagaagatcatggaaaagggcaaggaagctgaaacaaggtatacttcttatgttttatataccatcgacaggactgttttggaccagcagataagggaccagatcattaagataaagaacggcgaanatccggaactgaacgcggcatttgacgccattacaaaacaactgctagagaaaggcctggagtgggaatag

SEQ ID NO: 65114 - protein, 225 aa, Unknown
  Obtained from environmental sample
  SIGNAL (1)...(20)
  misc_feature (1)..(225): Xaa is any amino acid
MKSVKVFTLIAALMVIVVLAGCPTTDKAKDISLKSTAKVETVEHKGTAFGIASIPPWLSTFIQRNGTRSVEEMPEYKGKYVIIGQANGAGLQQVETWAKNFDAQQQIGATIETRVASIFKAHENLLPGDTDAKRKYDNAINTLVRATYTGAKQEADWWLHQKIMEKGKEAETRYTSYVLYTIDRTVLDQQIRDQIIKIKNGEXPELNAAFDAITKQLLEKGLEWE

SEQ ID NO: 65115 - DNA, 753 bp, Unknown
  Obtained from environmental sample
  misc_feature (1)..(753): n is a, c, g, or t
atgaaaaaaattttctgtgcttttatcctgttgctttttatttctgtgttcgctttctcgcaggctgtaactcttgataacgctttgcgtaattcaaccacgtacttgaacggcagaataaaggaaaattcaaaagtaatagttcttaactttacctcggattggccccgcttgtccgattatataattgatgaactaatcggatacgttgtaaatgacggtaattttgcagtggtagaccgtaataatctggaaacaatacgcaaggaattaaattttcagttgtcgggggaagtaagcgacgagacggctcaatccatcggcaaaatgcttggagcgcagactataattaacggcaatattaccgtaataggaaacgcgtacaggctgcgcgtcagggcaatatccgtagagacagcccagataattggaatgaacaatgtggacgtggtgcaggacagccgtgtagctgccctgacagggacggcgtccgccgggcctgtggcggtaacaactacgccgacaacaacaactactacaccaacagcccccgcaaacgcgatatttaatggtacagtcatacctccgtcagcatggataccaggaaatgagccgtcaccaggaacaactataagagcctttaccggcagagaatttatcgcgggacaggagagagacgtattatcagtagaaattacttttacaagacaaacccaagccggaggaaccggtaaatggaactcggccatctga

SEQ ID NO: 65116 - protein, 250 aa, Unknown
  Obtained from environmental sample
  SIGNAL (1)...(20)
  misc_feature (1)..(250): Xaa is any amino acid
MKKIFCAFILLLFISVFAFSQAVTLDNALRNSTTYLNGRIKENSKVIVLNFTSDWPRLSDYIIDELIGYVVNDGNFAVVDRNNLETIRKELNFQLSGEVSDETAQSIGKMLGAQTIINGNITVIGNAYRLRVRAISVETAQIIGMNNVDVVQDSRVAALTGTASAGPVAVTTTPTTTTTTPTAPANAIFNGTVIPPSAWIPGNEPSPGTTIRAFTGREFIAGQERDVLSVEITFTRQTQAGGTGKWNSAI

SEQ ID NO: 65117 - DNA, 669 bp, Unknown
  Obtained from environmental sample
  misc_feature (1)..(669): n is a, c, g, or t
atgtcattttcaagaggtttgaaagcaaaagcgtcaaaggtttgggaagaaggttacaatcatccttttgtacaggaacttggcaagggtaccctggacagggaaaagtttaaattttatttgctgcaggactatttgtatttaatccagtacgcgaaagtttttgccatagccgccgtaaaatcagatacggaagaactgatgacaaatttttcaacaagccagtatttaatcctcgcagatgaaatggacgtacaccgtgaatacatggccggtttcggcataacgcgggaagagacgctttccgtaaaaccctcgctgtataacagcgcgtacaccgccaatatgctggcgtacggccagacaggcgggcttgcggaacttctcgccgctgtctttccctgcgcgtggacatacgccgattacgcgaaacggctgaaaaagcaatacgccgaccgcctggaagggaacttctataaaacatggatcgagaattacgctggtgatgagttttcggaatcttttgaatggttctatgacgctcttgataatctggtttcaaatatgacagacagacagcgtgaaaaaataacggaaatttttatttccagcgttgaatttgagtatctgttttgggatatggcgtataaacggcagatgtcctattag

SEQ ID NO: 65118 - protein, 222 aa, Unknown
  Obtained from environmental sample
  DOMAIN (8)...(218): TENA/THI-4/PQQC family
  misc_feature (1)..(222): Xaa is any amino acid
MSFSRGLKAKASKVWEEGYNHPFVQELGKGTLDREKFKFYLLQDYLYLIQYAKVFAIAAVKSDTEELMTNFSTSQYLILADEMDVHREYMAGFGITREETLSVKPSLYNSAYTANMLAYGQTGGLAELLAAVFPCAWTYADYAKRLKKQYADRLEGNFYKTWIENYAGDEFSESFEWFYDALDNLVSNMTDRQREKITEIFISSVEFEYLFWDMAYKRQMSY

SEQ ID NO: 65119 - DNA, 441 bp, Unknown
  Obtained from environmental sample
  misc_feature (1)..(441): n is a, c, g, or t
atgacatggcgtcatacgcttacgggcaacacggtacggatgaaaccctatgccaaagagtatcttacggcgctgcgggaacgcggggtaaaactggcgatcgcgacttccctgttccccgaactttgcgatcctgtcctgcgcaataacggtattggtaatttgtttcatgccgtttgcaacacaaatgaattggggtgcggcaaatcatgtcccgatgtttttttgcttgccgcggaaaaaatcggcgtaatgcctgtggattgccttgtttttgaggatatactcgccgcggtaaaaagcgccaaaagcgccggaatgggcgtatgcgccgtgtatgacaagacatcggaaaacgattgggaagaaataaaaaaaacggcggattacgcgattgttgattttcgcgacgcaccgctgcccgtaagtaaaggagaataa

SEQ ID NO: 65120 - protein, 146 aa, Unknown
  Obtained from environmental sample
  misc_feature (1)..(146): Xaa is any amino acid
MTWRHTLTGNTVRMKPYAKEYLTALRERGVKLAIATSLFPELCDPVLRNNGIGNLFHAVCNTNELGCGKSCPDVFLLAAEKIGVMPVDCLVFEDILAAVKSAKSAGMGVCAVYDKTSENDWEEIKKTADYAIVDFRDAPLPVSKGE

SEQ ID NO: 65121 - DNA, 1278 bp, Unknown
  Obtained from environmental sample
  misc_feature (1)..(1278): n is a, c, g, or t
atgaacattgtagtcggcaactggtggcatagctatgataccaaggttacgccgccgacaaatcaatgggttggaagcgagtatcaggaaaaacagcttgattaccgcaaaagacttttacagcaatacaactttacaatgatggacaaaaacattgcaagctggaatgagatgccgcaaattgcagctacatcaattatggcaggaaaacccgccgctacaatatttgtattgcagccggactgggcgcttgccttgtatcgccagaaccttttgtatcctgtaggaaagagcaaagccgtcaactggacagctactactcctattgaatggaacagatctgttacatcagcttttacttttaagaacggacgcactcaagacgcttatgcttttgccgaaggttacggcggaagctaccatgccgcagttgtgttctttaacaaaagattattaaaagaagccggatttccggataactatctttatgatcttcagaaatccggacaatggacatgggataaattccttgaagttgccaagaaacttacaatagataaaaacaacgacggtattcccgatacatacgctatgcccgcagacctttccacggaaattctggacgctttagtttccagcaacggcgcaatgtatgttaataaagacccgaaaaccggattgctttataacgctacgaacagacccgaatttatcgaagctcttagtttttatatgaagctaagagacgaaaaagttatgaagccgaagccgccaggagacaaaaccccctggaactggcacattcccgaatttaacgacggaaaagtcgctatgcgtattgatcagcagtaccttgctacaaacgatcttcgcagtatgaaagatgattggggcatggttcttcctccgaaaggacccagatcaaagaactatgtagtattcaacgatgagaacgtaagagtaattcccgccaagggatacacagacgctcaggttgatgcgatcatttgggcttatcaagcttgggtaactcctcccgatgataactggaaacttgcggaatatcctaactacagagacagaagagctgttgatgaaacagtagcgttaatccgcgatcagaaactctggcagtggaaatatcatcttcatgttcccggacttaaccgcggcggtattgcgtgggaaatctggtatcatgacggcgagcccgctcagttagttcaaacagtttcaaataactggaatgcgttgattgccgacgctaacggactgtaa

SEQ ID NO: 65122 - protein, 425 aa, Unknown
  Obtained from environmental sample
  misc_feature (1)..(425): Xaa is any amino acid
MNIVVGNWWHSYDTKVTPPTNQWVGSEYQEKQLDYRKRLLQQYNFTMMDKNIASWNEMPQIAATSIMAGKPAATIFVLQPDWALALYRQNLLYPVGKSKAVNWTATTPIEWNRSVTSAFTFKNGRTQDAYAFAEGYGGSYHAAVVFFNKRLLKEAGFPDNYLYDLQKSGQWTWDKFLEVAKKLTIDKNNDGIPDTYAMPADLSTEILDALVSSNGAMYVNKDPKTGLLYNATNRPEFIEALSFYMKLRDEKVMKPKPPGDKTPWNWHIPEFNDGKVAMRIDQQYLATNDLRSMKDDWGMVLPPKGPRSKNYVVFNDENVRVIPAKGYTDAQVDAIIWAYQAWVTPPDDNWKLAEYPNYRDRRAVDETVALIRDQKLWQWKYHLHVPGLNRGGIAWEIWYHDGEPAQLVQTVSNNWNALIADANGL

SEQ ID NO: 65123 - DNA, 990 bp, Unknown
  Obtained from environmental sample
  misc_feature (1)..(990): n is a, c, g, or t
atgagtatcatcgtaaacggatacagtctgccgaacattccttgggaagacagaccgtctgacagcaatccaaaaaaggagctgatgtggcggttttcgaaaaacccgattattcccagggatttaactttaaggtctaacagcatttttaacagcgctgttgttccttttaagggcgagtttgcgggtgttttccgctgcgatgatacttctcgccacatggacataaacgcggggcgcagtaaagacggaatcaactgggttattgaagatgaaccgattaagtttatcaaaacaagcccggacatacctgattccgaatataaatacgacccccgcgtaatttttatagaagaccgttattacataatgtggtgcaacggttatcacggtccgggtctcggcttgggctatacttacgattttgaaaaattttatcaaatggaaagcgtggtgatgccctttaacaggaacggagcccttttcccccgcaagattggaaaaaattacgcaatgtacagccgccccagcgattcagggcatactcccttcggagatattatttactccgaaagccccgatctagtttactggggcaaacatcgccatgttatgtcgccgacaggcggatggcaaagcacaaagataggcgcaggtccttgtcccattgaaacatcggaaggctggcttgtgttttatcacggggtactgacaagctgtaacggttttgtgtactcgttcagcgcggcattgatggatcttgaacagccgtggaaagttatagcgcgtccgaaaccgtatatcattaatcctagggaactttatgaactggcgggcgatgttccgaacgttacattccctgtagccgcactcgtagacaaggacacaggcagagtagcgatttactacggctgcgcggatacggtaacagggcttgtctttggtaaggttgatgagattgtcgcttggataaaagcaaataagatttaa

SEQ ID NO: 65124 - protein, 329 aa, Unknown
  Obtained from environmental sample
  DOMAIN (10)...(326): Domain of unknown function (DUF377)
  misc_feature (1)..(329): Xaa is any amino acid
MSIIVNGYSLPNIPWEDRPSDSNPKKELMWRFSKNPIIPRDLTLRSNSIFNSAVVPFKGEFAGVFRCDDTSRHMDINAGRSKDGINWVIEDEPIKFIKTSPDIPDSEYKYDPRVIFIEDRYYIMWCNGYHGPGLGLGYTYDFEKFYQMESVVMPFNRNGALFPRKIGKNYAMYSRPSDSGHTPFGDIIYSESPDLVYWGKHRHVMSPTGGWQSTKIGAGPCPIETSEGWLVFYHGVLTSCNGFVYSFSAALMDLEQPWKVIARPKPYIINPRELYELAGDVPNVTFPVAALVDKDTGRVAIYYGCADTVTGLVFGKVDEIVAWIKANKI

SEQ ID NO: 65125 - DNA, 951 bp, Unknown
  Obtained from environmental sample
  misc_feature (1)..(951): n is a, c, g, or t
ttgcttgtagcctgcgacttaatccgccccgccgccatggaacagcttgccgtactcggcggacaaataggaatccccgttcacaaagaagacggcgcaaaggacagcgtaaaagtttatcaaaacgccttatcgtgggcgaaacaaaatatgatcgacaccctcatcatcgacacaactggacggatgcaaattgacgagccgatgatgcaggagctttccaatcttaaaaatgccgcaaagcccgacgaaatgcttttggtagccgactcgatgacgggacaagccgccgccgacattgcaaaaacatttgacgaaaaaatcggacttaccggagtaattttaagcaagttcgattccgacacaagaggcggcgcggcgctctcgctgaaaacggtaacgggaaaatcattaaagtttacaggcacgggagaaaagccggaagactttgaacccttccaccccgaaagaattgcaggccgcatactcggcatgggtgacgttgtaagtcttgtagaaaaagcgcaggaagtaatcgaccaaaaagaagcgttagaactccagaaaaaaatggagaaagaaaacttcactcttgacgactggctgaaccaaatccgctctcttaaaaaaatgggttctctgcaaaaaatgctggaaatgattcccggtatgcagggacagataagcgaagacgatattgataaagccgaattaaaacagcaggaagcgattttaagttccatgacgattaaagagcgcaacaatcatttaattatcggaccgccgcgaagaagcagaattgcgcgaggttcgggaacttccgttgcggaagtggcgaggctgttaaaaaagtttgaaaaaatgcgcggcatgatgaaaaaaatggcgaaaggcgcaagaggcggcggaatgccgggaatgcccggaatgccggcgggaatgtttcagtaa

SEQ ID NO: 65126 - protein, 316 aa, Unknown
  Obtained from environmental sample
  DOMAIN (195)...(292): Signal peptide binding domain
  misc_feature (1)..(316): Xaa is any amino acid
MLVACDLIRPAAMEQLAVLGGQIGIPVHKEDGAKDSVKVYQNALSWAKQNMIDTLIIDTTGRMQIDEPMMQELSNLKNAAKPDEMLLVADSMTGQAAADIAKTFDEKIGLTGVILSKFDSDTRGGAALSLKTVTGKSLKFTGTGEKPEDFEPFHPERIAGRILGMGDVVSLVEKAQEVIDQKEALELQKKMEKENFTLDDWLNQIRSLKKMGSLQKMLEMIPGMQGQISEDDIDKAELKQQEAILSSMTIKERNNHLIIGPPRRSRIARGSGTSVAEVARLLKKFEKMRGMMKKMAKGARGGGMPGMPGMPAGMFQ

SEQ ID NO: 65127 - DNA, 645 bp, Unknown
  Obtained from environmental sample
  misc_feature (1)..(645): n is a, c, g, or t
ttgttgcgctctttaatcgtcatggaacttaaaatcgcttcctgctgttttaattcggctttatcaatatcgtcttcgcttatctgtccctgcataccgggaatcatttccagcattttttgcagagaacccatttttttaagagagcggatttggttcagccagtcgtcaagagtgaagttttctttctccatttttttctggagttctaacgcttctttttggtcgattacttcctgcgctttttctacaagacttacaacgtcacccatgccgagtatgcggcctgcaattctttcggggtggaagggttcaaagtcttccggcttttctcccgtgcctgtaaactttaatgattttcccgttaccgttttcagcgagagcgccgcgccgcctcttgtgtcggaatcgaacttgcttaaaattactccggtaagtccgattttttcgtcaaatgtttttgcaatgtcggcggcggcttgtcccgtcatcgagtcggctaccaaaagcatttcgtcgggctttgcggcatttttaagattggaaagctcctgcatcatcggctcgtcaatttgcatccgtccagttgtgtcgatgatgagggtgtcgatcatattttgtttcgcccacgataaggcgttttga

SEQ ID NO: 65128 - protein, 214 aa, Unknown
  Obtained from environmental sample
  misc_feature (1)..(214): Xaa is any amino acid
MLRSLIVMELKIASCCFNSALSISSSLICPCIPGIISSIFCREPIFLRERIWFSQSSRVKFSFSIFFWSSNASFWSITSCAFSTRLTTSPMPSMRPAILSGWKGSKSSGFSPVPVNFNDFPVTVFSESAAPPLVSESNLLKITPVSPIFSSNVFAMSAAACPVIESATKSISSGFAAFLRLESSCIIGSSICIRPVVSMMRVSIIFCFAHDKAF

SEQ ID NO: 65129 - DNA, 555 bp, Unknown
  Obtained from environmental sample
  misc_feature (1)..(555): n is a, c, g, or t
gtggatctgcataggggaagcgtagacggaaaagccggcgattcctcgatcacggccaggacttttgaagacgccctggcagcggagctgcgcggcaatctttcgaccgatattgtccgcgatgcggcggtaattatccgcaacggcggggaggggacaatacgcctttcactccgcccggcttcgctgggggatgtaaagatacgcctggaaatgaccgaaaacaagatcaccgggcatatcattcttaaaagcagtgaagcgcttcgggcttttgaacgggaacttccggttttggaaaaggcttttaaggattcgggcttcagcgagaccaaccttgaaatgttccttgcctcggatgattccgcgaacgggggtgcttttggcaggcgcgaagagtggcaggaaagagattttctggttcgcgcgctggccgtatccagctatgaggctgaatctgagcaatcagcgataagccgcctggatgaaggcgttcatgacggaatgactttatcaacttcgccgggaagaataccggtaaatttgcttgtttag

SEQ ID NO: 65130 - protein, 184 aa, Unknown
  Obtained from environmental sample
  misc_feature (1)..(184): Xaa is any amino acid
MDLHRGSVDGKAGDSSITARTFEDALAAELRGNLSTDIVRDAAVIIRNGGEGTIRLSLRPASLGDVKIRLEMTENKITGHIILKSSEALRAFERELPVLEKAFKDSGFSETNLEMFLASDDSANGGAFGRREEWQERDFLVRALAVSSYEAESEQSAISRLDEGVHDGMTLSTSPGRIPVNLLV

SEQ ID NO: 65131 - DNA, 318 bp, Unknown
  Obtained from environmental sample
  misc_feature (1)..(318): n is a, c, g, or t
ttgaagctccttttggcccagttggcccatcaggatccgtcggcgccgatggaagataaagaatttatcgcccagatggcccagttttcaagccttgagcagatgacaaacatggcggcggatttcgcgaaaatggcgcaaatgctgaaggtttccgaagcttcgggcgctttgggcaaagctgtcgaaattaacctgggagatgataccgtccagggagttgtcagggctgtaaccagagaagaagcgcccaggatacttgtgaacagcagcttttacgattgggaacaggtaattgcggtttatgacgagtattaa

SEQ ID NO: 65132 - protein, 105 aa, Unknown
  Obtained from environmental sample
  DOMAIN (1)...(105): Flagellar hook capping protein
  misc_feature (1)..(105): Xaa is any amino acid
MKLLLAQLAHQDPSAPMEDKEFIAQMAQFSSLEQMTNMAADFAKMAQMLKVSEASGALGKAVEINLGDDTVQGVVRAVTREEAPRILVNSSFYDWEQVIAVYDEY

SEQ ID NO: 65133 - DNA, 1398 bp, Unknown
  Obtained from environmental sample
  misc_feature (1)..(1398): n is a, c, g, or t
atgatgcgatctttgttttccggtgtttctggacttcaaaatcatcaaacgagaatggacgtaatcggcaataatattgccaacgtcaacacctacggctttaagcgtaaccgggtgaattttcaggacattttttaccaacagctccagggcgctgcgcgtcctaccgaagaagttggcggcgtaaacccccaggaagtcggtcttggtatgtcggtggcgtcaatcgacaccatccacatccagggcgcgttccagagtacaggggtgccgacagacctgtcgatacaggggatgggttttttcatccttgacgacaaaggctcacagctttacaccagggcaggtacttttgctcttgacgaanacggaacctatgtgaatccgggcaatggaatgaaagtacagggctggatggcccaggaaatcaacggtgtacagtttctggacacttcacgcgcgttggaggaccttgtaattccggttgggtcaaaagaccccgccagggcaaccacgctggtaaatttcgcctgtaaccttgacaagagaacgccggaagtcccggaaggagccagcgatcttcaaatacgggaaggaacctggtctacgcaggaaaaaatttacgattccttcggcgacgtacacattctgcaggtggaattttcccgcgtgccgggactgagcaatagctggacagccagggtctcggtggatccccaaaacgatgtacccaccaacgcttccgccgcctttggggacgctcctcctgcggcagggggtgctgatattttcaccataaacttcagcaaccagggaaccatccttaacgcgatagacggcgccggcaatgaatccaatgtcggacaggtattaatgaacgttgccttcgatgttcaaagcgcgacacccggcgacgacggcgctatggtacgccagactttccagttgaacctgggcagtgtcggcggcctttcaaattccatgacccagtacgccgaaaggagttcctcaaagattgttcaacaagacggctacagtatgggctacatggaaaacttcaagattgacggcagcgggattattaccggaattttttccaacgggactaaccgcgtactggggcaggtagccatggcgagtttccccaatcagggaggccttgaaaaagccggggacaacactttcagaaagaccagcaactcggggaacgccaatatcagcccgtcaggtatagccggaaaaggcataattaaatccggcgttctggaaatgtcaaacgtggacatggccgatcaatttaccgacatgatcattacacagcgcggtttccaggccaattccagaacaatacaaactgcggatcaactgctgcaggaattgttaagtctgaaaaggtaa

SEQ ID NO: 65134 - protein, 465 aa, Unknown
  Obtained from environmental sample
  DOMAIN (5)...(35): Flagella basal body rod protein
  misc_feature (1)..(465): Xaa is any amino acid
MMRSLFSGVSGLQNHQTRMDVIGNNIANVNTYGFKRNRVNFQDIFYQQLQGAARPTEEVGGVNPQEVGLGMSVASIDTIHIQGAFQSTGVPTDLSIQGMGFFILDDKGSQLYTRAGTFALDEXGTYVNPGNGMKVQGWMAQEINGVQFLDTSRALEDLVIPVGSKDPARATTLVNFACNLDKRTPEVPEGASDLQIREGTWSTQEKIYDSFGDVHILQVEFSRVPGLSNSWTARVSVDPQNDVPTNASAAFGDAPPAAGGADIFTINFSNQGTILNAIDGAGNESNVGQVLMNVAFDVQSATPGDDGAMVRQTFQLNLGSVGGLSNSMTQYAERSSSKIVQQDGYSMGYMENFKIDGSGIITGIFSNGTNRVLGQVAMASFPNQGGLEKAGDNTFRKTSNSGNANISPSGIAGKGIIKSGVLEMSNVDMADQFTDMIITQRGFQANSRTIQTADQLLQELLSLKR

SEQ ID NO: 65135 - DNA, 1284 bp, Unknown
  Obtained from environmental sample
  misc_feature (1)..(1284): n is a, c, g, or t
atgttccgggcagcagatgttataaggacgacccagccaactgcgacaaatacggcagactttacaactgggcaacagcaatggacggtatgccccagtggctggcatttgcctagcagtgcggagtgggatgttttgtttaagttcgtcaatccaaactgcactgacattaacaataacgataacaattgtgctggtgttggaaccaagttaaaagccaattctactaattggaaagttaatactggtacggatgaaattggcttttcggctctgcctggcggccaatacggtgtctctggctctttcggtggtgtcggcaacaacggctattggtggagtgcctccgagctcagtagcgacatggcccactaccgatatgtgaccagcaccagtgatgcccccttctggggctccaacaagaagagcagcttgctctctgtccgttgcctcaaagggttccctaagtgtggcgatgcagaatacaataatgcaacgcagttttgctccgacaacaaagtttattctctttgtggtggcaataaatacgagcctaaaacgcatttctgcacaaagtctccgaacaatcctgaaatagttccactctgtggaaaaacaagctacgatactagaacaaaatactgttccaatggtaccacaccgaaagactatggctccatcgcatatcaaggcaaaacctataaaaccgtagaaataggtacccaaatctggatggcagaaaacctcaactacgccgtagaaggtagcaagtgcggcaatggtaatggtaccactctaagcgatgcnaatactgcaacttgcgatacctacggcaggctttatgattgggcaacggcaatggcttttacagccagttgcaactccagtgattgctcttcttcaataaagcctaagcacaagggcatttgtcccgatgggtggcatatcccagctggtgaatttagtacgttggcgagttatgtcggcaccaatcctggaaccaagttaaaggctaccaccagttggaacgaanatggtggtatcaatggcacagacaattatggctttgcggctctgccgggcggcgacggttctggtggcaatttctactttgtcggcagcgacggccattggtggagtgccacggaggagaagtggagtgccacggatagcagtgctagctacgcctactcccgagacatgcgccataatgtcaacagggtcaacagggtcatcagcagtaagagcaacttcttgtacagtgtgcgttgcttgaaagattaa

SEQ ID NO: 65136 - protein, 427 aa, Unknown
  Obtained from environmental sample
  misc_feature (1)..(427): Xaa is any amino acid
MFRAADVIRTTQPTATNTADFTTGQQQWTVCPSGWHLPSSAEWDVLFKFVNPNCTDINNNDNNCAGVGTKLKANSTNWKVNTGTDEIGFSALPGGQYGVSGSFGGVGNNGYWWSASELSSDMAHYRYVTSTSDAPFWGSNKKSSLLSVRCLKGFPKCGDAEYNNATQFCSDNKVYSLCGGNKYEPKTHFCTKSPNNPEIVPLCGKTSYDTRTKYCSNGTTPKDYGSIAYQGKTYKTVEIGTQIWMAENLNYAVEGSKCGNGNGTTLSDANTATCDTYGRLYDWATAMAFTASCNSSDCSSSIKPKHKGICPDGWHIPAGEFSTLASYVGTNPGTKLKATTSWNEXGGINGTDNYGFAALPGGDGSGGNFYFVGSDGHWWSATEEKWSATDSSASYAYSRDMRHNVNRVNRVISSKSNFLYSVRCLKD

SEQ ID NO: 65137 - DNA, 768 bp, Unknown
  Obtained from environmental sample
  misc_feature (1)..(768): n is a, c, g, or t
atggtgcttgcaaatcgttttgcatggctgctcacaaagaaaggttacaatgtagatgaaatattaacccttacatttacaaaaaaagccgcggcgcagatgttcagccgcatacacgccctgttaacggaaatagccgaaggagaagacggaacaaacgcggcaagggcgcaaaaagcccttgataactttgttcactcaaggattcagacgctggacgcttacagttcgtctattgtaaaacaatacgcgccccgttacggcatcagccccgattttatgattgatgaggaacgctgccggcaaatagcttccgaggagtctcttcctttcttaattactcacaggcatcatccggcaattgaaaggctcttttccgataaccgcccgaacgaaattgtcagtcatatctttgcggctgttttgtttaaacactgccggatagacaaaccgcgtgatttttcggcggatgttaaaacacaatttgatattgtctgcgccgaatgggaaaaacatataaaaaaaatcggtgatttgttagacgaaatggaaattttgatttctgaaaacagcgctttgcttccggatcttgtcccgcttatgaaaaacaaaaatattatttttccaaaaacaaaagaaatacaaaaatattttgaatatttattgngtttaccggcagaatccgtcattgaaaaatcagaatccaattccttgcaaaaatcaaatgataacgcttcttggttttttgtccgaaatatgcgctcttaa

SEQ ID NO: 65138 - protein, 255 aa, Unknown
  Obtained from environmental sample
  misc_feature (1)..(255): Xaa is any amino acid
MVLANRFAWLLTKKGYNVDEILTLTFTKKAAAQMFSRIHALLTEIAEGEDGTNAARAQKALDNFVHSRIQTLDAYSSSIVKQYAPRYGISPDFMIDEERCRQIASEESLPFLITHRHHPAIERLFSDNRPNEIVSHIFAAVLFKHCRIDKPRDFSADVKTQFDIVCAEWEKHIKKIGDLLDEMEILISENSALLPDLVPLMKNKNIIFPKTKEIQKYFEYLLXLPAESVIEKSESNSLQKSNDNASWFFVRNMRS

SEQ ID NO: 65139 - DNA, 2544 bp, Unknown
  Obtained from environmental sample
  misc_feature (1)..(2544): n is a, c, g, or t
atgaacgcaattcttgtattattcgcaggtaatttaaaagacgaggcttttgaacctctttatgacgggaaaaacagcataactctgagtgtccggcaggcgcagaaatttccgggagccggaaaaaccgctctattggtttcgcagggagatttttcttttcttgaaggcgtacagatagaacaaagggatacgtggacaaaactaagtttgctggaaaaaatagcggaattgcaaacaggtttcgatttcgcctattttgctttcgcggactgcccttttctggaaccggctttggcgggcgcaatggcggacaggcatttgcgttattcagcggagtattcctacgcggacggctggccgttcggcctcgctcctgaaatactttccgcagggactgccgcgattttggcaaaaatattaggtgatgacgacggacctgtagaaagagacatacttttctccgtcattcagaaagacattaacgcgtttgatattgaaactgaaatatcgtcagaagaccttcgctgccacagaataaacctttgcgcagattccaaaagaaacgttcttcttttaaaaaattttataactgccgcagaaggcaaacttccatccgcatctgacgtacaacggattattacagaacagccgcaaatattaagaactctgccgaatttttatccaattcaggttttcagcggctgccctcaaaaatgctcaatttgcccctacccaatgtttacagacactgccggacgcaaagattttatggacagtgaaaaatttaaatctcttttggacaaaatcacggctttttcaggagacgcggtaatcgacctctccctttggggggaattaagtcttcatcctgaaaaaatgagacttatagaagaagtgctccgccgtcctgagttagccttgattattgaaacttcaggaatcggttggaaaaatgaagagattgaaaaatgcgccgaattgtgcggcagtttggaaaaaaatgcggtggtaagaaaaaacgccctgccgcctttatcgtggattgtatcccttgatacttccgatacccaacactacgcagagctgcatggcaacggttttgccgaggcggaagccttagttaagaaacttttttccctgtttccaaacgactgttatgtgcaagcggtacgcgtaaaaggagcggaagacgatacggaaaaattttaccgttactggaaaactgcctctccaaaaaacgaaaaaaatataattattcaaaagtatgatgatttctgcggcgttctcgaaaaaaaacaggcttccgatatttcgccagttatccgacagccgtgctggcatattatgagggatatgcctattttaataaatggggatgttccgctatgcagggaaaatctttcggtattaaaaggggaaaaaaaggatatacttggaaacgtatttgcggaccctcttgaagacatctggcaaacggagacaagtactacaaggaacaatgcgaaaaaaaatacacagggctttgcgcagggtgcgatgaatactatacctacaatttttaacgaagtaattattccctataccgctgtcggcggcaaagagcgaattgcgtcaacaggaatttccgcagttgttttaaatcgtcccggtcagtatcaaaacagagcttctttttcggaactggaaaaaagcggttttgacaatatcatttcgatagaatcctgcgctccccattacgacatagaagatttatcggggcgtttcccgtttgtacgctttattctgcccgaaaaagaattgaacttaggcgaacagataaaccttgccgcatccgatattgacactcctcttttttatgtttttcacaacgacatgaaaataattgccggaggaaccgcaaaacgaatggcggaaagattaaacgtcaattccgatgaaaaagataattttgaaagcggatttaaaagactttgcactgttccgattataatgaattcaaattacgagatattaccgaccatcgtagttcccatgacgcatcgcagaaaaatgaatcccgtttttttggaaccgcaaaacgaagacgatttaagcctgtatccttttgacggagccggtatctatgacagacagcgatttatcaacatgggcggatttgatataacgctaactactcctttttggcagttaatggatttcggttttagggcaaacctttggggagaaaaaatatctctcagcgctcaattaaaactttcatataacggagaattacccacagaaaactttaccgtagacgagagttacaggcgtttttacatgaaaaatctggctcccgtattcagaaacgattacgcccatctgcccttttacggtttcctctcttatttatttaaatccgcagatgatcttttttcctcttgggaagaattcaaagagtgcagaaaatgggtggcgaaaaataaattccgctggaaacacgatgcacgagaagtaacaaaccaatgggactcagcgcccgaaaaaaagagggttaattga

SEQ ID NO: 65140 - protein, 847 aa, Unknown
  Obtained from environmental sample
  DOMAIN (230)...(407): Radical SAM superfamily
  misc_feature (1)..(847): Xaa is any amino acid
MNAILVLFAGNLKDEAFEPLYDGKNSITLSVRQAQKFPGAGKTALLVSQGDFSFLEGVQIEQRDTWTKLSLLEKIAELQTGFDFAYFAFADCPFLEPALAGAMADRHLRYSAEYSYADGWPFGLAPEILSAGTAAILAKILGDDDGPVERDILFSVIQKDINAFDIETEISSEDLRCHRINLCADSKRNVLLLKNFITAAEGKLPSASDVQRIITEQPQILRTLPNFYPIQVFSGCPQKCSICPYPMFTDTAGRKDFMDSEKFKSLLDKITAFSGDAVIDLSLWGELSLHPEKMRLIEEVLRRPELALIIETSGIGWKNEEIEKCAELCGSLEKNAVVRKNALPPLSWIVSLDTSDTQHYAELHGNGFAEAEALVKKLFSLFPNDCYVQAVRVKGAEDDTEKFYRYWKTASPKNEKNIIIQKYDDFCGVLEKKQASDISPVIRQPCWHIMRDMPILINGDVPLCRENLSVLKGEKKDILGNVFADPLEDIWQTETSTTRNNAKKNTQGFAQGAMNTIPTIFNEVIIPYTAVGGKERIASTGISAVVLNRPGQYQNRASFSELEKSGFDNIISIESCAPHYDIEDLSGRFPFVRFILPEKELNLGEQINLAASDIDTPLFYVFHNDMKIIAGGTAKRMAERLNVNSDEKDNFESGFKRLCTVPIIMNSNYEILPTIVVPMTHRRKMNPVFLEPQNEDDLSLYPFDGAGIYDRQRFINMGGFDITLTTPFWQLMDFGFRANLWGEKISLSAQLKLSYNGELPTENFTVDESYRRFYMKNLAPVFRNDYAHLPFYGFLSYLFKSADDLFSSWEEFKECRKWVAKNKFRWKHDAREVTNQWDSAPEKKRVN

SEQ ID NO: 65141 - DNA, 348 bp, Unknown
  Obtained from environmental sample
  misc_feature (1)..(348): n is a, c, g, or t
ttgacagccgtaatattgcaggcaagaattgattccacaagactgcccggaaaaagtctgctattactggacggaaaaccgctcatattccgagtaatggaagcgttaaaccaagcgcctgccgatatcagaatactagcttgtcccgaagattcgctttcttctttcgagtctttagcgaaagaagccgaatttgaaatattcgcaggtcccaaagaagatgtccttgagcgttactgtcttgcaatacgcaaatattctatagatagagtcataagggcgacaggcgacaacccctttgtnttgccgacgccgccgcctcgcttaacaatgaagccgtctccctaa

SEQ ID NO: 65142 - protein, 115 aa, Unknown
  Obtained from environmental sample
  misc_feature (1)..(115): Xaa is any amino acid
MTAVILQARIDSTRLPGKSLLLLDGKPLIFRVMEALNQAPADIRILACPEDSLSSFESLAKEAEFEIFAGPKEDVLERYCLAIRKYSIDRVIRATGDNPFVLPTPPPRLTMKPSP

SEQ ID NO: 65143 - DNA, 462 bp, Unknown
  Obtained from environmental sample
  misc_feature (1)..(462): n is a, c, g, or t
atggcgaagaagcgactaccggacgacttcaaagagttcatacaatgcttaaactcaaataacgtccgttatttgctcataggcggttgggccgttggaatgtatggaaatccgagagcgacaaaagatattgacttcttggtcgccatagataacgataacttggcaaacctgcaaaacgcgttgcttgccttcggcgctccgccggttgatttggagcgttttaaagaaaaaggcaatgttattagaatgggaagttctcccatacttatagacattataaacgaggctgacggcattgatatagacgagtgctatttgagaagaaaaataatgaacattgaagatgtcgatatttctataatttcggtaaacgacctaatcaagaataaaaaagcaagcgggagaagcatggatattgccgatgcggaaaaacttgaaaaacagaccgcatatcgttga

SEQ ID NO: 65144 - protein, 153 aa, Unknown
  Obtained from environmental sample
  misc_feature (1)..(153): Xaa is any amino acid
MAKKRLPDDFKEFIQCLNSNNVRYLLIGGWAVGMYGNPRATKDIDFLVAIDNDNLANLQNALLAFGAPPVDLERFKEKGNVIRMGSSPILIDIINEADGIDIDECYLRRKIMNIEDVDISIISVNDLIKNKKASGRSMDIADAEKLEKQTAYR

SEQ ID NO: 65145 - DNA, 534 bp, Unknown
  Obtained from environmental sample
  misc_feature (1)..(534): n is a, c, g, or t
ttgactttggaagggcgcgatttatcgcgcccttcgtctaaaaaagatttaaaagatgaaaaaccatacattatgacacctacaaaaatcgcggtaacacgtctcccccactctatgggattgcccttgccggttagaatgactcccggatcgagcgggtgcgatgtatgcgccgctgtggataaggaggtcgttatctactcgggatgccgcgtgctgatacccaccggatttaagtttcgcatccctgaaggctttgaggtgcaggtacgcccacggagcgggctcgctttgaagaacggggtgaccgttctgaacgctccgggcactatcgacgcggattatcggggggaggtacagatcatactgatcaaccacggcgatcaaccgtttacagtaaaacgcggcgacaggatagcgcaattagttccggctgcggtggctgccgataccgtgtttattgaagacgaggtacaagacgacacatcccgcggcgcgggggggttcgggcatacggggggaattagtctttaa

SEQ ID NO: 65146 - protein, 177 aa, Unknown
  Obtained from environmental sample
  DOMAIN (39)...(173): dUTPase
  misc_feature (1)..(177): Xaa is any amino acid
MTLEGRDLSRPSSKKDLKDEKPYIMTPTKIAVTRLPHSMGLPLPVRMTPGSSGCDVCAAVDKEVVIYSGCRVLIPTGFKFRIPEGFEVQVRPRSGLALKNGVTVLNAPGTIDADYRGEVQIILINHGDQPFTVKRGDRIAQLVPAAVAADTVFIEDEVQDDTSRGAGGFGHTGGISL

SEQ ID NO: 65147 - DNA, 1305 bp, Unknown
  Obtained from environmental sample
  misc_feature (1)..(1305): n is a, c, g, or t
atgggcgtcaaaccggatcggtacgcggctgtggcggcgctacgcgacgaagctgtgacggcgctcgccgagcgctttccggattcgaagaaggctatcggcgaaatcttcacggagcttgaacgcgacgacatccgccaatcgattctgaacaacggcgtccgcatcggcgggcgcgggctggacgagatacgcaagatcacctgcgaactcgacatactgcctcgagcgcacggctcggcgctcttcactcgcggcgagacgcaggcgctcgtagcgacgacgctggggacgaagctcgacatacagcacatcgacaacattcagggcaattacgacaaatcgtacatgctccactacaacttcccgccctactcggtgaacgaggtcaagcggatgacgtcggtgagcagacgcgaaatcggccacggccacttggccgaacgctccatagcgccggtactgcccaatgagaagagcttcccgtacacgatacgcgtggtctccgagattctggagtcgaacggcagttcgtcgatggcctcggtctgctgctcctcgctctcgcttatggccgccggcgtgccgctcaagacgcacgtggccggcgtggcgatgggcctgatcaaggagggcgaccgcgtggctatcctgaccgacatcctcggcaccgaagaccatgtgggcgacatggacttcaaggtggccggcacaagggacggcgtgaccgccatccagatggacataaagctggccggcatcacggcggatatcatgagggaggcgctcggcaaagccaagaccgcccgcatcaagatactcgacattatgaccgaggcgctaccctcggcacgcaaagatatgtccgccttcgcgccgcgcataatcacgatcaccatagacaaggacaaaatccgcgaagtcataggccccggcggcaaggtaatccgcgacatccaagacaccaccggcgccacaatcttcatagacgacgacggcaccgtacaagtcgccgccaccaacagagcctcaggggatgccgcgctgcgccgcatcaagggcatagtcgcggaaccggagctcaacgcgatctacgaaggcacggtcaagacaatcgtggaattcggagcgtttgtggagtacctgccgggcaaggacgggttgttgcacatatcagaacttgagcacggtagggtcaacaaagttgaggatgtgttgcagttgggggataaggtgaaggtgaagctgatcgggtttgacaggatggggaaggttaaactcagccggaaggctttgttggagtag

SEQ ID NO: 65148 - protein, 434 aa, Unknown
  Obtained from environmental sample
  DOMAIN (2)...(60): Polyribonucleotide nucleotidyltransferase, RNA binding domain
  misc_feature (1)..(434): Xaa is any amino acid
MGVKPDRYAAVAALRDEAVTALAERFPDSKKAIGEIFTELERDDIRQSILNNGVRIGGRGLDEIRKITCELDILPRAHGSALFTRGETQALVATTLGTKLDIQHIDNIQGNYDKSYMLHYNFPPYSVNEVKRMTSVSRREIGHGHLAERSIAPVLPNEKSFPYTIRVVSEILESNGSSSMASVCCSSLSLMAAGVPLKTHVAGVAMGLIKEGDRVAILTDILGTEDHVGDMDFKVAGTRDGVTAIQMDIKLAGITADIMREALGKAKTARIKILDIMTEALPSARKDMSAFAPRIITITIDKDKIREVIGPGGKVIRDIQDTTGATIFIDDDGTVQVAATNRASGDAALRRIKGIVAEPELNAIYEGTVKTIVEFGAFVEYLPGKDGLLHISELEHGRVNKVEDVLQLGDKVKVKLIGFDRMGKVKLSRKALLE

SEQ ID NO: 65149 - DNA, 714 bp, Unknown
  Obtained from environmental sample
  misc_feature (1)..(714): n is a, c, g, or t
ttgagctccggttccgcgactatgcccttgatgcggcgcagcgcggcatcccctgaggctctgttggtggcggcgacttgtacggtgccgtcgtcgtctatgaagattgtggcgccggtggtgtcttggatgtcgcggattaccttgccgccggggcctatgacttcgcggattttgtccttgtctatggtgatcgtgattatgcgcggcgcgaaggcggacatatctttgcgtgccgagggtagcgcctcggtcataatgtcgagtatcttgatgcgggcggtcttggctttgccgagcgcctccctcatgatatccgccgtgatgccggccagctttatgtccatctggatggcggtcacgccgtcccttgtgccggccaccttgaagtccatgtcgcccacatggtcttcggtgccgaggatgtcggtcaggatagccacgcggtcgccctccttgatcaggcccatcgccacgccggccacgtgcgtcttgagcggcacgccggcggccataagcgagagcgaggagcagcagaccgaggccatcgacgaactgccgttcgactccagaatctcggagaccacgcgtatcgtgtacgggaagctcttctcattgggcagtaccggcgctatggagcgttcggccaagtggccgtggccgatttcgcgtctgctcaccgacgtcatccgcttgacctcgttcaccgagtag

SEQ ID NO: 65150 - protein, 237 aa, Unknown
  Obtained from environmental sample
  misc_feature (1)..(237): Xaa is any amino acid
MSSGSATMPLMRRSAASPEALLVAATCTVPSSSMKIVAPVVSWMSRITLPPGPMTSRILSLSMVIVIMRGAKADISLRAEGSASVIMSSILMRAVLALPSASLMISAVMPASFMSIWMAVTPSLVPATLKSMSPTWSSVPRMSVRIATRSPSLIRPIATPATCVLSGTPAAISESEEQQTEAIDELPFDSRISETTRIVYGKLFSLGSTGAMERSAKWPWPISRLLTDVIRLTSFTE

SEQ ID NO: 65151 - DNA, 642 bp, Unknown
  Obtained from environmental sample
  misc_feature (1)..(642): n is a, c, g, or t
atggtcttcggtgccgaggatgtcggtcaggatagccacgcggtcgccctccttgatcaggcccatcgccacgccggccacgtgcgtcttgagcggcacgccggcggccataagcgagagcgaggagcagcagaccgaggccatcgacgaactgccgttcgactccagaatctcggagaccacgcgtatcgtgtacgggaagctcttctcattgggcagtaccggcgctatggagcgttcggccaagtggccgtggccgatttcgcgtctgctcaccgacgtcatccgcttgacctcgttcaccgagtagggcgggaagttgtagtggagcatgtacgatttgtcgtaattgccctgaatgttgtcgatgtgctgtatgtcgagcttcgtccccagcgtcgtcgctacgagcgcctgcgtctcgccgcgagtgaagagcgccgagccgtgcgctcgaggcagtatgtcgagttcgcaggtgatcttgcgtatctcgtccagcccgcgcccgccgatgcggacgccgttgttcagaatcgattggcggatgtcgtcgcgttcaagctccgtgaagatttcgccgatagccttcttcgaatccggaaagcgctcggcgagcgccgtcacagcttcgtcgcgtag

SEQ ID NO: 65152 - protein, 213 aa, Unknown
  Obtained from environmental sample
  misc_feature (1)..(213): Xaa is any amino acid
MVFGAEDVGQDSHAVALLDQAHRHAGHVRLERHAGGHKRERGAADRGHRRTAVRLQNLGDHAYRVREALLIGQYRRYGAFGQVAVADFASAHRRHPLDLVHRVGREVVVEHVRFVVIALNVVDVLYVELRPQRRRYERLRLAASEERRAVRSRQYVEFAGDLAYLVQPAPADADAVVQNRLADVVAFKLREDFADSLLRIRKALGERRHSFVA

SEQ ID NO: 65153 - DNA, 711 bp, Unknown
  Obtained from environmental sample
  misc_feature (1)..(711): n is a, c, g, or t
gtgatgggttacgagacggttgaagcggatgtatccggcctcaaggtatctattgagaccggcaggttggcgaagcaggcgaacggttcggcggtggtgcgcctcggggactctatggttctcgtgacggcgtgttgctcgcaatcggagtccgaatcggattttttcccgctttcggtagagtacattgagaagacatacgcggcggggaagatccccggcgggtacatcaagcgggagggccgcccgagcgagaaagagattttgtcggcgcgtatagtcgaccgcccgattcgcccgctctttccggacggctacaagcgcgaggtacagatcgtctgcacggtgatctcggccgacgaaaagtacgacacggacgtgttggctgttacggcggcttccacggcgctgtgcctttcggacatgccgtttacggagcctgtcgcggcggtgcgcgtaggatttgcgaacgggcagctcaagatcttccccacctacgctgagacggagagcggagaactcgacatggtcgtggccggcacggcggaatccatcatgatggtcgagggcggcgccatggaactctcagaggatgtgttgctggaggctatccttttggcccacgccgagataaagaacttacggctatacagaaagaccttgtcgcccggtgcggcagacaaacggcgcaattcacggccccggccgtaa

SEQ ID NO: 65154 - protein, 236 aa, Unknown
  Obtained from environmental sample
  DOMAIN (146)...(210): 3' exoribonuclease family, domain 2
  misc_feature (1)..(236): Xaa is any amino acid
MMGYETVEADVSGLKVSIETGRLAKQANGSAVVRLGDSMVLVTACCSQSESESDFFPLSVEYIEKTYAAGKIPGGYIKREGRPSEKEILSARIVDRPIRPLFPDGYKREVQIVCTVISADEKYDTDVLAVTAASTALCLSDMPFTEPVAAVRVGFANGQLKIFPTYAETESGELDMVVAGTAESIMMVEGGAMELSEDVLLEAILLAHAEIKNLRLYRKTLSPGAADKRRNSRPRP

SEQ ID NO: 65155 - DNA, 1038 bp, Unknown
  Obtained from environmental sample
  misc_feature (1)..(1038): n is a, c, g, or t
ttgagatttccgtcgatgaagatcccgcaaagatactgtcccgcttttttacaggcagaggcggccaatgaggaattaggaatgaaaagggaaaaaagaaaaaaacaggaaaaaatactcccagcctcttacttttttctctcttctcttttattttttcttttgtattccacagtcttcgcccaggacagaaacacaagcgccttcacggttccgccaaaggtatatgtcggggacagggcgtccatgatcctgccgctgccgggttttaccatgaaagaggactctgaagccatatcgatcatttcgccgtcagccgacattgagatccaccgcgctttacttgaacgccggcccgtaggcagccgccttaccgtcgaattcacggcttacaggaccggcattctggaattgccacctgtagttatagcgggagaagttttcaacgaccttaaaatagagataagctcagtacttgaaaagggcgcctccggtaccgtgttatcgggcccctcccctcccctggccattccgggcacaagcctgcttgtttacggaaccataatctcaatactgtgttgtttgtcgctgtcgttctgggccttgttttggggccgcaagagaatcaaagactggcttgcggcatgggaaaagaaacggctgatcatcggcatgaggggagttgaaaaacgcctgcgtaaaaccctgacaagaggggatgatactgncagaaatatccttgatacgctttcaagggagttccgcggtttcctgtctcattttaccggagagagctgccgcgcgatgaccgcgtcggaattcgcaaatatcgaattgcatattaacagggaattcctgaaagattttttcaggcgctgcgacggaatccgctttggcggtaataaaataaataaaaatgacgcaatgtcaatactggatgatctgaaacagttccttgccggactgacaagcgcggcgccgtcctcattgccggatgccgcgctgtcaggcgcgcccgttcaggaggccgttaaatga

SEQ ID NO: 65156 - protein, 345 aa, Unknown
  Obtained from environmental sample
  misc_feature (1)..(345): Xaa is any amino acid
MRFPSMKIPQRYCPAFLQAEAANEELGMKREKRKKQEKILPASYFFLSSLLFFLLYSTVFAQDRNTSAFTVPPKVYVGDRASMILPLPGFTMKEDSEAISIISPSADIEIHRALLERRPVGSRLTVEFTAYRTGILELPPVVIAGEVFNDLKIEISSVLEKGASGTVLSGPSPPLAIPGTSLLVYGTIISILCCLSLSFWALFWGRKRIKDWLAAWEKKRLIIGMRGVEKRLRKTLTRGDDTXRNILDTLSREFRGFLSHFTGESCRAMTASEFANIELHINREFLKDFFRRCDGIRFGGNKINKNDAMSILDDLKQFLAGLTSAAPSSLPDAALSGAPVQEAVK

SEQ ID NO: 65157 - DNA, 996 bp, Unknown
  Obtained from environmental sample
  misc_feature (1)..(996): n is a, c, g, or t
atgacacttgaacggcccatacttgccattgccgcccttgtaatttttccgattgctatcgcgctggcaaaaaagctgggaagcccctttacggcgtccgtgcccctggggcctccgggcggagcgccctttaaggcgccctataatttaagggggataattaacacgctgtacgcgcttgaatattgcggcgtcttcctgcttttcatcgcggcttcaggccccgttatgcaaatctcagaaacaatatggctgaaccggggcgcggacattctttttgtccttgacgtcagcccgagcatggcggcgattgacatggacgggttaaaccggttcaacgccgcccgtaggctgttaaaggatttcgcgttaagccgcccttccgacggcataggcctggtcgcggtaggagacgacgcggccctgttgataccgccgactaccgaccgcgacctcctcgcggcgcggctggaaaatttgcgtatcggcgaaatgggcaacggaaccgcgctcggcatggggatcgcaatcgccgcttaccacctggaaaaatcaaaagcgccgcgaaaggcggtggttcttattactgacggcgaaaacaacgccggaacaattcatcctgagtccgcggctgccatgctgggtgaaatgggtgtttctctttgggttgtaggagtgggctcgaccggagaagttcccgtcaactatgtggatccaattacaaaaatgcgccgtaccggtacatttgagtcgcgatataacactgaagctctaaagagcattgccgacagggcgcatggacagtgggttcacgcgcctcaggcggaagctttgtcggcggcgttttcgcagctcgaccagagggaaatgatcatacgcaggtctattcccgtaagaagagaagaacccctttatgttggttttgtaatcgcggcagtggcgctgctttggggggtacgttttgtaagacgctacgtactgggggcccttctttga

SEQ ID NO: 65158 - protein, 331 aa, Unknown
  Obtained from environmental sample
  SIGNAL (1)...(23)
  DOMAIN (90)...(285): von Willebrand factor type A domain
  misc_feature (1)..(331): Xaa is any amino acid
MTLERPILAIAALVIFPIAIALAKKLGSPFTASVPLGPPGGAPFKAPYNLRGIINTLYALEYCGVFLLFIAASGPVMQISETIWLNRGADILFVLDVSPSMAAIDMDGLNRFNAARRLLKDFALSRPSDGIGLVAVGDDAALLIPPTTDRDLLAARLENLRIGEMGNGTALGMGIAIAAYHLEKSKAPRKAVVLITDGENNAGTIHPESAAAMLGEMGVSLWVVGVGSTGEVPVNYVDPITKMRRTGTFESRYNTEALKSIADRAHGQWVHAPQAEALSAAFSQLDQREMIIRRSIPVRREEPLYVGFVIAAVALLWGVRFVRRYVLGALL

SEQ ID NO: 65159 - DNA, 1440 bp, Unknown
  Obtained from environmental sample
  misc_feature (1)..(1440): n is a, c, g, or t
gtgggttcacgcgcctcaggcggaagctttgtcggcggcgttttcgcagctcgaccagagggaaatgatcatacgcaggtctattcccgtaagaagagaagaacccctttatgttggttttgtaatcgcggcagtggcgctgctttggggggtacgttttgtaagacgctacgtactgggggcccttctttgacttttgataattccgcttttctatttttattgattatccccggtgtcctgatcccgattgtcatagtcaggtacataaagagccggggaatggccgccttgttcgcggcggcggcaccttcaaacaggcgggaaccgtttttaagggaacttcgcctaagaatgatcatgtcggacattttcttcctgtttttcctgggccttcttattgtagctctggcggggccaagatggggcttaagaatagtagcggattaccgccgcggccttgatgtgattttggcctttgatgtttcacggagcatgaatgtaagggattgtcaggataatgattcaagaattgaacgcggaatagacatatcccgtgaacttgtgggatatctggaggatgtgcggtttgggacggcaataagcaagggtaagggaattttagcggtacctttgactttcgattctgaaatggtaatgagctttctttatgttctggacagccaggccgttaccggcaggggaaccgatttggaatctctccttgattccgctattggggcgttccaggaatccataccaagctgcaggggaataatcctcttttcggacggggagagcctttcaggttcttttcagcgggcggtgaataaagcaagaaaagccggaatttctctttgcgcggtgggccttggctctgattatggcgggccagtgccggttgaaaaaggcccggaagccccggacggttttctgcttggcgcaaacggaaaagccatatggagcgaaaggcatgcggatgttttgcggaatgccgtggcaaggtccgggggaatttacgttgacggcagccaggatgaggcggccagggttttagcgtcattcatcgattccctttccgccgattcaaggctccaggggcaaagacgcgaggcgaatcccaggtggcggttttttatcatggcagccatggcctgtcttggcggcgcgcggttgatgggctttagccgacgaagccgcaggcgcggtatcctgccggttctgctttgccttttcgcgttatcttcctgttcgaatatccagggcaagctcctggttatggaagccaacttcttcaatacacggggattgtacaccgaagcaattgcgtcttacttaaaggccctgaaccacgaggaagcggttccttacgccgaatatggtcttgcctctgtttttccgcgcttgacgaaggggaagccgctttggatcgatatatag

SEQ ID NO: 65160 - protein, 479 aa, Unknown
  Obtained from environmental sample
  SIGNAL (1)...(16)
  DOMAIN (155)...(329): von Willebrand factor type A domain
  misc_feature (1)..(479): Xaa is any amino acid
MGSRASGGSFVGGVFAARPEGNDHTQVYSRKKRRTPLCWFCNRGSGAALGGTFCKTLRTGGPSLTFDNSAFLFLLIIPGVLIPIVIVRYIKSRGMAALFAAAAPSNRREPFLRELRLRMIMSDIFFLFFLGLLIVALAGPRWGLRIVADYRRGLDVILAFDVSRSMNVRDCQDNDSRIERGIDISRELVGYLEDVRFGTAISKGKGILAVPLTFDSEMVMSFLYVLDSQAVTGRGTDLESLLDSAIGAFQESIPSCRGIILFSDGESLSGSFQRAVNKARKAGISLCAVGLGSDYGGPVPVEKGPEAPDGFLLGANGKAIWSERHADVLRNAVARSGGIYVDGSQDEAARVLASFIDSLSADSRLQGQRREANPRWRFFIMAAMACLGGARLMGFSRRSRRRGILPVLLCLFALSSCSNIQGKLLVMEANFFNTRGLYTEAIASYLKALNHEEAVPYAEYGLASVFPRLTKGKPLWIDI

SEQ ID NO: 65161 - DNA, 579 bp, Unknown
  Obtained from environmental sample
  misc_feature (1)..(579): n is a, c, g, or t
ttgccttttcgcgttatcttcctgttcgaatatccagggcaagctcctggttatggaagccaacttcttcaatacacggggattgtacaccgaagcaattgcgtcttacttaaaggccctgaaccacgaggaagcggttccttacgccgaatatggtcttgcctctgtttttccgcgcttgacgaaggggaagccgctttggatcgatatatagaagcggagaagttcatccttttgaatagcgaggaccacccggagttgaggtacaggattcattataatatggggattatttattttgagaacgagaagtatgcggaagcaatagactcgtttaaggaagctttaaaggttgacggcagccggattgatgccaagcggaatctggagctaagccttctttccagggccaggagcagccaaccccagggagcttcgtcgcaggaagctgaagacggcaggcagggttcgggcggggggagttcggtaatatttgagtatcttaaggccaaggagcaggaacaatggaaaagtcgggaatggatcggggaaaacagttattccggtccggactactaa

SEQ ID NO: 65162 - protein, 192 aa, Unknown
  Obtained from environmental sample
  DOMAIN (89)...(122): Tetratricopeptide repeat
  misc_feature (1)..(192): Xaa is any amino acid
MPFRVIFLFEYPGQAPGYGSQLLQYTGIVHRSNCVLLKGPEPRGSGSLRRIWSCLCFSALDEGEAALDRYIEAEKFILLNSEDHPELRYRIHYNMGIIYFENEKYAEAIDSFKEALKVDGSRIDAKRNLELSLLSRARSSQPQGASSQEAEDGRQGSGGGSSVIFEYLKAKEQEQWKSREWIGENSYSGPDY

SEQ ID NO: 65163 - DNA, 684 bp, Unknown
  Obtained from environmental sample
  misc_feature (1)..(684): n is a, c, g, or t
ttgggctcggttataaacgtacccgccgcgccgttcaaaaaagggctggctttcaacggcgcgacgcgcggcgagatcaacctgaacctagccctagacctgatggtgcaaagcggcgacgcccgcctgctcatggactcgaaactcaccacgacgaataaccgggaggcctccctgcacatcggcgaggtgatcccctacaccatccaatcctacaacctatcgacctccggcggcgtgaaccagcaaatcgagaaagaaaacgtgggcgtactgctgaaaatgacgcctcacatcaacgacaataaccaaatcaccctgacgctagcccccgaagtctcgaacatcaccggctggaagggggctaactccgacattcccgtggtacgcgtccgccgtacgaacacgaccgtacgcgtcgaggacggccaaacggtgatcctcgccggcctgctctcggaagagaagaccacggtcgtcagcaagttcccgattctgggcgacatccccgtcctgggcctcctcttccaaaacaaacacgacgaggtaaagaaaacgaacctgataatagaggtagtcccgcgcataatccacaacccggaagaaatatcgaaatatatgacgatgacaggccatggcaagccgccgacggaaaaaacgaagcggcgcggtaaaaaagattaa

SEQ ID NO: 65164 - protein, 227 aa, Unknown
  Obtained from environmental sample
  DOMAIN (1)...(198): Bacterial type II and III secretion system protein
  misc_feature (1)..(227): Xaa is any amino acid
MGSVINVPAAPFKKGLAFNGATRGEINLNLALDLMVQSGDARLLMDSKLTTTNNREASLHIGEVIPYTIQSYNLSTSGGVNQQIEKENVGVLLKMTPHINDNNQITLTLAPEVSNITGWKGANSDIPVVRVRRTNTTVRVEDGQTVILAGLLSEEKTTVVSKFPILGDIPVLGLLFQNKHDEVKKTNLIIEVVPRIIHNPEEISKYMTMTGHGKPPTEKTKRRGKKD

SEQ ID NO: 65165 - DNA, 2166 bp, Unknown
  Obtained from environmental sample
  misc_feature (1)..(2166): n is a, c, g, or t
atggaacaacaagacaaaacatccgacatgttcaggctcgccctgctcgggtactcccgcaaagacttcgactacatcacgcgcctggtcaacctgatagacttgggcaaaccgctgaaactttccgtcggcgacctctctaagatgcacaacgtccaatgcgacttggccatcgcgattctggataatatatccaatctagactcctacaacaaccatgtaatgctcgtcaagcaaaaaagctccaacccgccggtcatctgcgcggcgcgcgaggccgaccggcagatactcgaaagctaccgaataggcgtgaaagcggatcacatcatctttatgccgatccagcttgaacgcttcgccgcggtgatccaccgcctcggcgtcgaccttttaagcggcgaggaatccgacaacgacacggcggcaacgaccgtccggaacgttacagccctggcgccgtcggcgatacggcttggagaccttttcgtaaagagcggccttatctccaaggaagacttggataaagccttggcgcaccaaaaacaaaccaacctgcacataggcgacgcgctgatcgacctcggcatcataaccgaagaccaaaagctcaagtgcctcgccgaacagctcaagaccacggtggccgcgcccagccagtacgccgccatagacctcaacgtcgctgcgctcataccggagcacatggcgcggcgcttcaactgcatagcgatagagaaacgcggcagcaacgaattggtcgtggcgaccaccgacgtgctcaacctcaatatgctcgacacgttgcgcgacacgaccgatatgcgcatcaccgcgatcctcggcaaaaaagaggacatcgcgacctccgtggagcggtgctaccgcgacatagcctcgcacaaagacgcctcccgcctcaccgagaatatggacgatcacgttgagtacgtcaaacgcaaggagaaggagaccggcgacgaacaagaagcggccgccgccggcgccgaactcggcataataaagctggtcaacatactgatcaccaacgccatccgcgaccacgcgagcgacatacacatagaacctatggagaacgaactgctcgtacgctaccgcatcgacggggatatgcgcaaagtgatgtcgccgcccaagaactcgcaccacgcaatcgtggcgcgcataaaaatcctctccgacctcgacatcgccgaacgccgcctgcctcaggacgggcgtatggcgataaagatcggccagcgcgaggtcgacatccgcgtctccatactccccacgatcttcggcgaaaaagcggtgctgcgcatactggacaaggagtcattcgaaaagaacaccgcaagcctgggcctcacccaatacgacgaacggatcttccgctcgcagatagccaaaccctacggactggtcatagttacaggaccgaccggaagcggaaagtccacgacgctctacagcgcgctgcaagccgtcaaaaatgtggccagaaatataatcacggtggaagaccctgtagaattccacatggagggggtaaaccaagtcaacgtgaacacaaagaccggcctgactttcgcaacggcgctgcggtcaatcctgcggcaagacccagacatcgttctgataggagagatccgcgacagcgagacggcggacatcgcgataaaaatggcgctgaccggccacttggtattctcaaccctgcacacaaacgacgcggcaagcaccatagcccgcttcaccgacataggcatccctcccctgctgctcggctcggcgctgaacctgatcgtggcgcagcggctggtgcggaaaatatgccctaagtgcaaaatagaatacaaagccgccccggaacttatacagagcatcggactagaccccgaaaaagtcacgaaactctacaagggcaacgggtgcgtcacctgcaacggcaccggcttcgcggggcgcacggcgatattcgagatgctgcagatcactaagaacatccgcaaacttatactgaaaaacgcgtcaacgacggagattcaagaggcggcggcggcggaaaacatgaaaacgctgcggcaaacgggcgcggaactggcgatgaacggagagactactattgagcaggtgctggcggccacgattgaaatttaa

SEQ ID NO: 65166 - protein, 721 aa, Unknown
  Obtained from environmental sample
  DOMAIN (192)...(301): GSPII_E N-terminal domain
  misc_feature (1)..(721): Xaa is any amino acid
MEQQDKTSDMFRLALLGYSRKDFDYITRLVNLIDLGKPLKLSVGDLSKMHNVQCDLAIAILDNISNLDSYNNHVMLVKQKSSNPPVICAAREADRQILESYRIGVKADHIIFMPIQLERFAAVIHRLGVDLLSGEESDNDTAATTVRNVTALAPSAIRLGDLFVKSGLISKEDLDKALAHQKQTNLHIGDALIDLGIITEDQKLKCLAEQLKTTVAAPSQYAAIDLNVAALIPEHMARRFNCIAIEKRGSNELVVATTDVLNLNMLDTLRDTTDMRITAILGKKEDIATSVERCYRDIASHKDASRLTENMDDHVEYVKRKEKETGDEQEAAAAGAELGIIKLVNILITNAIRDHASDIHIEPMENELLVRYRIDGDMRKVMSPPKNSHHAIVARIKILSDLDIAERRLPQDGRMAIKIGQREVDIRVSILPTIFGEKAVLRILDKESFEKNTASLGLTQYDERIFRSQIAKPYGLVIVTGPTGSGKSTTLYSALQAVKNVARNIITVEDPVEFHMEGVNQVNVNTKTGLTFATALRSILRQDPDIVLIGEIRDSETADIAIKMALTGHLVFSTLHTNDAASTIARFTDIGIPPLLLGSALNLIVAQRLVRKICPKCKIEYKAAPELIQSIGLDPEKVTKLYKGNGCVTCNGTGFAGRTAIFEMLQITKNIRKLILKNASTTEIQEAAAAENMKTLRQTGAELAMNGETTIEQVLAATIEI

SEQ ID NO: 65167 - DNA, 444 bp, Unknown
  Obtained from environmental sample
  misc_feature (1)..(444): n is a, c, g, or t
gtgactttttcggggtctagtccgatgctctgtataagttccggggcggctttgtattctattttgcacttagggcatattttccgcaccagccgctgcgccacgatcaggttcagcgccgagccgagcagcaggggagggatgcctatgtcggtgaagcgggctatggtgcttgccgcgtcgtttgtgtgcagggttgagaataccaagtggccggtcagcgccatttttatcgcgatgtccgccgtctcgctgtcgcggatctctcctatcagaacgatgtctgggtcttgccgcaggattgaccgcagcgccgttgcgaaagtcaggccggtctttgtgttcacgttgacttggtttaccccctccatgtggaattctacagggtcttccaccgtgattatatttctggccacatttttgacggcttgcagcgcgctgtag

SEQ ID NO: 65168 - protein, 147 aa, Unknown
  Obtained from environmental sample
  SIGNAL (1)...(16)
  misc_feature (1)..(147): Xaa is any amino acid
MTFSGSSPMLCISSGAALYSILHLGHIFRTSRCATIRFSAEPSSRGGMPMSVKRAMVLAASFVCRVENTKWPVSAIFIAMSAVSLSRISPIRTMSGSCRRIDRSAVAKVRPVFVFTLTWFTPSMWNSTGSSTVIIFLATFLTACSAL

SEQ ID NO: 65169 - DNA, 1620 bp, Unknown
  Obtained from environmental sample
  misc_feature (1)..(1620): n is a, c, g, or t
atgctgtggccgtctaattccggcaatcaaactttctcgaacccgaaaaggccgtcccgaatgttcgacgtaagcaaaaagatcctgtgggtagacgacgaaatcgagttcttccgctcgcacgtcgtgttcttggagacgcgcggttacagcgtcacgaccgccgccgacggcgacaccgccgtccggcttgtcgaggagaaccccgccgcctacgacctcgtgcttttagacaagcagatgcccgtcaagagcggcaacgccacgttggacgagataaaggccatcaggcccaacctgcccgtcgtaatgctgaccgggtatcagcacagcgcggaaatcgccatggggaagcgctatgaggcctacctcaccaagcccatcgatccgggcaagctgctaatcgcctgccagcagatattggacgcggggcagggggtctctcgcaagaagctcaccgacaggtacttgcgcggttatactgagatgtcgtcgcgcgcgggcggggttctgggcgtatccgactggatggggctttatcactcgcttgtcaaatgggatattgagcttgaggggatcaatagcgacgcggtcagccggatgcacacggggctgaagtccgactgcggcaagaagttttgcgattacgtcgccgagaattacacggactgggtgcgagggggaaacaaccatccgccaatgcacgtcgacgttttggatagggtcgtgaagccggagctcgcgctcgggcgcggcgtgcttatgattgtgctcaacgggatgcggctggatcagtttctctgtttggagccggagcttcggaggaatttctcggtgagcgggatgaagctcatgtcgctgctgccgacgctgtcaaatttctgcgttacggcgctcgccacgggttactatcccgacgaggcggcggaggcggagccgaatatatttgagggcgcgtccgccgatcccattgtgatgaagcgtctgatgcgccgcgggcttgagcgcgccggggcggccaaggttaaaacgcttttcgcctccgccgacgggcccaacgggcggcggcacgtgcggtcggcgatagagtccatgagaaaggcgcagactttcggggtggtcgccatcgacataatagaaaaagttctgggcgccgagtccgccgccaagcacgcgaagatggccgtcaccgacgaggcggagttccgcagacgagtggagctggagttcggcgggtctacggtgctcggcgtgatgaaggagatctgcggcgacgactgcacggtgatcttgacctcaggccacggtcacgtcctttgccgacgcgcgagcgaggtgtacgagacggcgaacaagctcggcccgaatttgcggtgcttcttcggcgacaaggcgtcggttgacgatcgggaggtgtttctgttcggggatttgtcgcatatcaggctgccggcgacgatagggggcaagatgtgcctcttggcgcgcgagaatttttatttggcgctgaacgagagcgtcggcctcccgtcgaacgtcttccagagcggcggcatttcgccggaggagatgattgtgccgctgtacatctgccgtccgctcgcagggatggcgcggtaa

SEQ ID NO: 65170 - protein, 539 aa, Unknown
  Obtained from environmental sample
  DOMAIN (26)...(138): Response regulator receiver domain
  misc_feature (1)..(539): Xaa is any amino acid
MLWPSNSGNQTFSNPKRPSRMFDVSKKILWVDDEIEFFRSHVVFLETRGYSVTTAADGDTAVRLVEENPAAYDLVLLDKQMPVKSGNATLDEIKAIRPNLPVVMLTGYQHSAEIAMGKRYEAYLTKPIDPGKLLIACQQILDAGQGVSRKKLTDRYLRGYTEMSSRAGGVLGVSDWMGLYHSLVKWDIELEGINSDAVSRMHTGLKSDCGKKFCDYVAENYTDWVRGGNNHPPMHVDVLDRVVKPELALGRGVLMIVLNGMRLDQFLCLEPELRRNFSVSGMKLMSLLPTLSNFCVTALATGYYPDEAAEAEPNIFEGASADPIVMKRLMRRGLERAGAAKVKTLFASADGPNGRRHVRSAIESMRKAQTFGVVAIDIIEKVLGAESAAKHAKMAVTDEAEFRRRVELEFGGSTVLGVMKEICGDDCTVILTSGHGHVLCRRASEVYETANKLGPNLRCFFGDKASVDDREVFLFGDLSHIRLPATIGGKMCLLARENFYLALNESVGLPSNVFQSGGISPEEMIVPLYICRPLAGMAR

SEQ ID NO: 65171 - DNA, 612 bp, Unknown
  Obtained from environmental sample
  misc_feature (1)..(612): n is a, c, g, or t
gtgcctcttggcgcgcgagaatttttatttggcgctgaacgagagcgtcggcctcccgtcgaacgtcttccagagcggcggcatttcgccggaggagatgattgtgccgctgtacatctgccgtccgctcgcagggatggcgcggtaacgggaacttattttacaaggaatgcagtgatgacggcgacgacagtaaagacgcagacatcatcggtagaagagacgcggcggttgggcgcgaagctggccaagaccgcgcttcccggcgacgtcttctcgttaaatggcgatctcggttgcggcaaaaccgagttcgtgcgcggatttgtggaggcgctgtcgagcggcgcggacgtccgcagtcccacattctctattgtcaacacatataccgcgcctgattttccgatacaccattttgatttctacaggatagagaatgtccgcgagttcgcgtcaataggtctcgacgaatacataaacggcgacggcgtatgtttgatagagtggggggatatgtatcctgaagtcctgcctgatacgactaagcgtatcaaatttacggaggttgacgagacggcgcgggagattgagatgaattttgagttttga

SEQ ID NO: 65172 - protein, 203 aa, Unknown
  Obtained from environmental sample
  DOMAIN (75)...(197): Uncharacterised P-loop hydrolase UPF0079
  misc_feature (1)..(203): Xaa is any amino acid
MPLGAREFLFGAERERRPPVERLPERRHFAGGDDCAAVHLPSARRDGAVTGTYFTRNAVMTATTVKTQTSSVEETRRLGAKLAKTALPGDVFSLNGDLGCGKTEFVRGFVEALSSGADVRSPTFSIVNTYTAPDFPIHHFDFYRIENVREFASIGLDEYINGDGVCLIEWGDMYPEVLPDTTKRIKFTEVDETAREIEMNFEF

SEQ ID NO: 65173 - DNA, 384 bp, Unknown
  Obtained from environmental sample
  misc_feature (1)..(384): n is a, c, g, or t
atgtcttatagggaggggaggatgaaaacggacattaaaatcgctatttcaggaaggagcggctgcggaaacaccacggtcagcagaatggttgcggaaaaattaaatttgcaatttatcaattttacctttcgttctttggcggaagagagaaaggtaactttaaaagatatacttgagcttgccggaaaggacgattcgatagacaaggaagtagacgcgcggcagacaaaacttgccgcagaaagcagcggctgtgtattaggctcgcgtcttgcgatttggatattaaaagaagcggatttaaaaatctatcttgacgcaaatccgcagacaagggcggcgaggattgtaacaggggaagcggaaatcttgaagaagtag

SEQ ID NO: 65174 - protein, 127 aa, Unknown
  Obtained from environmental sample
  misc_feature (1)..(127): Xaa is any amino acid
MSYREGRMKTDIKIAISGRSGCGNTTVSRMVAEKLNLQFINFTFRSLAEERKVTLKDILELAGKDDSIDKEVDARQTKLAAESSGCVLGSRLAIWILKEADLKIYLDANPQTRAARIVTGEAEILKK

SEQ ID NO: 65175 - DNA, 867 bp, Unknown
  Obtained from environmental sample
  misc_feature (1)..(867): n is a, c, g, or t
atgattagcatgacaggttatgcgtacaaagaaaaatcagggcaggagttatcgatctctgcggaaattaagggttttaataatcgctatcttgaaatatccgtgaatcttccgccatggctttcaatgctggaaacaaaaatccgtgaaaagattacatcgaattgcggcaggggaaaggtcgatatttttatccgtgtcagggaacataacacgcctgtcaatataagcgtaaataaaaacgcggctaaggcatattacaacgccattaatgagatggcaaaagaactcggcatgaaagaaaaaccgtcgctctcaacaattttgggaatggaaagcgttttggaaatagaaaaaaaccgtgatgatgaacgctactggcgggaaatcgagcctctgctgaatgatgccgttaaaagtttttgcgaggaacgggaaagagagggcaagcacacgcaagacgatattctttctcatcttggagcgatagaatcatcgttaaaaaaagtttcctcgtttgcccccgtaatcgagcaaacgttgaaagaaaacattaaaacaaggtttgccgaattaatcggaaatcaagttgatgaaaacagagtgctcgccgaaaccgcttcacagcttttgaagtatacaatttccgaagaaatctcccgccttacgtctcatcttgcggaattcagggcggaaaccgaaagaaatcagcgtccgggcaaaaaactggattttctttgtcaggaaattaatcgggaaataaacacaatcggctcaaaaagtgctataatagatgtgacaaacgaagttgtaaaaatgaaagaaacattggaaaatataagagagcagttaagaaatattgagtaa

SEQ ID NO: 65176 - protein, 288 aa, Unknown
  Obtained from environmental sample
  DOMAIN (201)...(288): Domain of unknown function (DUF1732)
  misc_feature (1)..(288): Xaa is any amino acid
MISMTGYAYKEKSGQELSISAEIKGFNNRYLEISVNLPPWLSMLETKIREKITSNCGRGKVDIFIRVREHNTPVNISVNKNAAKAYYNAINEMAKELGMKEKPSLSTILGMESVLEIEKNRDDERYWREIEPLLNDAVKSFCEEREREGKHTQDDILSHLGAIESSLKKVSSFAPVIEQTLKENIKTRFAELIGNQVDENRVLAETASQLLKYTISEEISRLTSHLAEFRAETERNQRPGKKLDFLCQEINREINTIGSKSAIIDVTNEVVKMKETLENIREQLRNIE

SEQ ID NO: 65177 - DNA, 2598 bp, Unknown
  Obtained from environmental sample
  misc_feature (1)..(2598): n is a, c, g, or t
ttgttttgggataccggcgtgggcaagacggcgtactccgtgatggagcaggggaaaatcgaccaggtgctttcctcaaagccggacgaacggcgttatctgtttgaggaagctgcggggattacccgctacaaggtgaggggcgcggaagttgaacggaatcttgccaaaacaagcgagaatatgcatcaggtcgagctggttttaaacgaggtaaaacgttcctacgatacgctcaaagtacaatcggaaaaaaccctgaaataccgcgcccttagagacgaaattttcaactgcgagcttgatattcaactgctcaggctaaagcatttcaaatatgaacgggacgagcgtaacgaaacattaagaagacgcaccgccgaccgggatcgaatacgccggcaaatggaagaggaaagcaaggcccttgacgctcacatggacgaaatgaactccatggagacccggcttgtagagatgcagagaaacatctacggccttgccctggagaaagacgccaaagaaaaccaggcccggcttctgggagagcggcgcaacgaaggtaaagcaaagattgaacagagcgaagtcagggaaaaacaaataaatagcaagattgaagagctaaatgaagacgccgcgggacaggatgaagttgtgtctgaattgagacaaaaagctgcaagtatagaagaaaacatcaaatcctttgaggaaaacatcaaaattgcctcaacccgcataggtgacaacgaaaaagcgatacataaggccgaatccgagatacacggccttgaaaaagagcaggcccaatttgaaatacagttggcgcagataaccgatgatattgtggcggaactggacgccggcctgaaaaaagccggttattcggcttcggagcgccgcaatatagaagctgcccttaacgaaaccctgaacaggctgcgcacggtgcttacgggcagggaagcccttatacgtgacctttccgccgccgcttccgttgaggcttccgagcttcagcgcattgctggaggactggcaacggaacttgcaaatgccgcggcggacgcggaaaaagctcttaccttgtttgaaagttaccgtagccattcgcccctgttccttgatgagtttttagcgccggaaggtatcatcaccaaaaagcgggaactggacggaaaaatccggggtgcgaaagacggcatagaggaacgccgtcaaaggataaaaaccctgcaagccgacaatgcggttctggcggcgaagattaacgaataccgcgtcacgctggaagacctgcgggtaaacctcgccaggatgaacgcccaggcaaaatccgccgaggaacaggccaaactgatacggcgggagcttaacgggcaggaagccatgcttaaaaatatccgtgacgaattgcacgcggaccgcaagcggctggaggaaattaacgagcgcattgccgacacccaatcagaaatcgccgaaattgagcaaaaaggaaaggcgcttaccggcgagcttgaaaagctggaaaaagatataaaaaagagatcgggcgatgtcgcgggcaagcaggaaatcatcaaaaagcgcacagcggaactaggcaaagtgcaggaggccctggataaaattcaccttgaactggtacagtctgaaacggaaataaaaaacatacaggaaaacttccgcgatacccattcccgcgatctgatggaatttgaggagcgtgtttttaccataaccgcccaccccgccgatctgcgggaaaaacttacggaagcgcgttctcagatgaaagaccttggctctgtaaacctgatggccccggaggaatttgcagaaaccaaagaacgctatgaatttttaagcaaccagatggcagacctcctaaaagcccgtaaagaccttgaagatcttaccacggagatacgcacggagtcctctgaattatttatcaagacatacaaccgcgtaagaaagaatttccacaatatgttccgccgcctctttggcggcggcagggcggagctgcagctttctgacaacaaccacgtgcttgaatcgggcatagaaattttcgcccagccgcccggtaaaaaactggagcatatctccctgctttcaggcggcgagcgatccatgaccgccgtggccctgctttttgccacatacatggtaaagcccagccccttctgcctgttagacgaaattgacgccgccctggacgaggcaaatgtaggccgctttgtccagcttttgcgtgagttctccactaccagccagttcatagtaattacacataacaagaaaacagtatccggcgccggcaccctgcttggtgttacaatggaagagtccggcgttacaaaactcatctccgtgcggcttgaaaacgaagacttggccattgccgaagagactccgcctcagcagggtctgtgggacagcgacggcaattttgaggaagaggacgtggaaaacgaagaagggaggcagcttccctccggtgtagacgatcccaagaaagtcagcgaggaacagcttagacccataagagcgcgggcaaagccgcaaactgaaattaatggatag

SEQ ID NO: 65178 - protein, 865 aa, Unknown
  Obtained from environmental sample
  DOMAIN (19)...(792): RecF/RecN/SMC N terminal domain
  misc_feature (1)..(865): Xaa is any amino acid
MFWDTGVGKTAYSVMEQGKIDQVLSSKPDERRYLFEEAAGITRYKVRGAEVERNLAKTSENMHQVELVLNEVKRSYDTLKVQSEKTLKYRALRDEIFNCELDIQLLRLKHFKYERDERNETLRRRTADRDRIRRQMEEESKALDAHMDEMNSMETRLVEMQRNIYGLALEKDAKENQARLLGERRNEGKAKIEQSEVREKQINSKIEELNEDAAGQDEVVSELRQKAASIEENIKSFEENIKIASTRIGDNEKAIHKAESEIHGLEKEQAQFEIQLAQITDDIVAELDAGLKKAGYSASERRNIEAALNETLNRLRTVLTGREALIRDLSAAASVEASELQRIAGGLATELANAAADAEKALTLFESYRSHSPLFLDEFLAPEGIITKKRELDGKIRGAKDGIEERRQRIKTLQADNAVLAAKINEYRVTLEDLRVNLARMNAQAKSAEEQAKLIRRELNGQEAMLKNIRDELHADRKRLEEINERIADTQSEIAEIEQKGKALTGELEKLEKDIKKRSGDVAGKQEIIKKRTAELGKVQEALDKIHLELVQSETEIKNIQENFRDTHSRDLMEFEERVFTITAHPADLREKLTEARSQMKDLGSVNLMAPEEFAETKERYEFLSNQMADLLKARKDLEDLTTEIRTESSELFIKTYNRVRKNFHNMFRRLFGGGRAELQLSDNNHVLESGIEIFAQPPGKKLEHISLLSGGERSMTAVALLFATYMVKPSPFCLLDEIDAALDEANVGRFVQLLREFSTTSQFIVITHNKKTVSGAGTLLGVTMEESGVTKLISVRLENEDLAIAEETPPQQGLWDSDGNFEEEDVENEEGRQLPSGVDDPKKVSEEQLRPIRARAKPQTEING

SEQ ID NO: 65179 - DNA, 369 bp, Unknown
  Obtained from environmental sample
  misc_feature (1)..(369): n is a, c, g, or t
atgcattcagcgcttctccgcagggcgcgcggctacccggccgtgccgctggcgcgacagccggtgcgccggaggcgcccccgtcccggtcctctcgtactaaggacggcgtccctcaagccttctgcgcccgcgccggatagggaccgaactgtctcacgacgttctgaacccagctcgcgtgccgctttaattggcgaacagccaaacccttgggaccttctccagccccaggatgcgacgagccgacatcgaggtgccaaacctccccgtcgctatggacgcttgggggagatcagcctgttatccccagagtaccttttatccattgagcaacggccgttccacgctgtgccgcgggatcactaa

SEQ ID NO: 65180 - protein, 122 aa, Unknown
  Obtained from environmental sample
  misc_feature (1)..(122): Xaa is any amino acid
MHSALLRRARGYPAVPLARQPVRRRRPRPGPLVLRTASLKPSAPAPDRDRTVSRRSEPSSRAALIGEQPNPWDLLQPQDATSRHRGAKPPRRYGRLGEISLLSPEYLLSIEQRPFHAVPRDH

SEQ ID NO: 65181 - DNA, 789 bp, Unknown
  Obtained from environmental sample
  misc_feature (1)..(789): n is a, c, g, or t
ttggcgaacagccaaacccttgggaccttctccagccccaggatgcgacgagccgacatcgaggtgccaaacctccccgtcgctatggacgcttgggggagatcagcctgttatccccagagtaccttttatccattgagcaacggccgttccacgctgtgccgcgggatcactaagccctgctttcgcatctgcccgacccgtcggtctcgcagtcaagccaccttttgcctttgcgctcgcgaggccggttgccgaccggcccgaggtgacctttggatgcctccgttactttttgggaggcgaccgccccagtcaaactggccaccaggcactgtcccggcatccttctcggatgcgcggttaggcctcaggcgacgcaggggcggtatttcaaggacggctccccccggcccagaagccggggatcgtagcctcccgcctatcctacgcacgcggcgcctaaagccaacgccaagatgcagtgaaggttcatggggtctttccgtccaggcgcggggcgccggcatcttcaccggcactgcaatttcgctgagtctcgggaggagacagcgcaggagtcgttacacgattcgtgcaggtcggaacttacccgacaaggaatttcgctaccttaggaccgttatagttacggccgccgtttaccggggcttcggttcgccgcttcggggttgccccctgacgcctcccgttaaccttccggcaccgggcacgtgtcagaccatatacttcccattgctggttcgcatggccctgtgtttttggtaa

SEQ ID NO: 65182 - protein, 262 aa, Unknown
  Obtained from environmental sample
  misc_feature (1)..(262): Xaa is any amino acid
MANSQTLGTFSSPRMRRADIEVPNLPVAMDAWGRSACYPQSTFYPLSNGRSTLCRGITKPCFRICPTRRSRSQATFCLCAREAGCRPARGDLWMPPLLFGRRPPQSNWPPGTVPASFSDARLGLRRRRGGISRTAPPGPEAGDRSLPPILRTRRLKPTPRCSEGSWGLSVQARGAGIFTGTAISLSLGRRQRRSRYTIRAGRNLPDKEFRYLRTVIVTAAVYRGFGSPLRGCPLTPPVNLPAPGTCQTIYFPLLVRMALCFW

SEQ ID NO: 65183 - DNA, 561 bp, Unknown
  Obtained from environmental sample
  misc_feature (1)..(561): n is a, c, g, or t
atgaaaaaacggcttattttcacgtttattgttattgcgtctgttttattgtttcttgcggcatccccctgggaaggctccgcggcaatcgcgcctaatggagatttgcccgcgacgggttattatatcgccaccaacgcgtatccaagaaatactgtagtggatatcactaaccttgaaacaggaaaaagcacccgtgtaattgtttccaatattttaacaagtccgggacttcttgccgttgtctcgcgccaggcgggggaattaataggcatgagagccggttccgtaagcagattaagaatgatacaacctaccgatcctatggcttatatgcgtttcacgcagagtatgaaagacggaaatcccgaatatgactctggaaatgttatcaccgaggataatcttgtggcgcaggtttataaggacgatacttacagaccgcccgaagccgtcaaagcgccggaagagcccaagtctccattacttcccggttatattgttgacgagcctgaatggggaggagaaggaagactgcaaattgtcgatgttcccgattaa

SEQ ID NO: 65184 - protein, 186 aa, Unknown
  Obtained from environmental sample
  SIGNAL (1)...(20)
  misc_feature (1)..(186): Xaa is any amino acid
MKKRLIFTFIVIASVLLFLAASPWEGSAAIAPNGDLPATGYYIATNAYPRNTVVDITNLETGKSTRVIVSNILTSPGLLAVVSRQAGELIGMRAGSVSRLRMIQPTDPMAYMRFTQSMKDGNPEYDSGNVITEDNLVAQVYKDDTYRPPEAVKAPEEPKSPLLPGYIVDEPEWGGEGRLQIVDVPD

SEQ ID NO: 65185 - DNA, 2640 bp, Unknown
  Obtained from environmental sample
  misc_feature (1)..(2640): n is a, c, g, or t
atggcgagcgaaagtgctgggggtcaagatgttgtcaagcaggcggaggagattgctgcggcgttgaccgctaccgatccttccgacaatcaggcgttggctgtcaatgttcacgcaaagctggagaagttgcgtgacggttcgagcgacgccgccgtgcagaacggggcaaacgagtgcatcacgattatcgagaagataatctttcaggagatcgctccggccgaaggcaaggagaaggccgctgcggcgctctccgcgctcatacgtaagtgcggcggcggcgacgcgtcaggcggcgactcggggcacgacgaggttgttgagatcgtggaggatatctcggcggcgctcatcctcgtagaccccaccgacaatcaggcgctggctgtcggcattcactccaagctcgagaagttgcgcggcgcctccgatgatcccaacgtgcagaccgcggcgaacgactgcatagggcttgtggagaagatcatctttcaggagctcaagccggacgaggggatcgcgaagatcgcggataagctcacggcgttacgccgtgggtgccagtatgtggaaggcgcggcggtcgtcgtggaagacggcggcacgggcgttccgggaactggcggcggcgacatcgccaaggatatggatttcgacatggactccgacgaggagacgtctaagcccaaaacgccgccggccgcgccgctcaagcaggacgccgaaggcttcttcgtcgacccgacggcgagttccaagcccgccgtgaagttcagacgggagatcgacatatccacgctcgacgcgtcgttgctgggcgagttcatagccgaggctcaggagcacttcgccaatgccgacgcggcgttgctcaggcttgaggccacccccgccgacgtcgatatcataaacgaattgttccgtgtattccatacgataaagggcgtcgccggattcttgtcgctcgacgccatccaggcgctggcgcacgctaccgagagcctcatggacaaggcgcgggagaaggtattcgttctcaacagcgccgcgatagacctcatattttccacggtggacaccctgaagaaagaggtggaatcgctcaccctcgcccttgagaacaatacgccgtatgtggtccaggagatcatggatcaaatcatcgcctccgtgcacgcaatgaacgagagtttgatcaacaacaagcccatgcctaaattgggcgagatattggtcaacgacggcaaggtctcgccgtccgaggtggagtccgtgttgcacgagcaggagcgcaggcccggcaccaagatgggcgagatattggtcgagcgcggcgcggtcaccccaaccgacatctcgcaggctctggagaagcagggcaacgccagcgccaacaagggcgtggtcgtcatcaaggagagcgtcaaggtcgataccgataagctcgacaaactcgtcgacatgatcggcgaactggtaataaccgagtccatggtgaccggcgggctcgcggggaaggacttgcagagtacgcgtctgggcgtcaacgcccgccagctcacgaagatcacgcggcagttgcaggagatcgggctctcaatgcgtatgatgtccctcaaggccaccttcaacaagatggcgcgcctcgtgcgagacttagcgagaaaggccgcaaaggagatcgcgtttgtgagcgagggcgaggacaccgaactcgacaagtcggtgatagagcatatatccgatccgcttgtgcacatgatccgcaactccgccgaccacgggctggagcacccggacgaacgcgaggcggtcggtaagccgcgtaccggcacaatcacgcttaaggcctaccagaagggcggctctatttgcgtcgaaatacaggacgacggccggggcctcgaccgcgacgccatattcaaaaaggcggtggagaagggcatgatagcccccgacgcgcagatgtcagaagccgagatacatcaccttatattcgccccgggcttttcaacctccgcccaagtgaccgacatttccggccgcggcgtgggcatggatgtggtaaagaagaacgttgagtctctgcgcgggcgcatagagataaataccaaaccgggcgagggaaccacgttcgtcatccatctgccgctaacgctggcgatcatggacggcatgatagtctgcgccggagacgagcgctacatactccccactttctcggttgtggaaaacttcaaaccggcgaagaccgacctgacggacgtgatgggcacgcagaagatggtaatgtgccacggccagctgctgccgctgtatagcttggcggaggtgatgggcaaaaagaacaccatctccctggaagagggcatagtaatggtagtggaagacgccggcaagcgcaccggcctcttagtcgataggattataggccagcagcaaacggtcataaaaaagctgggcgacggcgttggaaagatagacggcgtttccggcggcgcgatcatgccggacggcaaagtcagtttgattatagacatagccgagacgataaaattggctatgagaagcggaagtacgatagtggatccgaaaactgaaaaagttaccggggatccgatgatatacgaagaataa

SEQ ID NO: 65186 - protein, 879 aa, Unknown
  Obtained from environmental sample
  DOMAIN (473)...(535): Signal transducing histidine kinase, homodimeric domain
  misc_feature (1)..(879): Xaa is any amino acid
MASESAGGQDVVKQAEEIAAALTATDPSDNQALAVNVHAKLEKLRDGSSDAAVQNGANECITIIEKIIFQEIAPAEGKEKAAAALSALIRKCGGGDASGGDSGHDEVVEIVEDISAALILVDPTDNQALAVGIHSKLEKLRGASDDPNVQTAANDCIGLVEKIIFQELKPDEGIAKIADKLTALRRGCQYVEGAAVVVEDGGTGVPGTGGGDIAKDMDFDMDSDEETSKPKTPPAAPLKQDAEGFFVDPTASSKPAVKFRREIDISTLDASLLGEFIAEAQEHFANADAALLRLEATPADVDIINELFRVFHTIKGVAGFLSLDAIQALAHATESLMDKAREKVFVLNSAAIDLIFSTVDTLKKEVESLTLALENNTPYVVQEIMDQIIASVHAMNESLINNKPMPKLGEILVNDGKVSPSEVESVLHEQERRPGTKMGEILVERGAVTPTDISQALEKQGNASANKGVVVIKESVKVDTDKLDKLVDMIGELVITESMVTGGLAGKDLQSTRLGVNARQLTKITRQLQEIGLSMRMMSLKATFNKMARLVRDLARKAAKEIAFVSEGEDTELDKSVIEHISDPLVHMIRNSADHGLEHPDEREAVGKPRTGTITLKAYQKGGSICVEIQDDGRGLDRDAIFKKAVEKGMIAPDAQMSEAEIHHLIFAPGFSTSAQVTDISGRGVGMDVVKKNVESLRGRIEINTKPGEGTTFVIHLPLTLAIMDGMIVCAGDERYILPTFSVVENFKPAKTDLTDVMGTQKMVMCHGQLLPLYSLAEVMGKKNTISLEEGIVMVVEDAGKRTGLLVDRIIGQQQTVIKKLGDGVGKIDGVSGGAIMPDGKVSLIIDIAETIKLAMRSGSTIVDPKTEKVTGDPMIYEE

SEQ ID NO: 65187 - DNA, 606 bp, Unknown
  Obtained from environmental sample
  misc_feature (1)..(606): n is a, c, g, or t
atgaggaacaggggcgggtatgacggcagccacgatgaggcggtcaagaccgtcaaccatttctttaaggagatgatgtaccagttgtgtgacgggttttccgtaaacacagggtggttcacggttaacgtccacattggcggcctttttcattcggttaaagaaatctttgatccgaaaaagcaccatgttacctttaaattccatatgctgaaggcaatgaagaaccttacatccctcattgaaataacgattaacagccacattgaagaaaccgcgtatatatccgaatacaacgacaaggaagacccggagggcagtaacctttttgagcctggccacgtatgcgagattcatggccaccggattaaaatcgagggccccgccgacgaaaccggcctctggatggttcccctgcaagacccctccaaagcggttaagataaaccgcgtcgtgtccaacaccccttctcgtatcgaattcattccggtcgctaccggctttcctgaaaaccgcctggaaatccgcacgcgctacgctgcttccggcgcaagccttacttcgctgcgcatcatcaccagcccgtttgttatttccgaggcatga

SEQ ID NO: 65188 - protein, 201 aa, Unknown
  Obtained from environmental sample
  misc_feature (1)..(201): Xaa is any amino acid
MRNRGGYDGSHDEAVKTVNHFFKEMMYQLCDGFSVNTGWFTVNVHIGGLFHSVKEIFDPKKHHVTFKFHMLKAMKNLTSLIEITINSHIEETAYISEYNDKEDPEGSNLFEPGHVCEIHGHRIKIEGPADETGLWMVPLQDPSKAVKINRVVSNTPSRIEFIPVATGFPENRLEIRTRYAASGASLTSLRIITSPFVISEA

SEQ ID NO: 65189 - DNA, 708 bp, Unknown
  Obtained from environmental sample
  misc_feature (1)..(708): n is a, c, g, or t
atgagtaatatcaagaaaataagcgggggggtatgcgccccgaaaggttttgtcgctggcggcgtccattgcggcatcagggcaaaatcaaagaagctcgatctggctttgctttattcggaaaagccatgtacagctgccgcggtttttacgaccaataaggtaaaagccgcctgcgttttggtaagccaggagcatgtctccggaggcgtactccacgcgataattgccaattcgggaaatgccaatgcctgcacaggcgagggcggccttgctgcagcccgcaaaatggcgagcctagcttccggcctttttgggataagccccaaggaagtggcggttgcttctaccggggtaatcggcgtgcctcttcctatagaaccaatcgaaagcagcatggaaatccttcgcagttctttaaaaggtggtgaggaaggccactcaacggcccttgaagcgattatgacaacagacatacgcaggaaagacggggcagttgagatcgaaataggcggcaagagtgtaaaaataggcgggatgataaaaggctccgggatgatacaccccaacatggcaaccatgctctgctttattaccaccgacgctgccatttcaaaagaagcccttgatacaagcctacgcagcgcggtgcgccgctcctttaccgtgtttcagtggacggcgacacctcgaaccacgacatggtga

SEQ ID NO: 65190 - protein, 235 aa, Unknown
  Obtained from environmental sample
  DOMAIN (17)...(234): ArgJ family
  misc_feature (1)..(235): Xaa is any amino acid
MSNIKKISGGVCAPKGFVAGGVHCGIRAKSKKLDLALLYSEKPCTAAAVFTTNKVKAACVLVSQEHVSGGVLHAIIANSGNANACTGEGGLAAARKMASLASGLFGISPKEVAVASTGVIGVPLPIEPIESSMEILRSSLKGGEEGHSTALEAIMTTDIRRKDGAVEIEIGGKSVKIGGMIKGSGMIHPNMATMLCFITTDAAISKEALDTSLRSAVRRSFTVFQWTATPRTTTW

SEQ ID NO: 65191 - DNA, 558 bp, Unknown
  Obtained from environmental sample
  misc_feature (1)..(558): n is a, c, g, or t
gtggacggcgacacctcgaaccacgacatggtgatcgttatggcaaacggcgaggcgggaaattccccgatcaaagcgggaacgcccgattatgagattttttcacaggcgttggaagtcttatgcgtagacctggcccgccagttggcaagggacggcgagggcgcgacaaaactggtgtcagtcaccgtttttggggcaaacgacgaaggagccgccgaagccctcgcaatgtccgtaatttcttccagccttgtaaaggctgcctgcttcggcgcggacgcaaactgggggcgcatcctctgcgcgatgggctactccggcgcggactttgatcccggcgaggttgacgtgagcttcgcgagcgaaggcgaagaaatcgcagtgtgcagaggcggcgaaccgctggacttctccgaggaggacgccaaaaggatactcaaacgcgaggagatcgaaatccgcataaaagccgggaagggctcaggcagcgcgacggcctggggctgcgatttgacttacgattacgtcaagataaacggggactaccgctcatga

SEQ ID NO: 65192 - protein, 185 aa, Unknown
  Obtained from environmental sample
  DOMAIN (2)...(185): ArgJ family
  misc_feature (1)..(185): Xaa is any amino acid
MDGDTSNHDMVIVMANGEAGNSPIKAGTPDYEIFSQALEVLCVDLARQLARDGEGATKLVSVTVFGANDEGAAEALAMSVISSSLVKAACFGADANWGRILCAMGYSGADFDPGEVDVSFASEGEEIAVCRGGEPLDFSEEDAKRILKREEIEIRIKAGKGSGSATAWGCDLTYDYVKINGDYRS

SEQ ID NO: 65193 - DNA, 1035 bp, Unknown
  Obtained from environmental sample
  misc_feature (1)..(1035): n is a, c, g, or t
gtgcagaggcggcgaaccgctggacttctccgaggaggacgccaaaaggatactcaaacgcgaggagatcgaaatccgcataaaagccgggaagggctcaggcagcgcgacggcctggggctgcgatttgacttacgattacgtcaagataaacggggactaccgctcatgaaataccaaaacgctgaaatagccgagatcctaatccacgccctgccttacatccagcaattcagcggcaagaccgtggtggttaaatacggcggcaacgcgatgataaacgaggagcttaaaggccgccgtcattcaggacattatcctgatggcatgcgtcgggatccgtaccgtgctggtacacggcggcggccccgagatgacgccatgctaaaaaaaaccggaaaggaaagccgctttatcaacggtctgcgctacactgacggggaaaccatggagatagtccagatggttctctgcggtaagttgaacaaggacatttgctctttaattcagcacgcggggggcagggcggttggcctctgcggcatcgatggcgcgttgctccaggcccgccgccgaaaaagcggggaagacctcggccttgtcggcgatgttgaaaacgtggacgccacgatcctcaactccgcgctggatgacggaatcatcccggtggtgtcttccgttgcctacggccttggcgaagacgaaggctgctcgctcaacatcaacgcggacacagccgccgcgaaaatcgccggcgctcttaaagcggaaaagctcatgctaatgacggacgttcagggcatactccgcgatgtcaaggatccggcttctcttatcaggcaggttaaccgatctgaactggaagcgcttaaacgaaacggcatagtgagcaagggcatgatcccgaaggttgactgctgcctcctggcaatggatggcggcgtcaagaggagctacataattgacggccgcctgcctcatgcccttctggtcgagctttttaccgacgaaggcatgggcactatgattgaataa

SEQ ID NO: 65194 - protein, 344 aa, Unknown
  Obtained from environmental sample
  DOMAIN (81)...(322): Amino acid kinase family
  misc_feature (1)..(344): Xaa is any amino acid
MQRRRTAGLLRGGRQKDTQTRGDRNPHKSREGLRQRDGLGLRFDLRLRQDKRGLPLMKYQNAEIAEILIHALPYIQQFSGKTVVVKYGGNAMINEELKGRRHSGHYPDGMRRDPYRAGTRRRPRDDAMLKKTGKESRFINGLRYTDGETMEIVQMVLCGKLNKDICSLIQHAGGRAVGLCGIDGALLQARRRKSGEDLGLVGDVENVDATILNSALDDGIIPVVSSVAYGLGEDEGCSLNINADTAAAKIAGALKAEKLMLMTDVQGILRDVKDPASLIRQVNRSELEALKRNGIVSKGMIPKVDCCLLAMDGGVKRSYIIDGRLPHALLVELFTDEGMGTMIE

SEQ ID NO: 65195 - DNA, 1860 bp, Unknown
  Obtained from environmental sample
  misc_feature (1)..(1860): n is a, c, g, or t
atgttcgatgatcaaaatgacaggcaaacggagcggccgcccgacaagccggcccgcccccttcgcaggaaggcaggccccaccggtttagccctgttctttttcttcgcgatgatagccttgtttatcgggtatttttacagcaggaattcctccgccgtaagggagatacgttactcggatttcattaactaccttgaacagaaccagatagagtctgttgttattaacgataacaacactatggatattttccccaaagggcagtcccagcagactgtccagctcagaacccgcatcccctaccaggatcccaatctgcttccctcgcttaaggaaaaaggaatcaatatttccggctccgcttccagattaagcccctggcgcgtgctgctcgatcttttcccatggattatcggcttcggctttatctggtatatgttccgaaacatgccgggcggagggggcaaggccttccagttcggcaagagcaaggcaaagcgttaccatgacgagggaaaaaaagtcagctttgccgatgtcgcgggacagaaggacgccaagttcgagcttgaggaagtggtggctttcctgaaaaacccgcagaagtttacaaaaatgggggcaaggattcccaaaggcgtcctgcttgtgggaatgcccggaacaggcaagacgctgatggcgcgctctgtcgcgggggaagcgggagtcgcctttttccatatgtccggctccgattttgtcgagatgtttgtcggcgtgggcgcaagcagagtcagggacctttttgatcagggcaggcgcagcgccccctgcatcattttcatagacgagttggacgccgtcggacgcacccgcggcgcgggctacgggggcggccatgacgaacgcgagcagaccctgaaccaactgttagtcgaaatggacggctttgattcaaaagacggggtgataattctagcggcgacaaaccgccccgatgttctggatccggccctgctgcggcccggccgcttcgacaggcaggtagtagtcgcgatgccggacatcaaggaacgcgaggcgattttgcaaatacactcggcaaagattcccctgggaaaagatgttgatcttacccgtgtcgcgcgggcgacgccggggatgagcggggccgacattgccaacctggtaaacgaggcggccctgcatgcggcccgcaaggacaagccggatgtggaaatgcacgactttgaggaagcgcgggacaaagtgctgatgggcgtagcccgcagcaccctcgttgtgtctgaaaaggaacgccggatgaccgcgatacacgaggcaggccatgccctgctgcattacttcctgaaaaacgccgaccccctgcacaaagttaccatagtcccccacggccgggcgctgggcatggccctgtccctgccggaggaagacagttacagccgtactcgcggctggatagaggatagaatcgcgatttgttacggcggctggattgctgaaaaattaatcttcaatgagaccacaaccggtaccaagcaggacatacagcaggcaacggaaatggcccgccacatggtctgcgaatggggcatggccgaggaaatggggcctgttgcatacggccaggaagaagagcctatcttcctcggcaaggaaatcgccaggcataaggattattccgaagagaccgcccggcgtatcgacaaggctgtcaaggaaatactggacatagcgcgtgtgggagctgaacgtattatccgcgaacagaaaacagggcttgaagctcttgccgacgccctgctcagtaaagaacccttgttgatgaaagaggtgcgcagatactgggagtag

SEQ ID NO: 65196 - protein, 619 aa, Unknown
  Obtained from environmental sample
  DOMAIN (214)...(348): ATPase family associated with various cellular activities (AAA)
  misc_feature (1)..(619): Xaa is any amino acid
MFDDQNDRQTERPPDKPARPLRRKAGPTGLALFFFFAMIALFIGYFYSRNSSAVREIRYSDFINYLEQNQIESVVINDNNTMDIFPKGQSQQTVQLRTRIPYQDPNLLPSLKEKGINISGSASRLSPWRVLLDLFPWIIGFGFIWYMFRNMPGGGGKAFQFGKSKAKRYHDEGKKVSFADVAGQKDAKFELEEVVAFLKNPQKFTKMGARIPKGVLLVGMPGTGKTLMARSVAGEAGVAFFHMSGSDFVEMFVGVGASRVRDLFDQGRRSAPCIIFIDELDAVGRTRGAGYGGGHDEREQTLNQLLVEMDGFDSKDGVIILAATNRPDVLDPALLRPGRFDRQVVVAMPDIKEREAILQIHSAKIPLGKDVDLTRVARATPGMSGADIANLVNEAALHAARKDKPDVEMHDFEEARDKVLMGVARSTLVVSEKERRMTAIHEAGHALLHYFLKNADPLHKVTIVPHGRALGMALSLPEEDSYSRTRGWIEDRIAICYGGWIAEKLIFNETTTGTKQDIQQATEMARHMVCEWGMAEEMGPVAYGQEEEPIFLGKEIARHKDYSEETARRIDKAVKEILDIARVGAERIIREQKTGLEALADALLSKEPLLMKEVRRYWE

SEQ ID NO: 65197 - DNA, 540 bp, Unknown
  Obtained from environmental sample
  misc_feature (1)..(540): n is a, c, g, or t
ttggttcagggtctgctcgcgttcgtcatggccgcccccgtagcccgcgccgcgggtgcgtccgacggcgtccaactcgtctatgaaaatgatgcagggggcgctgcgcctgccctgatcaaaaaggtccctgactctgcttgcgcccacgccgacaaacatctcgacaaaatcggagccggacatatggaaaaaggcgactcccgcttcccccgcgacagagcgcgccatcagcgtcttgcctgttccgggcattcccacaagcaggacgcctttgggaatccttgcccccatttttgtaaacttctgcgggtttttcaggaaagccaccacttcctcaagctcgaacttggcgtccttctgtcccgcgacatcggcaaagctgactttttttccctcgtcatggtaacgctttgccttgctcttgccgaactggaaggccttgccccctccgcccggcatgtttcggaacatataccagataaagccgaagccgataatccatgggaaaagatcgagcagcacgcgccaggggcttaa

SEQ ID NO: 65198 - protein, 179 aa, Unknown
  Obtained from environmental sample
  SIGNAL (1)...(20)
  misc_feature (1)..(179): Xaa is any amino acid
MVQGLLAFVMAAPVARAAGASDGVQLVYENDAGGAAPALIKKVPDSACAHADKHLDKIGAGHMEKGDSRFPRDRARHQRLACSGHSHKQDAFGNPCPHFCKLLRVFQESHHFLKLELGVLLSRDIGKADFFSLVMVTLCLALAELEGLAPSARHVSEHIPDKAEADNPWEKIEQHAPGA

SEQ ID NO: 65199 - DNA, 411 bp, Unknown
  Obtained from environmental sample
  misc_feature (1)..(411): n is a, c, g, or t
gtgctgcgggctacgcccatcagcactttgtcccgcgcttcctcaaagtcgtgcatttccacatccggcttgtccttgcgggccgcatgcagggccgcctcgtttaccaggttggcaatgtcggccccgctcatccccggcgtcgcccgcgcgacacgggtaagatcaacatcttttcccaggggaatctttgccgagtgtatttgcaaaatcgcctcgcgttccttgatgtccggcatcgcgactactacctgcctgtcgaagcggccgggccgcagcagggccggatccagaacatcggggcggtttgtcgccgctagaattatcaccccgtcttttgaatcaaagccgtccatttcgactaacagttggttcagggtctgctcgcgttcgtcatggccgcccccgtag

SEQ ID NO: 65200 - protein, 136 aa, Unknown
  Obtained from environmental sample
  misc_feature (1)..(136): Xaa is any amino acid
MLRATPISTLSRASSKSCISTSGLSLRAACRAASFTRLAMSAPLIPGVARATRVRSTSFPRGIFAECICKIASRSLMSGIATTTCLSKRPGRSRAGSRTSGRFVAARIITPSFESKPSISTNSWFRVCSRSSWPPP

SEQ ID NO: 65201 - DNA, 438 bp, Unknown
  Obtained from environmental sample
  misc_feature (1)..(438): n is a, c, g, or t
gtgggggactatggtaactttgtgcagggggtcggcgtttttcaggaagtaatgcagcagggcatggcctgcctcgtgtatcgcggtcatccggcgttccttttcagacacaacgagggtgctgcgggctacgcccatcagcactttgtcccgcgcttcctcaaagtcgtgcatttccacatccggcttgtccttgcgggccgcatgcagggccgcctcgtttaccaggttggcaatgtcggccccgctcatccccggcgtcgcccgcgcgacacgggtaagatcaacatcttttcccaggggaatctttgccgagtgtatttgcaaaatcgcctcgcgttccttgatgtccggcatcgcgactactacctgcctgtcgaagcggccgggccgcagcagggccggatccagaacatcggggcggtttgtcgccgctag

SEQ ID NO: 65202 - protein, 145 aa, Unknown
  Obtained from environmental sample
  misc_feature (1)..(145): Xaa is any amino acid
MGDYGNFVQGVGVFQEVMQQGMACLVYRGHPAFLFRHNEGAAGYAHQHFVPRFLKVVHFHIRLVLAGRMQGRLVYQVGNVGPAHPRRRPRDTGKINIFSQGNLCRVYLQNRLAFLDVRHRDYYLPVEAAGPQQGRIQNIGAVCRR

SEQ ID NO: 65203 - DNA, 1452 bp, Unknown
  Obtained from environmental sample
  misc_feature (1)..(1452): n is a, c, g, or t
atggaggcggctttgggagtctcatttgccgggaagcgggcaattgtaaccatgaagcacgtcggccttaacgttgccgcagatccatatatgaacagcgcccttttgggtataaacggcggcgtgataatcgccgtggccgactatccggggatgcacagttcccagggggaacaggactcgcgctcccattcagcctttgcaatggcgccctgccttgagccaaggagccagcatgaagcctacgacctgtgccgcgaggcgtttgaagtctcatatcactaccatctgccggttatgctgctcctgtctacaaggctttcccacgccagggcagccgttaaacccacccctatcggcaatcagaacgagcttccaaaaattaacgacaggacatactggactctgcttccggcatacgcccggcgtaattaccaggaacttatcgaaaagcaggagaagcttgcttcgtggtcaaacgcccacagcgtaaataagattgaaatggctgacaccggctttgccgttataacgtcaggcttggggggcaactattacgaagaaaaccttgaagacctgatttcttacagaggtggaaaagctccgtcaaggctgcacatcggggcatatcccattcctgtcgaatcaatcagaaagctatgcgaaaaagctgaaaaagtcttactaatagaagaaggccagccttttattgaagagcgtgttaagggcatcctttctcaaaatataaaagtttcaggcaaacttgacggaacgttaagccgcacaggagagcttgatcccgacaatgtgaggaagggcctcggccttgcgccccggcccagcgtgcttgattccggcttaaagataccggaactgccaggccgcccgccgcagctttgccagggctgcccgcacggcgacagtttcgctgctattaacaaggcattggcggaactcggtagcggccagggataccctgattcggctataacttccgacatcggctgttacacgttgggcgctaccccgccctattcaagcattgaaagctgcgtctgcatgggggcatcggtatccatggcgcgcggcgcggcggatgccggtataaaatacgcggtcggcgttatcggcgactctactttcctccattcgggaattacctgccttgtggacgcaattcaatcggatactcccatgacgcttgtaattcttgacaattccacagttgcaatgacaggctgccaggaaaccatagtcccctcggaacaccttacccagctcatcctgggcctgggtgtgaaggccgaacacgtattggaacttgaagcctcgcctaagttccatgaggagaacgcggggaaactcaaaaaagaaatggaataccgaggcttgtcggtggtgatcttccgcagggaatgtcttgaagcaataagaaaacggagaaccaaatga

SEQ ID NO: 65204 - protein, 483 aa, Unknown
  Obtained from environmental sample
  DOMAIN (333)...(469): Thiamine pyrophosphate enzyme, C-terminal TPP binding domain
  misc_feature (1)..(483): Xaa is any amino acid
MEAALGVSFAGKRAIVTMKHVGLNVAADPYMNSALLGINGGVIIAVADYPGMHSSQGEQDSRSHSAFAMAPCLEPRSQHEAYDLCREAFEVSYHYHLPVMLLLSTRLSHARAAVKPTPIGNQNELPKINDRTYWTLLPAYARRNYQELIEKQEKLASWSNAHSVNKIEMADTGFAVITSGLGGNYYEENLEDLISYRGGKAPSRLHIGAYPIPVESIRKLCEKAEKVLLIEEGQPFIEERVKGILSQNIKVSGKLDGTLSRTGELDPDNVRKGLGLAPRPSVLDSGLKIPELPGRPPQLCQGCPHGDSFAAINKALAELGSGQGYPDSAITSDIGCYTLGATPPYSSIESCVCMGASVSMARGAADAGIKYAVGVIGDSTFLHSGITCLVDAIQSDTPMTLVILDNSTVAMTGCQETIVPSEHLTQLILGLGVKAEHVLELEASPKFHEENAGKLKKEMEYRGLSVVIFRRECLEAIRKRRTK

SEQ ID NO: 65205 - DNA, 573 bp, Unknown
  Obtained from environmental sample
  misc_feature (1)..(573): n is a, c, g, or t
atgaagtgtgatgttatattggccggtgtgggcggccagggcgtattgtccgttgccgcgattattgcccaggccgcggtaaaagaagcgttggaagtacgccagtcggaagtccacggcatggcccagcggggcggcgcggtactggcccatttgcgtatcgctgataaaaccatagcctcagacctggttccccggggcggcgcggaactcatcctttccatggaacctttggagagcctccgctacggggcctggctttcacccaagggcgcgttagtgagcgccgcggaaccattggtcaatattcccaattacccggacatttcgggtatcataaactcgatagaagcctttcccctgtatcgaattgttgaagccgcggccctggccaaagaagccggccttgcgcggtcggtgaacatggtcatggtgggcgcggcttcggccttcctccccattaaggcggaaaccctggaagagacaattaaaaccgtatttgccgctaagggaaccgacaccgttgaagcgaatatacgagcctttagccttgggaggagcgcggtaaaatga

SEQ ID NO: 65206 - protein, 190 aa, Unknown
  Obtained from environmental sample
  SIGNAL (1)...(25)
  DOMAIN (11)...(187): Pyruvate ferredoxin/flavodoxin oxidoreductase
  misc_feature (1)..(190): Xaa is any amino acid
MKCDVILAGVGGQGVLSVAAIIAQAAVKEALEVRQSEVHGMAQRGGAVLAHLRIADKTIASDLVPRGGAELILSMEPLESLRYGAWLSPKGALVSAAEPLVNIPNYPDISGIINSIEAFPLYRIVEAAALAKEAGLARSVNMVMVGAASAFLPIKAETLEETIKTVFAAKGTDTVEANIRAFSLGRSAVK

SEQ ID NO: 65207 - DNA, 669 bp, Unknown
  Obtained from environmental sample
  misc_feature (1)..(669): n is a, c, g, or t
atgagcgaaaaaattgcgttccaattccgtaatccggaaatcgaaaaaatgccgaggaatgaaatagaggctttgcaactttctaaattaagaaccgctgtgggctgggccctgcgtacccctttttacaaagaacgccttccggcggcggggatcaaaagccccgatgatataaagagcctagaagacctccgcaggattccctgcaccaccaaggaggatttaaggaaagtattcccttacggtttcctcagcatccccagggacgatgtagtgcggctccacgcttcaagcggtaccaccggtacgccgaccaccatttatttcagcgccgatgaccttaaacgctgggccggtttcatggcccgctgcatctggggaacaggctgcaccagaagcgacgtgttccaaaacatgatcagttacggcctttttaccgggggccttggttttcacgccggcgccgaggaagcgggcatgatggtcatcccttcgggggcggggaataccgcccggcagttcaagctcatgcaggacttcggtaccacggtgcttcacgcgactcccagtttcctcctgcacgtagagtccaggatgaaagaagaaggggtctccagggaaagcctcaaactgaaaaaaggcgtttgccggcgccgagccttactctga

SEQ ID NO: 65208 - protein, 222 aa, Unknown
  Obtained from environmental sample
  misc_feature (1)..(222): Xaa is any amino acid
MSEKIAFQFRNPEIEKMPRNEIEALQLSKLRTAVGWALRTPFYKERLPAAGIKSPDDIKSLEDLRRIPCTTKEDLRKVFPYGFLSIPRDDVVRLHASSGTTGTPTTIYFSADDLKRWAGFMARCIWGTGCTRSDVFQNMISYGLFTGGLGFHAGAEEAGMMVIPSGAGNTARQFKLMQDFGTTVLHATPSFLLHVESRMKEEGVSRESLKLKKGVCRRRALL

SEQ ID NO: 65209 - DNA, 618 bp, Unknown
  Obtained from environmental sample
  misc_feature (1)..(618): n is a, c, g, or t
gtgtataattcctacggcctttccgagatgaacggccccggcgtcgcttttgagtgtcagtgcaaggacgggatgcatatctgggaggacggctatatcgcggaaatagtgaatcccgacacccttgaaccggtcaaagacggcgaaattggggaactggtgcttaccatactctgccgtgaggcgacaccgattctccgttaccgtacccgcgaccttacctctttttacacggagccatgcgcatgcggcagaacccaccgccgtctgcaccgcatcaccggacgcagcgatgacatgctgataatcaacggcgtaaatgtcttccccagccagatcgaggaagtgatcatgggcatgaaggaagtgggaaacaactatcttattgtggttgaaaaagacggcgctctcgataggcttacggtaaaaaccgaagtcggccagaacatattcatggacgatgcccgccccctcaacgccctgaaggagaggataagggaaacccttcaggtatccatttcaatcagccccagggtagagcttcacgaaagcggcagtatggcggtctcggaaggcaaggcggtaagagtgcaggacaaacggcccaaagatgtttag

SEQ ID NO: 65210 - protein, 205 aa, Unknown
  Obtained from environmental sample
  misc_feature (1)..(205): Xaa is any amino acid
MYNSYGLSEMNGPGVAFECQCKDGMHIWEDGYIAEIVNPDTLEPVKDGEIGELVLTILCREATPILRYRTRDLTSFYTEPCACGRTHRRLHRITGRSDDMLIINGVNVFPSQIEEVIMGMKEVGNNYLIVVEKDGALDRLTVKTEVGQNIFMDDARPLNALKERIRETLQVSISISPRVELHESGSMAVSEGKAVRVQDKRPKDV

SEQ ID NO: 65211 - DNA, 864 bp, Unknown
  Obtained from environmental sample
  misc_feature (1)..(864): n is a, c, g, or t
atgccacagttggacgcaggacggacgctgtgtcagtttgttaaagttctgtattccaatgtgtgcaaatacgactgcgcttactgcgtcaaccgctcttccgccgacataaaaagagcgagttttaccgtcaacgaacttgccgaattaacctgcgaattttacaaacgaaactacatcgaagggctttttctgtcgtcgggaattttcgccgaccccgacatcgtaatggaaaaattgaccgaaacggcgaaaacgctcagaacggaaatgggtttcggcggctatatccacttaaaagtaattccgggcacgggcgataaaatgatccgtgaggcgggaaagtgggcggacaggttaagcgtcaatatcgaacttccaacggaaaaaagccttcaatgtcttgcgcctcaaaaatccaaaaaagcgattatcggggcgatgaatgatttttcctgtttaagccgtgaaatggaagaaacaaaaaataaaagccgatttcttccgcagggaaaaacagcggcggttcaattcgctccggcgggacaaagcacacagcttattgtcggcgctacaaacgaggacgacaggcagatcatcaatttgactagttctctctacaataaattttccttaaaacgggtatactactccgcttttattcatccgggaagcattgcgcacaaagaaaatattttagacccccgcctgcccgaaagctcaagtccgccgttggtaagggaacatcgattgtatcaggcggattggcttttgcgcttttaccattttgaagcgggcgaaattttaaccgaagatcacctttccttgacgcgcatatcgatcctaaaacagcgtgggcgttaa

SEQ ID NO: 65212 - protein, 287 aa, Unknown
  Obtained from environmental sample
  misc_feature (1)..(287): Xaa is any amino acid
MPQLDAGRTLCQFVKVLYSNVCKYDCAYCVNRSSADIKRASFTVNELAELTCEFYKRNYIEGLFLSSGIFADPDIVMEKLTETAKTLRTEMGFGGYIHLKVIPGTGDKMIREAGKWADRLSVNIELPTEKSLQCLAPQKSKKAIIGAMNDFSCLSREMEETKNKSRFLPQGKTAAVQFAPAGQSTQLIVGATNEDDRQIINLTSSLYNKFSLKRVYYSAFIHPGSIAHKENILDPRLPESSSPPLVREHRLYQADWLLRFYHFEAGEILTEDHLSLTRISILKQRGR

SEQ ID NO: 65213 - DNA, 675 bp, Unknown
  Obtained from environmental sample
  misc_feature (1)..(675): n is a, c, g, or t
ttgagttttaatatgagaataaatcttaataaactgtttttaagtctggacaatcccgcatttgtcattgacgaagaaatattactcaatcttgcatcggaaaaaaaagaacatcaatttgaaacggaagatattaattttgccgcggcttatttctccaataagtttaacgcgtccttgcttgaaggagcggcgcaaagcctctttgaaatatcatctaacgcctttgacaacatcatgctggcgtggctcagcgagcttccggtagaaagggaaataaccgcctacggcagaggggttttagccgccgcgcgggattttaacagttttgatgataaacggcgggcggcggcgaaagcggcgaataaccgcacagacgccgatacgttaacgacgctgaccacggcgtataaagtgcagattgagattcacaggatgatggggcttttgcggtttaccaagaatgaagacggcgagtttatcgcaaggtgtgaacctgatcactttatccttccctgtnctggagacttttttaccgcccgttttggggacaccccctggacaatttatgacgaaaaaagggggctggctttgcgcggaaaaccggcgaggacagccaaaaatcattgttttggaagaattcggcgaggacattcccgccgccggacgcgatga

SEQ ID NO: 65214 - protein, 224 aa, Unknown
  Obtained from environmental sample
  misc_feature (1)..(224): Xaa is any amino acid
MSFNMRINLNKLFLSLDNPAFVIDEEILLNLASEKKEHQFETEDINFAAAYFSNKFNASLLEGAAQSLFEISSNAFDNIMLAWLSELPVEREITAYGRGVLAAARDFNSFDDKRRAAAKAANNRTDADTLTTLTTAYKVQIEIHRMMGLLRFTKNEDGEFIARCEPDHFILPCXGDFFTARFGDTPWTIYDEKRGLALRGKPARTAKNHCFGRIRRGHSRRRTR

SEQ ID NO: 65215 - DNA, 960 bp, Unknown
  Obtained from environmental sample
  misc_feature (1)..(960): n is a, c, g, or t
ttgcgtctgaaatcgtctattctgtccattatatgtatttcttttacttttttcctcttttgcgtttccgctcaggctgccgagttggggcttgacgacgctgttaaccgcgcgctggaatacaatctttcactgaaaaagagcgagattgatcttgcggctagcggctactcggaaaaaaatctttggtcggaaatttttccgtcgattagcgcaagcgcaagcaccgggtacagaaaaaatcttttcagcgatattcctcttaacaatgaaggttctaattacagcttaggttttagcgttaccctcggcttgaatgccggtattccgtacacaatgaaaaacattaaattggctcatcagggaaatattttaaaatacgaagacgcgaaaaatcagctttcaattcaaattaccaaattattttattcgctcaccgcagagaagaataacattctgctccttgaagaaatttttaaccttgcgcaaaggcaatatacaagaagcgaagtttcattcaggaacgggctggtgggagaactttccctaacgcaaagcagtcttgctcttgaaaacgcgcggtacaatcttaacacggcaaaaacagcccacaaaaacaatatgtcggattttttggcaatgcttggaatgcccgacgaagatataacattgtcaggtgaatttaaaatagtaaagattgacgccgacgcggaatcgcttataaatgattatcttccaaagcgtcccgacatcataagggcgaatcaggagattgagaggcttacgctgacgcaaaagcaaaccttactgcaaacaaaagcaccttctttaaatttatcggttgattggaacaactctgcttccgagccttatgataagccttttaccgactcagtaagcgctaccgcgcgtatcagcataccgattgacccgggattccgggacctccggccgatctga

SEQ ID NO: 65216 - protein, 319 aa, Unknown
  Obtained from environmental sample
  SIGNAL (1)...(26)
  DOMAIN (31)...(216): Outer membrane efflux protein
  misc_feature (1)..(319): Xaa is any amino acid
MRLKSSILSIICISFTFFLFCVSAQAAELGLDDAVNRALEYNLSLKKSEIDLAASGYSEKNLWSEIFPSISASASTGYRKNLFSDIPLNNEGSNYSLGFSVTLGLNAGIPYTMKNIKLAHQGNILKYEDAKNQLSIQITKLFYSLTAEKNNILLLEEIFNLAQRQYTRSEVSFRNGLVGELSLTQSSLALENARYNLNTAKTAHKNNMSDFLAMLGMPDEDITLSGEFKIVKIDADAESLINDYLPKRPDIIRANQEIERLTLTQKQTLLQTKAPSLNLSVDWNNSASEPYDKPFTDSVSATARISIPIDPGFRDLRPI

SEQ ID NO: 65217 - DNA, 978 bp, Unknown
  Obtained from environmental sample
  misc_feature (1)..(978): n is a, c, g, or t
ttgaatgaaacgccttcggctaaccgcgtgcatatcggcttttttgggattcgtaatgccgggaaatccagccttgtaaacgcagtcaccggccaggatctagctcttgtctcagaggtaaagggaaccaccaccgatcctgtgtacaagacaatggaacttctgccgctcggccctgttatgatcatcgacacccccggcatagacgacgaaggcgagttaggcgaattacgcgtagcccgagccagacgggtgctgaacaaaaccgatgtggcggtgctggtgacggaggcgggctcaaccttcaaaccggccgaggaagagcttatcggaattttcaagacaaaaaatgttccatatattatcgcgcataacaaatgcgagttacattccggaaacgcggtgccggaatccgtttcgactacggacaatgttctgccggtcagcgcgaaaatcggcatcaatatacatatgctcaaggaaaaaatcgccgccatcgccaataaaaccgaaccgcagcggcgtctggtcgcagatctcatacagccccttgaccttgtagtactggtgatacccatagacaaagccgcccccaagggccggctgatcctcccccagcagcaggtaatccgcgacatactggatacaggcgctgtagctatagcggtcagagataccgaattgaaagacattctcgcgcgtcccaggctaaggcccgccattgtaattaccgacagccagggctttcgccaaagtcgccgccgaggttccgcaggatatacccctcacttcgttttctattttatttgcccgccaaaaaggctggctggacagcgccgtggagggcgtcgccgcgttggacggtttgaaggacggcgacaaggtgcttatttgcgagggctgcacccaccaccgccagtgcgacgatataggcacggtaaaactgcccggcatgattcggaagcacacgggttttga

SEQ ID NO: 65218 - protein, 325 aa, Unknown
  Obtained from environmental sample
  DOMAIN (10)...(128): Miro-like protein
  misc_feature (1)..(325): Xaa is any amino acid
MNETPSANRVHIGFFGIRNAGKSSLVNAVTGQDLALVSEVKGTTTDPVYKTMELLPLGPVMIIDTPGIDDEGELGELRVARARRVLNKTDVAVLVTEAGSTFKPAEEELIGIFKTKNVPYIIAHNKCELHSGNAVPESVSTTDNVLPVSAKIGINIHMLKEKIAAIANKTEPQRRLVADLIQPLDLVVLVIPIDKAAPKGRLILPQQQVIRDILDTGAVAIAVRDTELKDILARPRLRPAIVITDSQGFRQSRRRGSAGYTPHFVFYFICPPKRLAGQRRGGRRRVGRFEGRRQGAYLRGLHPPPPVRRYRHGKTARHDSEAHGF

SEQ ID NO: 65219 - DNA, 360 bp, Unknown
  Obtained from environmental sample
  misc_feature (1)..(360): n is a, c, g, or t
gtggagggcgtcgccgcgttggacggtttgaaggacggcgacaaggtgcttatttgcgagggctgcacccaccaccgccagtgcgacgatataggcacggtaaaactgcccggcatgattcggaagcacacgggttttgagcctgatttcagtttccgctcgggcggcgattttccggatgatctttccctgtacaaggcggtcattcactgcggggcatgcatgcttaacgaccgcgagatgcagtaccgcagccgctgcgccgccgaccagggaacgccttttaccaattacggcatagccatcgcccatatccatgggatattgcggcgcagtatagcggtttttaagagggagtag

SEQ ID NO: 65220 - protein, 119 aa, Unknown
  Obtained from environmental sample
  misc_feature (1)..(119): Xaa is any amino acid
MEGVAALDGLKDGDKVLICEGCTHHRQCDDIGTVKLPGMIRKHTGFEPDFSFRSGGDFPDDLSLYKAVIHCGACMLNDREMQYRSRCAADQGTPFTNYGIAIAHIHGILRRSIAVFKRE

SEQ ID NO: 65221 - DNA, 948 bp, Unknown
  Obtained from environmental sample
  misc_feature (1)..(948): n is a, c, g, or t
atggcgcagtcggatttgtattcccttttaagggggtatgcggttaacgccaaaaccgcgacggtcagcatcaagccgtttttaagctttatcagccagtacgccgcgaagaaagagcatcagcagcctgaattgtcaagatgggccggcaacgccgaagcggaattcaaaacggaaatagcctatctgatggaaaacggcagatgcaatatcctcgcggacgggagtgttttcctgcccgatctttgccgggaaataatccggtcggcgtaccagaatccggataaacacgcgggcatccctttcctcaccgcggcaaaaatgaatttgaaaataccgtccggttacgcgaagacaatcggcctgttatccgacatggagtcttttttcggacgcaaggattccgactcttctgatgtaaacaaggatgaaataatcaatctggaattcccgcagaattacggtagcacgctgatgttggcgtcaatgctcccgaacaggcttatggaattggcgcttattaaaatccagtttttcctcaacaacgggcataacatggcacatattgtaaataccttaaacgctcagattaaggacaaggagagagccctgaaggagtgtatagaccggataatataccgcccgtttgactgtattaatgatatggaacgtttcgatgattttgtctatcaattctgggtccatttctgcgctctggtaaaaaaagacgtcaaggcaaagaatgaaatccgcgaccaggatatcgccgttttacagtcggtctacgtcattgaggtatgcggcagcctctaccgttcctccgtggtcaagaaacaggagattgaagccgcctatgccaggctggaagaattgatgggtcttcccccctaccgctatacgctgggagatattatcaaatttaccaatgacaagggagttcccctttga

SEQ ID NO: 65222 - protein, 315 aa, Unknown
  Obtained from environmental sample
  misc_feature (1)..(315): Xaa is any amino acid
MAQSDLYSLLRGYAVNAKTATVSIKPFLSFISQYAAKKEHQQPELSRWAGNAEAEFKTEIAYLMENGRCNILADGSVFLPDLCREIIRSAYQNPDKHAGIPFLTAAKMNLKIPSGYAKTIGLLSDMESFFGRKDSDSSDVNKDEIINLEFPQNYGSTLMLASMLPNRLMELALIKIQFFLNNGHNMAHIVNTLNAQIKDKERALKECIDRIIYRPFDCINDMERFDDFVYQFWVHFCALVKKDVKAKNEIRDQDIAVLQSVYVIEVCGSLYRSSVVKKQEIEAAYARLEELMGLPPYRYTLGDIIKFTNDKGVPL

SEQ ID NO: 65223 - DNA, 1716 bp, Unknown
  Obtained from environmental sample
  misc_feature (1)..(1716): n is a, c, g, or t
ttggcgccgaaaaatatatattatcaagccgtatacgagatggcgtttattttaagtatattgggcgtcgcgcttgcgtcagtgttgattatcgttctgattcgcgttgacgcggcaaaaaacaaatcaaacagggagagcaaatacaaaagcgcgtttcttgccaacatgagccatgaaatcagaacgccgatgaacgccataaccggcatggtcgcgataggaaaatctgcttccgacatggaacgcaaggattattgttttgataaaatacatgacgcttccaaccatctgcttggcgtgattaacgatattctggatatgtccaaaatcgaagccaacaaatttgaacttgctccgacggaatttgaccttgagaaaatgctccagcaggtagtgaatgtcatcaatttccgcgtagatgaaaagcatcaaaaattctcggtgcatattgaccgttctattccccgcacattgataggggatgatcagcgcattgcccagatcattactaacctgttgggaaacgcggttaaattcacccctgaaaacggcgttatcagccttgccgtgcgccttgtggataaagtaaacggccactgtaccctgcgattttcagtgaaagataccgggatcggcataagccccgaacagcagaaaagattgtttcagtcttttgaacaggccgaatccagcacaacccgcaaatacggcggcacagggcttggccttgcgatttccaaaagcattgtagaactaatgaacggcagcatttgggttgaatcagaggtcggaaaaggctctacatttatctttacggttcaggttgagcgcggaacggaaatcaaacaaaagcgtttgttagatgtcaatttgaaaaatgtccgcatattggccgtagacgatgataatgacatattaacgtatttccggaatataactcttggtttcggcttaatgtgcgataccgctacaagcggaaaaaaagcgattgaactgctggaaaagaacggcggctatcatatttactttatagactggaaaatgccgaacatggacggcatagagcttgcgcgcgaaataaaagcgcgaagccctgaaaattccatagtgataatgatttccgccattgaatggagcgcgattgccaatgaggcaaagacggcgggcgttgataaattcctgtccaaacccctgtttccttcagccattgcggaagtaataaatgaatgtctgggagtagaaaataacaaggtggaaaaatcacaaatcccggatattacgggtatttttgaaggacagcgcgtgcttcttgttgacgatgttgaaataaaccgcgaaatcgttatgacgctccttgaaccgacacagttggggatagactgcgcggaaaacggcatagaagccgtgcgaatgttcagcgaagctcctgacaagtacaacttgattttcatggatgtacagatgccggaaatggacgggtatgaagcgacacggcgtatcagggcattggatattctccaagccaaaactatcccgataattgccatgacagctaatgtatttcgtgaggatgttgaaaagtgccttgaggccggcatgaacgaccatgttggaaagccgaataaatttcaggaaatcctggactgtcttacctcgtatctggaaagtagaaaaaaagacttgaaaaacatagtaatcctatggtataaatag

SEQ ID NO: 65224 - protein, 571 aa, Unknown
  Obtained from environmental sample
  DOMAIN (49)...(114): His Kinase A (phosphoacceptor) domain
  misc_feature (1)..(571): Xaa is any amino acid
MAPKNIYYQAVYEMAFILSILGVALASVLIIVLIRVDAAKNKSNRESKYKSAFLANMSHEIRTPMNAITGMVAIGKSASDMERKDYCFDKIHDASNHLLGVINDILDMSKIEANKFELAPTEFDLEKMLQQVVNVINFRVDEKHQKFSVHIDRSIPRTLIGDDQRIAQIITNLLGNAVKFTPENGVISLAVRLVDKVNGHCTLRFSVKDTGIGISPEQQKRLFQSFEQAESSTTRKYGGTGLGLAISKSIVELMNGSIWVESEVGKGSTFIFTVQVERGTEIKQKRLLDVNLKNVRILAVDDDNDILTYFRNITLGFGLMCDTATSGKKAIELLEKNGGYHIYFIDWKMPNMDGIELAREIKARSPENSIVIMISAIEWSAIANEAKTAGVDKFLSKPLFPSAIAEVINECLGVENNKVEKSQIPDITGIFEGQRVLLVDDVEINREIVMTLLEPTQLGIDCAENGIEAVRMFSEAPDKYNLIFMDVQMPEMDGYEATRRIRALDILQAKTIPIIAMTANVFREDVEKCLEAGMNDHVGKPNKFQEILDCLTSYLESRKKDLKNIVILWYK

SEQ ID NO: 65225 - DNA, 705 bp, Unknown
  Obtained from environmental sample
  misc_feature (1)..(705): n is a, c, g, or t
atggatataagtacaatatgcgtacacggctgtgaaaaaaagtttgatacgacaggagcggtagccgtcccgatattcgcgtcggctactttcgctcatccgggcgtggggaaaatcaccggctttgattactcacgctcgcttaatcctaccaacgtacatctggaagacaccgttgccgcgctggaaggcggtagccatgccgtgtcgttctcctccggcatggcggcggtttcggctttaatggaactgttttcgccgggcgaccatatcatcgcatccgacgatctttacggcggcactttccgcctttttaagcacatatccgaaaaaaacggcgtaaaattttcttatgccgccgcgttaaaagatttagaaaaggaaataactccttccacaaaggcagtctttatagaaacgccgtccaacccgatgatgcacgtaacagacattgccgccgccgccgccattacgaaaaaacacaacgttcttttaataatagacaacacatttcttacgccgtattttcaaaagccgttttcttttggcgcggatattgttttgcacagcggaacaaaatacttaggcggacacaacgacaccctgtcgggaatgttagttgtaaaggactgtggtcttgaagaaaaactgaggtttatcgcaaaaacaacaggcggatgtctttcgccattgacagcttcctga

SEQ ID NO: 65226 - protein, 234 aa, Unknown
  Obtained from environmental sample
  DOMAIN (4)...(234): Cys/Met metabolism PLP-dependent enzyme
  misc_feature (1)..(234): Xaa is any amino acid
MDISTICVHGCEKKFDTTGAVAVPIFASATFAHPGVGKITGFDYSRSLNPTNVHLEDTVAALEGGSHAVSFSSGMAAVSALMELFSPGDHIIASDDLYGGTFRLFKHISEKNGVKFSYAAALKDLEKEITPSTKAVFIETPSNPMMHVTDIAAAAAITKKHNVLLIIDNTFLTPYFQKPFSFGADIVLHSGTKYLGGHNDTLSGMLVVKDCGLEEKLRFIAKTTGGCLSPLTAS

SEQ ID NO: 65227 - DNA, 783 bp, Unknown
  Obtained from environmental sample
  misc_feature (1)..(783): n is a, c, g, or t
ttgggaatgccggaagaaaggacagaagaggaactctggcagcagtaccgaaaaactcgggatcctgcgatacgagaagcttttataaaacagtacgccccattggtaaagtatgttgccggaaaagtagccgttggaatgcccaacaatgttgagtttgacgaccttgtaggctacggcgtctttggtcttatcgacgcgattgacaaatttgatcctgataaaaatgtaaaatttaaaacttatgccgttacgcgcataagaggcgcgatttttgacgaactgcgtttaatcgactttgttcctcgttccgtcaggcaaaaaacccgcgaaatagaaacaacaatttcatctttggaagctcatttgggcagaaccgcctcggagcaggaaatagcaggcgctctgggtatagacgaacaagagtacatgaaagtgattcaaaaaatttccggcacttcaataatttccttgaatgacttatggtattcaggcgacgataacgacaaagtgtctatcggcgacagtatagaatctccttccagcatgaatccagacgttgttgtagttaacgaggaaatccgcagagttattgtcgaggcgataaacgaacttcccgataaagaaaagaaaattcttgttttgtattattacgaagatttaacattaaaagatatagggcgcgttttgcaggtaacagaatccagagtttcacagcttcattccaaagcgattctgcatttaagatccaaattaactaatataagaaaaggtattgtatga

SEQ ID NO: 65228 - protein, 260 aa, Unknown
  Obtained from environmental sample
  DOMAIN (102)...(184): Sigma-70 region 3
  misc_feature (1)..(260): Xaa is any amino acid
MGMPEERTEEELWQQYRKTRDPAIREAFIKQYAPLVKYVAGKVAVGMPNNVEFDDLVGYGVFGLIDAIDKFDPDKNVKFKTYAVTRIRGAIFDELRLIDFVPRSVRQKTREIETTISSLEAHLGRTASEQEIAGALGIDEQEYMKVIQKISGTSIISLNDLWYSGDDNDKVSIGDSIESPSSMNPDVVVVNEEIRRVIVEAINELPDKEKKILVLYYYEDLTLKDIGRVLQVTESRVSQLHSKAILHLRSKLTNIRKGIV

SEQ ID NO: 65229 - DNA, 666 bp, Unknown
  Obtained from environmental sample
  misc_feature (1)..(666): n is a, c, g, or t
atgatcgattttctccagttgcaggaaattgtaaaagggcatctggaaaacgacagggcaattagatccgtagacgcgtcgggtcctacattggaagccgcggtaaatgaagccgcaggtttgcttgatacatcaatccgccgtcttgagtatgaaatcctggaaaggggttccgccggatttatgggcgccggaaaaagagattgggtaatacgcgcctatgaacgcgttcaagccaagaaagcgcagcaggaaagagagagtcttgttgatgaagatgcggaaagcattgaggttatccaagacaaagacggagacgcttttgtgcgatgttggcccagcggagtctttcttaaggttgttcctcctgtcggtaacggaaagagagtacattcggcttacgcaatgcaggaacttcattccagaggtgtagaaaattacgataataatttagttgaaaaacttatagatgatgccggcggaatgtatgtaaaggtggcggattttaattataatcccgctaacgacactatggctaacatcgaagttgacgacgcggaaatgaaagttctagcgactatcattcctcccggtgaaggcggcgctgatttacggttgatatatttagagtctgcttatacagaacagggtataccatggcgttaa

SEQ ID NO: 65230 - protein, 221 aa, Unknown
  Obtained from environmental sample
  misc_feature (1)..(221): Xaa is any amino acid
MIDFLQLQEIVKGHLENDRAIRSVDASGPTLEAAVNEAAGLLDTSIRRLEYEILERGSAGFMGAGKRDWVIRAYERVQAKKAQQERESLVDEDAESIEVIQDKDGDAFVRCWPSGVFLKVVPPVGNGKRVHSAYAMQELHSRGVENYDNNLVEKLIDDAGGMYVKVADFNYNPANDTMANIEVDDAEMKVLATIIPPGEGGADLRLIYLESAYTEQGIPWR

SEQ ID NO: 65231 - DNA, 1071 bp, Unknown
  Obtained from environmental sample
  misc_feature (1)..(1071): n is a, c, g, or t
gtgcctcccgaagacggcgtagacggaaaaaccgttacgggaaaaattcttcccgcaagagccggaagcgatattccgctgcctgtcggaacaaatgtgcatgtaaacgacgccaatgacacgattatttcagacattaacgggcaggtaataatcgcaaacggtaaaattaacgtagagccggtcttaacggttgaaggcgatgttaaccttaaaacgggaaatattattttccttggaaatgttattattacgggtaacgtagaagacagcttctctgtaaaagccgccggtaatatcgaagtaagaggaaccgtatccaaagctgaacttgacgcggaaggcgatataattatttatcagggtatcaacggaaagagcggcggtaaaatacgcgcagggcgttcaatctggtcgcgctttatcgagaatgccaatgtagaagccggcaatatggttgttgttacagacggtattatcaattcaaacgttgacgccataaagagcattgtttgtatgggcaaacgcgcgaatatcatgggcggtcgtttgcgcgcgggcgaggaaataaacgccaaagttcttggcaactcaacaagcggtacggaaacaatctgcgaagttggttttgatcctcacagcaaattggaattggagcgtcttcttacgattaaaacgacatcggaagaagaacttgaatcaatgcggttggatttgcaaacattaatcaatacgaagaaacagcgtaaatcactgcccgaggataaagaggcgtacttgcaggaactgacagaacgcaaacaagtattaaccgatgaattaacagatgtcaatgaaaatatacaaaaagtccaggaattcatgagtcagatgcaggttcgcggtaaggtatccgcctctactaaagtatggcccggtgtaaaaatatggattcgcgatgttaaggaagatgtaagaacagaataccgcgcggtaacctttattctggaaaacggtcttgtcagagcgactaaatacgaggaacctgacgaacttgctatgaagggacttgatggctatagcaccaattga

SEQ ID NO: 65232 - protein, 356 aa, Unknown
  Obtained from environmental sample
  DOMAIN (1)...(339): Protein of unknown function (DUF342)
  misc_feature (1)..(356): Xaa is any amino acid
MPPEDGVDGKTVTGKILPARAGSDIPLPVGTNVHVNDANDTIISDINGQVIIANGKINVEPVLTVEGDVNLKTGNIIFLGNVIITGNVEDSFSVKAAGNIEVRGTVSKAELDAEGDIIIYQGINGKSGGKIRAGRSIWSRFIENANVEAGNMVVVTDGIINSNVDAIKSIVCMGKRANIMGGRLRAGEEINAKVLGNSTSGTETICEVGFDPHSKLELERLLTIKTTSEEELESMRLDLQTLINTKKQRKSLPEDKEAYLQELTERKQVLTDELTDVNENIQKVQEFMSQMQVRGKVSASTKVWPGVKIWIRDVKEDVRTEYRAVTFILENGLVRATKYEEPDELAMKGLDGYSTN

SEQ ID NO: 65233 - DNA, 618 bp, Unknown
  Obtained from environmental sample
  misc_feature (1)..(618): n is a, c, g, or t
gtggattactttcaatactataactacactaacaacatttatgaaaaaattagcggtgaattcaccatggatggcggaaccatcagtggtaatatcgcccaaggcggcggctacggcggcgggggggtgtatgtaggctccaacgccacctttattatgagtgccggaatcatcagtagtaatatcgctcaaaacaattcctatggctacggcggcggggtgtatgtcgatgttgacgtatacggtggtgtgaaaggtacctttaccatgagcggtggaaccattggcggagataaaaaggaagatgcgaatattgcccaaagcggcggcggggtgtgtgtaaagggcggaaccttcaccatggagggtatcgccgaagtgtccggtaatgaagccaaagtctccggaggcggggtgcttgtttggggtatagatgccacctatcttagcaccttcaatatgcggggcaacgccacggtgtccggcaataccgctcaatacaacggcggcggggtgtttgtgtataactatactgaatttaacatgacaggcggaactattggcggcaaaaatgaaaacgacggcaataccgcctcttacggcggcggcggcaattaa

SEQ ID NO: 65234 - protein, 205 aa, Unknown
  Obtained from environmental sample
  misc_feature (1)..(205): Xaa is any amino acid
MDYFQYYNYTNNIYEKISGEFTMDGGTISGNIAQGGGYGGGGVYVGSNATFIMSAGIISSNIAQNNSYGYGGGVYVDVDVYGGVKGTFTMSGGTIGGDKKEDANIAQSGGGVCVKGGTFTMEGIAEVSGNEAKVSGGGVLVWGIDATYLSTFNMRGNATVSGNTAQYNGGGVFVYNYTEFNMTGGTIGGKNENDGNTASYGGGGN

SEQ ID NO: 65235 - DNA, 1575 bp, Unknown
  Obtained from environmental sample
  misc_feature (1)..(1575): n is a, c, g, or t
ttggcggcaaaaatgaaaacgacggcaataccgcctcttacggcggcggcggcaattaacgctaaaaatgtttcgaacatatccgttaaaacacagccaaaactgaattacacccacggagatgcgcttgatctgtctttactaaatgtaacgctgacctacgatgacggcacaaccgaagatgtcgtatcctctgctttttccgcacattctctaacaataacccccgcacacaatactccattggaacgttccagttataacggtaaacctgttaccattaattacggcagcagtaaaacggctaccaccaacaatttaaacatcgacgcaaaatccctatccgacaccgacgccattaccgttgaaccgtcttcaattacggcggtgatttataccggcaatgaattaaaaccggcgattacttacgtaaagcacactgttccaacaggcactataagaacattagatttgaacactgattacaagctggaatacagtaacaacagaaacgcaggaacagcgacaataaccataacaggcataagagactatacaggaactagaaccgtaaacttcactattaacaaagccgctggagcggcggtcaacgcaccgacactagacagtacgtcaggtggggatttgggttttaatcaaggctccgccaccataaaagcagtaactaccagcaatgggcagagcgttgaatatggaataagcacaaacaactccgcaatcgtatggcaggacgggttaaccttcagcgatctaatagtaggacttgctaattattactttgtatttgcacgctcgaaggaaaacgccaactatctcactggtacggcaagcacaggtttgcccgtaacgatccctttagtcatagaaactcgtattaattatccattggaatctttacttaacagccttcctgacaacaatccagacaacccatataaaataaaattgagccagagtaatatcacttattcctcaagtggaggaaacatggaggaaatactgagtagtaccaaatatgtcagtcttgatatttcagacagtagtttaagttttgatggagacagtggaagttatggcgctttctctaattgtaccagtcttatcagcgtaactttaaacaactgtagctttgggggtagtggcacttttcgaggttgcatcggccttacaagcgtaaccgtaggaaacgacgttactagcattttgggtagcactttttggggttgtacaagccttaccagcgtaactattggaaacgacgttaccagcattttgggtagcgcttttagagaatgcacaagccttacaaacataacaataccaaacaacgttaccaactttgggggtatagtttttacaggttgtaccagccttaccagcgtaacttttgcaacaggaagcaacataccagacgctaattttggtgacagtgcctttcctgaaggaagcgaaggagcgggcggaaacaccttaaagaccgcctacaatgcggcatcgctaaaagagggaacatatacaagagcggctaacggctcaacatgggagaagcagtaa

SEQ ID NO: 65236 - protein, 524 aa, Unknown
  Obtained from environmental sample
  SIGNAL (1)...(21)
  misc_feature (1)..(524): Xaa is any amino acid
MAAKMKTTAIPPLTAAAAINAKNVSNISVKTQPKLNYTHGDALDLSLLNVTLTYDDGTTEDVVSSAFSAHSLTITPAHNTPLERSSYNGKPVTINYGSSKTATTNNLNIDAKSLSDTDAITVEPSSITAVIYTGNELKPAITYVKHTVPTGTIRTLDLNTDYKLEYSNNRNAGTATITITGIRDYTGTRTVNFTINKAAGAAVNAPTLDSTSGGDLGFNQGSATIKAVTTSNGQSVEYGISTNNSAIVWQDGLTFSDLIVGLANYYFVFARSKENANYLTGTASTGLPVTIPLVIETRINYPLESLLNSLPDNNPDNPYKIKLSQSNITYSSSGGNMEEILSSTKYVSLDISDSSLSFDGDSGSYGAFSNCTSLISVTLNNCSFGGSGTFRGCIGLTSVTVGNDVTSILGSTFWGCTSLTSVTIGNDVTSILGSAFRECTSLTNITIPNNVTNFGGIVFTGCTSLTSVTFATGSNIPDANFGDSAFPEGSEGAGGNTLKTAYNAASLKEGTYTRAANGSTWEKQ

SEQ ID NO: 65237 - DNA, 363 bp, Unknown
  Obtained from environmental sample
  misc_feature (1)..(363): n is a, c, g, or t
atggcggtgcatggatatcctcgttctactatggatatagatatatgggttaaacctgatcctgaaaacgcaaatctggtattgagcgctcttgatgactttgacgcaccgattggggatttaaacgcggaagacttgcaaaaagaagaaatagtttttcaaataggcgttgctccttgcagaatcgacattctgacatcagttgacggattgaaattcgaagaagctttttcaaattcaaaaaaggttgagattgaggggatatccattcaggttctttcaattcccgatttgataaaaaacaaacgttccacaggaagaacaaaagatttagcagatgcgcaagatttggaaaaaatttaa

SEQ ID NO: 65238 - protein, 120 aa, Unknown
  Obtained from environmental sample
  misc_feature (1)..(120): Xaa is any amino acid
MAVHGYPRSTMDIDIWVKPDPENANLVLSALDDFDAPIGDLNAEDLQKEEIVFQIGVAPCRIDILTSVDGLKFEEAFSNSKKVEIEGISIQVLSIPDLIKNKRSTGRTKDLADAQDLEKI

SEQ ID NO: 65239 - DNA, 2220 bp, Unknown
  Obtained from environmental sample
  misc_feature (1)..(2220): n is a, c, g, or t
gtggccgccgagtccgatgtccaggcgggacggatcgccgagcttttaaaagacgaggatgtttccgtgggagcgctccccttctcatccggctttgctttgcccgacataaagttcatgctcatccaggagaacgaaatctttggccgccgccgccgtccgcccaaatcccttaaaaccgcgcgtagtgccgcaatcgacacttttgtggagctcaaccccggcgattacgtggttcacgtaaattacggcatcgggcttttcaagggcattgagcgaataaaggccctgggccacgaaagggactacataagcatagagtacgccggggaagaaacggtctttgtgcccattgagcaggtaaacctggttcagcgctacatcggcaacgagggcagtcctccccggctggacacactcggttccaaaagctgggaaaaccgcaagggccgcgttaaaaagtccgtggaagatattgcggaaaaacttttggccctttattccagacgccgccaatcgcagggcttcgcctttccgaaagacaccgaatggcagaccatgttcgaggcggccttcccgtttgaagaaaccgaagatcagctccgctgtgtggaagagatcaaagctgacatggaaagcccgcatcctatggacaggctaatctgcggggacgtgggctacggaaaaacggaagtggcggtgcgggcctgctttaaggcgataatgggcggcaagcaaatcgcgtttctcgcacccaccacgatccttgcggaacagcattacgaaaatttccaggaaaggttcagccagtttccggttaagctggcgatgctctcgcgctttgtggacaaaaaaagcgtccgcaaaatccttgaggaactaaaaaatggagaaatcgatctgttggttggtacccacaggatcattcaaaaagacgtagcctttaaaaacctgggccttattgtaatagacgaggaacagcgtttcggcgttaaagacaaggagcggctaaaggagctcaagaccaacgtcgactgcattaccctttccgcaacgccaatccccagaacgttgcacatgagcctccttaaaattcgcgacatgagcctgttggcgacggctcctccgggaaggcgtcctattgaaacctttgtcgaagaatacgacgattttttaatcgcaaaggcgatacggcgcgaagttgaaaggggagggcaggtgtttttccttcacaacaggattgaaactttgcgcgagacgcggcataagattgaacacctcgttcctgagatgcttattgaaaccgcgcacgggcaaatggacgcctttgaacttgaagacataatgcgtcgctttattcacggcggttttcacgttttggtttccactacaataattgaaaacggcatcgacatacccaatgttaataccatcataatagaccgcgcagacaagtacggcgtttcccaactttaccagttacgcggcagggtagggcggtctgaccgcaccgcttacgcttatcttttctatcctgaatcaaaatcgctgtcggagatcgcgatgaaaagacttcagaccatttccgattttaccgaacttggcagcggctttaaaatcgcgatgaaggatatggaaatcaggggagccggaaaccttcttggaaaagaacagtcgggcgacatttactcggtaggttttgacctgtacgttaaacttcttgacgaagcggttaaacgccttgaaaattccgactatgaggcggaaaccgaaacgcttatggaactggagtattcaggctttattcctgacgcttacattgactctcctcagcgtaaaatggaaatttacaaaatgattgccgccgtcagggaaaaggacgaacttgagcgcgtctacggcgaacttatcgaccgtttcggcccgctgccggatgaagccgcttcccttcttgcgctcgccgagataaggatcatctgccgtaaacttgctgtctcttcgataaaggaaaggggcggcgttgtccgcatcgagtttgcgaaagtcgcccgtgttaaaatagacacgcttttgcgcatgatgcaggaatcgcagggaaagataaaaatcgatcccaaaaagccgaatgtgcttctgcttgcaacgggcagtatcggcttaaaggaaaagagcgaatttatccgcgaaaaactgtccgtattaacggccgggcagctttaa

SEQ ID NO: 65240 - protein, 739 aa, Unknown
  Obtained from environmental sample
  DOMAIN (193)...(355): Type III restriction enzyme, res subunit
  misc_feature (1)..(739): Xaa is any amino acid
MAAESDVQAGRIAELLKDEDVSVGALPFSSGFALPDIKFMLIQENEIFGRRRRPPKSLKTARSAAIDTFVELNPGDYVVHVNYGIGLFKGIERIKALGHERDYISIEYAGEETVFVPIEQVNLVQRYIGNEGSPPRLDTLGSKSWENRKGRVKKSVEDIAEKLLALYSRRRQSQGFAFPKDTEWQTMFEAAFPFEETEDQLRCVEEIKADMESPHPMDRLICGDVGYGKTEVAVRACFKAIMGGKQIAFLAPTTILAEQHYENFQERFSQFPVKLAMLSRFVDKKSVRKILEELKNGEIDLLVGTHRIIQKDVAFKNLGLIVIDEEQRFGVKDKERLKELKTNVDCITLSATPIPRTLHMSLLKIRDMSLLATAPPGRRPIETFVEEYDDFLIAKAIRREVERGGQVFFLHNRIETLRETRHKIEHLVPEMLIETAHGQMDAFELEDIMRRFIHGGFHVLVSTTIIENGIDIPNVNTIIIDRADKYGVSQLYQLRGRVGRSDRTAYAYLFYPESKSLSEIAMKRLQTISDFTELGSGFKIAMKDMEIRGAGNLLGKEQSGDIYSVGFDLYVKLLDEAVKRLENSDYEAETETLMELEYSGFIPDAYIDSPQRKMEIYKMIAAVREKDELERVYGELIDRFGPLPDEAASLLALAEIRIICRKLAVSSIKERGGVVRIEFAKVARVKIDTLLRMMQESQGKIKIDPKKPNVLLLATGSIGLKEKSEFIREKLSVLTAGQL

SEQ ID NO: 65241 - DNA, 615 bp, Unknown
  Obtained from environmental sample
  misc_feature (1)..(615): n is a, c, g, or t
ttgatggccgagaaatttgcggatgtatccggaatggcgaatgtttttgaccttttggatctgataaaaaaatacggcgggccaaaacccggcgaatcagatttccagaatcaggtatcctctgtagcgacaggcgacgtggcaatgatccatcaggggatttgggcggaagacagcattaagcaggtaaatcccggtgtcgagatcggttttttggtcgggccggctggaaacgacgtttcaggcgcgggtatcatgtatgactctaaccagacgctgagggtatacaaggacagcaagaatttgaaagccgttctggactggctgcgatggcttacgaattccgaatacggaaggaactggatacccggaaaggtcaagcagctttcccccgtcgcgggagcccccgcgccggactctgatatagcccgtgaaaccgtcgcgatgttaagcaataaagtcccgtcttatccgtggttctaccagatgttcccgtccggatccgaggagcagttggggaccattttacaggggtacagcgcgggccttacggatcgcaagggtgcgattaccgctttggatgaagcctatgccaagctaataaaagcacagtaa

SEQ ID NO: 65242 - protein, 204 aa, Unknown
  Obtained from environmental sample
  misc_feature (1)..(204): Xaa is any amino acid
MMAEKFADVSGMANVFDLLDLIKKYGGPKPGESDFQNQVSSVATGDVAMIHQGIWAEDSIKQVNPGVEIGFLVGPAGNDVSGAGIMYDSNQTLRVYKDSKNLKAVLDWLRWLTNSEYGRNWIPGKVKQLSPVAGAPAPDSDIARETVAMLSNKVPSYPWFYQMFPSGSEEQLGTILQGYSAGLTDRKGAITALDEAYAKLIKAQ

SEQ ID NO: 65243 - DNA, 891 bp, Unknown
  Obtained from environmental sample
  misc_feature (1)..(891): n is a, c, g, or t
atgacgacgtataagaaaaacaggttttattctgtacttgtattctcgttatttattcttcccgctattgcggcagtactcttttcggtagaaatacccttcataatgagcatcggctattcctttaccaaatggaacgggcttgacagggtagccgcgtttatcggcctggaaaactacaaggaactgctgtttgatgacaccgttatgagaaattcccttgtctttaccttaaaacaggggattttatttgttctttttaccaacgcaatcgccatgcttctggcggttgtgttggatagtgaaatacggggaaaaaacgtcttgcgggcggcgttttatatccccaacattgtcagccttgtcgtcataggctatatatggcgttttgtaatttcccgcggttacaattccctgtatgaatttatcaggctcccttttttggagtacagttggctgggcaatccgcaactggcttttataagcatattgattgtatcggtatggcaggccataggcttttacatcgtgatttatctggccagccttcaggttattccccgcgacatgattgaggcggccatgattgaccgcgccggcgcggtttcccgctttttcacaattacctttccgctgctcatgccgtccgttacggaggctgtctttcattcagtttccggcagcctgaaattcatggacgtggtatacagcctgaccgacggcgggccgggtacctccaccaccccaattgccctggacatttacaaaacaccgtttgtttacagccgttttgggtacggaaccgccaagtcggtagttctttttctgttgatactgattattacattcttccaggtcaaattcttcaagaaacaggaggtggaggcatga

SEQ ID NO: 65244 - protein, 296 aa, Unknown
  Obtained from environmental sample
  SIGNAL (1)...(24)
  DOMAIN (70)...(294): Binding-protein-dependent transport system inner membrane component
  misc_feature (1)..(296): Xaa is any amino acid
MTTYKKNRFYSVLVFSLFILPAIAAVLFSVEIPFIMSIGYSFTKWNGLDRVAAFIGLENYKELLFDDTVMRNSLVFTLKQGILFVLFTNAIAMLLAVVLDSEIRGKNVLRAAFYIPNIVSLVVIGYIWRFVISRGYNSLYEFIRLPFLEYSWLGNPQLAFISILIVSVWQAIGFYIVIYLASLQVIPRDMIEAAMIDRAGAVSRFFTITFPLLMPSVTEAVFHSVSGSLKFMDVVYSLTDGGPGTSTTPIALDIYKTPFVYSRFGYGTAKSVVLFLLILIITFFQVKFFKKQEVEA

SEQ ID NO: 65245 - DNA, 831 bp, Unknown
  Obtained from environmental sample
  misc_feature (1)..(831): n is a, c, g, or t
atgacagataaaaagtttttttctttcatgctgacggcagcgctgggccttttcgctttggtctatctttatccccttcttcttgtagtagtcaactccctaaaaacttacgaagagatcaccgttaatgtagtcgccctgcccaaaagaattacttttaataatttcattaacgcctggaagataatgagatatccgctgctttttttaaacaccctttttattacagccctgggcgtcgcgggcgtcgtgctcacaggagccctggcggggtataaactttcgcgtacaaagactgtttacagctggattttttttcttatccttatagctccgatgatgatcccctttcattcttttatgattgcgcttgttaaggtggcaagagttacgagtttgatcagaaaaccctggggcctgggattaatctattggggactgggggctccgctggctgtttttctctatcatgggtttgttaaaaccgttcctctggagcttgacgaatgcgccattattgacggcgcttctccgccaaaaatcttttttatgataatctttcccctgttacagccggttacggttacggtaatcgtaattaacgccatgtggatgtggaacgattttctgctaccgctgcttatagtgggcggctcaaaagacgcgtacacattacagcttgcggcaaacaattttatggggcaatataagacagaatggaactacgcgatggccggggttatactttccgtagttccggctattgctttctaccttgttttgcagaagtatattataaagggcatgaccgcaggagcggtcaaattataa

SEQ ID NO: 65246 - protein, 276 aa, Unknown
  Obtained from environmental sample
  SIGNAL (1)...(21)
  DOMAIN (65)...(271): Binding-protein-dependent transport system inner membrane component
  misc_feature (1)..(276): Xaa is any amino acid
MTDKKFFSFMLTAALGLFALVYLYPLLLVVVNSLKTYEEITVNVVALPKRITFNNFINAWKIMRYPLLFLNTLFITALGVAGVVLTGALAGYKLSRTKTVYSWIFFLILIAPMMIPFHSFMIALVKVARVTSLIRKPWGLGLIYWGLGAPLAVFLYHGFVKTVPLELDECAIIDGASPPKIFFMIIFPLLQPVTVTVIVINAMWMWNDFLLPLLIVGGSKDAYTLQLAANNFMGQYKTEWNYAMAGVILSVVPAIAFYLVLQKYIIKGMTAGAVKL

SEQ ID NO: 65247 - DNA, 531 bp, Unknown
  Obtained from environmental sample
  misc_feature (1)..(531): n is a, c, g, or t
atgtcctcaaaattgggaatgataggcgcgtatgttgtaatacttgtcattgttttctttctgggattcttcgctatcttcgcggaacccgggcttgcggttaccgccgtaaccgtagaggagatgaccaccggtacattcaagcgttctaaattgataaagatcgcggctatgggcgtaggcggcggcatggtgattggtttcgcgcgggtgctgttcagtaatatgatgccctcaggcggcatccatctttcgtggattctggctccttgctatctccttgccttgatcctgacaattttcgcgccggaagatttttcctcgatagcgtgggacgttgcgggcatagcgacaggccccatcaccgttcctataattataacttcaggacttggactcggacgtgattcattaagagctgacggcgctttcggcattgtggcgacggccagcgtatttccgattatcgtaatattaatatcgggtattattgataaagccagatcgaagcgcgtgttaagcaggatatag

SEQ ID NO: 65248 - protein, 176 aa, Unknown
  Obtained from environmental sample
  SIGNAL (1)...(28)
  DOMAIN (1)...(166): Protein of unknown function (DUF1538)
  misc_feature (1)..(176): Xaa is any amino acid
MSSKLGMIGAYVVILVIVFFLGFFAIFAEPGLAVTAVTVEEMTTGTFKRSKLIKIAAMGVGGGMVIGFARVLFSNMMPSGGIHLSWILAPCYLLALILTIFAPEDFSSIAWDVAGIATGPITVPIIITSGLGLGRDSLRADGAFGIVATASVFPIIVILISGIIDKARSKRVLSRI

SEQ ID NO: 65249 - DNA, 1125 bp, Unknown
  Obtained from environmental sample
  misc_feature (1)..(1125): n is a, c, g, or t
atggaaacttctatttccagtattatctgtatcgccgacatgaatatagtccccgctctggatcaggttcttaccgacatggcgcttcccgaagtttttatacagcgagccaaacaaacatttctccttgacaaacgcggtttattcggactgcgtcctgtaactaaacttgatgaaagccgcgcgctgatttacaggatgtacgttccggcgatgtatgaagaaagcgtaatgcgccgtattatcgaagcgactgatttgggactgggcgggcgcggaagcgttttctcccagcatataggtatcatgagagggacgcctctttcttttgacatggaaaaacttgaaaagctttgcgaaaaaaaagacaaacttgcccatgaggaacacgcccttatcacctgtacggtttcaagaggatcgggcgaggccttggcgcgggcggtattggaacttggtataggcgtgcctgttgttttttacggcacaggcgccggtttaagggacaggttggggcttttaaggataactatcccggtagaaaaagaaatcatctggtttgttgtcccgcgttcagacgcagaactggtggaaaaaaacctgataccgcgcgcgaaacttgatgttcccggcaacggctttttgtaccgttgttttgtccacgcgcctgtggtaaacctgcgcatcaggcacggggagcgcgttcatgccgcgactatggaacaggtcatcgccgcgctggacgaggttcgcggctcaaacgattggcgccgtttcggctcgcgcaggcacgaacataagggcagcgaaaaaaagtcggtgcataccagagggcttttctttatcggcgatgaagaggaaattgaaatgttccgtaaagtggcaatagaaaacggagcgcggggagctacatttaacccggttgagatgcgctcttataaagcctttaagcatgaaaaagccatggaatcaaaatcccgccaactctgcgacataatcaccacatctgtaacagaagaaaaaatctacgcgtccgccgttaaaaaaggatttttcaacgaaggaaaatcctgcgtgttaaaagcctataatgttgaaatgccgactattattcacagagagtaa

SEQ ID NO: 65250 - protein, 374 aa, Unknown
  Obtained from environmental sample
  misc_feature (1)..(374): Xaa is any amino acid
METSISSIICIADMNIVPALDQVLTDMALPEVFIQRAKQTFLLDKRGLFGLRPVTKLDESRALIYRMYVPAMYEESVMRRIIEATDLGLGGRGSVFSQHIGIMRGTPLSFDMEKLEKLCEKKDKLAHEEHALITCTVSRGSGEALARAVLELGIGVPVVFYGTGAGLRDRLGLLRITIPVEKEIIWFVVPRSDAELVEKNLIPRAKLDVPGNGFLYRCFVHAPVVNLRIRHGERVHAATMEQVIAALDEVRGSNDWRRFGSRRHEHKGSEKKSVHTRGLFFIGDEEEIEMFRKVAIENGARGATFNPVEMRSYKAFKHEKAMESKSRQLCDIITTSVTEEKIYASAVKKGFFNEGKSCVLKAYNVEMPTIIHRE

SEQ ID NO: 65251 - DNA, 1419 bp, Unknown
  Obtained from environmental sample
  misc_feature (1)..(1419): n is a, c, g, or t
atgaaaaaacagggatttaatccttttttgccgtcatgggaatatattcctgacggcgaacctcatctttttaacggcagaatttatttatacggttcccatgataaattcaacggttatgtatattgcatggacgattatgtctgctggtcggcaagcgaagacgatttaaccgattggcgttatgaaggcgtaattttcaaaaaaaccgacgatccgttaaattcggatggaagcatgaacctgtacgcgccggatgttaccctcggtccggacagtcggtactatctttattatgttttagacaaagcggatgtcgtatctgtcgcggtatgttcttctcccgccggaaaatttgaatttttaggatatgttcgttatccggacggaacattgtacggcagaaaagaaggcgacttgcagcagtttgatcccggcgttcttacggaagacggtaaaacctatctttatacaggccaatgctggccgggcgataaaacaaaaaaaggctctcttgcggcggttttggacgccgatatgcttacgataacacaagggccgttctttataattcccggctcttgttacagcgaaggaacaggctttgaggagcatgaattctttgaagcatcctccatcagaaaattcggcgacacatattattttgtctattcttccgttacattaaacgaattgtgttacgcgacaagcaagaatccgttaaaagattttacctacggcggagttattgtaagcaacaccgacatgcactttggaaaaccgatgaatcacaacggcaataatcacggcggcataattgaaataaaaggcaaattttacgttttttatcacaggcacacaaacggcagggatttttgccgtcaggcgtgcatggagccggttgaaattgataaagacggtaaaattaaacaggcaatgatgacttcctgcgggtcaaacgacgggcctcttgccggattcggagaatatccggcctatattgcgtgcaacttttttcccgtgtcagaaaacggaaaacaagaatgggatcttatcccaaagggaaaatggccgcgccgcgacacccgcctgccctttgtctcgcaggacggaagggacggcgacgaagagacaggctttgtaacaaacataaacgacaattacggaataggttttaaattctttgattgcaagggagtaaaaggcataaaagtaaaaacccgcggatacaaccgtggcttcttcgaggtaaaaacatcattggacggaaacccgcttggaactattgaaattacatcaagcaatatttggaaagaatttcaagcagatatagcgattccggacggcatacaagcgttatttttcatttacaaaggaaccggaagcgcgacgcttggatcgtttactctctgtgaataa

SEQ ID NO: 65252 - protein, 472 aa, Unknown
  Obtained from environmental sample
  DOMAIN (18)...(309): Glycosyl hydrolases family 43
  misc_feature (1)..(472): Xaa is any amino acid
MKKQGFNPFLPSWEYIPDGEPHLFNGRIYLYGSHDKFNGYVYCMDDYVCWSASEDDLTDWRYEGVIFKKTDDPLNSDGSMNLYAPDVTLGPDSRYYLYYVLDKADVVSVAVCSSPAGKFEFLGYVRYPDGTLYGRKEGDLQQFDPGVLTEDGKTYLYTGQCWPGDKTKKGSLAAVLDADMLTITQGPFFIIPGSCYSEGTGFEEHEFFEASSIRKFGDTYYFVYSSVTLNELCYATSKNPLKDFTYGGVIVSNTDMHFGKPMNHNGNNHGGIIEIKGKFYVFYHRHTNGRDFCRQACMEPVEIDKDGKIKQAMMTSCGSNDGPLAGFGEYPAYIACNFFPVSENGKQEWDLIPKGKWPRRDTRLPFVSQDGRDGDEETGFVTNINDNYGIGFKFFDCKGVKGIKVKTRGYNRGFFEVKTSLDGNPLGTIEITSSNIWKEFQADIAIPDGIQALFFIYKGTGSATLGSFTLCE

SEQ ID NO: 65253 - DNA, 1806 bp, Unknown
  Obtained from environmental sample
  misc_feature (1)..(1806): n is a, c, g, or t
atggcacagacccagtttatccgcaatttttgcattatcgcgcacatcgatcacggcaaatctacgcttgccgaccgtcttattcaaaaagccaatcttgtggacgaccgcaattttcaggatcagatactcgacaatatggatattgaacgggaacggggtatcacaatcaaaagccaggccgttaccctaccctacaaggcgaaggacggcaatgagtacatactcaatctggttgacacgcccggacacgttgattttagttacgaggtaagccgagcgattaattcctgcgagggcgctctgctcttggtggacgcgactcagggcgtgcaggcgcaaactttgtctaacatgtaccttgcgctggaacacaaccttgagatagtgcctgtaatcaacaagatcgatatgcaggcggctgatgttcccagagttaaaaaacaaattgataaagacctagggctggacgcggaaaccgccgttttggcgtccgcaagacagggtatcggaattgacgagcttttagaggcgatagtacagaaaattcccgctccctcaggcaaggcggacgcgccgttacgcgctcttatttttgactgtcattacgatccttatcgcggcgtagtcgtgcatttgcgtctctttgacggaaaaataaaaaaaggaatgagaatttcttttatgtccagcggctcttcttacgaagtggaaaccgtaggcgtttttaaacttgcgcttgtggaaacggacgagctttccgcgggggacgtaggctacataatcgcgagcattaaaaccgtaagcgatgtgcgcgtaggcgacaccgtaacaggcgcggacaatccctgcccggaacctttgcccggtttccgcgaagtaaaacccgtagtcttttcttctatctaccctgttgactcaaacgactacgaagaattacgcgcaagcatggataaacttaaacttaacgacgcttcccttatctttgaaaaagactcctctgcagccctcggctttggtttccgctgcggatttctgggactcctgcaccttgaggttattcaggaacgacttgagcgcgaatttgatcaatctgtaatatttaccgcgccgtccgtaaaatacaaggtgcatctaaggaacggcgaagaaatcatgatcgacaaccccatggaataccccgatgagggcagaatagacagcgcggaagagccgtatatccgcgcgagcgtaattactcctaccgattatcttggaaacataatgactctgtgccttgaaaaacgcggagtacaaaccaacatgacttatcttgatgaaaagcgcgtggaattaatctacgatatgccgctttccgaagtgttattcgatttttacgataaattaaaaagcataagccgcggttacgcgtcatttgattacgatatttcaggctacaaaccgacggaactcgcgaaaatggacattcttcttaacggcaaacccgttgacgctctttcccagcttgtgttcaaaggcaacgcctacgaccgcgcgagaaaagtatgcgaaaggttacgcgatgaaattccgcgccaacagtttaagataccgattcaaggctccattggcagtcatattatcgcgcgggaaactgtcaacgctctacgcaaagacgtacttgccaaatgctacggcggcgacattacgcgcaaacgcaaacttttggaaaagcaaaaagaaggcaaaaaacgcatgaaaatggtaggcgatgttgagttgcctcagagcgcgttcttggccgtcttgaaagctaaagatgaataa

SEQ ID NO: 65254 - protein, 601 aa, Unknown
  Obtained from environmental sample
  DOMAIN (8)...(137): GTPase of unknown function
  misc_feature (1)..(601): Xaa is any amino acid
MAQTQFIRNFCIIAHIDHGKSTLADRLIQKANLVDDRNFQDQILDNMDIERERGITIKSQAVTLPYKAKDGNEYILNLVDTPGHVDFSYEVSRAINSCEGALLLVDATQGVQAQTLSNMYLALEHNLEIVPVINKIDMQAADVPRVKKQIDKDLGLDAETAVLASARQGIGIDELLEAIVQKIPAPSGKADAPLRALIFDCHYDPYRGVVVHLRLFDGKIKKGMRISFMSSGSSYEVETVGVFKLALVETDELSAGDVGYIIASIKTVSDVRVGDTVTGADNPCPEPLPGFREVKPVVFSSIYPVDSNDYEELRASMDKLKLNDASLIFEKDSSAALGFGFRCGFLGLLHLEVIQERLEREFDQSVIFTAPSVKYKVHLRNGEEIMIDNPMEYPDEGRIDSAEEPYIRASVITPTDYLGNIMTLCLEKRGVQTNMTYLDEKRVELIYDMPLSEVLFDFYDKLKSISRGYASFDYDISGYKPTELAKMDILLNGKPVDALSQLVFKGNAYDRARKVCERLRDEIPRQQFKIPIQGSIGSHIIARETVNALRKDVLAKCYGGDITRKRKLLEKQKEGKKRMKMVGDVELPQSAFLAVLKAKDE

SEQ ID NO: 65255 - DNA, 690 bp, Unknown
  Obtained from environmental sample
  misc_feature (1)..(690): n is a, c, g, or t
ttgatagaacaccagtccacaattaacgaaaatttaccgtaccgtctgcttgaatacgtaacgcatatatacggaaaaatagttgataaagaaaagaagtatcaaaagaagcttgtaaaaataccgagaccggattttatagttttatacaacggaacggacgaatatcccgattatgtggaactgaatctttccgacgctttcacggatattgaagatctaaaaccgacaaacaataaaaaattgccgctcgaattatcagtacaggtatacaatatcaaccatgggcataatcccgaaatgttgaaaaagtgcgaaagtttgtacggctacagtttttttataaataagattagggaatatcagacgcagggattaacgcttgaagaattgataacccctgtgatagaatactgtataaagaacaacatactgaaagagtatttagaggcncacgcctcggaggtaataaatatgatttttggtgaatatgaccgtgaaatggatatagccgttaatcgtagagaagctagggaagaaggacgtttagaaggtcgtgaagaaggaagagaggaaggacgtaaagaaaaattaataatcgctaaaaatttgctttcaaaaggttctacgcctgaatttgtgcatgaaatcacagggttgtctttggagaaaataagagaaatagattaa

SEQ ID NO: 65256 - protein, 229 aa, Unknown
  Obtained from environmental sample
  misc_feature (1)..(229): Xaa is any amino acid
MIEHQSTINENLPYRLLEYVTHIYGKIVDKEKKYQKKLVKIPRPDFIVLYNGTDEYPDYVELNLSDAFTDIEDLKPTNNKKLPLELSVQVYNINHGHNPEMLKKCESLYGYSFFINKIREYQTQGLTLEELITPVIEYCIKNNILKEYLEAHASEVINMIFGEYDREMDIAVNRREAREEGRLEGREEGREEGRKEKLIIAKNLLSKGSTPEFVHEITGLSLEKIREID

SEQ ID NO: 65257 - DNA, 1212 bp, Unknown
  Obtained from environmental sample
  misc_feature (1)..(1212): n is a, c, g, or t
atgcccgcgagaaacgtgaaggcggcggcggagtttgataaggcgtttatcgacacgcgggacgggaagaagtacaggatgacgaaaatcggctatacgtggtggatgggcgagaatcttaattacaacacggctgacgggagcggctcttggtgctacgaaaacagcgcggacagttgcgccaagtacggcaggctgtacgattggaacaccgcgatggcgggggcggcggcttccgcgtccccaagcagtgtacaggggatttgcccgacgggctggcatcttccctctcagagtgaatggggcgaattgggaaaagccatcggggcgggcctccccccatataacgctttggattcagccgcgataattttgaagtctaaaagcggttggaaacagaacgacgctcccaatccgcgccaaatcggcggcaacggctacgacgacttcggattttcggcccttcccgcaggccgaaggaacttggaaggcggattcggcgagataggggaaagaggcgggtggtggacgaccaatgacgattgcgcaaattatagttgcgccgaaatccggtcaatggaatataacaacgacatggcgctgacttggagcatcagcaagtacgaaggcttttccgtgcgctgcgcgatgacggagacacaccacatcgtaatgtggcacaccaacggcggcaccatcctccccgtgccgaccgccgtggctcacggcggcaatatagagaaccctctatcgcccggaacaaagacgggcgaaatccccgactacgtgtacgaaggcacgttctacgactccgcatatacgatgccggctaatcccccgataatcaaggcgggccaaaacctctacgctaaatggacggccgtttataccgaataccggttcggtggctggtacttagacccggtgctgacgagaccggcagtcttcccgataaaggacgtaataaaggatacggacctctatgcgagatggacgggcgattatacggtaacgttcaatcctaacggcggaacggtcactctgtactccgacacaaccaacatctacggaaaattgacgtcgctgcccagacccgtcagagaagactacatatttcacggctggtacaccgcgccggacggcggcacgaaagtagggataggaacggtgttcacgcgaacgtcactatatacgctcagtggaggtcaataa

SEQ ID NO: 65258 - protein, 403 aa, Unknown
  Obtained from environmental sample
  misc_feature (1)..(403): Xaa is any amino acid
MPARNVKAAAEFDKAFIDTRDGKKYRMTKIGYTWWMGENLNYNTADGSGSWCYENSADSCAKYGRLYDWNTAMAGAAASASPSSVQGICPTGWHLPSQSEWGELGKAIGAGLPPYNALDSAAIILKSKSGWKQNDAPNPRQIGGNGYDDFGFSALPAGRRNLEGGFGEIGERGGWWTTNDDCANYSCAEIRSMEYNNDMALTWSISKYEGFSVRCAMTETHHIVMWHTNGGTILPVPTAVAHGGNIENPLSPGTKTGEIPDYVYEGTFYDSAYTMPANPPIIKAGQNLYAKWTAVYTEYRFGGWYLDPVLTRPAVFPIKDVIKDTDLYARWTGDYTVTFNPNGGTVTLYSDTTNIYGKLTSLPRPVREDYIFHGWYTAPDGGTKVGIGTVFTRTSLYTLSGGQ

SEQ ID NO: 65259 - DNA, 1488 bp, Unknown
  Obtained from environmental sample
  misc_feature (1)..(1488): n is a, c, g, or t
atggtaacgttcgatcccaacgggggaacggtctcgccgacggtcgtatataccgaagaaggggataaactcacttggctgccaacgcctataagagattgcgtctttctcggatggtacacggcggagggttgggcggtaacgacgaatactgtgttcacagcggacgcggtcgtctatgcgcggtggaggggttacaggatagggttctggtgggcctattgtgctgaaggtcattcgtgtgaccctccccgccccctcttacaacgacccatcgaaaccggtctcgacggaaaactcgcgtcgttgcccacacccaattgtgatggttcaaccccttgttccgtattcgaaggttggtacacggagaggagaggcggtacgcgggtaacgacagactacgtgttcagtagcgacactaccgtctgggcaaatcttatgtatactactgcaacatacacgattacattcaacccgagcggcggcacggtctccccgacctcagcgcagatagtaagagtctatgattattttggtatcttcccccccggcgcaaggctgacatcattacccacaccgacgagagacggccacaaattcgacggctggtacaccgcgcctgacagcggcatcgagataacgataaacactgtgtacaacgccgacgcgaccatctacgcccgctggacgcccgtaacgtacactataacgttcgaccccgtcggcggcgcggtctccccaacgtccgccgttaccgacacccccggaaagttggattcgctcccgacccccgagcgctccggctacaccttcatgggctggtacaccgccgagacaggcggcgagcgggtgacggcgaacacggtattcgcctccgacgcgacaatctacgcccgctggccgctggtaacatacactatcgcctacatactcaacggcggcacagcgaagtcccccaacccgacaagttacaccgccgagactccggacataacgctaaacaacccgataagaggcggctaccgtttcgacggctggacagggtcgaacggcgacgacccgcagacgcaagtggtaatcccgcgaggcagttccggcgcgagaacctatatagcgaattggacgcccgccgcctacgtcatatacttcgacctgaactacggcgacacccccccaaccgagtccgcgagaacaaccgcggcgacaggcaggttagcgtctctgcccacgcctacgagagagggctacgtcttcgaaggctggtacacagattgggccgacggcgctggggagagggtaacgacaaccacagtattctacaacgacgcgacagtctacgcccgctggtcgcttgtaaagccgttgaagcgcaagattccagtagtcataacgctaggcccgaatcccgtaaaagcaggcggcgaagccgcgatttacgtgacaagcggcaaagcggtcaaaggcaagtgtcaatctttaacaccgtag

SEQ ID NO: 65260 - protein, 495 aa, Unknown
  Obtained from environmental sample
  misc_feature (1)..(495): Xaa is any amino acid
MVTFDPNGGTVSPTVVYTEEGDKLTWLPTPIRDCVFLGWYTAEGWAVTTNTVFTADAVVYARWRGYRIGFWWAYCAEGHSCDPPRPLLQRPIETGLDGKLASLPTPNCDGSTPCSVFEGWYTERRGGTRVTTDYVFSSDTTVWANLMYTTATYTITFNPSGGTVSPTSAQIVRVYDYFGIFPPGARLTSLPTPTRDGHKFDGWYTAPDSGIEITINTVYNADATIYARWTPVTYTITFDPVGGAVSPTSAVTDTPGKLDSLPTPERSGYTFMGWYTAETGGERVTANTVFASDATIYARWPLVTYTIAYILNGGTAKSPNPTSYTAETPDITLNNPIRGGYRFDGWTGSNGDDPQTQVVIPRGSSGARTYIANWTPAAYVIYFDLNYGDTPPTESARTTAATGRLASLPTPTREGYVFEGWYTDWADGAGERVTTTTVFYNDATVYARWSLVKPLKRKIPVVITLGPNPVKAGGEAAIYVTSGKAVKGKCQSLTP

SEQ ID NO: 65261 - DNA, 1053 bp, Unknown
  Obtained from environmental sample
  misc_feature (1)..(1053): n is a, c, g, or t
atgacagattggccgagttgttgcgggcggacaggctatcgatcaacaggagagccgcttcctaaagaaacacttgaaaaggcaaaacagtgcgatgcgcttctcttgggcgctgtcggcggccccaagtgggatacgctcccgggacatttgcgccctgagagagcgctgttgggtcttcgcgccgggcttgatgtcttcgctaaccttcgtcccgccgctttgcttcctcaattgaaatccgcctgccccgttaaggacgaggtgcttatcgcaagtaataacgaaggaaaagccgcctttgatttattgattgtaagggaattgactggaggtctttacttcggtaagcgcggacggttggacgagccttctaacggccacactcccggttccgcctttgataccgaaacatattcatggatggaaattgagcgcgtgctccgcgcaggctacgaagcggcgaaagtgcggcgtaaaaaactctgcgtggtggacaaggctaacgtgcttgaatcgtcccgcttctggcgcgaagtcgccgcggtagtctcaaaggattatcccgatatagagacaagttacctctatgttgacaacgccgctatgcagttgatccgcgctcccggacaattcgacgttatcgtaacgtcaaatctctttggagacattctttccgacgaggcttccgtgcttacgggttcaatcggaatgctcgcctcggcgagtctcggcgcgcctgtgcagggcggaacaagactgggaatgtacgaacctattcacggctcggctcccgacattgcggggaaggacatcgccaatcctcttgcgacaattctttccgcggcgatgatgctccgttactccttcggtcttgagaaagaggcgcaagctattgaaaccgctgtcaacaatgtgctggatcagggattgcggacaggagacatcgcaagccgcagcaatgcgaactgcgcagcaagcagcggcggtgaaaaaattgtagggacaaaagcaatgggcgaagctgtgctcaaagcgttggagaaattatga

SEQ ID NO: 65262 - protein, 350 aa, Unknown
  Obtained from environmental sample
  DOMAIN (3)...(343): Isocitrate/isopropylmalate dehydrogenase
  misc_feature (1)..(350): Xaa is any amino acid
MTDWPSCCGRTGYRSTGEPLPKETLEKAKQCDALLLGAVGGPKWDTLPGHLRPERALLGLRAGLDVFANLRPAALLPQLKSACPVKDEVLIASNNEGKAAFDLLIVRELTGGLYFGKRGRLDEPSNGHTPGSAFDTETYSWMEIERVLRAGYEAAKVRRKKLCVVDKANVLESSRFWREVAAVVSKDYPDIETSYLYVDNAAMQLIRAPGQFDVIVTSNLFGDILSDEASVLTGSIGMLASASLGAPVQGGTRLGMYEPIHGSAPDIAGKDIANPLATILSAAMMLRYSFGLEKEAQAIETAVNNVLDQGLRTGDIASRSNANCAASSGGEKIVGTKAMGEAVLKALEKL

SEQ ID NO: 65263 - DNA, 1671 bp, Unknown
  Obtained from environmental sample
  misc_feature (1)..(1671): n is a, c, g, or t
atgaaaagcgattctgtaaacaagggtattgcccgcgcgcctcaccgttcgctctttaaggcgttgggttttattgaagaagaatttaaaagaccgttaatagggattgcctgcgcgaaaagcgaaatagtgccgggtcatctgcaccttgataatatcgcgcgcgccgccgccgaaggtattcgcatggcaggcggagtgcctgtaacatttccggtaatcggcgtatgcgacggaattgcgatgggtcatgagggaatgagatactccctgccgacaagggaacttatcgccgactcgattgaatgtatggcgaccgctcacgcatttgacgctcttgtctttattcccaactgcgacaaaatagtgccgggtatgctcatggcgtcggctaggctcaaccttccgactgtttttgtttcaggcggaccgatgctcgccggacgcaaggacggaaaaccgctgacgcttaccaccatgtttgaggcggtaggcgctgtcgccgccggaaagatcagcgaagcggaacttgaggaacttgaaaatctttcctgcccgggctgcggttcttgcgccggaatgtttacggcaaactcgatgaactgcgtaacagaagcgttgggaatggctctgccgggcaacggcactatccctgccgtaatggcggaacgtatccgtctggctaaaaaaacaggaatgttaattttggacgttcttaaaaaagacctgcgtcctaaaagcatactcacagaaaaagcgtttatgaacgctctcgccctcgacatggcgctaggctgttctacaaataccgctcttcatcttcccgccattgcaggggaagcgggcttcaaactcgatctggaacttcttaacaaggtaagcgcggttactcccaacctttgccgccttgcccctgccggaaaagacgcaatcgaagatctgcacacggctgggggaattcccgctgtctttaaggaactttccaaaaagaaccttgtcgatctaaaagcaaccacagtgtacggctgtctcggcgacgcgttgaacaaggcggaaaaccgcaaccccgatgtaataagaccgattgaaaatccctactcggcgacaggagggcttgccgccttgaaaggaaacatcgctcaggacggctgtgtcgtaaagcgaagcgcagttgcgccttccatgttgaaacacgaaggaccggcgagagttttcgattccgaggaaacggcatttgacgctatcatgggaaaaaagataaacgctggagacgttgtcgttatccgttacgaaggaccgaagggcggacccggcatgaaagaaatgctcgctcctactgcggctcttgccggcatgggtcttgacgataaagtcgccctgattacagacgggcgtttttcaggcgcatccaaaggcgcgtctataggtcacgtttcgccggaagccgctttaggcggaaacatcggtatcattaacgaaggcgacatcatcgccattgacattgacgggctttctataaacgtgaagattagcgatgaagaaattgagcggcggcgcaaaaattggaaacctctttccaagaaccctgtcggttatcttgcccgttacgccgcgcaagtaggctcagccgcgtcaggagcggtttttactgagccgcgaaaaggagattaa

SEQ ID NO: 65264 - protein, 556 aa, Unknown
  Obtained from environmental sample
  DOMAIN (31)...(550): Dehydratase family
  misc_feature (1)..(556): Xaa is any amino acid
MKSDSVNKGIARAPHRSLFKALGFIEEEFKRPLIGIACAKSEIVPGHLHLDNIARAAAEGIRMAGGVPVTFPVIGVCDGIAMGHEGMRYSLPTRELIADSIECMATAHAFDALVFIPNCDKIVPGMLMASARLNLPTVFVSGGPMLAGRKDGKPLTLTTMFEAVGAVAAGKISEAELEELENLSCPGCGSCAGMFTANSMNCVTEALGMALPGNGTIPAVMAERIRLAKKTGMLILDVLKKDLRPKSILTEKAFMNALALDMALGCSTNTALHLPAIAGEAGFKLDLELLNKVSAVTPNLCRLAPAGKDAIEDLHTAGGIPAVFKELSKKNLVDLKATTVYGCLGDALNKAENRNPDVIRPIENPYSATGGLAALKGNIAQDGCVVKRSAVAPSMLKHEGPARVFDSEETAFDAIMGKKINAGDVVVIRYEGPKGGPGMKEMLAPTAALAGMGLDDKVALITDGRFSGASKGASIGHVSPEAALGGNIGIINEGDIIAIDIDGLSINVKISDEEIERRRKNWKPLSKNPVGYLARYAAQVGSAASGAVFTEPRKGD

SEQ ID NO: 65265 - DNA, 1692 bp, Unknown
  Obtained from environmental sample
  misc_feature (1)..(1692): n is a, c, g, or t
atgaagtacacaggcgcgcaaatattgattgagtcattaattgagcagggagtggatactattttcggctatcccggcggcgcggttttgaatatttacgatgaactctacaaacacagcgacaagattcgccatatccttgtaagccacgaacagcacgccgcccacgccgcggacggttatgcccgctccaccggaaaaacaggcgtgtgcttagcaacttcgggacccggagcgacaaatcttataacgggaatcgccacggcatacatggattcaattccgatggtagccattacaggcaacgtccccacgggaatattgggcaaggacagttttcaggaagttgacattacgggtatttccatgccgatagtaaaacacaactggattgtaaaaaatgttgaagaccttgcggaagttatccgcgaatcgtttgagcttgcctcatcaggtcgtcccggacccgtactcatcgacatccctaaagatattaccgcgctgactgccgaatggaatccgtcaaagaaaaagaaaggcgagttaaaagacgagactctttccgcgcgggcaaagcgtcttgacgaacgcacctcaagagtcagatttaccgacaaagaagtggaaaccgccgccgcgatgattaaggaagcgaagcgtcctctgctctacgcgggcggcggagtcatcagcgccgcggcggaagaagaacttatcgctctcgccgaaaaacttaacgctcctgtggcgttaagcctcatgggaataggctcgataccgaaagatcaccgtctctgcacgggtcttgtcggaatgcacggaacagtggcgagcaacaaggcaacgcagaagacagacttgcttattgccattggcgcgcgtttttccgacagagttacaagcaaggcggatatgttcgccaagacagcgaaggttattcattttgatattgacccggcggagattagcaaaaatattgaaacccacgcgtgggtgataggaaatttaaaagacactctaaaatgtttgttgtcaaaacttcccgcccgtcttaaaaccgaatggggcggcgagattgacaaatggaaaactcatctgcctcaaacctacactcacgaggttacattcgccaagaacgctctccacccccactttattaatgaggagaccgcgaaggcgctcggtcccgaaacaattgccgttaccgacgtgagccagcaccagatgtggacagcgcagttctttccggcggagaagggcgaggcgtttatcagttccggcggactcggaacgatgggcttcgggcttggagccgcttgcggcgcaaaagtcgcgaaccccaaaaaacccgtggcgctttttacgggagacggcagtttcagaatgaactgcgcggagatggcgaccctcaccaacaataaaatcccgctgttgataattatttttaacaacggagtgttaggcatggtaaggcagtggcaaagtttcttttacgaaagccgctactcgcaaacaactctgagcggagtccccgacttcttaaaactgtgcgacgcttacggcgttacgggcttccgcgccgcagacagggagtntttnaagaaagcgctctacaacgcngnngcagaactgtccgccgggaaccccgatgatcatggaggtggacatagaagggggataagaaaagtctga

SEQ ID NO: 65266 - protein, 563 aa, Unknown
  Obtained from environmental sample
  DOMAIN (403)...(546): Thiamine pyrophosphate enzyme, C-terminal TPP binding domain
  misc_feature (1)..(563): Xaa is any amino acid
MKYTGAQILIESLIEQGVDTIFGYPGGAVLNIYDELYKHSDKIRHILVSHEQHAAHAADGYARSTGKTGVCLATSGPGATNLITGIATAYMDSIPMVAITGNVPTGILGKDSFQEVDITGISMPIVKHNWIVKNVEDLAEVIRESFELASSGRPGPVLIDIPKDITALTAEWNPSKKKKGELKDETLSARAKRLDERTSRVRFTDKEVETAAAMIKEAKRPLLYAGGGVISAAAEEELIALAEKLNAPVALSLMGIGSIPKDHRLCTGLVGMHGTVASNKATQKTDLLIAIGARFSDRVTSKADMFAKTAKVIHFDIDPAEISKNIETHAWVIGNLKDTLKCLLSKLPARLKTEWGGEIDKWKTHLPQTYTHEVTFAKNALHPHFINEETAKALGPETIAVTDVSQHQMWTAQFFPAEKGEAFISSGGLGTMGFGLGAACGAKVANPKKPVALFTGDGSFRMNCAEMATLTNNKIPLLIIIFNNGVLGMVRQWQSFFYESRYSQTTLSGVPDFLKLCDAYGVTGFRAADREXXKKALYNAXAELSAGNPDDHGGGHRRGIRKV

SEQ ID NO: 65267 - DNA, 4356 bp, Unknown
  Obtained from environmental sample
  misc_feature (1)..(4356): n is a, c, g, or t
gtgtcccccgacaagggcacagcaggaacatcagttacactttcttacaccgtagaaaatactgcggctaacaaccaacttgaattcggcggcgttaatgccgaaatcgcttctgtagaaagcgaaggaagcggcacaagaacctacaccataaactctggagacgctgcggacggcgttatcaccattaccgctgtatttacccataccaatctggtaatcgaccacatcgcgtttagcgagcataacgaagggcatataactaaaacgtatggagatgcggcgtttaccaacgccattaccacagcgcaccaaggaaccggacagataacctatcacagcagtgatgaaagcgttgccacggtgaacggctcagggcaagtgaccattcataacgctggcttcgccgtcatttccgccgaaaaagcggctgacggaacatacgcccacgccacgacaacctacacgctcaatgtaaaccacaagagcgtaaccataactggactgtccgcaagcagcaaaacttatgacggcactacagcggcaacggttacaggaactcctgtaatcagcggattggtcgcaggcgatgcggtaaccgtcgttacgggaacagcggcgtttgcggatgcgtctgtaggtaacaacaagaccgttacatttagcggctggtcattgggcggagcgaaagcgggtaattacaccctttctgcacagccagcaagcgttacggctaacatactgccggacggctcggctaccgctcccttcctcgttaccaacgaaaccgaactccgcaaagtcggcacaggcacagacggctggacgctttcggcgcattacaaacagacggcggacatcaatatgacaggcggcaactttccggtgattggcacaaccgccaccaaattcaccggatcgtatgacggtggcggaaaaaccatcaccggcttttcccaaagttacacaagcagtaatgtcggtttattcggctatatcggcgcaggcggcacggtgaaaaacattaaccttaccggaacgataacccaaggcggaagcaactcttcatatatcggcggtattgcgggcacaaacgaaggcacgattgataactgctcctttagcggaaccgtcagcggcggcgcaaacaacgataatgtcggcggcattgtcggaacgaatgacggaacggtaataaacagcagaagcatcgcaacagtaagcggcagaacttctatcggaggcattgtcggaaagaatgagggaacgattgaaaacagttacaacactggaaacgtcagcggcacaagtcaagtcggcggtatcgccggagctaattccggcactggcagttatataaggataaggaacagctataacacgggcaatattaccgcctcccgccacaacaccgcctatggcggaagcattgtcggggctaaccctgtcagctcaacggtagaattctgctacaataccggcaacgttaccagcggcagaattgccggcggcattgtgggaagcagttcaagcggaactactgtgcaaaactgcgtatcgctcggcgcaagggtaaccggcggctatagcacaggtcgtgtggttgcaagtattggcggcactatgaccaacaacaaggcccgttcagatatgaaagtcggtcaaagcggttcagaggcaataccaaccacaagcatagcggcaaacggaggcaacggcgcaaatttcggtttggggacggcgctgtccgatgtattcgccggttgggatacctcactttggaatatcagcggcaatttgaatataggcgacaatcttcccacgctcaaaccgaatacgcaaatccccgctcccacgcttccggcggcgtactctgcgcccggcacggcggaagctcccttcctcgtcgccaacgaagccgatctccgcaaggtcggaaccggcactgacggctggacgctttcggcgcactacaggcagacggcgaacatcgttctgaccagcaacttcacgaggattggcaataacactaacaaattcacaggctcgtatgacgggggcgagtatgccattaccaatttgagtatgactatcgccagcagttatacaggtttattcggctatatcggcgcaagcggcacggtgaaaaacgtaaatgtaacaagcggcacgataagcgtaagcacgggaagctatgtgagtatcggcggcattgcgggcgaaaacgaaggcactattgacaactgctcctttagcggaactttgagcgtcagtccgcacgatcagattggcggcattgtcggacagaataacggcacggtgaaaaacagcagaaacttcgccaatgtaaccggcggaaatcaggtcggcggcattgcgggaacgaatcagggcaaactcgacaatagttacagcgccggaacagtcagaggaagccagcaagtcggcggtatcgccggtactaatgtcggcagcggtaattatataaagaactcctataacacgggcaatgttaccagcaccgccggatcaagctctaatgtcggaggcattgtcgggtttaaccaagcaaacacggcggtagacttctgctancataccggcaatgttaccggatcaaccgcagtcggcggcatagtagggaactccagcggcagtagagtagtagacaacgtatcgctcggcttactgataaccggcactggcagtctcggtcgtgtagccggaattgccaatggcggaactcagatcgacagaaacaaatcccgtgcggatatgaaactcggtacaagcggttcagagacgacaataccaagcggatcaaccggggcaaataacgtatacggcgcggatgtcgctttgaatacgtcattagcaaccgttttcgatacaagcaggtgggacaccacgctttggaatatcagcggcaatttgactataggcaacgaattacccacgctcataccaaatacgcaacacccggctcccttgcttccggggtctaacccgtcgcccggcacggcggctaatcccttcctcgttaccaacgaaaccgatctccgcaaagtcggaacaggcactgacggctggacgcttacggcgcactacaaacagacacaggacatcacgctgaccagtaacttatccgtgattggcacaaacattaataagttcaccggttcgtatgacgggaacgaaaaaaccatttccggcttgaccatgacacgtaccagcgttagttattttggattattcggctatatcggatcagacggcgttgtaaaaaatgttaccgttaccaacggctcgataaccggaaccgcaagcagttatttcggaggcattgccggacagaacgaaggcacaattgaaaactgctcctttagcggaaccgtcaacggcgacacaaccagcgatgatgtcggcggcattgccggaaggaataccggcactataataaacagcagaaacaccgcaacggtaagcggcaggacacgggtcggcggcattgccggagagaatcagggcaaaatcgacaacagttacaacacgggagccattaccggcagtcagcaagtcggcggtatctctggtggtaattcctccagcggtaattatataaagaactgctataacacgggaaatgttatcagtaccaccgctaccaccacatctaatgccggcggcattgtcgggcaatcaagcgcactggtagaatactgctacaataccggcaatgtttcgggaaccggcggggtcggcggcatagtgggatacaccaacaccggaagcgccattcaaaactgcgtatcgctcggcgcaagggtaacaggcaacggtactagtaacggtcgcatagccggaactaatagcaatactgtcaccggcaacttagcccgtatagatatgaaagtcggcataagcggctcagaggcgttagtaactacaggagcggcaggaaataatgcaggcgcaaatgtcagtttggggactgcgctgtcctctgttttcaacacaaactggctctccacgctttggactatacctacaggcaatttgacaataaacggcgatttgcccacgctcaaagataatacgcaaagccccgctcccacgcttccggcggcgtacaatccgcccggcacggcggataatccctttgaagttaagaacgaagccgatctccgcaaagtcggaacaggcactgacggctggacgctttcggcgcactacagacagacacaggacatcaccatgacgacaagcaactttccgccaattggctacgtctccggtactggaaccactaaattctcaggtgtgtatgacggggacggaaaaaccatcaccggatga

SEQ ID NO: 65268 - protein, 1451 aa, Unknown
  Obtained from environmental sample
  DOMAIN (785)...(810): The GLUG motif
  misc_feature (1)..(1451): Xaa is any amino acid
MSPDKGTAGTSVTLSYTVENTAANNQLEFGGVNAEIASVESEGSGTRTYTINSGDAADGVITITAVFTHTNLVIDHIAFSEHNEGHITKTYGDAAFTNAITTAHQGTGQITYHSSDESVATVNGSGQVTIHNAGFAVISAEKAADGTYAHATTTYTLNVNHKSVTITGLSASSKTYDGTTAATVTGTPVISGLVAGDAVTVVTGTAAFADASVGNNKTVTFSGWSLGGAKAGNYTLSAQPASVTANILPDGSATAPFLVTNETELRKVGTGTDGWTLSAHYKQTADINMTGGNFPVIGTTATKFTGSYDGGGKTITGFSQSYTSSNVGLFGYIGAGGTVKNINLTGTITQGGSNSSYIGGIAGTNEGTIDNCSFSGTVSGGANNDNVGGIVGTNDGTVINSRSIATVSGRTSIGGIVGKNEGTIENSYNTGNVSGTSQVGGIAGANSGTGSYIRIRNSYNTGNITASRHNTAYGGSIVGANPVSSTVEFCYNTGNVTSGRIAGGIVGSSSSGTTVQNCVSLGARVTGGYSTGRVVASIGGTMTNNKARSDMKVGQSGSEAIPTTSIAANGGNGANFGLGTALSDVFAGWDTSLWNISGNLNIGDNLPTLKPNTQIPAPTLPAAYSAPGTAEAPFLVANEADLRKVGTGTDGWTLSAHYRQTANIVLTSNFTRIGNNTNKFTGSYDGGEYAITNLSMTIASSYTGLFGYIGASGTVKNVNVTSGTISVSTGSYVSIGGIAGENEGTIDNCSFSGTLSVSPHDQIGGIVGQNNGTVKNSRNFANVTGGNQVGGIAGTNQGKLDNSYSAGTVRGSQQVGGIAGTNVGSGNYIKNSYNTGNVTSTAGSSSNVGGIVGFNQANTAVDFCXHTGNVTGSTAVGGIVGNSSGSRVVDNVSLGLLITGTGSLGRVAGIANGGTQIDRNKSRADMKLGTSGSETTIPSGSTGANNVYGADVALNTSLATVFDTSRWDTTLWNISGNLTIGNELPTLIPNTQHPAPLLPGSNPSPGTAANPFLVTNETDLRKVGTGTDGWTLTAHYKQTQDITLTSNLSVIGTNINKFTGSYDGNEKTISGLTMTRTSVSYFGLFGYIGSDGVVKNVTVTNGSITGTASSYFGGIAGQNEGTIENCSFSGTVNGDTTSDDVGGIAGRNTGTIINSRNTATVSGRTRVGGIAGENQGKIDNSYNTGAITGSQQVGGISGGNSSSGNYIKNCYNTGNVISTTATTTSNAGGIVGQSSALVEYCYNTGNVSGTGGVGGIVGYTNTGSAIQNCVSLGARVTGNGTSNGRIAGTNSNTVTGNLARIDMKVGISGSEALVTTGAAGNNAGANVSLGTALSSVFNTNWLSTLWTIPTGNLTINGDLPTLKDNTQSPAPTLPAAYNPPGTADNPFEVKNEADLRKVGTGTDGWTLSAHYRQTQDITMTTSNFPPIGYVSGTGTTKFSGVYDGDGKTITG

SEQ ID NO: 65269 - DNA, 561 bp, Unknown
  Obtained from environmental sample
  misc_feature (1)..(561): n is a, c, g, or t
atgttgcagtcggtgagcgccgactgggtgcagatacagggtacggcgttggccgaggtcatcaggcaggctacctcggcgctcggcgggacaagcaagaggaacaaggtgctcgtcatactctcggacggcgaggatcacgagggtagcgtggtcgaggcggccaaagccgccgcgcagcagggcatagtgatctacaccataggcataggctccgaggccggcgtaccggtacccatgaacaagggcgggagcaacgtcgtatacaaaaaggacaaggacgggaatttggtgatgacgcggctcaactccgtgacgctggagaaaatcgccattgaatccggcggaaagtatttccacgccggtaccgaccttgacctgacgagaatctacaacgaggtgtcgaagatggagaagagcgacttcgggatgacgaaagcggtgatccacgaggagcagtaccaaatatttttgttgatagcgatcatctttatactgatagaattcttcatctccgagcgggctaggaagaaagtcgcctggaaggggaggtttgaatga

SEQ ID NO: 65270 - protein, 186 aa, Unknown
  Obtained from environmental sample
  misc_feature (1)..(186): Xaa is any amino acid
MLQSVSADWVQIQGTALAEVIRQATSALGGTSKRNKVLVILSDGEDHEGSVVEAAKAAAQQGIVIYTIGIGSEAGVPVPMNKGGSNVVYKKDKDGNLVMTRLNSVTLEKIAIESGGKYFHAGTDLDLTRIYNEVSKMEKSDFGMTKAVIHEEQYQIFLLIAIIFILIEFFISERARKKVAWKGRFE

SEQ ID NO: 65271 - DNA, 849 bp, Unknown
  Obtained from environmental sample
  misc_feature (1)..(849): n is a, c, g, or t
atgaacgcaatccggaaagccgcaactaataaaatcatccgcacaatatcgatgataatcatagccgccgtactctcggacgtcttcgccgatgaggtaggctccaaaaacaggaaagcgaataaactctactcaaagggccaatacgaagaggctctgaagctgtatgacgacgcgttattgctagacccgtcaaacggcaagctgaggatgaataagggctcgacgctctacaggttgggcgagcttgacgaggcggaaaaatcgtaccaagacgcgatgtcgtcgcggctcggtaaaaagacgctggccgacgcgcactacaacctaggcaacatccaatacaagcaagccgaaaagttagagtccgccggcgacgccgcgtcggcccgcaaaaagtattccggagctttagaaagctatatcaacaccctgaagttacgtcccaacgacatggacgcgaagtggaatttgcaattggcgcaccaaaagatagatctgatgaaagagcaacaggacaaaaatcaggacgataataaagataaagaccggcaaaaagacgataatcaacaaaaagacaagcaacagggggacaaggacgataaacaggagcaagataataaggataagcaggacaataaagatcaatcggatgataataaggatcagcaagacgataaagaccggcaaggccaagataatcaacagcctcagcccgataaaaatgacggcgaccggaaaaaagacgacgcagagaggttgatagagcagtacgcggacgattcggacacattaaacaaaccgaaatttcagagggctagggtcagacagcctgaaaaagattggtga

SEQ ID NO: 65272 - protein, 282 aa, Unknown
  Obtained from environmental sample
  SIGNAL (1)...(26)
  DOMAIN (33)...(66): Tetratricopeptide repeat
  misc_feature (1)..(282): Xaa is any amino acid
MNAIRKAATNKIIRTISMIIIAAVLSDVFADEVGSKNRKANKLYSKGQYEEALKLYDDALLLDPSNGKLRMNKGSTLYRLGELDEAEKSYQDAMSSRLGKKTLADAHYNLGNIQYKQAEKLESAGDAASARKKYSGALESYINTLKLRPNDMDAKWNLQLAHQKIDLMKEQQDKNQDDNKDKDRQKDDNQQKDKQQGDKDDKQEQDNKDKQDNKDQSDDNKDQQDDKDRQGQDNQQPQPDKNDGDRKKDDAERLIEQYADDSDTLNKPKFQRARVRQPEKDW

SEQ ID NO: 65273 - DNA, 486 bp, Unknown
  Obtained from environmental sample
  misc_feature (1)..(486): n is a, c, g, or t
gtggaaggggtaattcaattcagcggtacggaaatagtgtttacccgcggtaacgcatggggtattctggactggaacagaagcgcccgcccaaaagccgatataaagtattgggctgccgcctgcggaataagcgaaggcagacagttaagcttctgtgttggctacagttgggcggatttctcgcttgggacggaaaacggcttttttgtcgatggaaaacttcacaaacttgaccaggtaacattccatatcccgctttcaaactggctttctccgtggcgttttacaagtaacgataaccggctggaaatgacattttccccccatcaggaaagaatagaccgccatagtctgtttttttatagttctacccgcaggcaggtttgcggctttttttcgggaaaagtcactctggacgacggtactttgctggagttccagaatttaacaggttttgccgaacgcagtaaaatgagtcattaa

SEQ ID NO: 65274 - protein, 161 aa, Unknown
  Obtained from environmental sample
  misc_feature (1)..(161): Xaa is any amino acid
MEGVIQFSGTEIVFTRGNAWGILDWNRSARPKADIKYWAAACGISEGRQLSFCVGYSWADFSLGTENGFFVDGKLHKLDQVTFHIPLSNWLSPWRFTSNDNRLEMTFSPHQERIDRHSLFFYSSTRRQVCGFFSGKVTLDDGTLLEFQNLTGFAERSKMSH

SEQ ID NO: 65275 - DNA, 903 bp, Unknown
  Obtained from environmental sample
  misc_feature (1)..(903): n is a, c, g, or t
gtgactgtcacctttttccactccctactccctactccctttttcctgtattctttatccatgatcataagcgcatcgcgacgctgcgatattccacggtttcagtttgactggttcctgcagcggcttgaggccgggtttgttgatgttacgaatcccttcaatgccgcgcaggtcaggcgcgtctccctgaaaccggaagacgcacagttcctggtcttttggacgagggatccccgttccctgttggccgaagccgctaagctggatcaataccctttctatacgatgattaccatgacgggttatccggaaatccttgagccaaatgttccgcccgcgggggaaataattgacgcgatgaaagccatgtcggaaaagtggggccgtaaacgggtgatctggcgctatgatccgatctttttttccggtattaccgatacggcttttcactgccggaattttgcggaactggcggcgcgcttaagcggctctgtggacagggttataatcagcgtttacgatgaatacgccggcgcaaagcggcggcttaccgccctgggaaaagacaaggtcgaagtttttccccactccacgcaggacgggcgccttccgcctgaattgaaagagcttgccgcggaacttgcccgcatagccgcaaaagcgggaatggaaacgcgttcatgcgccgaggcggaagatttatcaggtttggggatcaggcccggcgcgtgcatagacggcgagcttatcaatgagcttctgggaggcaaagattccctttcgcaaatgggaagcaaggataaaaaccagcggcgtaattgccgctgtgtttccagcgtggatataggcagctacggttcctgcaaggccggctgcgtttattgttatgcgcaacattga

SEQ ID NO: 65276 - protein, 300 aa, Unknown
  Obtained from environmental sample
  misc_feature (1)..(300): Xaa is any amino acid
MTVTFFHSLLPTPFFLYSLSMIISASRRCDIPRFQFDWFLQRLEAGFVDVTNPFNAAQVRRVSLKPEDAQFLVFWTRDPRSLLAEAAKLDQYPFYTMITMTGYPEILEPNVPPAGEIIDAMKAMSEKWGRKRVIWRYDPIFFSGITDTAFHCRNFAELAARLSGSVDRVIISVYDEYAGAKRRLTALGKDKVEVFPHSTQDGRLPPELKELAAELARIAAKAGMETRSCAEAEDLSGLGIRPGACIDGELINELLGGKDSLSQMGSKDKNQRRNCRCVSSVDIGSYGSCKAGCVYCYAQH

SEQ ID NO: 65277 - DNA, 777 bp, Unknown
  Obtained from environmental sample
  misc_feature (1)..(777): n is a, c, g, or t
atgcgcaacaagcttaccgacgagctggcggtctgcggcctgaaagcggccctcgcccttgccgaatttcatcctgaaaccatcaaccgtctttttgtgcgggaggatcgtttccccctgtttaccaaagtttgcaagaaacttgcggaacgcaagcgtccctataaaatatgcgaaaacgaagaactggaacgcctatgcaaaaccgtccaccatcagggtgtggtgatgatgattgaggaaccggcggtcgagcccttaaccagggaggatctggacctttgggcaactgaaggcaagacgggtcttgtgctgcacgaggtggggaacgaccataatctgggggccattgccagggccgcggcttttttcgacgtgcatttcatcgtactgaacgagaacgacgaagaagcgcggctgactaccagcgcttatcgtgtcgccgaaggcggcatggagcatgtcactgtgcgaaagataggcaacacagccggatttttaaaagatgccgcaaaaaaaattcttgtcatcggaaccgacatccgcgcgcggcggcgcatcggggacctttccggcattgcgaaagactgggccgccaaggccggcgttaagcgccccggagtagctctcgcgctcggaaacgaggaaaacggccttcctcagaatataaaagacagctgctcctgcctgcttcgcattccggggaccggcaatatcgaaagcctcaatatcgcccaggccgcggctctttttctaagagagatttatgatttatga

SEQ ID NO: 65278 - protein, 258 aa, Unknown
  Obtained from environmental sample
  DOMAIN (10)...(85): RNA 2'-O ribose methyltransferase substrate binding
  misc_feature (1)..(258): Xaa is any amino acid
MRNKLTDELAVCGLKAALALAEFHPETINRLFVREDRFPLFTKVCKKLAERKRPYKICENEELERLCKTVHHQGVVMMIEEPAVEPLTREDLDLWATEGKTGLVLHEVGNDHNLGAIARAAAFFDVHFIVLNENDEEARLTTSAYRVAEGGMEHVTVRKIGNTAGFLKDAAKKILVIGTDIRARRRIGDLSGIAKDWAAKAGVKRPGVALALGNEENGLPQNIKDSCSCLLRIPGTGNIESLNIAQAAALFLREIYDL

SEQ ID NO: 65279 - DNA, 366 bp, Unknown
  Obtained from environmental sample
  misc_feature (1)..(366): n is a, c, g, or t
ttggccgagctcgttccgattttagcggttgtcggctcgagggccgtgggaacaaccgttattcgcaacgcggctcggcttcgcgccaaggaaagcgacagacttgccgccgtaagcgacatattacgcagtcttggcgcggacgcggacgagacggcggacggacttgtcatacacggcggaaaggctttcaaaggcggacaggtatcgtcctgcggggatcaccggatcgccatgtccgcggcaatcgcggcgacagtatgcgcggagccggttgttattcagggcgcgcaggcggtcaataaatcataccccggattttttgacgatctgcgctcgcttggcccattggtcgaagcgatatag

SEQ ID NO: 65280 - protein, 121 aa, Unknown
  Obtained from environmental sample
  misc_feature (1)..(121): Xaa is any amino acid
MAELVPILAVVGSRAVGTTVIRNAARLRAKESDRLAAVSDILRSLGADADETADGLVIHGGKAFKGGQVSSCGDHRIAMSAAIAATVCAEPVVIQGAQAVNKSYPGFFDDLRSLGPLVEAI

SEQ ID NO: 65281 - DNA, 1080 bp, Unknown
  Obtained from environmental sample
  misc_feature (1)..(1080): n is a, c, g, or t
atgtcttcacagtatggtaaaaaactaagaatatcgatcttcgggcagtcgcactccccggcgattggcgtgagcattgacggcttgccgagcggaatcaaaatcaatattgatgaactgagggccttccttaaacgcagggcccctgggcaaaacgacatttccacggcgcgcgcggaagatgacgcgccggagattttatcagggctggtggaaaccgtcacctgcggcgcgccgcttgccataattatccgcaacaaagacgcccgttcagccgattaccgtgaactgcgggatattccacgcccctcccacgccgattacgcggcgcacataaagtacggcggatttcaggatgtggcaggcggcgggcatttttccggcaggctgacagcgccgttgtgcgccgccggcgggatatgtttacagatattgcgcggtctgggagttttcgttggagctcatatattgcggatcggtaacgcacaggacgatccctttgactctgtggctgtatcaaacgcggaattcgaggcgattctcgaaaacccgctgcccgtactcaatcgggaagcgggcgaagcaatgaggcggcaaattctggaagcgcgggaaaaaggcgactcggtcgggggcattgtcgaggctgcggcaatcggtctgcctgttgggttgggcgatccgatattcgacggcattgagaaccgtatcgccgggattgtccttggcataccgggcgcgaagggcattgaattcggaagcggcttcgccgttgccgggcgcaggggttcggaaaacaacgacagctattttatggacggagaaaagataagaacgcgcacaaacaactcaggcggcatattgggcgggataacaaacggcatgcccgtccttttccgcgcagcgtttaagcccacgccgtccataggcatggaacaggacagtgtcagcctggagcgggcggaaaacgcgattttacgggtaaaaggccgccatgatccctgcattgttccccgcgctctgccctgcgtggaagcggcggcggctgtcgcgttatacgacgcttatttggaccgctaa

SEQ ID NO: 65282 - protein, 359 aa, Unknown
  Obtained from environmental sample
  DOMAIN (9)...(359): Chorismate synthase
  misc_feature (1)..(359): Xaa is any amino acid
MSSQYGKKLRISIFGQSHSPAIGVSIDGLPSGIKINIDELRAFLKRRAPGQNDISTARAEDDAPEILSGLVETVTCGAPLAIIIRNKDARSADYRELRDIPRPSHADYAAHIKYGGFQDVAGGGHFSGRLTAPLCAAGGICLQILRGLGVFVGAHILRIGNAQDDPFDSVAVSNAEFEAILENPLPVLNREAGEAMRRQILEAREKGDSVGGIVEAAAIGLPVGLGDPIFDGIENRIAGIVLGIPGAKGIEFGSGFAVAGRRGSENNDSYFMDGEKIRTRTNNSGGILGGITNGMPVLFRAAFKPTPSIGMEQDSVSLERAENAILRVKGRHDPCIVPRALPCVEAAAAVALYDAYLDR

SEQ ID NO: 65283 - DNA, 339 bp, Unknown
  Obtained from environmental sample
  misc_feature (1)..(339): n is a, c, g, or t
ttgttttccgaacccctgcgcccggcaacggcgaagccgcttccgaattcaatgcccttcgcgcccggtatgccaaggacaatcccggcgatacggttctcaatgccgtcgaatatcggatcgcccaacccaacaggcagaccgattgccgcagcctcgacaatgcccccgaccgagtcgcctttttcccgcgcttccagaatttgccgcctcattgcttcgcccgcttcccgattgagtacgggcagcgggttttcgagaatcgcctcgaattccgcgtttgatacagccacagagtcaaagggatcgtcctgtgcgttaccgatccgcaatatatga

SEQ ID NO: 65284 - protein, 112 aa, Unknown
  Obtained from environmental sample
  misc_feature (1)..(112): Xaa is any amino acid
MFSEPLRPATAKPLPNSMPFAPGMPRTIPAIRFSMPSNIGSPNPTGRPIAAASTMPPTESPFSRASRICRLIASPASRLSTGSGFSRIASNSAFDTATESKGSSCALPIRNI

SEQ ID NO: 65285 - DNA, 2154 bp, Unknown
  Obtained from environmental sample
  misc_feature (1)..(2154): n is a, c, g, or t
atgactcttaccaatctaactgcggaaacgggtaaagcgttgcctttgggggcgtcgttgacccacgggggcgttaattttgcggttttttcaaggaacgctaatgccattacgcttatcatttttgagtctgcggataaaaattcaccaaggttggaaattccactcagtagaaagaccaataaaaccggaaatatttggcattgtttcatcaaaggtttgcaggcgggtacttgttatctttaccgggcggacgggcattatattccagaaaagggactgcgttttaatccccataaaacattgctcgatccttacgctaaggctttaacggatatcagcgaatgggattacggaaaatgcgcgggttacgataccgaanaacccgggcgcgatcttacctattcttacgatgatgatatcgcgcatcagccgcgctgtatcgtagtcgatgataattttgattggcagggcgacacgcctttaaactatcctctgcgtttcagtgtaatttatgaaacccatgttaaggggcttacagccaaccccaactcgaaagtacagcatcccggaacatatctgggagttgtcgaaaaaattccgttttttaaagatttgggaataacaagtttagagtttttgcccgttcaggaatttaacgaaaacgagattgcccgccataacccgaaaacgggaggaactttgaccaattactggggatactccacggcggcgttttttgcgcctaagggaaattatgcttccaataaaaatcccggcgctcaggttaatgaatttaaagagatggtgcgggaactgcacaaagccggattggaagtaattcttgacattgtttttaaccacaccgccgaaggcaatgagcagggaccgactttttctttccgcggacttgataactcaatctactatatacttaatgaaaaccgccgttactatcaaaattattcgggctgcggcaatacggtaaattgcaatcaccccgtggtgcggacattcataatggactgccttcgctattgggtaatggaaatgcatgttgacggtttccgttttgatttaggatcgattctcgggcgcgatcaacacgggcagatcatggaaaatccgccgacacttgaacaaatagccgaagaccccgttttaagttcgacaaaaattatcgccgaggcatgggatgccggcggcgcttatcaggtgggatggttccccggcggacgctgggcggaatggaatgataaataccgagacaatgtgcgcaaatactggcgaggcgatgaaagagaaacacggtatctggcgactcgtatagcaggcagttccgatctttatttgcgcgacggacgcaaacctttccattcaatcaattttattacaagccatgacggttttacgatatatgatttagtttcgtataacgataagcacaacgaagacaacggtgagaataactgcgacggcagtggtatgaatttaagttataattacggggttgaaggggcgaccgatgacccgattattacaacgattcgagaacggcaaataaagaattttttcgccactctgcttgtttcgctaggcacgccgatgattcttggcggtgatgaaattggccgtactcaaaacggtaataataacgcctattgtcaggataatgagacttcgtggtatgattggtctttcctgaaaaaaaatgccggtttgtaccgttttgtcaaagaaatgatagctttccgccttagacatcccggttttatgcgtcctgaattttacaccggcaggggcggcacatataaggcgattcccgatattacatggtttaatgaaaaagggacttctatcgactgggaaaaggtcggctcttttttggctttgcgcctgcttggaagcaaggcggatacgttagctgacactgacgataatgatttttacattatgcttaacgcggattcggaagtgaaaaaatttacggttgccgatcctccgccaaagaaaaaatggtatcgcgccattgataccggatattcgtcccccaatgacattcttttgccgggaaaagaagaagctcttccctcacaacgtttttattccgttaaagcacgaagtatagtaatattaatctccaaggaagcataa

SEQ ID NO: 65286 - protein, 717 aa, Unknown
  Obtained from environmental sample
  DOMAIN (173)...(585): Alpha amylase, catalytic domain
  misc_feature (1)..(717): Xaa is any amino acid
MTLTNLTAETGKALPLGASLTHGGVNFAVFSRNANAITLIIFESADKNSPRLEIPLSRKTNKTGNIWHCFIKGLQAGTCYLYRADGHYIPEKGLRFNPHKTLLDPYAKALTDISEWDYGKCAGYDTEXPGRDLTYSYDDDIAHQPRCIVVDDNFDWQGDTPLNYPLRFSVIYETHVKGLTANPNSKVQHPGTYLGVVEKIPFFKDLGITSLEFLPVQEFNENEIARHNPKTGGTLTNYWGYSTAAFFAPKGNYASNKNPGAQVNEFKEMVRELHKAGLEVILDIVFNHTAEGNEQGPTFSFRGLDNSIYYILNENRRYYQNYSGCGNTVNCNHPVVRTFIMDCLRYWVMEMHVDGFRFDLGSILGRDQHGQIMENPPTLEQIAEDPVLSSTKIIAEAWDAGGAYQVGWFPGGRWAEWNDKYRDNVRKYWRGDERETRYLATRIAGSSDLYLRDGRKPFHSINFITSHDGFTIYDLVSYNDKHNEDNGENNCDGSGMNLSYNYGVEGATDDPIITTIRERQIKNFFATLLVSLGTPMILGGDEIGRTQNGNNNAYCQDNETSWYDWSFLKKNAGLYRFVKEMIAFRLRHPGFMRPEFYTGRGGTYKAIPDITWFNEKGTSIDWEKVGSFLALRLLGSKADTLADTDDNDFYIMLNADSEVKKFTVADPPPKKKWYRAIDTGYSSPNDILLPGKEEALPSQRFYSVKARSIVILISKEA

SEQ ID NO: 65287 - DNA, 411 bp, Unknown
  Obtained from environmental sample
  misc_feature (1)..(411): n is a, c, g, or t
atgtttggcactgcgttggaaatatcggcggcaattaaggcaaaaaaaatcagcgttgccgaagcggtaagcgcttatatagaaaaagctgaaaaaaacgacaaacaatttaacgctttcttggctctgtcaaaagagagcgcgcttaaacgcgcgaaggagatacaggcgctcatcgacaagggggaagagctttctcctcttgccggaacgccaatcgcgctgaaagacaatatttctacaataggacttgagaccacctgcgcgtcaaaaattctacggggtataaacagtgttcacgccacgataacggaaaacttngacaggcggaatgatcgttatcgaaactcacatggacgagttcgctctcggcggctcaagcgagacgggggcgttcggcgcggcacataa

SEQ ID NO: 65288 - protein, 136 aa, Unknown
  Obtained from environmental sample
  misc_feature (1)..(136): Xaa is any amino acid
MFGTALEISAAIKAKKISVAEAVSAYIEKAEKNDKQFNAFLALSKESALKRAKEIQALIDKGEELSPLAGTPIALKDNISTIGLETTCASKILRGINSVHATITENXDRRNDRYRNSHGRVRSRRLKRDGGVRRGT

SEQ ID NO: 65289 - DNA, 1125 bp, Unknown
  Obtained from environmental sample
  misc_feature (1)..(1125): n is a, c, g, or t
atgatcgttatcgaaactcacatggacgagttcgctctcggcggctcaagcgagacgggggcgttcggcgcggcacataacccgtgggatacgacgcgggtctgcggcggttcatccggtggcagcgccgccgcgattgcctcgggtgaagctccgattacgctcggcactgatacgggcggaagcatacgtcagccatgctctttctgcggcgttacgggcattaagcccacttacggctctgtttcaagatacggaattgtcgccttcgcatcatcgctggatcaggcgggacctatcggacaaaacattgaagactgcgccgcgctgttatcgatcatttccggaccggacgagaaagacagtacatgcgttatgaaaaaaccgtttgatttcagcgagcggtgcgcggatatgaaaggcgtaaaaatcggcttgccgaaaaattatcttgagggtggcatagaggacgaagtaaaagccgctgttcttgccgcggcaaaagagtttgaatcggcgggggcggctgtcgaagaatttgaaatgcccttgatggattacatgatcccaacttattacatcatcgccgccgccgaagtgtcgtctaacctttcaaaatacgacggtcttaaatacggctaccgcagtccaaacgcaaaaacgctctccgaagtctatcggctctccagaagcgaaggcttcggaatggaagcgaaaagaagaatcatgcttggctcttttgtattgtcatcgggatactacgacgcctactataaaaaagccctgcaagcgcgcgcgcttcttaaagacgcttacagtaaattgttcgggcgttttgacataataatctcccctacagcgcccaccacagcgtacaagttaggcgacaatatcggcgatccggtaaaaatgtacatgggagacatctacacagtttcgatcaatcttgcgggactccccgccgccgcgcttccatgcggctttgacaaacagggcttgccaatcggtttccagttgatcggagacgctttttcagaaaacaaaataataaacgcggcgcgtgtttttcaaaaccggacagatcatcataaaaagaaaccttctattaacggaggcgcatcatga

SEQ ID NO: 65290 - protein, 374 aa, Unknown
  Obtained from environmental sample
  DOMAIN (3)...(350): Amidase
  misc_feature (1)..(374): Xaa is any amino acid
MIVIETHMDEFALGGSSETGAFGAAHNPWDTTRVCGGSSGGSAAAIASGEAPITLGTDTGGSIRQPCSFCGVTGIKPTYGSVSRYGIVAFASSLDQAGPIGQNIEDCAALLSIISGPDEKDSTCVMKKPFDFSERCADMKGVKIGLPKNYLEGGIEDEVKAAVLAAAKEFESAGAAVEEFEMPLMDYMIPTYYIIAAAEVSSNLSKYDGLKYGYRSPNAKTLSEVYRLSRSEGFGMEAKRRIMLGSFVLSSGYYDAYYKKALQARALLKDAYSKLFGRFDIIISPTAPTTAYKLGDNIGDPVKMYMGDIYTVSINLAGLPAAALPCGFDKQGLPIGFQLIGDAFSENKIINAARVFQNRTDHHKKKPSINGGAS

SEQ ID NO: 65291 - DNA, 1428 bp, Unknown
  Obtained from environmental sample
  misc_feature (1)..(1428): n is a, c, g, or t
atgaagtgggaaacagtaattggtcttgaaattcataccgagctttcaacaaaatcaaaaatcttctgcggatgtacaaccgcctacggcggagagccgaatacccacgtctgccccgtttgctcaggaatgccgggcactctgcctgtgctgaaccgcgccgtgcctgaatacgcgatgaggctcgggcttactcttaactgcgagattacaaggcacagcaagttcgacagaaaaaattatttttaccccgatcttcccaacgcgtatcagatatcccagctttacgctcctatatgccgcaacggctatcttgaaattgaagttgagggaaagaaaaggaaaatcggtattcacgagatacacatggaacaggacgcggggaaacttgttcacgaccctaagggaaacagttctttcatggattttaacagatgcagtgtcccgcttttggaaattgtgtccgagcccgatttacgaagcgccgccgaggtaatcgcctaccttgaaaaaatgcgcgagacgcttctgttccttgatataagcgactgcaaaatgcaggaaggctcgatccgcgccgatgttaatttatccattcgtcccttcggcggagaactcggcacacgcaccgagacaaagaacatgaactcatttaaagcgattgcgcgagccattgaatatgagacagaacgccagattgaaatacttgaggacggcgggaaaattgttcaggagacccgccggtgggacgacgaaaaaggcctctcctacggaatgcgttccaaagaaaacgctcaggattaccgttatttccccgaacccgatcttctgcctcttcacattgacgacgcgtggattgagaacgttaaatcaaatatgccggaactggcgcagcaaaagcgcgaacgctatatccgcgactggagcatttccgaatccgcggctgtcgttcttaccgttcataaaaagatttccaatttgttggagatcgtctcacaaaaaagcaatcagccgcaggaagccgcgaatttattcacgggcgaaattatgcggctgatgaacaacgccaatctgcttcccgaagatctttccatagacgcggacaagttatcggctctcatcggttttgtcgcgggcggaaaaattaaccgcgccgcgttcaaggagacagtcgaagcggtattcacgagcaatgttgatcctgaaaaatatatcgcggaaaagggattgatgatggtcagcgatgacaacgccgtaatggaagcggttaaagctgtattggcggaaaatgccggcgtcgttgattcatggcggagcggaaagacgcaggtgttcggcttcctgatgggacaggttatgaagaaacttggcaagggggggaatcctgagatcgcgaagaaagcgctggaagagacgttgaaagaatag

SEQ ID NO: 65292 - protein, 475 aa, Unknown
  Obtained from environmental sample
  DOMAIN (256)...(324): PET112 family, C terminal region
  misc_feature (1)..(475): Xaa is any amino acid
MKWETVIGLEIHTELSTKSKIFCGCTTAYGGEPNTHVCPVCSGMPGTLPVLNRAVPEYAMRLGLTLNCEITRHSKFDRKNYFYPDLPNAYQISQLYAPICRNGYLEIEVEGKKRKIGIHEIHMEQDAGKLVHDPKGNSSFMDFNRCSVPLLEIVSEPDLRSAAEVIAYLEKMRETLLFLDISDCKMQEGSIRADVNLSIRPFGGELGTRTETKNMNSFKAIARAIEYETERQIEILEDGGKIVQETRRWDDEKGLSYGMRSKENAQDYRYFPEPDLLPLHIDDAWIENVKSNMPELAQQKRERYIRDWSISESAAVVLTVHKKISNLLEIVSQKSNQPQEAANLFTGEIMRLMNNANLLPEDLSIDADKLSALIGFVAGGKINRAAFKETVEAVFTSNVDPEKYIAEKGLMMVSDDNAVMEAVKAVLAENAGVVDSWRSGKTQVFGFLMGQVMKKLGKGGNPEIAKKALEETLKE

SEQ ID NO: 65293 - DNA, 453 bp, Unknown
  Obtained from environmental sample
  misc_feature (1)..(453): n is a, c, g, or t
ttgaaagtattattgcaaaacaaggggtacatatttatggaaattgaaacaacccttgaatggttctattgtgctgatgcggattttgacagcgctctaatactaaataacgcttatcgtaagcataacgcaataatttgttttcattgtcagcaagctgttgaaaaatacttaaaagcatttctctgttacaatggcgtaattccaccaaaaatccatgtgcttgaaacgttatgtgcattatgctcggaatttgattcatcttttaataacatcgcaaaggattgtgcctatttgtcaccattttccgttcatgcccgctatccgcttgaaatggaaattaccgatttaaacataatgaagtcaatggagattgcccaaaaagtaaaagattttacgccgatagctgaattaaaagcaaaactagttaaagagaaaggagataataattga

SEQ ID NO: 65294 - protein, 150 aa, Unknown
  Obtained from environmental sample
  DOMAIN (20)...(136): HEPN domain
  misc_feature (1)..(150): Xaa is any amino acid
MKVLLQNKGYIFMEIETTLEWFYCADADFDSALILNNAYRKHNAIICFHCQQAVEKYLKAFLCYNGVIPPKIHVLETLCALCSEFDSSFNNIAKDCAYLSPFSVHARYPLEMEITDLNIMKSMEIAQKVKDFTPIAELKAKLVKEKGDNN

SEQ ID NO: 65295 - DNA, 552 bp, Unknown
  Obtained from environmental sample
  misc_feature (1)..(552): n is a, c, g, or t
atgacaagacaagccggaaaagaaaccgtatacaaactcgttgatgactttgaaaaaaatgaatgccagtatatgtcaaaaagttttcaggaaacggaagcccgcaaccggttgatagatcctttctttaccgctctgggctgggaattaaaccagacatcaatagccagaaaattctgggatgtccaccgggaatacagccagcgtgacaactccactacaaaaaagccggattatgcctttcggatcaaagaaggcgcaaaataccgtgacagacattctactctccttgacagaaaagaagcgattcgggaattagctgatgttctggaatatttaaaatctacattaaaagataatatgacaactgatgatgaaaaagaattactcaaaatccagaaagatttatttaatattgcaaataattttcaaataagacataataatgttagtcaaaatgataactataatcgctcatggatgagttggatattttatttatatctttcatcaattcatcttttgttgcgaatcaggagaaaagttatatga

SEQ ID NO: 65296 - protein, 183 aa, Unknown
  Obtained from environmental sample
  misc_feature (1)..(183): Xaa is any amino acid
MTRQAGKETVYKLVDDFEKNECQYMSKSFQETEARNRLIDPFFTALGWELNQTSIARKFWDVHREYSQRDNSTTKKPDYAFRIKEGAKYRDRHSTLLDRKEAIRELADVLEYLKSTLKDNMTTDDEKELLKIQKDLFNIANNFQIRHNNVSQNDNYNRSWMSWIFYLYLSSIHLLLRIRRKVI

SEQ ID NO: 65297 - DNA, 660 bp, Unknown
  Obtained from environmental sample
  misc_feature (1)..(660): n is a, c, g, or t
gtgatatataccgaagtgtatgaagacgcgctcggatcgggattagtcgcaaccgtttcaaaagccgtttttgacaagagaaaaaacttattaggcgtagtcgctcttgacatcatgctggataattataaaaaacttttaatggaaacacgcatactaaaatccggctatgcgtttatcatcaataacgaaggaaaatatatatttcaccccgacatggacacgcaagattttcagcccaccataccgcaagcgtcaacaggctctgaaacagcagaaggctttcaaagaatgatgaacggcgaaacaggatttttcaccgttgaggaaaacggcgagctattcttcattgacgaacggagcgagagccgtggccgtgctggcacggacatggccgagcgagtgaggacatcgaaggatagtatatccttcatagcgttcagccccatatccgtaacaggctggtcggtgggcgttaccgtgaacgaggatgagcttctgtcagctctcggatcgctttcaacacagttgacatcgctaaccggtgaagcgaaaaagaatttcgaaaaatgtccggtcaggcgattattacttttattgttatcttcacagccgttgcggttatggttgtctttttgtcgtttttcctttcccttttaa

SEQ ID NO: 65298 - protein, 219 aa, Unknown
  Obtained from environmental sample
  DOMAIN (3)...(83): Cache domain
  misc_feature (1)..(219): Xaa is any amino acid
MIYTEVYEDALGSGLVATVSKAVFDKRKNLLGVVALDIMLDNYKKLLMETRILKSGYAFIINNEGKYIFHPDMDTQDFQPTIPQASTGSETAEGFQRMMNGETGFFTVEENGELFFIDERSESRGRAGTDMAERVRTSKDSISFIAFSPISVTGWSVGVTVNEDELLSALGSLSTQLTSLTGEAKKNFEKCPVRRLLLLLLSSQPLRLWLSFCRFSFPF

SEQ ID NO: 65299 - DNA, 585 bp, Unknown
  Obtained from environmental sample
  misc_feature (1)..(585): n is a, c, g, or t
ttggaaggagtctttaaaaagatcgatctgccggcgggatattcaatcgaatttgacccggacgccataagtcaggcggaagctttatctgcaaccgtgctttcgcttgtgatggctgttatcttctgttatatgatcatcgccggtattaatgaatcttttactatcccgcttcttgtgctctcggcgattcccgcctctcttgcggttcccgctctctgtctggcgctgtcgggaagcgcgtataattccgcagccgcgtgcgcatttatcgcggtaagcggaatgacagttaacgccgcggtgctttgtgtcgatggtttgaacgcaatgacaaaaaagaaaaacaaaatatcaactttgggaatttacaatgcgctgaggcgcaaaatgcccgcccttttgtcaacaaccggaactaccgtcgccggggcgcttcctttcctcttcctttcggagggggcgaatttgcttatacggacgctttctcttacaggagctcttggagtcgcgtgttcgtgtataggttcaataacattaatcccatcgctttttatatttaaaaatcatttaacaactaattag

SEQ ID NO: 65300 - protein, 194 aa, Unknown
  Obtained from environmental sample
  misc_feature (1)..(194): Xaa is any amino acid
MEGVFKKIDLPAGYSIEFDPDAISQAEALSATVLSLVMAVIFCYMIIAGINESFTIPLLVLSAIPASLAVPALCLALSGSAYNSAAACAFIAVSGMTVNAAVLCVDGLNAMTKKKNKISTLGIYNALRRKMPALLSTTGTTVAGALPFLFLSEGANLLIRTLSLTGALGVACSCIGSITLIPSLFIFKNHLTTN

SEQ ID NO: 65301 - DNA, 1947 bp, Unknown
  Obtained from environmental sample
  misc_feature (1)..(1947): n is a, c, g, or t
ttggtcagccgccgttttacgggcgatttaagcaacacggcgcaaatactggaaaaaattgtaaagcctcggctggaaagtttggaaggagcgggagaagttattgtctccggagtaggattaaaagaaatttatataattattgatcaggaaaaattaggtcttcttcagttagacccgtctgtaataatgtccgttcttgaattaaatgattcgattttttccggcggaatgattgaacaaaaaaacagggaaataatcgttaccgttgatggtcgttactcgtcgcttaacacagctttaattccgcttggcgagggaaagtatattgagctttcggatattgcagttattacggaaagggaacgggagccggatattctttcacgtttgaacggcagaaaaacggcgggaatcgcgattatggggcggcatgacgccgacctgcggaaactttcttccgacatcaaaaaagaactttccgccctttccctgcctttggaattcaccgttttaacggatgccggcgcggaagaaaccgccgctttcagttccgtctttaacgccgcgctgcttggcgcaatcatggtggcggcagtcagttttttgttgggagggaaaaactctgcaaacctgtccggcttcttctgcgcgctctcgatcccgttaatctgcgtcctttcaatcgccgttctttcaatgttaggctttccccccgggcggctgatgctggcgggtattgccgccggagtgggaaccgctgttgacgccgtcatcctctgttcggaaaaactccgcaaatatctaagttatgaaggcgcggcggcggccttgtccgaattagcgggacctttaatcgcgggagcggctacaactgtcgctgcccttcttccgctttcaagaatgcaggacgtaagcgtaaaaacaatcgccgcgtccattgccgtaatttgcacagtcgcccttgttttcagcctctcgctcctaccgcccctgcttctctggaaagtgaaatccggcgcggtaaattttttcgttaagatgccgttcatgttcaaacaaatacaaaggcggctttcaaggttactgtgcaaatttcttgccgcggacgttaagctctgtttccgttacccgattttaataccggcaatcagcctcgctcttaccgcggcggcggctctcgctcttttcgcgaaaggagttgacgcctcaagttacggttcggaagattccgtttacgctcaggttgaatttgagggaggcctgctcgcgcaggaagctgaccgccttcttgcggcttacggcgaacagctttcaagttatgagggaattaaaaatgttgaaaccggcgcgagaaccggctcaggctccctgcttatttcatttgatccaaaacagacaaacgcgcatagcgtaaaaaatttggcaaagagcgtatacattcccggcgggtttgtgttttttcacgaaagctcaaaccgcgatcgctattgggaaataagaatctgcggcgacgaggataaaaaatgcagagaacttgccgaaaaactggcgtacctgtgcgcgaatcatcctttggtaaccgaacaagtgttgaattttaagcaggggagtaaaaaattgattttacggccgaacagggaattatttgccggaacgggaatcggcttcgcgaacgccgccgccgggcttaggtacggggtgtacgggcccgtctcgtacaaaagaatggactcaaagggagagacagacgtgcgtatcagaaccggcggtaatgttatgcgacaatcaagagagggcgctttgagcttgcttgtttccggcgtaaaggtagactcgctcgtgcatacaagcgaagaaattgagagcgcaagcgtgnaagaaacgacaggcgtagaacggcttccatcaccgttgttacggggccgattgacgctaggcgcgtaa

SEQ ID NO: 65302 - protein, 648 aa, Unknown
  Obtained from environmental sample
  misc_feature (1)..(648): Xaa is any amino acid
MVSRRFTGDLSNTAQILEKIVKPRLESLEGAGEVIVSGVGLKEIYIIIDQEKLGLLQLDPSVIMSVLELNDSIFSGGMIEQKNREIIVTVDGRYSSLNTALIPLGEGKYIELSDIAVITEREREPDILSRLNGRKTAGIAIMGRHDADLRKLSSDIKKELSALSLPLEFTVLTDAGAEETAAFSSVFNAALLGAIMVAAVSFLLGGKNSANLSGFFCALSIPLICVLSIAVLSMLGFPPGRLMLAGIAAGVGTAVDAVILCSEKLRKYLSYEGAAAALSELAGPLIAGAATTVAALLPLSRMQDVSVKTIAASIAVICTVALVFSLSLLPPLLLWKVKSGAVNFFVKMPFMFKQIQRRLSRLLCKFLAADVKLCFRYPILIPAISLALTAAAALALFAKGVDASSYGSEDSVYAQVEFEGGLLAQEADRLLAAYGEQLSSYEGIKNVETGARTGSGSLLISFDPKQTNAHSVKNLAKSVYIPGGFVFFHESSNRDRYWEIRICGDEDKKCRELAEKLAYLCANHPLVTEQVLNFKQGSKKLILRPNRELFAGTGIGFANAAAGLRYGVYGPVSYKRMDSKGETDVRIRTGGNVMRQSREGALSLLVSGVKVDSLVHTSEEIESASVXETTGVERLPSPLLRGRLTLGA

SEQ ID NO: 65303 - DNA, 459 bp, Unknown
  Obtained from environmental sample
  misc_feature (1)..(459): n is a, c, g, or t
atgacaatgggcgctcaatttgaatcttttttgcttccccttgttttaatgttaagcattcctttttcgcttgcgggagccggacccgctcttataatcagcggctcaaaaattgattcgggagccgtgctgggattaaccgctttattcggacttgttgtaaataacagccttattctctttgaaatcagtgaacaaaaaattcaagccggttttcccgtaacggacgccgtttgccgaggagcgtcggaacgattacaggcgattttgatcacaacgacaacaaccgtcttcgctcttttgccgttaatcttcagtcctttgggaaattcgcaaaaatcaatggcggcggcaatgttaggcgggcttacggtatcaacattgctcagtctattcgcaattccttccgtattaattcggtacttcaaatggaaaattcgcaacgaggaagatatatga

SEQ ID NO: 65304 - protein, 152 aa, Unknown
  Obtained from environmental sample
  SIGNAL (1)...(25)
  misc_feature (1)..(152): Xaa is any amino acid
MTMGAQFESFLLPLVLMLSIPFSLAGAGPALIISGSKIDSGAVLGLTALFGLVVNNSLILFEISEQKIQAGFPVTDAVCRGASERLQAILITTTTTVFALLPLIFSPLGNSQKSMAAAMLGGLTVSTLLSLFAIPSVLIRYFKWKIRNEEDI

SEQ ID NO: 65305 - DNA, 993 bp, Unknown
  Obtained from environmental sample
  misc_feature (1)..(993): n is a, c, g, or t
atgaccgagcgagtgaggatatcgaagggctttagccctttatccgaccacatgaagcggaatttggacaaagttgttttgccttattttaaaaatatgaaaatggacgccattaccccagccgtgattgaggcgtttctggacagccttatcaaacaaaaatataagaataccacgattaacggctattacggcactttcaaaaccatgatgattgaagccgtcgagcgcggggttattgccgccgaccctaccgccaaagtcgaaaggctgataaacgaccgtgacgaaatcaggattatcaccccacttgaattcaaaaagctgtttaccggggattggcgcanagtctgggaagaacaccgcatctgttgtaccgtgaacaaactggcggtgctgtcgggcatgagggtgtccgagattttggggctgaaagggagctgcctgttcgaggatcacatttacgtctgcatgcagcatgacatatacggctataggccgaccaaaacaaaagacaggcataacataccgcttccggctcccctgattgccgatttgaagctgctgaaagaaacaagcggggacggctacctgttttccactaacggcgggggcagccccatatgcaggaaaactgttttgatgtatctgcgaaaggctttgataaatatcgggataaccgccgccgaaattaaagcccggaatttgcatatccacgcatggcggcattttttcaatacggagatgctgaagggcgggatgactaccgaacaggcgcaggcgataaccacgcataaaagcgaaaggatgacggaacggtacacgcattttgacccgcttgaatttgttaaggcgaaggaaattcaggaagcattgttgcagcctgtcggcgaaaaggcgcaagggctggaagcagaaaaaaaggaaatgccgttgaatgtgttttccttccctgtgtccggaactccgcaagaggaccggaaacaggcttag

SEQ ID NO: 65306 - protein, 330 aa, Unknown
  Obtained from environmental sample
  DOMAIN (111)...(284): Phage integrase family
  misc_feature (1)..(330): Xaa is any amino acid
MTERVRISKGFSPLSDHMKRNLDKVVLPYFKNMKMDAITPAVIEAFLDSLIKQKYKNTTINGYYGTFKTMMIEAVERGVIAADPTAKVERLINDRDEIRIITPLEFKKLFTGDWRXVWEEHRICCTVNKLAVLSGMRVSEILGLKGSCLFEDHIYVCMQHDIYGYRPTKTKDRHNIPLPAPLIADLKLLKETSGDGYLFSTNGGGSPICRKTVLMYLRKALINIGITAAEIKARNLHIHAWRHFFNTEMLKGGMTTEQAQAITTHKSERMTERYTHFDPLEFVKAKEIQEALLQPVGEKAQGLEAEKKEMPLNVFSFPVSGTPQEDRKQA

SEQ ID NO: 65307 - DNA, 723 bp, Unknown
  Obtained from environmental sample
  misc_feature (1)..(723): n is a, c, g, or t
atgggcggggtgctgatgctgtccagggcggcggaactgcaaactgagataaaagggtggcttgaagcgtcgggctttgaagatgttgcggttacgggcaaggaaaatgaggagcttaatacggctatctgcaacaagaagccccgtctggtcattattgacagtttgttttatcaggacggtacggcttgcagggtcggagatctggtgaaggtgtttccaaaactgaacgtcgccgttgtttctttccatgacttcgacgcgagccgcgcctcgtggttcatctgggagggggcaaagtcataccttagcttgtgggaagggtatggggaatttcagcggggcttgcggattgtgcgggagggcggtcagtacatttcgccgaaggttcagcgcctgattgaccattgcggggaatggccggataccaaaaacaaaatgaccaagcggcaaaaggaatgccttgtcatgctgtgctgcgggattatccctctccaaattgggaaaatactgaatatatccaaaagtacggttgacagacaccttgacgatttatacagaacttttcatgcaggcagccgtacagagatggttgcgcttgcttgggagatggaacttgttacccccaaagacattcggctttataacaggaaaaaagaactcttaccgcttcctgaatgggcggaggtgaaacggaaattcgacaggttttattttgattga

SEQ ID NO: 65308 - protein, 240 aa, Unknown
  Obtained from environmental sample
  DOMAIN (144)...(201): Bacterial regulatory proteins, luxR family
  misc_feature (1)..(240): Xaa is any amino acid
MGGVLMLSRAAELQTEIKGWLEASGFEDVAVTGKENEELNTAICNKKPRLVIIDSLFYQDGTACRVGDLVKVFPKLNVAVVSFHDFDASRASWFIWEGAKSYLSLWEGYGEFQRGLRIVREGGQYISPKVQRLIDHCGEWPDTKNKMTKRQKECLVMLCCGIIPLQIGKILNISKSTVDRHLDDLYRTFHAGSRTEMVALAWEMELVTPKDIRLYNRKKELLPLPEWAEVKRKFDRFYFD

SEQ ID NO: 65309 - DNA, 2394 bp, Unknown
  Obtained from environmental sample
  misc_feature (1)..(2394): n is a, c, g, or t
atgcactacggtttttttgactcgcataaacgggaatatgtaattacccgtcccgatacgcccgcgccctgggcgaattatcttggctctccggcctatggcgcgattatttccaacaactcaggcggttacagctttgtaaaaagcggcgccgccggaaggctgatccgttaccgctttaacgagcaggaccggcccggccgctacgtctacctccgcgatgacgataccggcgattactggtcggcctcatggaagcccgtgggcaagccccttgatcagtacaaatccgagtgccgtcacggtacgggttacacccaacttgaggcggattacagggacattcactcgcaggcgctttattatgtgccgcaggacgcggactacgaggtgtggaaggtcaaaattacgaataacggaagttacgcgcggaaaatttcctgttttggctttgttgaatttacctgcgagagtttttatgagcaggatcaggtgaaccttcagtatacccagtttattacccgcacttactttaaggataaatttatcctgcagacgataaacgagaactgcctgaacgccgtaaaccagagccgcgtggagacgcgctttttcgccctggccggggcgaaggtcgcgagttactgcggcgaccgcgcctcgttcctgggcaagtaccgcgattacggaaatcccgtttcggtggaaaacggaaaactggacggcaccctcaattataacctgaatccctgcggcgccttgcacgcggctttcgatcttgagccgggcaaaaccgttgaatttactttccttctggggcagaaacgcgaggcgcaggtaaaaaaactcgtgtcgcgttacgaggacatgagcctgccggaaaaagaaattgacatattaaaaaaatactggcatacccggctcgccaacctgaaggtaaacacccccgacgagaactttaacaacatgatcaacacatggaacgcgtatcagtgttttatcacctttgtctggtcgcgcgccgcgtcccttgtatactgcggacagcgcaacggttacggctaccgcgacacggtgcaggatattcagggcatcatccaccttgatccgaaaatggcccttgaaaaactcaagttcatggtttccgcgcaggtaagccacggcggcgcgcttcccctggtgaagtacaatcacaacccgggacacgaagacaagcccgaggacgaatcctaccgcaagaataccggccatccctcataccgcgcggacgacgcgctgtggctgttccccaccgtctggaaatatatcgcggagaccggcgacgccgccctcttaaacgaagtaatcccctacgcggacaagggcaaggacaccttgttcaaccacctgaaaaaagcgatcggcttttcgcttaacaacctggggatacacggccttcccgccgggcttcacgcggactggaacgactgcctccgccttggcgcgaagggcgtttccgtatttgtcgcgctccagttgtactacgcgttcgagatcatgatccgtttcgcgaagtttaaaaaagattccgcgacggaacaggaaatgacgaaacaaaaaaaacgttttggaaaagttatcgaaaaatactgctggaaagacgaccgctttgtgcgcggcatcaccgagaaggacgttacagtcgggaagaaaggcgacccggaagcggacatctggcttaacccgcagagctgggcggtaatcagcggctacgcggacgaaaaacgcggcaaacagatactcgatttagtccacaaaaaactgaacacgaaatacggcgcgcgcctcatgtcgcccccgtaccgcaggcacgcttttgacggcgcgctcgcgctgctgttcaacccgggcacaaaagagaacggcggcatcttcctgcagacgcagggctggataatccttgccgaagcattgcttggacgcggaaaccgcgccgttgagtattatctggaaagttgtccctccgcgcagaatgaaatcgccgacacccgtcttatggagccttacgcttactcgcaattcacggaaagtgtagacagcccgtttgaaggacgaagtcatgttcactggctgacaggcacggcaagcacggtaatggtcggcagtgtggaaggtattttaggattaagaccggacattgagggactgcgtctctctcccgcaattccttcatcgtggaaatcttttacaatggaaaaatctttccgcggcaaaaaacttaacataaaagtaaataaccccgacgggcgcgaaagcggctgtaaaaaactgactgtcaacggaacagcggtagaaggcaactacattcccgccggtatattgaaaccggagaacgaaataattttagatatgtga

SEQ ID NO: 65310 - protein, 797 aa, Unknown
  Obtained from environmental sample
  DOMAIN (198)...(280): Glycosyltransferase 36 associated family
  misc_feature (1)..(797): Xaa is any amino acid
MHYGFFDSHKREYVITRPDTPAPWANYLGSPAYGAIISNNSGGYSFVKSGAAGRLIRYRFNEQDRPGRYVYLRDDDTGDYWSASWKPVGKPLDQYKSECRHGTGYTQLEADYRDIHSQALYYVPQDADYEVWKVKITNNGSYARKISCFGFVEFTCESFYEQDQVNLQYTQFITRTYFKDKFILQTINENCLNAVNQSRVETRFFALAGAKVASYCGDRASFLGKYRDYGNPVSVENGKLDGTLNYNLNPCGALHAAFDLEPGKTVEFTFLLGQKREAQVKKLVSRYEDMSLPEKEIDILKKYWHTRLANLKVNTPDENFNNMINTWNAYQCFITFVWSRAASLVYCGQRNGYGYRDTVQDIQGIIHLDPKMALEKLKFMVSAQVSHGGALPLVKYNHNPGHEDKPEDESYRKNTGHPSYRADDALWLFPTVWKYIAETGDAALLNEVIPYADKGKDTLFNHLKKAIGFSLNNLGIHGLPAGLHADWNDCLRLGAKGVSVFVALQLYYAFEIMIRFAKFKKDSATEQEMTKQKKRFGKVIEKYCWKDDRFVRGITEKDVTVGKKGDPEADIWLNPQSWAVISGYADEKRGKQILDLVHKKLNTKYGARLMSPPYRRHAFDGALALLFNPGTKENGGIFLQTQGWIILAEALLGRGNRAVEYYLESCPSAQNEIADTRLMEPYAYSQFTESVDSPFEGRSHVHWLTGTASTVMVGSVEGILGLRPDIEGLRLSPAIPSSWKSFTMEKSFRGKKLNIKVNNPDGRESGCKKLTVNGTAVEGNYIPAGILKPENEIILDM

SEQ ID NO: 65311 - DNA, 1143 bp, Unknown
  Obtained from environmental sample
  misc_feature (1)..(1143): n is a, c, g, or t
atgatttacaaaacctttggaaaaacaggcgtaaaagtttcggctcttggcttcggcgcaatgcgcttacccatgaaagaatttgacggcaaaaaaatagtagacgaagaccttgctgttccccttatgcaaaaagcctttgacatgggcgttaactacgttgataccgcgccgctgtactgcgaaacgttaagcgaaatagccgtaggcaaggcattgaaaggctaccgcgacaaagtgtatctgtccacaaaaaaccccatagaagacgccgatggcgatcattggatggaacggctggaaaaatcgctgaaaaaactggacacggattacattgacttttatcatttttggggcatctcgttaaagagtttcgagtcatggcaggggttgaagttcggtcctcttgaagcggcgtataaggccaaagagcaggggcttatcaaacacatttcattttcgtaccacgacgcggcggaaaactataaaaagatagtagattcaggacactttgaaacaacccttgtacaatacaatatgcttgaccgttccaatgaggagaacatcgcctacgcgaaatccaaagggcttggcgttgttgtaatggggcctgtagggggcggcaggctgggagcgccaagcgaaaaaatacagagcttgctgaaaaataaatcgacaagcaccgcggaaatggccctgcgcttcgtgcttgcaaatgaaaatatagacatggctctttccggcatgggcgatctgaatatgttaaaggaaaattttgaaatagcctcccacaccggccatttaacggaagacgaactgcggcgtattaaaaccatgatggaagaaaacaaaaaccttgcaaagctgtactgcacgggctgtaattactgcaaaccctgtccgcagggcatagacattccctacctttttgaaataatgaaccgttaccgcgtctacgatttgaaggaacacgcgaaaagcgcctacagggaagtggtcaacggctggagctggattaagagcgctgacgcttcaaagtgcgcggcctgcggcgtctgcgaggaaaaatgcccccagaaactgccgattattaagcaacttcaggagacgcatcgtacccttggcacgcagacgcttgcataa

SEQ ID NO: 65312 - protein, 380 aa, Unknown
  Obtained from environmental sample
  DOMAIN (340)...(363): 4Fe-4S binding domain
  misc_feature (1)..(380): Xaa is any amino acid
MIYKTFGKTGVKVSALGFGAMRLPMKEFDGKKIVDEDLAVPLMQKAFDMGVNYVDTAPLYCETLSEIAVGKALKGYRDKVYLSTKNPIEDADGDHWMERLEKSLKKLDTDYIDFYHFWGISLKSFESWQGLKFGPLEAAYKAKEQGLIKHISFSYHDAAENYKKIVDSGHFETTLVQYNMLDRSNEENIAYAKSKGLGVVVMGPVGGGRLGAPSEKIQSLLKNKSTSTAEMALRFVLANENIDMALSGMGDLNMLKENFEIASHTGHLTEDELRRIKTMMEENKNLAKLYCTGCNYCKPCPQGIDIPYLFEIMNRYRVYDLKEHAKSAYREVVNGWSWIKSADASKCAACGVCEEKCPQKLPIIKQLQETHRTLGTQTLA

SEQ ID NO: 65313 - DNA, 2319 bp, Unknown
  Obtained from environmental sample
  misc_feature (1)..(2319): n is a, c, g, or t
atgctgccgatttgcgacaagctcgataaagcgggcttttttgccctcgaagcgtggggcggagccacttttgactcctgtataagattcctgaatgaagacccgtgggaacgccttaaaaaattgaaaaaagcccttccccaaacaaaaataatgatgcttctgcgcggacagaatttgctcgggtacaggcattatgccgatgacgttgtagcaaaattcgttgaatacgccgcaaaagacggcgttgacattttccgcattttcgacgcggtaaacgatccgcgcaactttaagatggccacagaagcggcaaagaaaaccggaaagcacattcaagcgacaatttcctacgctgtaactcctttccacacaatacagaaatacgctgaatttgcaaaacagcttgtggacatcggtgcggattcaatttgtataaaggacatggcaggtcttcttaaaccttatgaaggctacgatcttgttaaagcgattaaaaaagttaccgatttacctatcgaaatccacacccacgcgacaacgggtatgtcggttgcaacccttacaaagtgcgcggaagcgggagcggaaattcttgacactacaatttcttcaatgtctatgggtacaagccacagccccacagagacaatggtggaaattttcaaaggaacagaatacgacacggggcttgacaacaacctgttactcgaaattgccgcatatttccgcgaagtccgcaaaaactacaaaaagtttgaatctagcttcctcggcgcggatacccgtatcctcgcaagccaagttcccggcggaatgttaagcaacctggaaagccagcttaaagaacagggcgcttcggataaaattgacgacgtacttaaagaaatcgccgttgttcaaaaagactcaggctatccgccgcttgtaactcccacaagtcaaattgtcgggacacaggctgtgtttaacgtactgttcggcagatacaacaaactttcaggcgagtttcaggatcttgtcgccgganaatacggcgcctgccccgctcccaaaaatcccgatgtagtaaaaaaagctcttgaagctttaaaaatggaaaaagaaattacctaccgtcccgccgacgatattccggacgaatacagcaaacttgaaggcgagtgcaaaaccctccttgggacaagcacggtttcccccgaggacgttcttacccttgccatgttcccgaaagtcgcgccggacttcttcaagaaccgttccaaggggcccgtggtctttaaaccagaacaggaaggaactacctccggttctatggcggtcccagccgccgcatctgccgtagcggccccgaaagccggtcaggcggcccagtacagcgtcaacgttgacggcgtcaactacaacgtagtggtggccccggcgggtacggtggctgttgccccggcatcgggttcaatgcccgtggcgtcaaaggcggtcgcgccctcaggcggaggagctgcggttctcgctcccgtggcgggaagcattatccgctacgcggtagccgaaggcgcgactgtgaaagcgggagacaacgtgatcattatggaatccatgaaaatggaactggaaataaaagctactgcggcggggaaagttcatttcctggttgccgccggtactacagttgcgtcccagcagccaatcgcggaaattggcggtgtgctgggggcagttccagttgcgccggtcgcgcccacgcctgcccctgttgcggccccagcgccggtcgcgcctgttgcaacggccccttcgggcgggacagcgatcctcgcgccggttgccggtactatcatccgctacgccgtagccgaaggcgcggctgtgaaagccggagacaatgtggtcattatggaatccatgaaaatggaactggaaataaaagctaccgcttcggggaaagttcatttcctggttgccgcaggcactacggttgcgtcccaacagcccatcgctgaaataggcggcggggcggtgccagttgctcccgttgcgccggtcgctcccgctgcgccggttgcgccagccgcacctgttgtccccgcgtcggcggccccttcgggcgggacagcgatcctcgcgccggttgccgggactattatccgctacgctgtagccgaaggcgcggctgtgaaagccggagacaatgtggtcattatggaatccatgaaaatggaactggaaattaaagctactgcggcgggaaaggttcgtttcctttcagcgcccggcgctcgtgtggcgtcccagcagccaatcgcggaactaaagtag

SEQ ID NO: 65314 - protein, 772 aa, Unknown
  Obtained from environmental sample
  DOMAIN (1)...(249): HMGL-like
  misc_feature (1)..(772): Xaa is any amino acid
MLPICDKLDKAGFFALEAWGGATFDSCIRFLNEDPWERLKKLKKALPQTKIMMLLRGQNLLGYRHYADDVVAKFVEYAAKDGVDIFRIFDAVNDPRNFKMATEAAKKTGKHIQATISYAVTPFHTIQKYAEFAKQLVDIGADSICIKDMAGLLKPYEGYDLVKAIKKVTDLPIEIHTHATTGMSVATLTKCAEAGAEILDTTISSMSMGTSHSPTETMVEIFKGTEYDTGLDNNLLLEIAAYFREVRKNYKKFESSFLGADTRILASQVPGGMLSNLESQLKEQGASDKIDDVLKEIAVVQKDSGYPPLVTPTSQIVGTQAVFNVLFGRYNKLSGEFQDLVAGXYGACPAPKNPDVVKKALEALKMEKEITYRPADDIPDEYSKLEGECKTLLGTSTVSPEDVLTLAMFPKVAPDFFKNRSKGPVVFKPEQEGTTSGSMAVPAAASAVAAPKAGQAAQYSVNVDGVNYNVVVAPAGTVAVAPASGSMPVASKAVAPSGGGAAVLAPVAGSIIRYAVAEGATVKAGDNVIIMESMKMELEIKATAAGKVHFLVAAGTTVASQQPIAEIGGVLGAVPVAPVAPTPAPVAAPAPVAPVATAPSGGTAILAPVAGTIIRYAVAEGAAVKAGDNVVIMESMKMELEIKATASGKVHFLVAAGTTVASQQPIAEIGGGAVPVAPVAPVAPAAPVAPAAPVVPASAAPSGGTAILAPVAGTIIRYAVAEGAAVKAGDNVVIMESMKMELEIKATAAGKVRFLSAPGARVASQQPIAELK

SEQ ID NO: 65315 - DNA, 966 bp, Unknown
  Obtained from environmental sample
  misc_feature (1)..(966): n is a, c, g, or t
gtgctttctntgcagggcgagcaccggcttgccatgagcggcactccgattgaaaacaatctgggagaactgtacagcctgttccggtttctcaacccttcgttcttcggttccgagcggctcttcatgcagcggtatctccatcccattcaggataacaacgatgaagacgcgctcaaagatttaaaggcgaggatatacccttttatgctgaggcgtttgaagcgggacgtgttaaaagagcttccggcaaaaaccgaggaaaccgcctttattgaactggaagaaaaccatttggccgtttatcaccggagacggctggaatacaaacagcttatcgacggtatcatcgccaaaggggaagcggcaaaatcttcgttcatcattttcaaggcgttaagcgaactgcgccgcctggcaagtattcccgaggcggacggcgaatatgccgggccctcggcaaagcggcagtacctgctggacatgatagcggagttagttgaaaacaaccacaagtgccttatctttaccaacttcctggcaacggtggatatagtaagcgaagatttagccgggcggggaattcaaagcctgaccatgaccggggcgacggtggatcgccagtcactggtaaggcgcttccagaccgacaacgatgttaaggcttttataatgacattaaaaacagggggaaccggccttaaccttaccgcggcggattacatttttattatggatccctggtggaacagcgccgccgagaatcaggcaatcgaccgcagccaccgcatcgggcagcagaacccggtgttttgctaccggctcatagccaaggataccattgaagagcggatattggaacttcagaaacggaagaccgatttggcgggggcgcttcttgccgatgatccgggggcgctaaaggctttaagcccggaggaggtggcgtaccttgtgggcaattaa

SEQ ID NO: 65316 - protein, 321 aa, Unknown
  Obtained from environmental sample
  DOMAIN (189)...(265): Helicase conserved C-terminal domain
  misc_feature (1)..(321): Xaa is any amino acid
MLSXQGEHRLAMSGTPIENNLGELYSLFRFLNPSFFGSERLFMQRYLHPIQDNNDEDALKDLKARIYPFMLRRLKRDVLKELPAKTEETAFIELEENHLAVYHRRRLEYKQLIDGIIAKGEAAKSSFIIFKALSELRRLASIPEADGEYAGPSAKRQYLLDMIAELVENNHKCLIFTNFLATVDIVSEDLAGRGIQSLTMTGATVDRQSLVRRFQTDNDVKAFIMTLKTGGTGLNLTAADYIFIMDPWWNSAAENQAIDRSHRIGQQNPVFCYRLIAKDTIEERILELQKRKTDLAGALLADDPGALKALSPEEVAYLVGN

SEQ ID NO: 65317 - DNA, 675 bp, Unknown
  Obtained from environmental sample
  misc_feature (1)..(675): n is a, c, g, or t
ttgcagcgccgttgcgcggcaatcaagaagatattggacagagccgtggaagtccatgtcagcgcgcccggaggaacagacattaccattggagtgagggacagggaagcaaaaaccgatgacggcaatttttcaatacctggctcaggcggcaaccttcctgccggggaaacctttatcagcccggaaaacatgaccgcaaagggccgaatttgctatgatggttccatcagcgtcaacgagggggaactaatcatcaatactccgattgaatgtctggtggaagacggctatgtaagtaaaattctcggcgctggggaagcggcctgcctgttgaagaccattgaggcggccgagcgcaacgcctatgaatttgaaagagacgggaaactcccacccagcttcggcgaaatctacgcccgcaacgcccgcaacataggcgagcttggcatcggcctgaaccccgcggcccgaatcaccggaaagatgcttgaagacgaaaaggccttccgcacctgccattttgccatcggctccaattacgatgatgacgcgccaagcctcatacacctggacggccttgtaaaaaggcccaccataacggcgttttttgaagacggaaccaaacaggtaattgagcgggacggcgaactggacaactgcatactgtcttga

SEQ ID NO: 65318 - protein, 224 aa, Unknown
  Obtained from environmental sample
  misc_feature (1)..(224): Xaa is any amino acid
MQRRCAAIKKILDRAVEVHVSAPGGTDITIGVRDREAKTDDGNFSIPGSGGNLPAGETFISPENMTAKGRICYDGSISVNEGELIINTPIECLVEDGYVSKILGAGEAACLLKTIEAAERNAYEFERDGKLPPSFGEIYARNARNIGELGIGLNPAARITGKMLEDEKAFRTCHFAIGSNYDDDAPSLIHLDGLVKRPTITAFFEDGTKQVIERDGELDNCILS

SEQ ID NO: 65319 - DNA, 1605 bp, Unknown
  Obtained from environmental sample
  misc_feature (1)..(1605): n is a, c, g, or t
atgacaccttcaacccatatacaggtggaggtaaaatgtatgattgaaaaaaccaaccatgaaattaacgatccgcaaggcggggaagatcccttgaccggcgcggttaaaaatctgttcggggtgtcatatctgtttccgtatcaaagacttgtaatgacaaatattctggaagccgcgcaggcggcggggattcaggtaaagtggtcgggggaaagcgaaatttcctccgaagaagaaccggcagattcctctccttcttccgaccgtgaaatttccggcaggcagatagttattctgccaacaggcgccggaaaatccctctgcttccaactgccggcaatgttgatagaagggcttactcttgtcatctatcctattttgtcgctgatggcggatcaacaaaggcggttaagcgaacgcggtttttctccggtaataatcaggggaggacaaagcaaggaagaacgcaatgagatttggcaaaaattggaaagcggaaaaagcaagttcatcatcgccaaccccgaggttttgcttacaccgcaagtcaaatcaaagctggaaaaaatcagggtgatgcacgccgtaattgacgaggcgcactgcgtaagcgagtggggagaaagtttccgtcccagttaccttgaaatcggctctatcttacgttctcttaatccgccgcttgttaccgcttttaccgccacagcttcctctccggtgctggaaaaaataaagaagtacatcttcggcgatctggaagcgcgtcaaatcgtgggaaacccggacaggcccaacatcagttattccgcgaagggctgcattaaccgcaatctggcggttcgggatttaattcttcaaaacagccgccccgcgatagtgttctgttcctcgcgccccggcacggaaaaactttctcgctatctgcgcgactctttcggcgagatgggactttcctggagtaacgaaattcgtttttatcacgcggggttaagcagagaggaaaaagccggcgttgaaaaatggtttatcaacaatccggaggcggttctttgcgccacctgcgcctacggaatgggagtggacaaagccgatgtgcgcaccgttattcacagggactgcgccccttcggtagaagcgtatttgcaggaagcaggcagagcaggccgcgacggctctcaatcaaaggcgatcctcctctggggcccggacgacaaaatgagcntgcggcgtacaaaaacggatgcagaccgcgcaaggctttccggccttttggattacgcgcgcgacataacccaatgcagaaggcatgcccttttaagaatgctcaactacgacagcgatggcgaaagcccggaaacccaatgctgcgacgtgtgcgaacatgaggcaagcgccacgttacgcgaagaatcgggcgtcatggatttcttccgcagaaacaaacgctgttattcgataaatgaggcctgcggtaaattggcgcaatcggaaagccattactggtcggagggagaggcgaagcaaacgattaatcatttgcttgccgttggcaggcttaaggaatcaaagaatcccttgttcaaacaccgtataatatgttag

SEQ ID NO: 65320 - protein, 534 aa, Unknown
  Obtained from environmental sample
  DOMAIN (316)...(392): Helicase conserved C-terminal domain
  misc_feature (1)..(534): Xaa is any amino acid
MTPSTHIQVEVKCMIEKTNHEINDPQGGEDPLTGAVKNLFGVSYLFPYQRLVMTNILEAAQAAGIQVKWSGESEISSEEEPADSSPSSDREISGRQIVILPTGAGKSLCFQLPAMLIEGLTLVIYPILSLMADQQRRLSERGFSPVIIRGGQSKEERNEIWQKLESGKSKFIIANPEVLLTPQVKSKLEKIRVMHAVIDEAHCVSEWGESFRPSYLEIGSILRSLNPPLVTAFTATASSPVLEKIKKYIFGDLEARQIVGNPDRPNISYSAKGCINRNLAVRDLILQNSRPAIVFCSSRPGTEKLSRYLRDSFGEMGLSWSNEIRFYHAGLSREEKAGVEKWFINNPEAVLCATCAYGMGVDKADVRTVIHRDCAPSVEAYLQEAGRAGRDGSQSKAILLWGPDDKMSXRRTKTDADRARLSGLLDYARDITQCRRHALLRMLNYDSDGESPETQCCDVCEHEASATLREESGVMDFFRRNKRCYSINEACGKLAQSESHYWSEGEAKQTINHLLAVGRLKESKNPLFKHRIIC

SEQ ID NO: 65321 - DNA, 369 bp, Unknown
  Obtained from environmental sample
  misc_feature (1)..(369): n is a, c, g, or t
atgctttcagcggttatcccttccgaacatagctacccagccgtgcctctggcgagacaactggcgcaccagtggttcgtccaacccggtcctctcgtactagggtcaggccctctcaaatttcctgcgcccacagcagatagggaccaaactgtctcacgacgttttaaacccagctcacgtaccgctttaaatggcgaacagccatacccttgggacctgcttcagccccaggatgcgatgagccgacatcgaggtgccaaacctcctcgtcgatgtgaactcttggaggagattagcctgttatccccggcgtaccttttatccgttgagcgatggcccttccatgcgggaccaccggatcactaa

SEQ ID NO: 65322 - protein, 122 aa, Unknown
  Obtained from environmental sample
  misc_feature (1)..(122): Xaa is any amino acid
MLSAVIPSEHSYPAVPLARQLAHQWFVQPGPLVLGSGPLKFPAPTADRDQTVSRRFKPSSRTALNGEQPYPWDLLQPQDAMSRHRGAKPPRRCELLEEISLLSPAYLLSVERWPFHAGPPDH

SEQ ID NO: 65323 - DNA, 303 bp, Unknown
  Obtained from environmental sample
  misc_feature (1)..(303): n is a, c, g, or t
gtgccaaacctcctcgtcgatgtgaactcttggaggagattagcctgttatccccggcgtaccttttatccgttgagcgatggcccttccatgcgggaccaccggatcactaagacctactttcgtacctgcttgaggtgtccctctcgcagtcaagctctcttttgcctttacactccgcggctggtttccaatcagcctgagagaaccttcgcgcgcctccgttacttttttggaggcgaccgccccagtcaaactacccaccagacactgtctccggccgggataaccggcccgggttag

SEQ ID NO: 65324 - protein, 100 aa, Unknown
  Obtained from environmental sample
  misc_feature (1)..(100): Xaa is any amino acid
MPNLLVDVNSWRRLACYPRRTFYPLSDGPSMRDHRITKTYFRTCLRCPSRSQALFCLYTPRLVSNQPERTFARLRYFFGGDRPSQTTHQTLSPAGITGPG

SEQ ID NO: 65325 - DNA, 606 bp, Unknown
  Obtained from environmental sample
  misc_feature (1)..(606): n is a, c, g, or t
ttgccgagttccttctcccgggttgtctcaagcacctcgggcttctcgcccagcccacctgtgtcggtttggggtacggtcggcacaaaagctcccttagcgggttttcctggcgcgggcacgggcaactcgggctcgggccgaagccctcccccggtcagtagtctcaggcttatgccagggggatttgccgccctgacgccttgctccacttccgcggcatatccatcagccgctatgccccgacccgcgcgtcgccgcatcggtcgaacgcttccatgccggcgggggaatatttgcccccttcccatcggtcgcgcctctcggcttcgccttagggaccggctaaccccgggcggactaaccttccccgggaaccctcgggctatcggtgcgcgggctttccacccgcgttttcgcatactcatgccagcattctcattcccgatgtctccagcggcaatcgcctgccgccttcccaggcatacgggacgctctcctaccactccatatcgctatggaatccacggcttcggcggcgcgcttagccccgataattttgggcgcggcagggcgtcgaccagtgagctgttacgctttctttaa

SEQ ID NO: 65326 - protein, 201 aa, Unknown
  Obtained from environmental sample
  SIGNAL (1)...(23)
  misc_feature (1)..(201): Xaa is any amino acid
MPSSFSRVVSSTSGFSPSPPVSVWGTVGTKAPLAGFPGAGTGNSGSGRSPPPVSSLRLMPGGFAALTPCSTSAAYPSAAMPRPARRRIGRTLPCRRGNICPLPIGRASRLRLRDRLTPGGLTFPGNPRAIGARAFHPRFRILMPAFSFPMSPAAIACRLPRHTGRSPTTPYRYGIHGFGGALSPDNFGRGRASTSELLRFL

SEQ ID NO: 65327 - DNA, 714 bp, Unknown
  Obtained from environmental sample
  misc_feature (1)..(714): n is a, c, g, or t
atggacacaagaatacatttttttagtcagaataatgttatttcctcaaaaataaaacctgaattacttggtatcaggggccgtcaggcaaatgaattcgcggaattggaatttccgattttgccgggatttattctggatacggaaatagcatctgaaatagagccaaaggcaatcaagaaggatatcgcggaacttttgggaaaatgcgaaaaaattgtaggcaagaaatacggcgacattgagaatccaatgcttttaaaaattgttatttcttcaaaccttgcaattaccacatatcccacgcttcataatttcggtcttgttaaacctgttattgccggtttctcaaaatgggtaggccctgattttgccgcaagcgaggttttatttcttatcaacggaatgttgatgatacagggacggatcaaggaactggaaaataaaccgaaagagaaagatgaaattaccgcaagtttaaaacttatccggcgtatgctgggttttaagagaccttccaatgagcttcacagtgaagaagacaatacgccgcttccaaagaaaaaatcggctgttgaatacatggatgaatataccaaatatctcccgaaaggtttctttgatgatgcggaaagccagttgatgataaccattactgaaatatccaaaatgctcaaaatggatgaacaaaacgacaccgacaccgctatatga

SEQ ID NO: 65328 - protein, 237 aa, Unknown
  Obtained from environmental sample
  DOMAIN (3)...(234): Pyruvate phosphate dikinase, PEP/pyruvate binding domain
  misc_feature (1)..(237): Xaa is any amino acid
MDTRIHFFSQNNVISSKIKPELLGIRGRQANEFAELEFPILPGFILDTEIASEIEPKAIKKDIAELLGKCEKIVGKKYGDIENPMLLKIVISSNLAITTYPTLHNFGLVKPVIAGFSKWVGPDFAASEVLFLINGMLMIQGRIKELENKPKEKDEITASLKLIRRMLGFKRPSNELHSEEDNTPLPKKKSAVEYMDEYTKYLPKGFFDDAESQLMITITEISKMLKMDEQNDTDTAI

SEQ ID NO: 65329 - DNA, 1038 bp, Unknown
  Obtained from environmental sample
  misc_feature (1)..(1038): n is a, c, g, or t
atggcggataaatttaatcttgatgtgctttcaacccgcgatggttttaacactgcggtaagatatataaaaaatacagttggaatagcctccagcgccggggcggataaccttggcgatattctttttaaattagacgatgaagacatgacaagcgcgaagataggcttgcttttaaaaatgctgcttgttgacaaacttggttacaagaccgcatctacaaacctcagcgcggcggtaaacaacctttcgcaagtcgcgaaagagttttcaaagtggaacggaattgatcttgtagtcgcgtatcatcatcctgaacttgggctattaatagcgaatcccaaagttatcgaagaattggcggatttcggagaacttcgtaaaaatgagttgttggcaatttatgcaggttactacggaagcgaaacggatgaaaactgcaagaaggcggcagaacttgcccttaaggtatttgaaggctctaaggtaaaagttccgccggcgctggcaagaggcaaatatgccgcaaagaaagtcagcaagcccaaaaaagaagcgccgccgcctaaacctgtaaaagtaaaagcagccgcggcaaaaacccaggtcaaacgcgccgcgcctgtggtaactcaggcggctccgcaggtaaaacctagtggaggggctgtaaagatgactccgcggtacgctgtaattgttcaaaacgaacttttccataacgggaatgtggaagcgtggaagcggattatcgcaagctattcggctaaacacccggacttacaggtatatatttactatgaaaatgaaagaatattggacatcaattcgttgttcaaatggggcaaggtaaaacatggcagcgccatgaatttgccgtgccgggaaatgaaattcaagatgtcgcgaaattgcagcgttatctggcgcagggtgccagccatcaatttgaagcgtttctgcgcgggcctgttaatacagtgcttaatttattttaatttaaggaagaactatggacacaagaatacatttttttag

SEQ ID NO: 65330 - protein, 345 aa, Unknown
  Obtained from environmental sample
  misc_feature (1)..(345): Xaa is any amino acid
MADKFNLDVLSTRDGFNTAVRYIKNTVGIASSAGADNLGDILFKLDDEDMTSAKIGLLLKMLLVDKLGYKTASTNLSAAVNNLSQVAKEFSKWNGIDLVVAYHHPELGLLIANPKVIEELADFGELRKNELLAIYAGYYGSETDENCKKAAELALKVFEGSKVKVPPALARGKYAAKKVSKPKKEAPPPKPVKVKAAAAKTQVKRAAPVVTQAAPQVKPSGGAVKMTPRYAVIVQNELFHNGNVEAWKRIIASYSAKHPDLQVYIYYENERILDINSLFKWGKVKHGSAMNLPCREMKFKMSRNCSVIWRRVPAINLKRFCAGLLIQCLIYFNLRKNYGHKNTFF

SEQ ID NO: 65331 - DNA, 1005 bp, Unknown
  Obtained from environmental sample
  misc_feature (1)..(1005): n is a, c, g, or t
ttggaaaatatccgtaaccgcggctttaacaccgcgattaactcgcttacggcgattcttgacacttcaagaatgggatatcagtacattgaaaacctcaagaacggacgtgaagtagcgttgcgcgaatatgaagacaccgatatagccaatctgccggatgagcgctacagcattaagcttcgttattttgacaatgcccagctcattgaagaccgcaaggcttacgatgtaatgatcaagagtttcgagactgaaattcaacatctgtgggatgttctggaagttatctatcaggacaagaagagcgcctttgccattaccgattttgaagatttggccaagaaacaaaaacccagaattcgcaagacaattaaagaaaaatcaggcgaacccatgtacgaagatatcgcanaggtatgggacgaaatttcctttattaaagccgcggaaaccgaagttgaaaaatccaaccgcacctatatctgggaaaaagacagagtccgcacaagaattatcagaatgcgcgacaaaatgaagaaaatgtgggacttcctgtaccccgttgaaaggcgtgttatggaagaaaggcttggttgggtagaaaaagaatattacaggtttgactacatgattaacccctaccacctgcagcccggtctcttgctcgacgttgatattacatcaatcaagaggaagaaaatcactttggacgcaatggcgaacgtactcaacgagttcctccacggcgtatccaaaggcttctccgatgcggcgtttgcgtcattcagccgcagaaggtcgacagtacgcgaagacattaaccagtctttcagcgctcctgttgaagaagaagaagagagcgtcgcttcagccgctcccagggcgaaggcgattgccgctcccagagccgtagccaagtctgctcctaagaagaaaggcgttgtagattcaaaagcaaagaaaagaccgtcacgcggcgggtcccagctttcggaaatataa

SEQ ID NO: 65332 - protein, 334 aa, Unknown
  Obtained from environmental sample
  misc_feature (1)..(334): Xaa is any amino acid
MENIRNRGFNTAINSLTAILDTSRMGYQYIENLKNGREVALREYEDTDIANLPDERYSIKLRYFDNAQLIEDRKAYDVMIKSFETEIQHLWDVLEVIYQDKKSAFAITDFEDLAKKQKPRIRKTIKEKSGEPMYEDIAXVWDEISFIKAAETEVEKSNRTYIWEKDRVRTRIIRMRDKMKKMWDFLYPVERRVMEERLGWVEKEYYRFDYMINPYHLQPGLLLDVDITSIKRKKITLDAMANVLNEFLHGVSKGFSDAAFASFSRRRSTVREDINQSFSAPVEEEEESVASAAPRAKAIAAPRAVAKSAPKKKGVVDSKAKKRPSRGGSQLSEI

SEQ ID NO: 65333 - DNA, 585 bp, Unknown
  Obtained from environmental sample
  misc_feature (1)..(585): n is a, c, g, or t
atggaaaagcaaacaggggcgatggatttttctgatttggaaaaagtcatcgtgtcagtcaaagggcagaatgttatcattgacagcgacgtggcgagtatctacggcgtgttgacaanagaggtaaatcaagctgtaaagaacaatcccgaaaaatttccttccggttatattgttgaagccgacagagacgaactggtcaaaatttttgaccggttcaaaaacttgaaacactctacagcgcagccaaaggcttttacggaaaaaggtctgtatatgcttgccaccatattgagaagcccgcaagcaacggcggcgactattgctgtcatcgaggcttttacgaaactgcgtgaattgtcgcatacaatcgcaaaactggcggacgctaatgaaaagccggaacaacaatctctaatgcaaaaaagcggagatattttctctgaattggtagccgccgatatgcctgtatcgggaacagaaactacccttgagataaattttgcggtaatgaaattccggcacactgttaaaagggagaaaaaaaaggaaacggtacaaggcgctaaaaagccgagcaaatga

SEQ ID NO: 65334 - protein, 194 aa, Unknown
  Obtained from environmental sample
  misc_feature (1)..(194): Xaa is any amino acid
MEKQTGAMDFSDLEKVIVSVKGQNVIIDSDVASIYGVLTXEVNQAVKNNPEKFPSGYIVEADRDELVKIFDRFKNLKHSTAQPKAFTEKGLYMLATILRSPQATAATIAVIEAFTKLRELSHTIAKLADANEKPEQQSLMQKSGDIFSELVAADMPVSGTETTLEINFAVMKFRHTVKREKKKETVQGAKKPSK

SEQ ID NO: 65335 - DNA, 378 bp, Unknown
  Obtained from environmental sample
  misc_feature (1)..(378): n is a, c, g, or t
atggcgcctaacgaaggctggcaaagcaccaaagtcggcgcgggcccctgcccgatagaaaccagcgaaggctggctcctgttctaccacggagtattaacaagctgcaacggcttcgtttactctttcagcgccgccctgcttgatctggacaaaccctggaaagtaatcgcccgcccgcgtccgtacattatcaatccacgcgaaatttatgaactagcgggagatgttcccaacgtaacattccccgtcgcctctctcgtagacaaggacacaggcagagtagccatctactacggctgcgccgacaccgtaaccggtctggtcttcggcaaggtggatgaaatcattgattgggtaaagaaaaataaattttaa

SEQ ID NO: 65336 - protein, 125 aa, Unknown
  Obtained from environmental sample
  DOMAIN (1)...(122): Domain of unknown function (DUF377)
  misc_feature (1)..(125): Xaa is any amino acid
MAPNEGWQSTKVGAGPCPIETSEGWLLFYHGVLTSCNGFVYSFSAALLDLDKPWKVIARPRPYIINPREIYELAGDVPNVTFPVASLVDKDTGRVAIYYGCADTVTGLVFGKVDEIIDWVKKNKF

SEQ ID NO: 65337 - DNA, 687 bp, Unknown
  Obtained from environmental sample
  misc_feature (1)..(687): n is a, c, g, or t
atgttttctaacaaaaaccccagtccccgatccccagtccctagtccccaaggagtaaccatgagcaatatcattgtaaacggaaacagtctgccgaatatcccctgggaagacaggcccagcggcagcaatccggaaaaagaattgatgtggcggtattcgggcaacccgattataccaaggaatttaaccacccattcaaacagtattttcaacagcgcggtcgtcccgttcaagggtagttttgccggagtgttccgctgcgatgataccgctcgccacatggacatccacgcgggacgcagcaaagacggcatcaagtgggagatcgaggataagccgatacaatttatcaagaccgatcccgaagtgccggattccgattacaagtacgacccccgcgttatttttattgaagacaggtattacataatctggtgtaacggttatcacggccccaacctgggcattggctatacctatgattttgaaaaattttatcaaatggaaaacgctttaatgccctataaccgcaacggcgcgctcttcccgcgcaaaatcgggaaaaactacgccatgtacagccgccccagcgattcggggcatacgccgtttggcgacattttctattctgaaagccccgacctgatatactgggggaaagcaccgccatgtcatggcgcctaa

SEQ ID NO: 65338 - protein, 228 aa, Unknown
  Obtained from environmental sample
  DOMAIN (31)...(228): Domain of unknown function (DUF377)
  misc_feature (1)..(228): Xaa is any amino acid
MFSNKNPSPRSPVPSPQGVTMSNIIVNGNSLPNIPWEDRPSGSNPEKELMWRYSGNPIIPRNLTTHSNSIFNSAVVPFKGSFAGVFRCDDTARHMDIHAGRSKDGIKWEIEDKPIQFIKTDPEVPDSDYKYDPRVIFIEDRYYIIWCNGYHGPNLGIGYTYDFEKFYQMENALMPYNRNGALFPRKIGKNYAMYSRPSDSGHTPFGDIFYSESPDLIYWGKAPPCHGA

SEQ ID NO: 65339 - DNA, 675 bp, Unknown
  Obtained from environmental sample
  misc_feature (1)..(675): n is a, c, g, or t
gtgtgccaaaatatgaataaacacccatattcatgcctgttactgatattgctctgttcagcgccggtctttgcccagagcggcccctcggcggatgccgccaatactgccgtgaataccgcttacctgtggcggcaggcggttggcggggcggttatcgggcggcccaccgttcaggcgcagtcagtcgtaatggcgctggacgggggaaacatcaaggcgtattcttcatcgggcagaccgctgtggaatttcacggcgaaaggacgcttaagcccctatgttacccgctcgcgcgaaggcacttcgtatatttgcagaacaaacggtatttttatcgcggttaaccgggtggggagggaactctggcggattaatatcggcgaagcgcttgccgggccggtagttctgggctgggacggcagggtatttattcctattgttaaaaaaattttttgttataccgcgtcggggaatcttctctgggcgcgggagctttcaggcaagataagcgccggtccctggctggatcaggagggcggcattatgcttgccctggaaaccggcgacgcggtgcgttatgatccctacggcgcggcggtaatccggcgcctgcacgctgttccccggatactgctttccataaagcgtcctcgtgccaatctgtcttggtaa

SEQ ID NO: 65340 - protein, 224 aa, Unknown
  Obtained from environmental sample
  SIGNAL (1)...(25)
  misc_feature (1)..(224): Xaa is any amino acid
MCQNMNKHPYSCLLLILLCSAPVFAQSGPSADAANTAVNTAYLWRQAVGGAVIGRPTVQAQSVVMALDGGNIKAYSSSGRPLWNFTAKGRLSPYVTRSREGTSYICRTNGIFIAVNRVGRELWRINIGEALAGPVVLGWDGRVFIPIVKKIFCYTASGNLLWARELSGKISAGPWLDQEGGIMLALETGDAVRYDPYGAAVIRRLHAVPRILLSIKRPRANLSW

SEQ ID NO: 65341 - DNA, 843 bp, Unknown
  Obtained from environmental sample
  misc_feature (1)..(843): n is a, c, g, or t
gtggaatttgtcgccacaggctcaatggcgggaacgagctatcttcgcaaaacccactgccagttcggctgggattgggggccaatgctgcccgacgccggaatctggcgaagcatctttctggaaggctggagcgttgcccggttaagcgatgtgtacatcacgcaggatcattccgccgatggaaaggtaacgctgcaagccagaatacaggcggaaattgcggatcttaagcgcttttgggcggagaatcgacatttaagtcttttactgcgggttaagagtccgattaagaattcctcggaaaataacagtgtaattgaaatagcaaaaacaattacggatgttacagaagcatccgaaattagttgcgttatagaaaagccggagttgtggtggcctaatggccttgggacacagccgctttacagcgttgaagtagaactgcggaatgaggcttcatcaatactcgatacatggcagcgacgtattgggctcaggtcaatgacgatcagtaccaaagaagaccaatggggaagcgagtttgcgcttacggtaaatggcgttaaggtctttgctatgggagcggattacattccggaagattcggtatttcccaggattaacaagaaacggacgcggcgtcttcttgaggactgcgctaaagcgaactttaacagcatcagagtttggggcggcggctactatccggacgattatttttatgacgcctgcgacgagctgggtttggttatctggcaagactttatgtttgcttgcaatgtttatcagttaaccgatgattttgccgccatgtggccgaggaagtacggcagaacgtga

SEQ ID NO: 65342 - protein, 280 aa, Unknown
  Obtained from environmental sample
  misc_feature (1)..(280): Xaa is any amino acid
MEFVATGSMAGTSYLRKTHCQFGWDWGPMLPDAGIWRSIFLEGWSVARLSDVYITQDHSADGKVTLQARIQAEIADLKRFWAENRHLSLLLRVKSPIKNSSENNSVIEIAKTITDVTEASEISCVIEKPELWWPNGLGTQPLYSVEVELRNEASSILDTWQRRIGLRSMTISTKEDQWGSEFALTVNGVKVFAMGADYIPEDSVFPRINKKRTRRLLEDCAKANFNSIRVWGGGYYPDDYFYDACDELGLVIWQDFMFACNVYQLTDDFAAMWPRKYGRT

SEQ ID NO: 65343 - DNA, 1290 bp, Unknown
  Obtained from environmental sample
  misc_feature (1)..(1290): n is a, c, g, or t
gtggccgaggaagtacggcagaacgtgatccgcattcgccaccacgcctgccttggcctctggtgtggaaacaacgaaatggaaatgggctgggttgcctggcctggtgtaacaaaccatcacctggttcttaaagctgattacatcaaactatttgaatcaattattccggagatttggaaaaagacagacccccagaccttttactggccctcttcgccgtcttcaggcggaggctttgacgcgcccaacgatcctgaccgtggggatgtgcattactgggatgtatggcatgggctaaagcctttcagtgagtacaggaaatactttttccgttattgttctgagtttggttttgaatccctgccggatttagaaacaatacagacttatgcaaaaagcgaagacttaaatctcttttcgcctgttatggaagcccaccagcgcaacccgggcggaaacggaaaaattctttattatctttcggaaacctaccgttacccgaaagattttgcttcccttgtttacatctcacaggtgttgcagatggaaagcattcagtccggagtggatcactggaggcggaaccgcggtcgctgcatgggcgccatttactggcagttaaacgactgttggccggtgtgttcctgggcaagcatagattactatggtcgctggaaggcccttcattacggagcccggcgatttttcgcgcccctgcgggcgacgctgttcatagacgagactgtgcgggtttttgttcacaacgacacacttaaaccggcaaagggcaagattaagctgtaccttcgcgacaggagttttaacaccctggccgaagaaaccattgacgcggagctgccgccgatggccgcttcggaaatccttgtccgtgatttccgcggtctggtgaataccgtcgagcttgggcgttcttgctttgttacggcggagctttctattgaaaccttggtttctgaagaaaccgtattatttgttccgcccaagcatttttcttttcaaaagccggaatacagcgtagatgtagatgaaaaaagcgatcactttgctataattataaaagcgaataccttttgccgctttgtccgcgtaaagataccaggcgaagatccggtcttttcggataactattttgacattaccggcaaagaaggcgtggaaataaaggtatcaaaaggggaactaaaaaaagcttataccgcgcaaacattaaaggcattgcttaatgaaaactcaggatcaattgtcagcgtaggcgatagtttttaa

SEQ ID NO: 65344 - protein, 429 aa, Unknown
  Obtained from environmental sample
  misc_feature (1)..(429): Xaa is any amino acid
MAEEVRQNVIRIRHHACLGLWCGNNEMEMGWVAWPGVTNHHLVLKADYIKLFESIIPEIWKKTDPQTFYWPSSPSSGGGFDAPNDPDRGDVHYWDVWHGLKPFSEYRKYFFRYCSEFGFESLPDLETIQTYAKSEDLNLFSPVMEAHQRNPGGNGKILYYLSETYRYPKDFASLVYISQVLQMESIQSGVDHWRRNRGRCMGAIYWQLNDCWPVCSWASIDYYGRWKALHYGARRFFAPLRATLFIDETVRVFVHNDTLKPAKGKIKLYLRDRSFNTLAEETIDAELPPMAASEILVRDFRGLVNTVELGRSCFVTAELSIETLVSEETVLFVPPKHFSFQKPEYSVDVDEKSDHFAIIIKANTFCRFVRVKIPGEDPVFSDNYFDITGKEGVEIKVSKGELKKAYTAQTLKALLNENSGSIVSVGDSF

SEQ ID NO: 65345 - DNA, 1353 bp, Unknown
  Obtained from environmental sample
  misc_feature (1)..(1353): n is a, c, g, or t
atgggattcagggatgacttcatttggggtgttgcttcagcatcctaccaggtggaaggggccgcttacgaggacggcaagggtttaagcgtttgggatatgttctgcaaacagccggggcgcatcgttgacggttccagcggggatgtagcctgcgatcattatcacaggtacaaagaagacatagctataatgaaagagctgggagcgaaagcctaccgtttttccatctcctggccgagggtgatccccgacggtgatgganaggtaaacgaanagggtctggacttttacgagcggctcaccgactcgcttctggaagctggaatcgccccttgcgctaccctgtttcattgngattacccttacgatttgttcccgcagggcggctggatgaatcctgaaagcccaaagtggttccttaaatatacggaagcagtcgccaaaaggcttaaaggcaaactccccattgtatttacctttaacgaaccccagtgttttatagggatntcctgcgatcttacctggcatgctccgggaatacatttccccatttgggatactctttcaatggttcataatgtgctgatggctcacggcctttcggttcaggccctgcgttcgctctcgcctgaaacaaaaattggttacgcgccagcagtcggcgccaattatcctgtatcggacagcccggaagacattgaagcagcccgtaagtccatgtttgccataaataaggatgttcccagcctttgcgcgtccatttggagcgacccgatttttttgggaaaataccccgatgaattgtttgaaaagtacggccaatatatgccaaagataggcccggacgatatgaagatcatcgcacagcctcaggactttgtagggcagaacatttacaacggcgaccagatcagggcggacgggaaaggcggatatgaatctgcacccagagaaaccggttacgcttttaccgcagccaaatggccggtgactcccgaatcgctttactgggggccgcgtttctttgcggagcgttacaaggttcctatattcatcaccgaaaacggtctttcctgtaccgatgttgtctcgcttgatggcaaagtccacgaccccaatcgcattgattttcttcaccgctatctgcgctgccttaaaaaagccgctgacgatggcgtcgatatccggggctattttcattggtgcttcacggacaactttgagtggggaaaaggctatcacagaacgcttgggacttgtatattgcaactttacaactcaacagcggataataaaagattccggttattggtacagggatattataaatcaaacggcgcacaattgtaa

SEQ ID NO: 65346 - protein, 450 aa, Unknown
  Obtained from environmental sample
  DOMAIN (3)...(448): Glycosyl hydrolase family 1
  misc_feature (1)..(450): Xaa is any amino acid
MGFRDDFIWGVASASYQVEGAAYEDGKGLSVWDMFCKQPGRIVDGSSGDVACDHYHRYKEDIAIMKELGAKAYRFSISWPRVIPDGDGXVNEXGLDFYERLTDSLLEAGIAPCATLFHXDYPYDLFPQGGWMNPESPKWFLKYTEAVAKRLKGKLPIVFTFNEPQCFIGXSCDLTWHAPGIHFPIWDTLSMVHNVLMAHGLSVQALRSLSPETKIGYAPAVGANYPVSDSPEDIEAARKSMFAINKDVPSLCASIWSDPIFLGKYPDELFEKYGQYMPKIGPDDMKIIAQPQDFVGQNIYNGDQIRADGKGGYESAPRETGYAFTAAKWPVTPESLYWGPRFFAERYKVPIFITENGLSCTDVVSLDGKVHDPNRIDFLHRYLRCLKKAADDGVDIRGYFHWCFTDNFEWGKGYHRTLGTCILQLYNSTADNKRFRLLVQGYYKSNGAQL

SEQ ID NO: 65347 - DNA, 1116 bp, Unknown
  Obtained from environmental sample
  misc_feature (1)..(1116): n is a, c, g, or t
atgaagaaaattgtttttatcgcattggtccttttgatctgctgcggaacgtttttatttatcggatgcagaaaagaggattcaggaaaaatcaagttgactgtgctgaattatacggacttaaccgtagccaatgcagccaaggatcaaaaatggcagtgggatacttttttggaagcaaataaggacattgcccttgaaaaggaagatctttttaacgagcctttccacgagaagactgcggcctatgccgcatcgggaaatatacctgacgtgttgtttgtctggccggccggccgatcgacacctctgcatgagaaaagactgttgaaagacctgatgccttttttacgaaaagacaatctggtagataaatatctgccggtggccctggatcccaatatgcaggcttcgcgttatgtcgccatgattccccaagccctcaccgccacccacgcgatgtttgtaaacctggatgtgctcagggactgcgggcttcagccggcgactacctatgccgaactaaaatctcaggtaccggtactgagggccaaaggctatgacactctgatcatgccctgcaaagatacgtgggttatgcagagctgtatgttctccatgatcgccggacgtttttgcgggcaaggctgggatcagaagatcctttccggcaaggcgaaatttaccgacccggattttgtggccgctcttgatttcatcaggcagctatatgctgatggcgttcttccccagtcctgtcttggcatagactacggcgaaggccccggattgttttctacccgtaaatgcgcctactacgtggacggcgactggagggtaggagattttcttgaagatgaagatacaggccaggcgctgtttagcgctgcccagcaaaggaacatccggatcacggtatttcctgacatagccggcgcgaagatcaataaaacgaactcaaccgttttaggaactggttgggcaatgagcgcagatatcccagacggttcccccagggaagatgcagcatggcgcctggttaaatggctgtccggggcggaaattgaatcgcgtatgcttgccaccgggcggaatttcggctccttcgcgcactga

SEQ ID NO: 65348 - protein, 371 aa, Unknown
  Obtained from environmental sample
  SIGNAL (1)...(25)
  misc_feature (1)..(371): Xaa is any amino acid
MKKIVFIALVLLICCGTFLFIGCRKEDSGKIKLTVLNYTDLTVANAAKDQKWQWDTFLEANKDIALEKEDLFNEPFHEKTAAYAASGNIPDVLFVWPAGRSTPLHEKRLLKDLMPFLRKDNLVDKYLPVALDPNMQASRYVAMIPQALTATHAMFVNLDVLRDCGLQPATTYAELKSQVPVLRAKGYDTLIMPCKDTWVMQSCMFSMIAGRFCGQGWDQKILSGKAKFTDPDFVAALDFIRQLYADGVLPQSCLGIDYGEGPGLFSTRKCAYYVDGDWRVGDFLEDEDTGQALFSAAQQRNIRITVFPDIAGAKINKTNSTVLGTGWAMSADIPDGSPREDAAWRLVKWLSGAEIESRMLATGRNFGSFAH

SEQ ID NO: 65349 - DNA, 408 bp, Unknown
  Obtained from environmental sample
  misc_feature (1)..(408): n is a, c, g, or t
atgaaagatataaccactagagccgaagagaatctttcgcgggttattcttatagggcccgccttgctgatttacctttttgtaatggcttttcccttggtgttttccgttggcctaagcttaaccaattattccggcggcagggttttcggtaacattgatttttccttagtggggctaaagagttataaaactatattcatcgacaactatttttatttatccctcaagaacaatatctggatagtgctcgtatcagtttttgggcaaattcccctgggctttttccttgcttatttgctttcgcggcgaattgttaaaaaaacggattttttccaaactgtgatatacctgcctgccgtcatttcccctgttattattggcatccttttcaacaaatttttctaa

SEQ ID NO: 65350 - protein, 135 aa, Unknown
  Obtained from environmental sample
  misc_feature (1)..(135): Xaa is any amino acid
MKDITTRAEENLSRVILIGPALLIYLFVMAFPLVFSVGLSLTNYSGGRVFGNIDFSLVGLKSYKTIFIDNYFYLSLKNNIWIVLVSVFGQIPLGFFLAYLLSRRIVKKTDFFQTVIYLPAVISPVIIGILFNKFF

SEQ ID NO: 65351 - DNA, 492 bp, Unknown
  Obtained from environmental sample
  misc_feature (1)..(492): n is a, c, g, or t
ttggtgaacacagggcttgtctataaagtagatcggacaaacgaggcaaaactgccagtcgccgcgtatgctgaccgcgaggcttttaaaatatttatgcttgatacggggcttttgtccgccgcttcgggactggatataacaagtttttacgatcccgatccgctggtattcagggaattcaaaggcgccataaccgaacaattcgtgctgcaggaattaaaaaccctcggcgctatgcctatatgctactggagtcgggaggagggcaaaaacgaagttgacttcgtcgtgcaatggaggaatgaggtcgttcctattgaggtcaaatctggaatccgcacaaaatcgaaaagtcttgatatataccgcgagctataccgcccggtgcattccatccgcactagtcttaaaaacttcggcgtaagcggaggtctgtattccataccgctttatatgatagcgagtttttccgctatgctggcggattaa

SEQ ID NO: 65352 - protein, 163 aa, Unknown
  Obtained from environmental sample
  misc_feature (1)..(163): Xaa is any amino acid
MVNTGLVYKVDRTNEAKLPVAAYADREAFKIFMLDTGLLSAASGLDITSFYDPDPLVFREFKGAITEQFVLQELKTLGAMPICYWSREEGKNEVDFVVQWRNEVVPIEVKSGIRTKSKSLDIYRELYRPVHSIRTSLKNFGVSGGLYSIPLYMIASFSAMLAD

SEQ ID NO: 65353 - DNA, 1650 bp, Unknown
  Obtained from environmental sample
  misc_feature (1)..(1650): n is a, c, g, or t
ttgtttacgatattacatcaaagcccccggcaacggtggaatgggagtaggattatgactaaatatgtttttgttacaggcggcgtcgtatcgggactgggcaaggggatcacagccgcgtcattgggcaggctgctcaaacagcggggcttaaaagtcgcggcgcagaaactcgatccctatatgaacgtcgatccgggaaccatgagcccattccagcacggcgaggtttttgttaccgacgacggcgcggagacagatcttgacctggggcattacgagcgttttatagatgaaaatttaacgaagctcagcaacctgacatccggccaggtgtaccggaacgtgcttgaccgcgaacgcgcgggcggctatcttggcagcaccgtgcaggttattccccatgtcaccggtgaaataaaaagttttatttacgccggcgcggaaaaaagccgcgccgatgttttgattaccgagataggcggcacgaccggcgacattgaaagccagccttttttggaggctatccggcagatctcccttgaaaaaggccgcgagaactgcctgtttatccatgtgacattgatcccctatctgaaagcgtcgggcgaacacaagtcaaagcccacacagcactcggtcaaggaactgcgcgccattggtatttcacctaacatcatcatcgcgcgggcggacgaaccgataagcgacggtattacggataaaatatcgcttttttgcaatgtgaagcccgattgcgtcatagagaacattaccattccattcctttatgaagcgcctcttttgctgcatcaaaacggcctggacaaagtcgtctgccgcgaacttggacttaacgttcccgagcctgatctgaatgagtggagcgtcatggtaaaaaaaatcggggagagaaaacgggaagtcaatatcgcgattgtcgggaaatatgttcagttacacgacgcgtatctttccattattgaaagcctgaaccacgcgggcattgaagccggaatgggagtaaacatcctatggattgacagcgaggacgtaacaaacgaaagcgcgggcgaactgttacgcgaaactgacggcatgattattcccggcggcttcggcgaaaggggaattgagggaaaaatcaccgcctgccgttacgcgagggaaaacgatataccgtatctgggaatttgccttggaatgcagattgccgtaattgaatttgcgcgtaacgtttgcgggctgaagcacgcccattcaagtgaatttgacgaagtttctccccatcgggtcattgacctgatgcccgatcaggccggcatggtcggctcgggcggcaccatgcggctgggcgcgtatccgtgtaaaatcacgcagggaacgctgctgcacaggctgtacaacgcggaagaaataagcgaaagacaccgccaccgctttgaattcaacaatgactaccgcgaggctctgactggcaaagggatggttatctgtggcgtgtcgcctaacggcagccttgttgaggcgattgagcttccggatcgccgttttttcaccggggttcagtttcatcccgagttcaaaagccgccccaataaaccgcatccgctgtttttgggcctggtaaaagcggcgattaaaagttaa

SEQ ID NO: 65354 - protein, 549 aa, Unknown
  Obtained from environmental sample
  DOMAIN (311)...(527): Peptidase C26
  misc_feature (1)..(549): Xaa is any amino acid
MFTILHQSPRQRWNGSRIMTKYVFVTGGVVSGLGKGITAASLGRLLKQRGLKVAAQKLDPYMNVDPGTMSPFQHGEVFVTDDGAETDLDLGHYERFIDENLTKLSNLTSGQVYRNVLDRERAGGYLGSTVQVIPHVTGEIKSFIYAGAEKSRADVLITEIGGTTGDIESQPFLEAIRQISLEKGRENCLFIHVTLIPYLKASGEHKSKPTQHSVKELRAIGISPNIIIARADEPISDGITDKISLFCNVKPDCVIENITIPFLYEAPLLLHQNGLDKVVCRELGLNVPEPDLNEWSVMVKKIGERKREVNIAIVGKYVQLHDAYLSIIESLNHAGIEAGMGVNILWIDSEDVTNESAGELLRETDGMIIPGGFGERGIEGKITACRYARENDIPYLGICLGMQIAVIEFARNVCGLKHAHSSEFDEVSPHRVIDLMPDQAGMVGSGGTMRLGAYPCKITQGTLLHRLYNAEEISERHRHRFEFNNDYREALTGKGMVICGVSPNGSLVEAIELPDRRFFTGVQFHPEFKSRPNKPHPLFLGLVKAAIKS

SEQ ID NO: 65355 - DNA, 1065 bp, Unknown
  Obtained from environmental sample
  misc_feature (1)..(1065): n is a, c, g, or t
ttggccgagacacccaaaggcgggcgcgaaataatcaaacgatttttgtatgatgtttgcggcgcgtcaggcgattataaactcggtaattatataaatacgcaaattaagcaaataagggaaaaggtcggcgataatcatgtcctgctcgccctgtcgggcggagttgattcgtccgtatgcgcgggtcttttatcacaagcgataccggggcagcttacctgcatctttgtcgatcacggccttatgcgcttaaacgaaggcgatgaaatagaacgcgcattttcaaaacgaaatctcaaattcatccgcgtaaacgcgcaaaaacgcttccttgccaaattggaaggcgtaaccgagcctgagaaaaagcgcaagataatcggcgaggagtttatccgcgtgtttgaggaagaatccgcaaagttaggcaacattccatttttggtgcagggaacgatctaccccgatgttgtcgaatcaggaggggaacctcgccctacgggctcggctgagtatccgggcggcaagcacggcgctgttatcaagagccatcacaacgtaggcgggcttccggaaaaactcaagtttacggggatcgttgagccattgtcgcggcttttcaaggatgaggtgcgcgagctgggcagaaagcttaaacttccggcatcgcttgttaaccgccagccctttccggggccgggacttgccatccgcgtcatgggcgaaataacggaggaaaagctggatattttacgccgcgccgacgcaatcctccgtgaggaactggatgccatgaaacgcagacccaatcaatacttctgcgtcatgaccggcacacgttccgtgggcgttaaaggcgacgacaggacttatgattttgtaatagccgtcagagccgtaataactgacgattttatgacctgtgaatacgccccgctgccgcacaaattgttaaagccggatatcctcacggatcacaagcgagataccgcaggcgagccgggttgtttacgatattacatcaaagcccccggcaacggtggaatgggagtaggattatga

SEQ ID NO: 65356 - protein, 354 aa, Unknown
  Obtained from environmental sample
  DOMAIN (260)...(340): GMP synthase C terminal domain
  misc_feature (1)..(354): Xaa is any amino acid
MAETPKGGREIIKRFLYDVCGASGDYKLGNYINTQIKQIREKVGDNHVLLALSGGVDSSVCAGLLSQAIPGQLTCIFVDHGLMRLNEGDEIERAFSKRNLKFIRVNAQKRFLAKLEGVTEPEKKRKIIGEEFIRVFEEESAKLGNIPFLVQGTIYPDVVESGGEPRPTGSAEYPGGKHGAVIKSHHNVGGLPEKLKFTGIVEPLSRLFKDEVRELGRKLKLPASLVNRQPFPGPGLAIRVMGEITEEKLDILRRADAILREELDAMKRRPNQYFCVMTGTRSVGVKGDDRTYDFVIAVRAVITDDFMTCEYAPLPHKLLKPDILTDHKRDTAGEPGCLRYYIKAPGNGGMGVGL

SEQ ID NO: 65357 - DNA, 1662 bp, Unknown
  Obtained from environmental sample
  misc_feature (1)..(1662): n is a, c, g, or t
ttggcgcgaattcaggttctgattgcctcaagcgtggaagacgtgtatggcagaacattgggcaagccatggtcgggcgacgttgtagttcccgatgagccgccgcccagaggcgaggcgaactttctggattacggtcatgccatgctggaagcccaatttccgccgcgctttctttttgagtataaaaacattaccgaaaattcctcgtacctgctttttaaaaccaacaatccctggaatgaatatcttgatgatcctacccgcgtaaatctgaccccgggtaaagtgaataataattattttgaagaaattgatttatcgccgtatctcaatgaacagggcaggggctttgtctctttccgggcgaatctgcagcttttgaccagtgagagacagcaggatgacacataccgtaccggtactagggaaagaaataatgaattgaacatacaggttaccgatctggggctgacggtgcgttacggctttaataaggctacggtactggttaccagcctttcaaccggcaaacccgtggaaaatgccaaagttacgctgcttccccccagccgggtaaaaggcggggaagatgtttccactattatgtcaagtcttggcgatgccaagaccgataaaaacggcctcgcggtagtgtatatcagcgcttcggcgctgcggtacaatacggaaaacaaccaaaattggaggagatacgatacgccttttgtcctggctgaaaaagacgaagacagggccatatttgatccctattcgcataacaactggcgttttggcgttgagtatgatataccccagcgcgccgaggaaataacgtccattgcctttatgttttccgaccggggcctttacaagcccggcgaggttcttacttttcggggtgttgaccgttccaaagtgctgggaatgtacaccatataccggggagattataccgttgtctttgaaggagactataacagtccggttgctattggtacggtatcaggcacaaccaccgaatcaggcagtttttacggcagcatcaatattcccgacgatctcgctccgggttcctaccggctggtatacaggcgcaatgacggcataagcaaacgggttatcgccaatgcgcctgtaacggtagcttactttgaacggctgaaatttcaggcatccctttccgcgccggcggcagcaatcataagcggcgacgacatcaacttaaaattgcgggcaagttacctttcggggggcagtctggcgggcgcttcatgggaaggcgcatggtacgatgaaatgaccacttttcagccaaagttggttgaaaccaaaggctacgtattcgggccccgccgcgtatgggacagcaagcgttacatcgcttccgaaaacggggttctcggcgggcagggaaccgcgactctcagccagaaaaccggcggcggcaaaataaccggcgctccctatctgtatcaggcggaagccagagtaaccgacatcagcaatcagatggtcagcgcttaccgctcggtgatggtgcatcccgcaagtttttacatcggcctgtaccagggagccggcggctttgcgcggacaggacaggaattatcctacgaatacattaccgttaataccgcgggcggaaaaaacggcgggtaa

SEQ ID NO: 65358 - protein, 553 aa, Unknown
  Obtained from environmental sample
  DOMAIN (150)...(454): Alpha-2-macroglobulin family N-terminal region
  misc_feature (1)..(553): Xaa is any amino acid
MARIQVLIASSVEDVYGRTLGKPWSGDVVVPDEPPPRGEANFLDYGHAMLEAQFPPRFLFEYKNITENSSYLLFKTNNPWNEYLDDPTRVNLTPGKVNNNYFEEIDLSPYLNEQGRGFVSFRANLQLLTSERQQDDTYRTGTRERNNELNIQVTDLGLTVRYGFNKATVLVTSLSTGKPVENAKVTLLPPSRVKGGEDVSTIMSSLGDAKTDKNGLAVVYISASALRYNTENNQNWRRYDTPFVLAEKDEDRAIFDPYSHNNWRFGVEYDIPQRAEEITSIAFMFSDRGLYKPGEVLTFRGVDRSKVLGMYTIYRGDYTVVFEGDYNSPVAIGTVSGTTTESGSFYGSINIPDDLAPGSYRLVYRRNDGISKRVIANAPVTVAYFERLKFQASLSAPAAAIISGDDINLKLRASYLSGGSLAGASWEGAWYDEMTTFQPKLVETKGYVFGPRRVWDSKRYIASENGVLGGQGTATLSQKTGGGKITGAPYLYQAEARVTDISNQMVSAYRSVMVHPASFYIGLYQGAGGFARTGQELSYEYITVNTAGGKNGG

SEQ ID NO: 65359 - DNA, 1545 bp, Unknown
  Obtained from environmental sample
  misc_feature (1)..(1545): n is a, c, g, or t
atggttattgaagacggtttgtctgatgaagcatattttgcgaagttgtctgaaattaaaaacaagggtagaaatattattaccgccccttattttaaagatcaatctcagaatgaagttgggttgtctaattttttctatgtaaaattgaaatcgttaaacgataccattttgcttaaacaagaagcccaaaaggaacgtgctgtcattgcgtatcaaaatcaatttatgcctatgtggttcgttgttagtgttacggcaaactcaaattataacgccatggaattagcaaatcgtttcttcgagtctgggttatttcaatatgctgagcctgatttaatggttgatgcgaaaatagactgtgctaatgacacagattttggtaaacaatggggtttgaaaaatgtcggacaacacggaggtacaagcggaattgatattaaggcttgtgatgcgtggcaagtatcaacaggaagtggcgttgtcgttgcggttctcgatcatggaattcaactaaatcatcctgatttagcacataatatttatccgttaagttatgacagcgaattaaacagatcaccacaagatttgttatatggtaatcatggtaccaaatgcgccggaatcatcggtgcggtaaaaaacaatgcaaggggtgttactggagtggcgccggattgcaaattaatgtctataagcaattctttgataggaaatccaaggtcagagataaaactcgcggatggaattaattgggcttggataaatggtgcggatattattagtaattcatggcattcaggtgttcataatgtaatagacgatgctattaataacgcggtaacactcggtagggtgagaaatggggtaagtttgggttgtgtggttgtttttgcttctggtaataaaaatgcgtcaacgattgaatacccaggaaatttgtcgaatgttatagcggttggtgcgatgtcacaatgtggagaaaggaagtcattatcttcttcttgtgataatgtaaaaacttggggaagtaattatggaaatgcactgaatgttgttgctccaggggtgtttatccctacaacgtctgcatcttcaccgtcaactagtacgtatatttatgacttcgatggcacatcatcggcggctcctcatgtagctggaatcgcggctttgattttatcggttaatccatacctaacacgagaacaagtaacgaacattatagaatccactgcacgaaaggtaggggtatatacatattctagtacatccggtcatccgaatggcccatggaacaatgaaatgggttatgggttagtagacgcgtacgccgcagttaaagctgcatgcacaacttctgtcaatctagtcaatcaaaccataaccacagccaccaacattaatagctgcggaaatgttagtatccaaaatacgacaataacttctacaggagcattaaatgtacgaactaacggtacaattaccattaaccagccctttaatgccgttgcaggatcgtcattgttattacaggttccgtaa

SEQ ID NO: 65360 - protein, 514 aa, Unknown
  Obtained from environmental sample
  DOMAIN (142)...(428): Subtilase family
  misc_feature (1)..(514): Xaa is any amino acid
MVIEDGLSDEAYFAKLSEIKNKGRNIITAPYFKDQSQNEVGLSNFFYVKLKSLNDTILLKQEAQKERAVIAYQNQFMPMWFVVSVTANSNYNAMELANRFFESGLFQYAEPDLMVDAKIDCANDTDFGKQWGLKNVGQHGGTSGIDIKACDAWQVSTGSGVVVAVLDHGIQLNHPDLAHNIYPLSYDSELNRSPQDLLYGNHGTKCAGIIGAVKNNARGVTGVAPDCKLMSISNSLIGNPRSEIKLADGINWAWINGADIISNSWHSGVHNVIDDAINNAVTLGRVRNGVSLGCVVVFASGNKNASTIEYPGNLSNVIAVGAMSQCGERKSLSSSCDNVKTWGSNYGNALNVVAPGVFIPTTSASSPSTSTYIYDFDGTSSAAPHVAGIAALILSVNPYLTREQVTNIIESTARKVGVYTYSSTSGHPNGPWNNEMGYGLVDAYAAVKAACTTSVNLVNQTITTATNINSCGNVSIQNTTITSTGALNVRTNGTITINQPFNAVAGSSLLLQVP

SEQ ID NO: 65361 - DNA, 1206 bp, Unknown
  Obtained from environmental sample
  misc_feature (1)..(1206): n is a, c, g, or t
gtgaacagtctgtcaatacgtaaaatcattatcacggtagcgttcttaacgttaacgacccatgccgccaccccgccattattcagcggtggcgatggttccgcatcaagcccgtatttaattgcctccgcatcagacctcgcggcgttggcgtctttggtcaacgctcctgcgaccaacgtctctttcgccggcaaacattataggcttgcgtcagacatagacctgtccggctatgccaattggacgcctataggtattggccttatccgttccaacgcgggagacgaccgcctcattttcaggggtgttttcgacggcgccgggaagtcggttgccaacctgaaaatcacgagcgcggtacgtattgcggattcttttcagggttcgggtcttttcggcgttgtagacggtggaacggttaagaacgtcaggcttagcagtgtgaatatcggcatcaaggccggacgggcgggcggcgttgccggcgcggcggttgccggcggtgttattaaggattgttatgtgctcggcagtatcggcggttccggtagcgtgggcggtattgtcggccacattgacgatagtagcgctgtggttaattgctatgtggtcggcagtgtaagcggaacggatagggtcggcggcgttgccgggtacgtttacaatagtgttgttaccggtagctatgcggtaggcaaagtgaacgagggcgatagcgccgtcagtacggcggcgggtcatgtttggaacagcgtcattgcggagagcggtgtttttgaccccgaaactgatgtagaagcgatgcttaaagtcgtgccggaacatatacttgacggtgtggttgcagatgtgaaaaacgctccgcctatagtagctgttactattgaattagcggacagaattacagccggacctaatccggtcaataggttgttgggatcggttaatttctttaggaatggtacgaaacttaaaaaaggcggactatcggtttacaactcacaaggaaaagtcaccaagagaatctctacagccgatatgtccataggcgtgaatgataaaagttggcgtcaagtcggtacgtgggatttgaaagacagaaaagggcgtatagtctctgagggtgcgtatgcggtgaaaggtgtgctgtttacgatggacggtaagaaggaaaagatattaatacctctgtgggtaaagtaa

SEQ ID NO: 65362 - protein, 401 aa, Unknown
  Obtained from environmental sample
  SIGNAL (1)...(22)
  misc_feature (1)..(401): Xaa is any amino acid
MNSLSIRKIIITVAFLTLTTHAATPPLFSGGDGSASSPYLIASASDLAALASLVNAPATNVSFAGKHYRLASDIDLSGYANWTPIGIGLIRSNAGDDRLIFRGVFDGAGKSVANLKITSAVRIADSFQGSGLFGVVDGGTVKNVRLSSVNIGIKAGRAGGVAGAAVAGGVIKDCYVLGSIGGSGSVGGIVGHIDDSSAVVNCYVVGSVSGTDRVGGVAGYVYNSVVTGSYAVGKVNEGDSAVSTAAGHVWNSVIAESGVFDPETDVEAMLKVVPEHILDGVVADVKNAPPIVAVTIELADRITAGPNPVNRLLGSVNFFRNGTKLKKGGLSVYNSQGKVTKRISTADMSIGVNDKSWRQVGTWDLKDRKGRIVSEGAYAVKGVLFTMDGKKEKILIPLWVK

SEQ ID NO: 65363 - DNA, 1521 bp, Unknown
  Obtained from environmental sample
  misc_feature (1)..(1521): n is a, c, g, or t
gtgacagactggtttgccgacgagacaaatcaggcgaaaaagaacgccgcccatactgaaatgctggattcaaccggtatgctgcagagcccgctcctgtatatcggcatccaaaaatcattgaacgagtatgcggtaaaagaagggacgcggcttgaggatttcgctccccacggctggctcgacccgtcagtcgcccataacgaatggtattacaactgcgtcaattccccgaacgactataccttgaatatagacgttgacaaggtcacccgcacgcgccttctctggatcaactacaaggtcgcggagggcgggaacgtattgggcgtgttctgcgccggcctcccctttgaaaaggtgcttcacgccctgttcgacaggtatgacaccagcaatgtaaaggggtatgttatcgacaggaacggcgttgtccaaatggacagcaccctgtctgttttctccgaagaagaccataaaaacattccggaggcggcttccgatcccgcgtttgcctccgcaatagaatcatacttaaaaaatattgaaggctacttcgtatcgaatgaaatacttcagctcatcaaacttaagaaagggccgtatcaatacgcgtctattgagccaatcgtcggttcccactggtcggttgttactttttttaacaataaatcgctgttcagtatatggcggcttcttcctctgctgattttcatgatgtccgcttttgtgctgtattcgctgatagaaaacatatctatcagccatattgtaatcgcgccgttaaaccgccttacaagaagtatttcacagatcggaggggaacagggggttatcttcggccatgaccgaggcgacgaactcggcgaacttgcgcggactatacaggaaatgcgggtaaaacttcacgaggccgacgagagagcaaggctcatgctggacgcgacacccctttgctgcaacctctgggataaagattttaatatcattgcgtgtaacgaggcagctgttaaactcttcaggctgaaggataaacaggaagttctgaaaaggtttttcgaattatcgccggtacgccagcccaacgaacagctttcttccgttctgtcggcgggaaacctgaaaaaagcgtttgaggaaggcagatgcgtttttgaatggatgcaccaactgccggacggtacgccgatcccgacggaaatcacgctggtacggaccggctatggcggcgattatgtcgtggccgggtacacgcgggacctgcgcgaacataacatgatgataaaggagcttgagaagcgggacaggctgcttaatacggtgaaccgcgccgccgccatcctgctccagtcaggaattgacgattttgcggacgccttattgcgcagcatgggcatgatgggcgcggctgtcggcatcgagcgcgtatacatctggaagaatcatatttttaacggcgagcattgttgtactcagttgtatgaatggtcgcagggcgtcaactcgctcgtgccgatctga

SEQ ID NO: 65364 - protein, 506 aa, Unknown
  Obtained from environmental sample
  DOMAIN (236)...(304): HAMP domain
  misc_feature (1)..(506): Xaa is any amino acid
MTDWFADETNQAKKNAAHTEMLDSTGMLQSPLLYIGIQKSLNEYAVKEGTRLEDFAPHGWLDPSVAHNEWYYNCVNSPNDYTLNIDVDKVTRTRLLWINYKVAEGGNVLGVFCAGLPFEKVLHALFDRYDTSNVKGYVIDRNGVVQMDSTLSVFSEEDHKNIPEAASDPAFASAIESYLKNIEGYFVSNEILQLIKLKKGPYQYASIEPIVGSHWSVVTFFNNKSLFSIWRLLPLLIFMMSAFVLYSLIENISISHIVIAPLNRLTRSISQIGGEQGVIFGHDRGDELGELARTIQEMRVKLHEADERARLMLDATPLCCNLWDKDFNIIACNEAAVKLFRLKDKQEVLKRFFELSPVRQPNEQLSSVLSAGNLKKAFEEGRCVFEWMHQLPDGTPIPTEITLVRTGYGGDYVVAGYTRDLREHNMMIKELEKRDRLLNTVNRAAAILLQSGIDDFADALLRSMGMMGAAVGIERVYIWKNHIFNGEHCCTQLYEWSQGVNSLVPI

SEQ ID NO: 65365 - DNA, 462 bp, Unknown
  Obtained from environmental sample
  misc_feature (1)..(462): n is a, c, g, or t
atgaggaatgaggaatacaatgaattttcacttttaaggctggttccggatgtgttgcgggcacgggaattcaggctttatacaaaagcagggcggctggttgatctgtggcagaacaacggggcggcggtactggggcatacccctccttccctgatgagggaaataaaaaattccgcaagccggggactgtacgcgccttttccccattttctggaagagcgttaccgtaaggcgctgtcccgcgtttttcctgacagggttttccgcctgtatgccgcgccgccgccgggactggaaacacttgccgccaacggaagcgccgttctctggcggccttttgccgatcccgcgtcgccacttggggttccggaaaatcccccggattttgatccccgttgttcccggcatacagacatggcgcgacggcttgcccctgggtctctgcgttctcgcggttaa

SEQ ID NO: 65366 - protein, 153 aa, Unknown
  Obtained from environmental sample
  misc_feature (1)..(153): Xaa is any amino acid
MRNEEYNEFSLLRLVPDVLRAREFRLYTKAGRLVDLWQNNGAAVLGHTPPSLMREIKNSASRGLYAPFPHFLEERYRKALSRVFPDRVFRLYAAPPPGLETLAANGSAVLWRPFADPASPLGVPENPPDFDPRCSRHTDMARRLAPGSLRSRG

SEQ ID NO: 65367 - DNA, 507 bp, Unknown
  Obtained from environmental sample
  misc_feature (1)..(507): n is a, c, g, or t
gtgataatgaccgggctggagcatggaatctttcccagggaagacaaaaaaagcgaggaacttgaagaggaacgccgtttgttttatgtgggggctacgcgcgctatggacgaactgtatttaacttcatgcttcatgcgacgcatgttcggcagggtaataccgcttcaaccatcattgttcttaagggagattgacaaaaaatgcctgaagattatcggaaacgcgccatacggtttcaccgcgccgtcgtcaggaatgggcgcagcaaaaggaaacagcggctggatggtttcaggtttcacggagaacgaagcggaaaaagcctcaggctggcgcagggggcagcggcttttccatgacgattacggttacggctctgttgtggacgtgcgtgacagcgaagacgggccagtggtgcgggtcatgtttgaaacagggaaggaacttcggtttttaagcgagaaacagggagcggcaatcgttaagattgggaatgaggaatga

SEQ ID NO: 65368 - protein, 168 aa, Unknown
  Obtained from environmental sample
  misc_feature (1)..(168): Xaa is any amino acid
MIMTGLEHGIFPREDKKSEELEEERRLFYVGATRAMDELYLTSCFMRRMFGRVIPLQPSLFLREIDKKCLKIIGNAPYGFTAPSSGMGAAKGNSGWMVSGFTENEAEKASGWRRGQRLFHDDYGYGSVVDVRDSEDGPVVRVMFETGKELRFLSEKQGAAIVKIGNEE

SEQ ID NO: 65369 - DNA, 309 bp, Unknown
  Obtained from environmental sample
  misc_feature (1)..(309): n is a, c, g, or t
atgcctggttttgtgaaagggctgaaaaccgggtttttcccggcggaacaacaatatggtcaagcctcgcggcggattagtaccggttggctgaacgcgttaccgcgcttacacctccggcctatcaaccaggtagtctccctggcgccttcgggggggttaaacccccagggatggctcatcttgaggcaggcttcccgcttagatgccttcagcggttatcctttccggacatggctacccggcgcttgcacttggcagtacaaccggcacaccagcggtccgtccgtctcggtcctctcgtactaa

SEQ ID NO: 65370 - protein, 102 aa, Unknown
  Obtained from environmental sample
  misc_feature (1)..(102): Xaa is any amino acid
MPGFVKGLKTGFFPAEQQYGQASRRISTGWLNALPRLHLRPINQVVSLAPSGGLNPQGWLILRQASRLDAFSGYPFRTWLPGACTWQYNRHTSGPSVSVLSY

SEQ ID NO: 65371 - DNA, 456 bp, Unknown
  Obtained from environmental sample
  misc_feature (1)..(456): n is a, c, g, or t
ttggctgaacgcgttaccgcgcttacacctccggcctatcaaccaggtagtctccctggcgccttcgggggggttaaacccccagggatggctcatcttgaggcaggcttcccgcttagatgccttcagcggttatcctttccggacatggctacccggcgcttgcacttggcagtacaaccggcacaccagcggtccgtccgtctcggtcctctcgtactaaaaacagctcctctcaaccatccaacgcccatggcagatagggaccgaactgtctcgcgacgttctgaacccagctcacgtaccgctttaattggcgaacagccaaacccttgggacctgcttcagccccaggatgcgatgagccgacatcgaggtgccaaaccttcccgtcgatgtggactcttggggaagatcagcctgttatccccggagtaccttttatccgttaagtga

SEQ ID NO: 65372 - protein, 151 aa, Unknown
  Obtained from environmental sample
  misc_feature (1)..(151): Xaa is any amino acid
MAERVTALTPPAYQPGSLPGAFGGVKPPGMAHLEAGFPLRCLQRLSFPDMATRRLHLAVQPAHQRSVRLGPLVLKTAPLNHPTPMADRDRTVSRRSEPSSRTALIGEQPNPWDLLQPQDAMSRHRGAKPSRRCGLLGKISLLSPEYLLSVK

SEQ ID NO: 65373 - DNA, 303 bp, Unknown
  Obtained from environmental sample
  misc_feature (1)..(303): n is a, c, g, or t
gtgccaaaccttcccgtcgatgtggactcttggggaagatcagcctgttatccccggagtaccttttatccgttaagtgacggcgcttccactcgctgccgccagatcactaagacccgctttcgcgcctgcccggcctgtcggcctcgcagtcaggcccccttgtgcctttacactcatacgccgatttccaaccggcgcgaggggaccatcgcgcgcctccgttactgtttgggaggcgaccgccccagtcaaactgcccgcctaccgctgtccccgcaccggtttcacggcgcgggttag

SEQ ID NO: 65374 - protein, 100 aa, Unknown
  Obtained from environmental sample
  misc_feature (1)..(100): Xaa is any amino acid
MPNLPVDVDSWGRSACYPRSTFYPLSDGASTRCRQITKTRFRACPACRPRSQAPLCLYTHTPISNRREGTIARLRYCLGGDRPSQTARLPLSPHRFHGAG

SEQ ID NO: 65375 - DNA, 321 bp, Unknown
  Obtained from environmental sample
  misc_feature (1)..(321): n is a, c, g, or t
gtgacggcgcttccactcgctgccgccagatcactaagacccgctttcgcgcctgcccggcctgtcggcctcgcagtcaggcccccttgtgcctttacactcatacgccgatttccaaccggcgcgaggggaccatcgcgcgcctccgttactgtttgggaggcgaccgccccagtcaaactgcccgcctaccgctgtccccgcaccggtttcacggcgcgggttagaagcctagccaggaaagggtggtatttcaccgtcggctccgcgcaggctgacgcccacgcctcacagcctcccacctatcctacacatgcctag

SEQ ID NO: 65376 - protein, 106 aa, Unknown
  Obtained from environmental sample
  misc_feature (1)..(106): Xaa is any amino acid
MTALPLAAARSLRPAFAPARPVGLAVRPPCAFTLIRRFPTGARGPSRASVTVWEATAPVKLPAYRCPRTGFTARVRSLARKGWYFTVGSAQADAHASQPPTYPTHA

SEQ ID NO: 65377 - DNA, 399 bp, Unknown
  Obtained from environmental sample
  misc_feature (1)..(399): n is a, c, g, or t
atgaaccagtttcccatcggctacggctttcgccctcgccttaggggccgacttaccctgggaagattgcctttacccaggaaacctcgggctttcggcggagggggatcccacccctcttttcgtctacttatacctgcattctctcttccgctccctccagccaaccttacagtcagccttcgtcggccagcggaatgctcccctaccaaccgcatattgctatgcgattccgcggcttcggttgcatgcttagccccgttacattatctgcgcgccgtgactcgaccagtgagctgttacgcactctttcaaggaatggctgcttctaagccaacctcctggctgtcctcgccagggcacatcatttcacactcagcatgctatccgggaccttag

SEQ ID NO: 65378 - protein, 132 aa, Unknown
  Obtained from environmental sample
  misc_feature (1)..(132): Xaa is any amino acid
MNQFPIGYGFRPRLRGRLTLGRLPLPRKPRAFGGGGSHPSFRLLIPAFSLPLPPANLTVSLRRPAECSPTNRILLCDSAASVACLAPLHYLRAVTRPVSCYALFQGMAASKPTSWLSSPGHIISHSACYPGP

SEQ ID NO: 65379 - DNA, 471 bp, Unknown
  Obtained from environmental sample
  misc_feature (1)..(471): n is a, c, g, or t
gtgaggccccctagtccatccagagctctacctgcgcgaggttttgacgaggctgtccctcaaggcatttcggggagagccagctatttccaagtttgtttagtctttcgctccgagccacgggtcatccctgccttttttaacagactagggttcggccctccacccggtttcacccgggcttcaacctgcctgtggctagatcacttggcttcgggtctatggcatgcaacttatattccgccctgttcagactcggtttccctgcggctccgggactcccatcccttagcctcgctgcataccataactcgcaggctcattctacaaaaggcacgccgtcaccgcattactgcggctccgacctgttgtgggtccacggtttcaggttctttttcactcccctcgccggggttcttttcgcctttccctcacggtacttctgcgctatcggtcgctctctgtgtttag

SEQ ID NO: 65380 - protein, 156 aa, Unknown
  Obtained from environmental sample
  misc_feature (1)..(156): Xaa is any amino acid
MRPPSPSRALPARGFDEAVPQGISGRASYFQVCLVFRSEPRVIPAFFNRLGFGPPPGFTRASTCLWLDHLASGLWHATYIPPCSDSVSLRLRDSHPLASLHTITRRLILQKARRHRITAAPTCCGSTVSGSFSLPSPGFFSPFPHGTSALSVALCV

SEQ ID NO: 65381 - DNA, 717 bp, Unknown
  Obtained from environmental sample
  misc_feature (1)..(717): n is a, c, g, or t
gtggctagatcacttggcttcgggtctatggcatgcaacttatattccgccctgttcagactcggtttccctgcggctccgggactcccatcccttagcctcgctgcataccataactcgcaggctcattctacaaaaggcacgccgtcaccgcattactgcggctccgacctgttgtgggtccacggtttcaggttctttttcactcccctcgccggggttcttttcgcctttccctcacggtacttctgcgctatcggtcgctctctgtgtttagccttggatcgtggtcgacccggattcccgcggggtttcccgtgccccgcggtacttaggataccgctcccgaatgctcatcatttcagatacggggctttcaccctctgtggccggctttcccaaaaccgttctcttatcatggacatccagttatcgcggccctacaaccccgccccaaagggcggtttaggctcctccgatttcgctcgccgctactctcggaatcattgttattttcttttcccggggtacttagatggttcagttcccccagtgtcgcctccgcacactatgtattcatgcgcggatgccaagctcgcgcttggcgggttaccccattcggctatcggcggatctcaggatgtgtgctcctccccgccgcttctcgcagcttgccacggccttcttcgcctcgatacgccaaggcatccaccgtaa

SEQ ID NO: 65382 - protein, 238 aa, Unknown
  Obtained from environmental sample
  misc_feature (1)..(238): Xaa is any amino acid
MARSLGFGSMACNLYSALFRLGFPAAPGLPSLSLAAYHNSQAHSTKGTPSPHYCGSDLLWVHGFRFFFTPLAGVLFAFPSRYFCAIGRSLCLALDRGRPGFPRGFPCPAVLRIPLPNAHHFRYGAFTLCGRLSQNRSLIMDIQLSRPYNPAPKGGLGSSDFARRYSRNHCYFLFPGYLDGSVPPVSPPHTMYSCADAKLALGGLPHSAIGGSQDVCSSPPLLAACHGLLRLDTPRHPP

SEQ ID NO: 65383 - DNA, 2535 bp, Unknown
  Obtained from environmental sample
  misc_feature (1)..(2535): n is a, c, g, or t
ttgatggacgggggcaatttatctttggatcatgtcccggtatttgttaaaacggacataggtaaaaaacctatagggctgattggcacgggcgtaaatcttactgacttttcaaattttatagcttccagttatcatgaattcaatgaaaatatcacaatatatatgttcaataaatacaatgaaattacttcggcggcggattatgaactggttcaaaataaagtccgccttgacgaacacttaggtgttaccggaaaagaattgattaaggtcgcgcaagagctttccggagatgaaagccggagctttatctatgataaaaaaatctatctgataaactccctccagtctatggaatggtacctgactgtaagttatccggcgcctggtttgttgtcactgaataatgccatgaataccgtatttttcagtatgttgttccttattctgttcttgttcatcattattaatgtttatattgcccgctcggaaaatgcgatagcgaaacaaaatttacaactgattgaggcaaacaaaaagactgaatccgcttctcgggcaaaaagcgacttcctcgcgaaaatgagccacgaaatccgcaccccaatgaatgcgattataggcatggcggaacttctgctgaggggggaactctcaagcgaagccagaagttatacgcaggatatcaaacaggcggggaataaccttgtttcgataattaatgatattttggatctttcaaaaattgaagcgggaaaactggaaatcgttcccgtcaaatatatgctttcatctttgattaacgacactgtcaatattatccgtacaaaacttaaagaaaagccgatacggttttttaccaacatcgacggtaatatttcaaacagtcttatcggagacgaagtgcgcatccgacaaattcttattaaccttctgtccaatgcgataaagtacacggaaaaggggtatatcggtttgaccattatcgcggacaaacagaacgataaacaagtcttgctcagaatagacgtgtccgattccggaaaaggaataaaacctgaacatcaggcaaacctctttgacgaatttgttcgggtagataagaatcataacattgaaggaaccggtctggggcttcccattgccagacggctttgcgcggctatggacggaaaaataagcatggagagcgaatacggcaaaggcagcgtgtttacggtgattattccgcagggtattgaatcgaaagagccttttgccgcggtggaggagccggaaaaaaagaaagttcttatttatgaaagcagacttaactacgccaaatcggtgtgctggtcgctgaaaaatatgaacgttcctcatatcttggtaacgaatcaaaatgattttgccgcctcactgtaccgagaagaatggttttatgtgttttcaggttacggtctttatgaaagaattaaatcgcttatggaacaggacgattcgattttctgcggagggaaaaagccgcatctggctcttatgatggaatggggctccgaagtttttgtctccaacgcgcgctttgtttccataccggtacattccctgtccattgccaataccttgaacggcaagactgaccgtcagaatagttatgaagattccgtcagttccggcgttatacgtcattcattcaccggcgcgcggctgttgatagtagacgacattcccaccaatcttaaagtagccgagggcctcctgtccccttacaacgcgaagattgacacctgcttaagcggtgcggaagcgatagaacttgtgaaaaaaaataagtatgaccttatttttatggatcacatgatgcctgatatggacgggattgaggcgacagcaataataagaaagttagaaaaggagaacgaggtatcgggaaacaacggaaaacaaataattattgtcgcgcttaccgctaacgccgttgtgggaatgaaggaaatgtttcttgaaaaaggctttaatgattttctttcaaagccggtagatgtctcgaagatggatgaaattcttgaccgatggatagaaaaaagaacaatgagcaatgaacaattagcaatgaacaatgataaattaacaattaataacgaacaattacagaacaagaatactaattgctcattgctcattgatcattgctcattgcccattatccccaatgttgatacggcaaaaggagttgcgatggttcgcggttccttgaaggcttatatgaatatattatccatgttttgcaaagatgttgatgaaaggctgcctaagttgcaaataatccctaaggaggatagcttaccggcatttataattcaagttcactctttgaaaagcgtgactgcttctataggcgcgaaggaagtatcagccaaagccgcgggacttgaagccgcgggcaaaaacgcggatttggcgtttataagcgggtatttgcctgagtttactgaacagcttgcggaagtggtgaaaaatatccgcgcggcaattacctcacccagtacttaa

SEQ ID NO: 65384 - protein, 844 aa, Unknown
  Obtained from environmental sample
  DOMAIN (751)...(838): Hpt domain
  misc_feature (1)..(844): Xaa is any amino acid
MMDGGNLSLDHVPVFVKTDIGKKPIGLIGTGVNLTDFSNFIASSYHEFNENITIYMFNKYNEITSAADYELVQNKVRLDEHLGVTGKELIKVAQELSGDESRSFIYDKKIYLINSLQSMEWYLTVSYPAPGLLSLNNAMNTVFFSMLFLILFLFIIINVYIARSENAIAKQNLQLIEANKKTESASRAKSDFLAKMSHEIRTPMNAIIGMAELLLRGELSSEARSYTQDIKQAGNNLVSIINDILDLSKIEAGKLEIVPVKYMLSSLINDTVNIIRTKLKEKPIRFFTNIDGNISNSLIGDEVRIRQILINLLSNAIKYTEKGYIGLTIIADKQNDKQVLLRIDVSDSGKGIKPEHQANLFDEFVRVDKNHNIEGTGLGLPIARRLCAAMDGKISMESEYGKGSVFTVIIPQGIESKEPFAAVEEPEKKKVLIYESRLNYAKSVCWSLKNMNVPHILVTNQNDFAASLYREEWFYVFSGYGLYERIKSLMEQDDSIFCGGKKPHLALMMEWGSEVFVSNARFVSIPVHSLSIANTLNGKTDRQNSYEDSVSSGVIRHSFTGARLLIVDDIPTNLKVAEGLLSPYNAKIDTCLSGAEAIELVKKNKYDLIFMDHMMPDMDGIEATAIIRKLEKENEVSGNNGKQIIIVALTANAVVGMKEMFLEKGFNDFLSKPVDVSKMDEILDRWIEKRTMSNEQLAMNNDKLTINNEQLQNKNTNCSLLIDHCSLPIIPNVDTAKGVAMVRGSLKAYMNILSMFCKDVDERLPKLQIIPKEDSLPAFIIQVHSLKSVTASIGAKEVSAKAAGLEAAGKNADLAFISGYLPEFTEQLAEVVKNIRAAITSPST

SEQ ID NO: 65385 - DNA, 900 bp, Unknown
  Obtained from environmental sample
  misc_feature (1)..(900): n is a, c, g, or t
ttggtttaccgggattatcgcgatcctgccgcgtgcggttactgcttgtacggtcttttgtgggcggttagatatatgaaaaaatttcttattatggctgtcacggtttttttgctcttggcgctgtgtcttgccggcgcggccgcgtggtcgttcaaccactacctaatgccggacaaagcggcgatggcgaagattgtgccggtgcaagtgacgatcgagcgaggcacaagcgcgcgcgtcgtttccgacacgctggaagttcgcggcgtggtcaggtcggccaaggcgctctactattggatgaggtacgccggcatatccgacaagatacaggccgggcgcttcacctttatcaggggtgagggcgcgatcaacgccgccgagaaactcatcaaggccgaagtcatagaacagacggtctttatacaagaaggactcactatagagcagacggcatccaaggttgcggcgcagatggggatagactccgcggagtttgtgaaactttgcctagatacggcgtttatagcagttttgggcataaaagcgccgacgcttgaggggtacctgttccccgacacgtaccgtttccccgaaaacagcacggtggaagcaactatccgcaggatgacggcgcgcttcaaagaggcctgcgccggattgcagtggagtttgcagataaaaaacgcctacgatctgcacaaggtggtaaccttggcctccattgttgagaaagaggctacgctgccgagcgaacgcggacgcatagcaggcgtcttccacaaccgtctccgtaaaggctggcccttgggcgccgacccgacggtgcggtacatctacagaaaattcaacggcccgctcttgtatcggaactcaactccccctcggccgatctga

SEQ ID NO: 65386 - protein, 299 aa, Unknown
  Obtained from environmental sample
  DOMAIN (69)...(293): Aminodeoxychorismate lyase
  misc_feature (1)..(299): Xaa is any amino acid
MVYRDYRDPAACGYCLYGLLWAVRYMKKFLIMAVTVFLLLALCLAGAAAWSFNHYLMPDKAAMAKIVPVQVTIERGTSARVVSDTLEVRGVVRSAKALYYWMRYAGISDKIQAGRFTFIRGEGAINAAEKLIKAEVIEQTVFIQEGLTIEQTASKVAAQMGIDSAEFVKLCLDTAFIAVLGIKAPTLEGYLFPDTYRFPENSTVEATIRRMTARFKEACAGLQWSLQIKNAYDLHKVVTLASIVEKEATLPSERGRIAGVFHNRLRKGWPLGADPTVRYIYRKFNGPLLYRNSTPPRPI

SEQ ID NO: 65387 - DNA, 492 bp, Unknown
  Obtained from environmental sample
  misc_feature (1)..(492): n is a, c, g, or t
ttgcggaaactccgcgtaatcttatttagggtattcatgccaattttttttgaaataggtaaatcgtgcaatttttctttcgcttgcccaagatactttgaccagttatactataaatcaatgaacaaaagcgaattagtattgtatcaacccgacagcgccgtttcggttgaggtcagactggaagatgaaaatgtctggctgaacagacaacaaattgccgttttattcgatagggatataaaaaccatcggaaagcatataaacaacgcattgaatgaagaattggcggtattttcaactgtcgcaaaaaatgcgacagttggagggaaaaaaggtgaaaatccagttgtcgcanattttgcgacaactgctacaaatggcaaagtttatcaaatgggatattataatcttgatgtgattttgtcagtaggttacagggtaaaatcaagccgtggcattcattcagaatttgggctaaccgtgttttga

SEQ ID NO: 65388 - protein, 163 aa, Unknown
  Obtained from environmental sample
  misc_feature (1)..(163): Xaa is any amino acid
MRKLRVILFRVFMPIFFEIGKSCNFSFACPRYFDQLYYKSMNKSELVLYQPDSAVSVEVRLEDENVWLNRQQIAVLFDRDIKTIGKHINNALNEELAVFSTVAKNATVGGKKGENPVVAXFATTATNGKVYQMGYYNLDVILSVGYRVKSSRGIHSEFGLTVF

SEQ ID NO: 65389 - DNA, 1413 bp, Unknown
  Obtained from environmental sample
  misc_feature (1)..(1413): n is a, c, g, or t
atgaatgaagctatcagagaagaagcagaatattcaatggtctgcaaactggaaaatggggaaatccaatattccgacacttcaaacgccgaaaggcttttaatggagcataagcgggatatccgttatttaacggcttggaaaaaatggctggtgtggaacggaacgaattgggaaaccgatgagggcggggctctgattcatgaaaaagggcttaaaaccgtgcggaaattttataaagaattgttagaaaaatgcagttataggtatagttttaattctagttatgagaatattagggaaattgagagatttgcgaagaatagcgaaaacatcagaaagcgtgaagcgttgattaaaaccgcccaatatattcaggaattgaatattacggctgaggatcttgacgttaatccgtggctgttaaacgtccgcaacggcactgttgacgtttttaccggggaatttcgggaacacaggcgggaggatatgattaccaagctcgcanacgtggattacgatccggcggcggattgtccgttatggaaaaagtttatcagtgaaattatgaactttaatcctgaactgattaagttccttcaaaccgctgcgggctggtctttgtcgggggatatttcggaacaatctatgtttatcatgtacggaaccggcgctaacggcaaatctacattcattaatactgttatgtatctgatgggcgattacgccacttccacttttacggagacttttatgagaaaatcggggagcggcaacactaatgacgttgcccgtcttaggggtactcggtttgtcgccactacggaagttgaggaggggcggcggctgtccgaacctttgatcaagaaaattacgggcaacgaccaaatgacggctaggtttctttatggggaatttttcaactttacgcctactttcaagatattcatggctactaaccataagcctgttatcaagggtacagatcacggcatttggcggcggattaagctgattccctttttgacgaggattacggaagacaaacaggatagacatcttgaatacaaactgcgggaagaagcgagcggtattcttaactggctcttggaaggggcggctgtttggaaaaaagaaaggctgcaaacgccgaatattatatcttccgctactgatgagtacagggcggaaatggacgttatcggcagctttattgatgagaggtgtgttctgaaaaaagaattaaaaattaatatcagggttctttataaggtgtattccgaatggtgcgatgaaaataacgagaacgccataagcgagagattttttaccttgcggcttaaggaaatgggttataggcagtgcaggtcctctacggaaaggttttgggttggggtgggattgaaggaatag

SEQ ID NO: 65390 - protein, 470 aa, Unknown
  Obtained from environmental sample
  DOMAIN (142)...(453): Poxvirus D5 protein-like
  misc_feature (1)..(470): Xaa is any amino acid
MNEAIREEAEYSMVCKLENGEIQYSDTSNAERLLMEHKRDIRYLTAWKKWLVWNGTNWETDEGGALIHEKGLKTVRKFYKELLEKCSYRYSFNSSYENIREIERFAKNSENIRKREALIKTAQYIQELNITAEDLDVNPWLLNVRNGTVDVFTGEFREHRREDMITKLAXVDYDPAADCPLWKKFISEIMNFNPELIKFLQTAAGWSLSGDISEQSMFIMYGTGANGKSTFINTVMYLMGDYATSTFTETFMRKSGSGNTNDVARLRGTRFVATTEVEEGRRLSEPLIKKITGNDQMTARFLYGEFFNFTPTFKIFMATNHKPVIKGTDHGIWRRIKLIPFLTRITEDKQDRHLEYKLREEASGILNWLLEGAAVWKKERLQTPNIISSATDEYRAEMDVIGSFIDERCVLKKELKINIRVLYKVYSEWCDENNENAISERFFTLRLKEMGYRQCRSSTERFWVGVGLKE

SEQ ID NO: 65391 - DNA, 342 bp, Unknown
  Obtained from environmental sample
  misc_feature (1)..(342): n is a, c, g, or t
atgctttattattacctttgcgctgttttcacattaattagttctgcggttagttttggattttcaattaatgcctatctaaaatcaaaatcacaaaaagatataaattttactaatgccaaatatgcgatgtcaaggagttttgcattgttccttgctgcaatcggattatttatatttgtatctaatccatatttaataacgctttcattaataatgatttgtatacaattatttgatggaattattgggattaaaataaatacttttaagactattggacctatattgacagccgtaggtaatgcagttttattgatactctttttaaaaaattattga

SEQ ID NO: 65392 - protein, 113 aa, Unknown
  Obtained from environmental sample
  SIGNAL (1)...(25)
  misc_feature (1)..(113): Xaa is any amino acid
MLYYYLCAVFTLISSAVSFGFSINAYLKSKSQKDINFTNAKYAMSRSFALFLAAIGLFIFVSNPYLITLSLIMICIQLFDGIIGIKINTFKTIGPILTAVGNAVLLILFLKNY

SEQ ID NO: 65393 - DNA, 3258 bp, Unknown
  Obtained from environmental sample
  misc_feature (1)..(3258): n is a, c, g, or t
atggcctgggaatacgagacccgttcgcaatggaacaatcgaataagcaaaaacagcagttggcttacggtacaggttaccgacataggaattaccacgcgttacgcatataacaaggttcttgtgtgggcaacaaagctttcgacaggtgagcctgtcgcaaacgccagggtggagcttcttgagggtaataccgtaatcaggcagggcactgccaatgcccaggggctggcggtttttgaattccgcgacggggagtttgtctcccgttttaccaatctggaaccctactacggcgtaagcgactggtcaaaaggcttccgtatccgggtggtacaggacgacggggcaatggccggcggagaccaggcggaattcattccgaacaatagccacaatatatggcgtttcccggttgaggctgccgcaagcccgtttaccgcggaaaccgacagagctctggtttttatgttcaccgaccgcgggctttacaggccgggcgagaccgttacattccgtagcatagacaggaacctttcaagggggaaattcttcccctacgagggcaactacagcatcgaggtttctaccggcggacgcaacgccccggcaattgcatcgcttagcgggaaaaccaccaaaagcggcggaagccacggctcctttgtcattcccgccaacctcgccccgggccgttacgttatgcgctacaagcgtcttgagggcggcagccaggaatactcaattacttttttggtcgccaacttcgagcggctccgcgttgaagcgtccttaaaattcctagaccttacatattaccagggcgaaaaaatatcaggccgcctttccgcctcttacctttcaggcggcgggctttccggcgctccctacacctactactggagccgcgagccgacaggctttaatccgggaggaaactggcaatactggcgtttcggccctgaaacctacgacggccgttactttgccgccagcggggatggaaccctgggtcccgacggtagcgccgatatagcgcataacgtcggcgtggacggtgttgaaggaatcacttaccgctaccgccttgaggcctccgttcaggacgcggcaaggcaggaaatatcagtccggaatgcggcgattgtccacccagcttcgttttacatcgcttcccgattggatacggggactttaaaagccgtagattccgcaagtacgaaaccttccgccttctttttatcgagcggttcgcccgccacagttagctgggcgttgctcacgccggaaggaacgcctttcgagcaggcttccgacagccgcgacgcgcccgaaatcacattcaaattgatccgccacgagtggaagcagtcccgtcaggccggtattggaggaaggatcaacctgtattgggaaatggttgaagagaccgtcatggaaagaagcatacgcccaggcagaagggaacactcgggtgttattcctttcactccttcaaccagcggcgaatacgaagtgcggctttctagcaaggatgccctgggccgttccgcgcaaacgcgttacaggttttacgtgacaggcgccggctgggcattgtggggcaggggcgattcggacagcatcaccctgaggccggataagagctcttacgcgcctggagagacagccaaacttttggtgcagtcccccctgccaaaagggagttacctgctcacactggaaagggaagggatactcgaagagaggatcatcgagcttgacggctctgccctgaccatcgacattccgattaaggaatcgtacatacccatcgtgtatgttgccatcgcttcttacactgttcgatctgggccgccgactcacacttactacgagcctgaccttgacaagccaaagggccttttcggcctgaccagcctttatgtggataacgaaaaccggcattacgcaatcgagattgaagcttccaaaagcgtatacaggcctgccgagcaggcggaagtaacgctgaaggtaagccagaacggaaagccggcggcgggcgtagaggtaaccttcatggcagttgaccggggagtggtagatttaatcgactaccacgtgcctgatcctctggcctttttttacagtccctggaatttcccgcttggcgtgcggggcgcggacagccgttcgcttctcatcgatcctgtcacctacagcctctcggatctccagggcggcgacgaggaagacaattccaaaatggaggagcgcaaggatttccggcccaccgcagtttttgagccttatctcgtaacaggcgcggacggaaccgcaaaagtgaaattcaatctcccggattcgcttaccacctaccgctgtacggcggtggcctctggcaccagtgatttcggcatagcggagaaagacctgcgtgtcagcgctcccttaaccgccgtagccgccctgcccccggaagcttccgctggcgggacaccggtactgtttcgcttatacttaccaatctggaaactaccgcccgtcgaagcgaaagtttctgcggaaacagaaacgattgacggcggcgtttgggacacggtactggagatcgacggcgtcaaggaaaagacggtgaagatcaatcccggctcaacggcggaagtttcttttaaggcagcagcccttggcacgggggaaagcaggatcatctttactctcacgtcgccctcggtgaacgaaaggataataaaaacccttacggtagacagacctgtgttatacgaaaccgtaacgactatcggcagcctggcaagcgataatccatttattgaggaaggtgtgataattccttcacttgtccccgaggggacggggagcctttcggtttctgtttcttcctcaaggcttgcactgctgaaagaggcggtgcgctacctgcttgattacccctacggctgcctggagcaaaaaaccgcgcggctccttccgcttgtcgcctttgccgatcgccttgagacctttgagcttgatagccctgtaaaaaatcccaaaaaggttattgaagacgagctgtccctgctggtaaaaagccagatgcctgacggctccttcccatattggcccggcgggcaatttggagaccaatatgtgacgctcagggttgcccatatagtttttctcgcaaggcaaaaaggctacacggttcctgatgcgtttaatacccaaaccctgaccaaatacatttcggaaaacgatttttctcaacagtattaa

SEQ ID NO: 65394 - protein, 1085 aa, Unknown
  Obtained from environmental sample
  DOMAIN (538)...(700): Alpha-2-macroglobulin family N-terminal region
  misc_feature (1)..(1085): Xaa is any amino acid
MAWEYETRSQWNNRISKNSSWLTVQVTDIGITTRYAYNKVLVWATKLSTGEPVANARVELLEGNTVIRQGTANAQGLAVFEFRDGEFVSRFTNLEPYYGVSDWSKGFRIRVVQDDGAMAGGDQAEFIPNNSHNIWRFPVEAAASPFTAETDRALVFMFTDRGLYRPGETVTFRSIDRNLSRGKFFPYEGNYSIEVSTGGRNAPAIASLSGKTTKSGGSHGSFVIPANLAPGRYVMRYKRLEGGSQEYSITFLVANFERLRVEASLKFLDLTYYQGEKISGRLSASYLSGGGLSGAPYTYYWSREPTGFNPGGNWQYWRFGPETYDGRYFAASGDGTLGPDGSADIAHNVGVDGVEGITYRYRLEASVQDAARQEISVRNAAIVHPASFYIASRLDTGTLKAVDSASTKPSAFFLSSGSPATVSWALLTPEGTPFEQASDSRDAPEITFKLIRHEWKQSRQAGIGGRINLYWEMVEETVMERSIRPGRREHSGVIPFTPSTSGEYEVRLSSKDALGRSAQTRYRFYVTGAGWALWGRGDSDSITLRPDKSSYAPGETAKLLVQSPLPKGSYLLTLEREGILEERIIELDGSALTIDIPIKESYIPIVYVAIASYTVRSGPPTHTYYEPDLDKPKGLFGLTSLYVDNENRHYAIEIEASKSVYRPAEQAEVTLKVSQNGKPAAGVEVTFMAVDRGVVDLIDYHVPDPLAFFYSPWNFPLGVRGADSRSLLIDPVTYSLSDLQGGDEEDNSKMEERKDFRPTAVFEPYLVTGADGTAKVKFNLPDSLTTYRCTAVASGTSDFGIAEKDLRVSAPLTAVAALPPEASAGGTPVLFRLYLPIWKLPPVEAKVSAETETIDGGVWDTVLEIDGVKEKTVKINPGSTAEVSFKAAALGTGESRIIFTLTSPSVNERIIKTLTVDRPVLYETVTTIGSLASDNPFIEEGVIIPSLVPEGTGSLSVSVSSSRLALLKEAVRYLLDYPYGCLEQKTARLLPLVAFADRLETFELDSPVKNPKKVIEDELSLLVKSQMPDGSFPYWPGGQFGDQYVTLRVAHIVFLARQKGYTVPDAFNTQTLTKYISENDFSQQY

SEQ ID NO: 65395 - DNA, 687 bp, Unknown
  Obtained from environmental sample
  misc_feature (1)..(687): n is a, c, g, or t
ttgcacgagtttttataccctctgatgcaaggttacgatagcattgcgataaaaagcgatattgaactcggcggaacagatcaaaaattcaacgttctgtgcgggcgtgaattgcaggagcgagagaaaatggagccacaaataggcttgtttatgcccatacttctcggcactgacggcgagcaaaaaatgagcaagtcgcttggcaactatgttggcataaacgaggcggcagatacaatgtaccataaaatttacaatatcacagatgctttagttgagagctggtttgagttattaacagatattccaaaagaaaactacgaggctctgataaaggaaaatattttaaacgcaaaaaaagaactcgcctccgatatagttaagcaatatcacggctcttccgcagcagaggcagctgtagaaaaagaaaaagctattcacagcggagatgttttgccaagcgacacgcccacggttaaattaaccgctggcaattacggcattttagatttgcttgttgctgccggagcctttgcgagcaaaggtgaagcccgccgcatgattcagaacaacggcgttaaaataaatgggtctgctgttgcagaccaaaatatgaatgttgctgtggggagtggtgaaattgtagtgcaagctggcaaacgcaagttttacaaaattacataa

SEQ ID NO: 65396 - protein, 228 aa, Unknown
  Obtained from environmental sample
  DOMAIN (1)...(149): tRNA synthetases class I (W and Y)
  misc_feature (1)..(228): Xaa is any amino acid
MHEFLYPLMQGYDSIAIKSDIELGGTDQKFNVLCGRELQEREKMEPQIGLFMPILLGTDGEQKMSKSLGNYVGINEAADTMYHKIYNITDALVESWFELLTDIPKENYEALIKENILNAKKELASDIVKQYHGSSAAEAAVEKEKAIHSGDVLPSDTPTVKLTAGNYGILDLLVAAGAFASKGEARRMIQNNGVKINGSAVADQNMNVAVGSGEIVVQAGKRKFYKIT

SEQ ID NO: 65397 - DNA, 489 bp, Unknown
  Obtained from environmental sample
  misc_feature (1)..(489): n is a, c, g, or t
atggcaaatgcaataaataggattttccctaacgcagcaaggacagaagacgcctctacagtattggtgaatgtgccagaaaatatgaaaaacgattatatgtctttcatagcacgtgccgaaattgccgagtttaacccaaacacaaattccggtattgtgctaaacgaaaaaacaggaactgtggtaagcggggcaaatgttcaaatagacgaggttgccgtttcacacggaagcataacaattcaaattgccaatacgcaagaagcagcacagccaactttcatagggcaagcaactctgataaacaatcagcaattgaatgtgcaagaaccacgtacggaaacacgagttttgccagcggtcacaaatgctggtcagttagctcaggctttgaatggactaggtgtttcgccacgtgatataattgcaattttccaagctattaaaaaagcaggagcattgcacgcagaattagtggttatgtaa

SEQ ID NO: 65398 - protein, 162 aa, Unknown
  Obtained from environmental sample
  DOMAIN (1)...(162): Flagellar P-ring protein
  misc_feature (1)..(162): Xaa is any amino acid
MANAINRIFPNAARTEDASTVLVNVPENMKNDYMSFIARAEIAEFNPNTNSGIVLNEKTGTVVSGANVQIDEVAVSHGSITIQIANTQEAAQPTFIGQATLINNQQLNVQEPRTETRVLPAVTNAGQLAQALNGLGVSPRDIIAIFQAIKKAGALHAELVVM

SEQ ID NO: 65399 - DNA, 597 bp, Unknown
  Obtained from environmental sample
  misc_feature (1)..(597): n is a, c, g, or t
ttggattttctagaaacctgcataacaaaaaaaggagttggtatgcgaatagacgacgaaaagaagtacaaaataggctggatcgagttaaccattgccgtttgcattttgcttgcgattttggtttccaatgcgagcgcagcaagggtcaaagacatggcaacgctggaaggcgtttctgagcagcaactggttggctatgggctagttgttgggcttgccggcacaggagacggcacccgaacccaattcacggttcaatctgttgcaaatatgctgcaaaagatgggcatagttgttaatcccgcagatttgcggcttagaaacgtggcagcggttatggtaactgcaagtttgcccacttttgttaagcccggcaaaaaaatagatgtgaacatttcaagccttggcgatgctcgctcgcttgaaggaggaacgctcttaatgacccctctttcagcctccgatggcgaatactatgctcaggcacaaggtgcaattaccattggcgcgctttcggcaagaacaggcccgcacagcgttaaaaaagaaccacaccaactctggaactctgccaaatggtggggtgacgtataa

SEQ ID NO: 65400 - protein, 198 aa, Unknown
  Obtained from environmental sample
  DOMAIN (49)...(192): Flagellar P-ring protein
  misc_feature (1)..(198): Xaa is any amino acid
MDFLETCITKKGVGMRIDDEKKYKIGWIELTIAVCILLAILVSNASAARVKDMATLEGVSEQQLVGYGLVVGLAGTGDGTRTQFTVQSVANMLQKMGIVVNPADLRLRNVAAVMVTASLPTFVKPGKKIDVNISSLGDARSLEGGTLLMTPLSASDGEYYAQAQGAITIGALSARTGPHSVKKEPHQLWNSAKWWGDV

SEQ ID NO: 65401 - DNA, 408 bp, Unknown
  Obtained from environmental sample
  misc_feature (1)..(408): n is a, c, g, or t
ttgtcgccgggggaaagacgatataaatattgggcagcaagctgctgtgggcataaactttttagctggctacccggttttggagttaaaggctcggcagatattaattacgatggcaaaggaactaccgcacgaaacggagaattgaaagcaaccgtaacagcacgcataacagaagttttagacaacggaaacctgctaattgaaggatctaaactcgttgccataaacaacgaagaagagattttggaagttagcggcacaataagagcagacgatatcaatcccgacaatacagtatatagctataaaatagccgaggcagttatccgttattctggaagtggaaccagttccgatgcggcaaagcctgggttaataacaagattttttaattggattttctag

SEQ ID NO: 65402 - protein, 135 aa, Unknown
  Obtained from environmental sample
  DOMAIN (1)...(133): Flagellar L-ring protein
  misc_feature (1)..(135): Xaa is any amino acid
MSPGERRYKYWAASCCGHKLFSWLPGFGVKGSADINYDGKGTTARNGELKATVTARITEVLDNGNLLIEGSKLVAINNEEEILEVSGTIRADDINPDNTVYSYKIAEAVIRYSGSGTSSDAAKPGLITRFFNWIF

SEQ ID NO: 65403 - DNA, 1026 bp, Unknown
  Obtained from environmental sample
  misc_feature (1)..(1026): n is a, c, g, or t
ttgggattgggagaaagcagctatttgacggaacggaaaaaacgccgcaagctgacgcaatcctatgccgacaagaataaaaatctggttgaacataccttagtaccgtatttcgggaaaatgaaactggataaaataaccggggaagctatagaccaatggctagacgttatgattaaagagggcaagaaaaacagcacgaccaacggctattttggctcgctaaaaacaatgatgaaatgggctgttaagaaacggattattgacagagacccgttcctcgacgttgaaaaactgcttaacgaaaagacggacaaaaaaataatcaccactgacgaattcaaagccctgtttgtagacgactggaaaaaggtttggggcaacgatttgctgcggtgtaccgccaacaaagtagcggcccttaccgggatgaggtgctgtgaggtgctggggctgaggggggaatttgtctatgacgaccatatatatttatgcggacaatatgacgagtacggctaccgtgaaacaaaaacaaagataaaacaccatattccccttaccgccgaattggtaaaggatttaagaaagcttatgaaggtaaacgggcaggggtttattttttccctggacggcggggctacccctgttacccgtatgcacatattcaaaggcttaaaaaaagcgtttaacaatatagggataaccaatgaggaaatagacgaaagggggcttaacatccatgcgtggcggcatttctgcaacacggaactgcaaaagggcggacttacaatccagaaagaacaggcggttacagggcataagtcagaaaaaatgacggaacgctacacgcattttgacccgcttgatttcggggaagtgcctaaaatacaggcggaactgctgaaaaggaagcataaaaagccggaagccggcattggcgaagaggcgggaaaagaacgcccagcccttacccttgtaaagccacaggaagatgacaaggccggaaggaaaagaaaagcgtcttag

SEQ ID NO: 65404 - protein, 341 aa, Unknown
  Obtained from environmental sample
  DOMAIN (125)...(292): Phage integrase family
  misc_feature (1)..(341): Xaa is any amino acid
MGLGESSYLTERKKRRKLTQSYADKNKNLVEHTLVPYFGKMKLDKITGEAIDQWLDVMIKEGKKNSTTNGYFGSLKTMMKWAVKKRIIDRDPFLDVEKLLNEKTDKKIITTDEFKALFVDDWKKVWGNDLLRCTANKVAALTGMRCCEVLGLRGEFVYDDHIYLCGQYDEYGYRETKTKIKHHIPLTAELVKDLRKLMKVNGQGFIFSLDGGATPVTRMHIFKGLKKAFNNIGITNEEIDERGLNIHAWRHFCNTELQKGGLTIQKEQAVTGHKSEKMTERYTHFDPLDFGEVPKIQAELLKRKHKKPEAGIGEEAGKERPALTLVKPQEDDKAGRKRKAS

SEQ ID NO: 65405 - DNA, 672 bp, Unknown
  Obtained from environmental sample
  misc_feature (1)..(672): n is a, c, g, or t
ttgcccaaatactgggaagaactgtgcatgatgggcttttatcttatcgcgggcgacaagccgcttatgtacatggaagactggttaacggaaaatgaaagtttccctgtgggaaagatgagttcgcaacggttaagcgagctgttaggcgcatttgggcaaaaggaaaggaatgattttttcagggcgtggtgtactgctaactcaagcgacgagtatatggccgttgatattacctcggtatcatcatattcacaattgataaccgactgtgagcgcggatacaaccgcgacggggagaacctttgccagatcaacttatgccttttattcggtgaggaaacgcagatgccggtatatcagacctcctattcggggagccttaaagatgtttcgacgttcgaggctacggcagcggagatgaaagcggtaagcggggggaaaaagctggttttagtggctgacaaggggttttacagcggtaaaaacgtgcaaatactggcggaaaggcggcgcggggacgagtttctcatagcggtgcccttctcaaacaaatgggcgaaagaagtggtcaggggggagcggggccggatagagcgggcggtgaacctgatcacagaactggctgcttctctacaggtagtaatcacggataataacggcaaagaatga

SEQ ID NO: 65406 - protein, 223 aa, Unknown
  Obtained from environmental sample
  misc_feature (1)..(223): Xaa is any amino acid
MPKYWEELCMMGFYLIAGDKPLMYMEDWLTENESFPVGKMSSQRLSELLGAFGQKERNDFFRAWCTANSSDEYMAVDITSVSSYSQLITDCERGYNRDGENLCQINLCLLFGEETQMPVYQTSYSGSLKDVSTFEATAAEMKAVSGGKKLVLVADKGFYSGKNVQILAERRRGDEFLIAVPFSNKWAKEVVRGERGRIERAVNLITELAASLQVVITDNNGKE

SEQ ID NO: 65407 - DNA, 456 bp, Unknown
  Obtained from environmental sample
  misc_feature (1)..(456): n is a, c, g, or t
ttgaatcgcataacagggttttttccggctccgtatagtattgcggcttcccctttgttttcagccggaacaatgaattcggtaatgccctcctcaaggccgccggcgattgcagccagaacgccccgcaccgggcgtatctttccggaaagctccagctctcccatcaccagcagatccggaggcaccgggacaatacccgcggcggccattaccgccagcgcaattggcagatccagcgccgccccgtctttccgtaatcccgccggagccaggttgatcaggatcctgtccagcggaaatgtaaagccggaattcctgaacgccgcccttaccctttcccgcgcttcacgtaccgccccttcggcaagcccggtaatatcaatacccggaataccccggcgtatatccgcttccactcggattatcaccccacccgcgccaaaaggcgcataa

SEQ ID NO: 65408 - protein, 151 aa, Unknown
  Obtained from environmental sample
  SIGNAL (1)...(21)
  misc_feature (1)..(151): Xaa is any amino acid
MNRITGFFPAPYSIAASPLFSAGTMNSVMPSSRPPAIAARTPRTGRIFPESSSSPITSRSGGTGTIPAAAITASAIGRSSAAPSFRNPAGARLIRILSSGNVKPEFLNAALTLSRASRTAPSASPVISIPGIPRRISASTRIITPPAPKGA

SEQ ID NO: 65409 - DNA, 1239 bp, Unknown
  Obtained from environmental sample
  misc_feature (1)..(1239): n is a, c, g, or t
gtgtggaacggctgtcaatgggaaatggacgacggctatttaatacatgaccggggcttgaaaatgataagggggatttacgcagagctgttaaaaacagccgatatgcgggaccgcattgaaattgaaaaacacggtatgcagagcgaaagcgcaagacggaggaaggctttgattgaggttgcaagctggataccggaactgaatataaaaactgacgatcttgacagagacccatggctgttcaatgtcaaaaacggaactattgatttaagaacgggagaaatgagggagcacaggcaagaagatttaattaccagaattgccaatgtggagtatgacttgaacgccgattgtcctgtatggaaaaagtttgtaatggagataatgaattacaatgcagacttaattcattttatccaaaatgcggcggggtgggcgataacaggggacacgtccgagcaatcaatgttcatcctgtttggaacgggggcgaacggaaaaagcacgtttctcaataccataatgaacctgttgggcgactacgccatcgccacgcctactgaaacttttatgaaaaaatcaggagaccagataacaaatgacattgcaaggctgaggggaacacgctttgtaaccactacggaagcggaatatgggaaacgtctgtccgagcctttgataaagcagataacagggaatgaccgaatgaccgcaaggtttttgtacggagaattctttaactttgtaccgactttcaaaatatggatggctactaaccacaagcctgtaatcaagggaactgaccacggaatatggaggcggataaagctgatacccttccttacccgcattgaggaagaaaaccaggacaaacaccttgaacaaaagctaatgaaagaagggccggggattttgaactggcttgtcgaaggggcaaggcggtggcgaaatgagggattaaaaacgccgccaattattgtcagtgcaacggatgaataccgggcggagatggacgttatcgggaacttcctaaaggagcgttgtacccagggagaggaaggctgtatcaaggcaagggaactttttaagtgctatcaggaatggtgcgatgaccacaacgaacacgccgtaagcgagcgtttttttggtttgcgcttaaaggaattgggccttgagcaaaaacgcatgaacgatgggcggtactggcatggtattcagattagggcgcaagggtag

SEQ ID NO: 65410 - protein, 412 aa, Unknown
  Obtained from environmental sample
  DOMAIN (82)...(393): Poxvirus D5 protein-like
  misc_feature (1)..(412): Xaa is any amino acid
MWNGCQWEMDDGYLIHDRGLKMIRGIYAELLKTADMRDRIEIEKHGMQSESARRRKALIEVASWIPELNIKTDDLDRDPWLFNVKNGTIDLRTGEMREHRQEDLITRIANVEYDLNADCPVWKKFVMEIMNYNADLIHFIQNAAGWAITGDTSEQSMFILFGTGANGKSTFLNTIMNLLGDYAIATPTETFMKKSGDQITNDIARLRGTRFVTTTEAEYGKRLSEPLIKQITGNDRMTARFLYGEFFNFVPTFKIWMATNHKPVIKGTDHGIWRRIKLIPFLTRIEEENQDKHLEQKLMKEGPGILNWLVEGARRWRNEGLKTPPIIVSATDEYRAEMDVIGNFLKERCTQGEEGCIKARELFKCYQEWCDDHNEHAVSERFFGLRLKELGLEQKRMNDGRYWHGIQIRAQG

SEQ ID NO: 65411 - DNA, 366 bp, Unknown
  Obtained from environmental sample
  misc_feature (1)..(366): n is a, c, g, or t
atgaaaaggtgtataattgcccgattgcccgattgcccgattgcccgattgcccgattgcccgattgcccgattgcccgattgcccgattgcccgattgcccgattgcccgattgcccgattgcccgattgcccgattgccccattgcccgattgcccgattgcccgattgcccgattgcccgattgcccgattgcctagaccactcacaaaaaatgcctgcggcattttttgtgttggagtttgcgaaatcaagttaaaattggcgaaatttcggctcattgggaatatgttatcattttcaagtgaaaatagcgatatagggattggggggattatttgtttttttcttgtcttttactactaa

SEQ ID NO: 65412 - protein, 121 aa, Unknown
  Obtained from environmental sample
  misc_feature (1)..(121): Xaa is any amino acid
MKRCIIARLPDCPIARLPDCPIARLPDCPIARLPDCPIARLPDCPIAPLPDCPIARLPDCPIARLPRPLTKNACGIFCVGVCEIKLKLAKFRLIGNMLSFSSENSDIGIGGIICFFLVFYY

SEQ ID NO: 65413 - DNA, 615 bp, Unknown
  Obtained from environmental sample
  misc_feature (1)..(615): n is a, c, g, or t
ttgtttttttcttgtcttttactactaaaatgggtatattgtaatagaggtacaagcatggaagcagtacaaacagccaatccccccagttttgagtccgtttgggctattttgcaggaagtagccgaaagccaaaaagaatatgaacaggagaggaagaaagacaaagcggaattcaatgaaaggcttgggaaatatatcaatcttttcggcgattttactgaatatatgatggctcccaaattgcgcgagaaatttaaggatttcggacttttttttcccagaacaaatagaaatgtcagcgtggaagatgaaaataaaaatattcttcttgaaactgacgttatgctggaaaacggcgataaagctatgatggttgaaataaaaacccagcttactgttgaacgcataaaaaaacatattaaacgccttcaaaaaatgcgaaagtttgccgatttgcacggcgataagcgcacattcatgggcgctgtcgcaggggtggtaattacggataatgtaaaaaagtatatattaaaacaaggcttttttgttatagagccttccggcgaaggctttaatattacttcgccaaaaggtcaaccgagagaatggtaa

SEQ ID NO: 65414 - protein, 204 aa, Unknown
  Obtained from environmental sample
  misc_feature (1)..(204): Xaa is any amino acid
MFFSCLLLLKWVYCNRGTSMEAVQTANPPSFESVWAILQEVAESQKEYEQERKKDKAEFNERLGKYINLFGDFTEYMMAPKLREKFKDFGLFFPRTNRNVSVEDENKNILLETDVMLENGDKAMMVEIKTQLTVERIKKHIKRLQKMRKFADLHGDKRTFMGAVAGVVITDNVKKYILKQGFFVIEPSGEGFNITSPKGQPREW

SEQ ID NO: 65415 - DNA, 747 bp, Unknown
  Obtained from environmental sample
  misc_feature (1)..(747): n is a, c, g, or t
atgattatttcttcacttaccgaagcgtcagggcttgcgccgggtttggcgatactaatcgccgtaatagtcggaactcttataggcttctgcatggggcttatgatcgctttctgggatgttccgcctttcatcgctactcttgcggggatgtttttcgcgcggggctcctgttaccttatcagcgtccaggctattacaatcaatcacccgtttctgtttaatttgggcctctggaagctttggtttggggaggacagcttcatttcgtttaacgtcatcatatccatagtgataatagcgatagggatatacatttccctgtatacaaagttcggcaggaatatttacgctatcggcggaaacgaaacttcggctcttcttatgggtattcccataaagcggacgaaagtgcttatatatacaatcaacggtttctgctcaacaatagcaggtttaattttcagtttgtatatgctttccggttatggcctgcatgttcagggaatggagatggacgtaatagcgtcggttgtcatcggcgggactctgctctcgggcggcacaggttatgtattcggttctgtatttggcgtgatgactctggggatcattcagtcccttattatgtttaacggaaaaattaattcatggtggacgaagattgtggtgggcatattacttttgacttttatcggtttgcagcggatcattgtggcaatggtggataagaaaaatagcaaatag

SEQ ID NO: 65416 - protein, 248 aa, Unknown
  Obtained from environmental sample
  DOMAIN (2)...(232): Branched-chain amino acid transport system / permease component
  misc_feature (1)..(248): Xaa is any amino acid
MIISSLTEASGLAPGLAILIAVIVGTLIGFCMGLMIAFWDVPPFIATLAGMFFARGSCYLISVQAITINHPFLFNLGLWKLWFGEDSFISFNVIISIVIIAIGIYISLYTKFGRNIYAIGGNETSALLMGIPIKRTKVLIYTINGFCSTIAGLIFSLYMLSGYGLHVQGMEMDVIASVVIGGTLLSGGTGYVFGSVFGVMTLGIIQSLIMFNGKINSWWTKIVVGILLLTFIGLQRIIVAMVDKKNSK

SEQ ID NO: 65417 - DNA, 945 bp, Unknown
  Obtained from environmental sample
  misc_feature (1)..(945): n is a, c, g, or t
gtggacaccgtaggcgtcggcgcgtttaggaattgcgccggactgacgtctgtaatcatcggcaacaaggtgaaatcggtcggggcgagcgcgttcagcggctgcaccggtctcgcgtcgctgacgagtcttgcgtccgacccgcccgcagtgggtgttgcgagcggcaacgggacgtttgacggcatagataaaacaacgtgcaagttgaaagttcagcaggtggacatgggaatgtaccgcaacgccgccggttggaaggatttcacgaacatagaggcggtgcagttccccaacgttcccgtgttggacataacgggcgttccgacgagtttcaaggtgggcgaggttctcacgcttaccggaacggtcactccaaccactgccacgaacaaaactatagagtggagcgtggcgggcgcgagcatatccggcacgaacttcacgggcgctgtgatagagggcgggaacaagttgagcgcgtctgcccccggcacggttgtggtgcgtgcggcgataccgagtggcgcgataacgggtgtggatttcgagcggtactttttcataacggcggagccggacgaggatagcgcggcggtgtccgtcgcgtctcgcgaccgtgtgattccgtcggtcaagtctgcggagtcggcggcgatagcgcctgtcgcgcggttgtctgctgagttcgcggcgggtcctaatccggcggccaggtttttttttttggcaaaatttttccgcttgggaatattcttaacgaacgcgacgcttacagtctacgacgcgtcgggttatgttgtttccgccgtaaagtcgggcgtatgggatttgcgcgacagcaagggtcgtttggtgccggcgggtacgtacttggcgaggggcgtggttaagacgaaaggcggcaagagcgagaaggtgtcggcggtcgtgggggtgaggtag

SEQ ID NO: 65418 - protein, 314 aa, Unknown
  Obtained from environmental sample
  misc_feature (1)..(314): Xaa is any amino acid
MDTVGVGAFRNCAGLTSVIIGNKVKSVGASAFSGCTGLASLTSLASDPPAVGVASGNGTFDGIDKTTCKLKVQQVDMGMYRNAAGWKDFTNIEAVQFPNVPVLDITGVPTSFKVGEVLTLTGTVTPTTATNKTIEWSVAGASISGTNFTGAVIEGGNKLSASAPGTVVVRAAIPSGAITGVDFERYFFITAEPDEDSAAVSVASRDRVIPSVKSAESAAIAPVARLSAEFAAGPNPAARFFFLAKFFRLGIFLTNATLTVYDASGYVVSAVKSGVWDLRDSKGRLVPAGTYLARGVVKTKGGKSEKVSAVVGVR

SEQ ID NO: 65419 - DNA, 765 bp, Unknown
  Obtained from environmental sample
  misc_feature (1)..(765): n is a, c, g, or t
gtgccgataaaagccgtagatattcctaaaatgacggagtttgccgttcaaaacaaaattgactacgttgttgtcgctcccgatgatccgcttgttcttggaatgacagacgcgcttacggcaaaaggcattcgctgtttcgggccggacaaggcggcggcgcgaatagaaggcagcaaggtcttctcaaaaaatttaatgaaaaaatacggaatacctacagccgcgtatgaaacattttccgctcctgataaagccgcggattacttaaaacaggatggtttgtcatttcctgttgtaataaaagcggacggacttgcgcttggcaagggcgtaataatcgccgaaaatcttgagcaagcgcttggcgcggttgactcaataatgagagaaaaaaaattcggagactcaggaagcagtatcgtaattgaggaatttttaacagggcctgaagtttctgttcttgcctttacggacggaaaaaccgtagtccctatggtctcatccatggaccacaaacgcgcttatgacggcaatacgggtcctaacacaggcggtatgggcgtaattgcgccaaatccccattatacggacgaaatcgccgcaatatgcgaaaaaaccatttttatacccagtattaacgccatgcgggaagaaggctgtcctttcaaaggctgtctggcttcgggcttatgctcactccgtacgggcctatggttattgaatacaactgccgttttggagacccggaaactcaggcaataa

SEQ ID NO: 65420 - protein, 254 aa, Unknown
  Obtained from environmental sample
  DOMAIN (1)...(57): Phosphoribosylglycinamide synthetase, N domain
  misc_feature (1)..(254): Xaa is any amino acid
MPIKAVDIPKMTEFAVQNKIDYVVVAPDDPLVLGMTDALTAKGIRCFGPDKAAARIEGSKVFSKNLMKKYGIPTAAYETFSAPDKAADYLKQDGLSFPVVIKADGLALGKGVIIAENLEQALGAVDSIMREKKFGDSGSSIVIEEFLTGPEVSVLAFTDGKTVVPMVSSMDHKRAYDGNTGPNTGGMGVIAPNPHYTDEIAAICEKTIFIPSINAMREEGCPFKGCLASGLCSLRTGLWLLNTTAVLETRKLRQ

SEQ ID NO: 65421 - DNA, 450 bp, Unknown
  Obtained from environmental sample
  misc_feature (1)..(450): n is a, c, g, or t
atgctcactccgtacgggcctatggttattgaatacaactgccgttttggagacccggaaactcaggcaataatccctctccttgaaactgatcttcttgatataatggaagccgttacagacggcagactggacactgttgatatacgctggaaatccgcccattccgtctgcgtagtgcttgcgagtggaggttatccggccgtttataaaacaggtttcgctattgacggtcttgatgcggacggaaaaataaaagacggcgaagctgttgtttaccacgccggaactgaatataaagacggcttattttatacttgcggcggccgagtgattggcattacagcatgcgctccttcattggatatagctcttgaaaaggcctataaagccgccggtacaatcagatttgacggtgcgcattaccgtaaagatatcggaaagtattaa

SEQ ID NO: 65422 - protein, 149 aa, Unknown
  Obtained from environmental sample
  DOMAIN (55)...(148): Phosphoribosylglycinamide synthetase, C domain
  misc_feature (1)..(149): Xaa is any amino acid
MLTPYGPMVIEYNCRFGDPETQAIIPLLETDLLDIMEAVTDGRLDTVDIRWKSAHSVCVVLASGGYPAVYKTGFAIDGLDADGKIKDGEAVVYHAGTEYKDGLFYTCGGRVIGITACAPSLDIALEKAYKAAGTIRFDGAHYRKDIGKY

SEQ ID NO: 65423 - DNA, 882 bp, Unknown
  Obtained from environmental sample
  misc_feature (1)..(882): n is a, c, g, or t
atggatcgggacgacggcgcgtccgcgcaaaagggcgatgtcgtaaccatagattacagcatattcggcgagaacggcgaagaacagcagaatttacaacggaaagattttgtttttaccatcgggtccaacgccagtttttatcaatttgacgacgatgttataggaatgaaaaagggcgaaacaaaggaatttgaaaaaacgttcgcggacgatttttttgagtctacgcttgccggaaagacaagaaaggtaaaaattaccctgtccgtccttaaagaaagaaaactgcccgaattggacgacgacctcgcgcaggatgtcgatgaaaaattcaaaactctggacgaccttaagaacaacataaaggaacgactgaataaaaatattgaatggaaacagcgcgacgtaaaacttcaggaagtcctgaaaaagataatggaaacctccccagttaccctgccggaatccatgatcagggcggaagtcgagggccgctggcgcaggcttgcacaatattacaatacaagtgcggaaaaaatgatgcagatgatgacaatgggcgaaggccacgaggaaagggagaaagaatggcggcaaacggcggaaaaagcccttcattcgcgcattattatcgaaactttaatcgaagagcagaaaattgaggctacagacgaggatatagagaacgaatttaagctgattgccgatgaaagcggggtcgaagttgacgaagttaaaaagaactacaaggaacaggatatattataccttaaagaggacatcaaagaacggcggattgtcgataaattgtttgccgaaaacaatttaaaaccagaaaaaaaggagaattatctggattttatctcggataatggttaa

SEQ ID NO: 65424 - protein, 293 aa, Unknown
  Obtained from environmental sample
  DOMAIN (4)...(92): FKBP-type peptidyl-prolyl cis-trans isomerase
  misc_feature (1)..(293): Xaa is any amino acid
MDRDDGASAQKGDVVTIDYSIFGENGEEQQNLQRKDFVFTIGSNASFYQFDDDVIGMKKGETKEFEKTFADDFFESTLAGKTRKVKITLSVLKERKLPELDDDLAQDVDEKFKTLDDLKNNIKERLNKNIEWKQRDVKLQEVLKKIMETSPVTLPESMIRAEVEGRWRRLAQYYNTSAEKMMQMMTMGEGHEEREKEWRQTAEKALHSRIIIETLIEEQKIEATDEDIENEFKLIADESGVEVDEVKKNYKEQDILYLKEDIKERRIVDKLFAENNLKPEKKENYLDFISDNG

SEQ ID NO: 65425 - DNA, 618 bp, Unknown
  Obtained from environmental sample
  misc_feature (1)..(618): n is a, c, g, or t
gtgatgaatgaaaaaatgagtaatatggtacccattgttgtcgaacagaccggaatgggtgaacgctcctacgatatttattcgcgcctcctgaaagaccgtattgtgtttttggacggggaaatacatgatctttccgccgatttggttgtagcccagcttttattccttgacggacaggaaaccgaaaaagacattaacctttacataaattcacccggcggctccgttactgcgggacttgccatttacgacactatccagcacttaaagtcggatgtgcagaccatctgtctgggacaggccgccagcatggccgcccttatattaacagccggtactgccggaaagcgcatggtactgccctcttcccgcgtgttgattcaccagccatggggcggcgcgcagggacaggcgcgggacataggcattcagtccagagaaattatccgcttaaagaaaatgacaattcaatacttcgccaaccataccggtaaatccacagaacaggtcgcgacagacatggaaagagacctttacatgtcggcggaggatgcggtcgcttacggcgtagcggattctattttaaagagggaaaaaaatggcaaagcttcgtaa

SEQ ID NO: 65426 - protein, 205 aa, Unknown
  Obtained from environmental sample
  DOMAIN (18)...(199): Clp protease
  misc_feature (1)..(205): Xaa is any amino acid
MMNEKMSNMVPIVVEQTGMGERSYDIYSRLLKDRIVFLDGEIHDLSADLVVAQLLFLDGQETEKDINLYINSPGGSVTAGLAIYDTIQHLKSDVQTICLGQAASMAALILTAGTAGKRMVLPSSRVLIHQPWGGAQGQARDIGIQSREIIRLKKMTIQYFANHTGKSTEQVATDMERDLYMSAEDAVAYGVADSILKREKNGKAS

SEQ ID NO: 65427 - DNA, 1257 bp, Unknown
  Obtained from environmental sample
  misc_feature (1)..(1257): n is a, c, g, or t
atggcaaagcttcgtaacggcccggagtcttttgaacgcatttgttcattctgcggaaaaagcgccgacatggcgcgccgccttatcgcggggcccaacgacgtttttatctgcgacgaatgtatagaagtatgccgaaaaatcctaagcgaagaagatcacgatcttacgacaaatttcacgggcgacattcccactccgcatgaaataaaaagctaccttgaccttttcgttatcgggcaggacaacgctaagaaagccctgtccgtcgccgtttacaaccactacaaacgtatagccaacccctccctcgggaaagaaaacgccgatgttgaaatcgaaaaatcaaacgtccttttaatcggacctacgggaaccggaaaaacattacttgctaaaattctcgcaaaaaaacttaaagtgcctttcgccattgtggacgctaccacccttaccgaggcaggctatgtcggcgaggatgttgagaatattctcttaaaactgatacagagcgccggaggcaatatagcggcggcggaaaggggcatagtctatatcgacgaaatcgacaagatagcgcgcaaaggcgaaaacgtttccattactcgcgatgtttcgggcgagggcgtccagcaggctctgctcaaaattatcgagggaacaatcgcttccgtgccgccccagggcggaaggaagcaccccaatcaggaactgatacggattgatactacaaacatcctgtttatctgcggcggcgcttttgtaggactggaaaaattaatcgcgcgccgcgtcgtaaaccagccattgggattcggcgccggcatggcaggttcggagaaaagccttaaagaactgtacgacgcgattcacccggacgacttaattcacttcggcatgattccagaatttataggaaggctgcctattaccgtaggccttgaagaattaaaacgcgacgaccttaaacgcattataacggaaccgcgtaacgccattgtaaggcagtatcaagcttccatggcttatgacaatgtaaaacttgagtttaccgaaaaagctattgactccatcgcggatttggccattaaacaaaaaaccggagctaggggacttcgcgccatcgtagaaaaactcatgacggacatcatgtttgacattccatcaatgaagggcgaaaagcatgtaatcgttacccatgatacggtagaaaagtcagaacctccgcaaataatatacctgcaaaagagcgcgtaa

SEQ ID NO: 65428 - protein, 418 aa, Unknown
  Obtained from environmental sample
  DOMAIN (117)...(335): ATPase family associated with various cellular activities (AAA)
  misc_feature (1)..(418): Xaa is any amino acid
MAKLRNGPESFERICSFCGKSADMARRLIAGPNDVFICDECIEVCRKILSEEDHDLTTNFTGDIPTPHEIKSYLDLFVIGQDNAKKALSVAVYNHYKRIANPSLGKENADVEIEKSNVLLIGPTGTGKTLLAKILAKKLKVPFAIVDATTLTEAGYVGEDVENILLKLIQSAGGNIAAAERGIVYIDEIDKIARKGENVSITRDVSGEGVQQALLKIIEGTIASVPPQGGRKHPNQELIRIDTTNILFICGGAFVGLEKLIARRVVNQPLGFGAGMAGSEKSLKELYDAIHPDDLIHFGMIPEFIGRLPITVGLEELKRDDLKRIITEPRNAIVRQYQASMAYDNVKLEFTEKAIDSIADLAIKQKTGARGLRAIVEKLMTDIMFDIPSMKGEKHVIVTHDTVEKSEPPQIIYLQKSA

SEQ ID NO: 65429 - DNA, 627 bp, Unknown
  Obtained from environmental sample
  misc_feature (1)..(627): n is a, c, g, or t
atgaataaaaaaaaagttattggccttaccggaaactactgctcggggaagaaccatgtggcttcccttctggaacaattccatattccggttcttgacgttgataagctggggcaccacgccattgaaactgaaaaagagcggcttttggagcgttttggcaatgacatcatggatcaagacgggtttattaatcgcaagcggcttggaaataaagtttttggcaggaaaaaggaactggaagcccttgaagaaataatccatcctgtcgcaaacggcgaaaccctcgcctggatcgattcccaaaaggaggaaacctgcgtaataaacgcagctttgcttcaccgctcgtcggcttttgatatgctggacgcagttattatcgttgaagccccttttttcgtcaggctgctaagagccagaaaacgggatcgcctgcaatggacagccctgcttaaacgtttcataagccaaagaaaattcaacgctcaattttttaaggaaacagccgatatatacagagtggagaactctgcttttttcagttttagcagggaatttgacaaaaaaaagctgaacaagcgtatcaatgaaattctttcgattgaagggataatacgggtgtag

SEQ ID NO: 65430 - protein, 208 aa, Unknown
  Obtained from environmental sample
  DOMAIN (5)...(171): Dephospho-CoA kinase
  misc_feature (1)..(208): Xaa is any amino acid
MNKKKVIGLTGNYCSGKNHVASLLEQFHIPVLDVDKLGHHAIETEKERLLERFGNDIMDQDGFINRKRLGNKVFGRKKELEALEEIIHPVANGETLAWIDSQKEETCVINAALLHRSSAFDMLDAVIIVEAPFFVRLLRARKRDRLQWTALLKRFISQRKFNAQFFKETADIYRVENSAFFSFSREFDKKKLNKRINEILSIEGIIRV

SEQ ID NO: 65431 - DNA, 921 bp, Unknown
  Obtained from environmental sample
  misc_feature (1)..(921): n is a, c, g, or t
ttgctccaaagatgccccgccctattccatggcttcggcaagggcgttcaagcggttgacaccggcattaacgtaactttgccgtcgtctgccgcttccggttcaacagtcaggcaggattcaaacccacagccttccccggtagacccggttgagctggttcggcagccaaaagatggcctcggcctccagcaggctccggaaggggcaaaccgccagggggacgggttttatgtaagcggagatggaaccggcaaaagcgcagaaacattaatcaatgtgccaaaaccaagcacagcagccgttcctgacgcggctccagcaggaagagcggtgtccacatccgcgcagaccgcttccaaatctgcgacttctgctgcatcttccacttctaccgtttcccctgcttcgcctgttgccgtagccgctccttccgctacagccacaactaaacctgccgctacagtcgctcctgctactatagccgcccctgctgctacagccgctcctgccgttgcggtcgcgcaatcacaggcaaaaccagcctcaacgcaaaccaaagtttacaacgattactgggttcaaaccggcgcgttttcgaccattaccaaagccgagggagtaaaagcgactctttcgtccaagggaataacttcgattatcgaaaaccgcgaggttgaaggcaaaacagttttcanggtaagggtcggcccgtatatttcccaaaacgaagccaattattggcttgccttaatcaagacgataagcggtttcgaagacagccaggtaaggctaacccaatcctcgccgctagtggtttactctaaaatatttcacgcaaaggcgcagagtttctgttcgataaaatcttgttatacaagatatattacattcaaaatagctagaatcttgaaaatataa

SEQ ID NO: 65432 - protein, 306 aa, Unknown
  Obtained from environmental sample
  DOMAIN (188)...(264): Sporulation related domain
  misc_feature (1)..(306): Xaa is any amino acid
MLQRCPALFHGFGKGVQAVDTGINVTLPSSAASGSTVRQDSNPQPSPVDPVELVRQPKDGLGLQQAPEGANRQGDGFYVSGDGTGKSAETLINVPKPSTAAVPDAAPAGRAVSTSAQTASKSATSAASSTSTVSPASPVAVAAPSATATTKPAATVAPATIAAPAATAAPAVAVAQSQAKPASTQTKVYNDYWVQTGAFSTITKAEGVKATLSSKGITSIIENREVEGKTVFXVRVGPYISQNEANYWLALIKTISGFEDSQVRLTQSSPLVVYSKIFHAKAQSFCSIKSCYTRYITFKIARILKI

SEQ ID NO: 65433 - DNA, 765 bp, Unknown
  Obtained from environmental sample
  misc_feature (1)..(765): n is a, c, g, or t
atgtcacggacattcgtctgcacagcgctggttctcagaaaccgtccttcgggggaagcgaacagcgagataaccctgcttacagccgaagaaggcattttcaaggcgacggtttacggggggccgaaaagcaaattacgctcccattcagcgccgtacaattcggggcaggtctggatttaccgcgacccggcaaaagattacagcaaactaagcgattttgacgttcattcatggcggccgggacttagagaattatacgagagaactatggcggcaagcgctgtggccgaaactatcctttccacgcacggcggcggcggcgattggggttccgcgctgaaaatggcggcggcaaccctggacgctctggaaacagcgggcgaagagctatgccgccgcttactggttcacttcttgtggcaatgggcaggctttttgggcatacgtccgcatttggaaaactgcgccgcctgtggcgattcttgcgccgccgtaaatgagccgctttggttttccgcccgcgaacatacagccctttgcggaaaatgcgcccgcatcggagcaagctccggcgaaacgcactcagatttcattcaattgaacctaggctgccgccgctggttcgccgccgttgaacagcttgagccttcggaactgcaccgttactcgctggacaacaaatcttttaatgaggcaaaagctcttgcggcggctgtcatggcaggctctcttgggaaacatttggcaagctgggactggtaa

SEQ ID NO: 65434 - protein, 254 aa, Unknown
  Obtained from environmental sample
  DOMAIN (1)...(237): Recombination protein O
  misc_feature (1)..(254): Xaa is any amino acid
MSRTFVCTALVLRNRPSGEANSEITLLTAEEGIFKATVYGGPKSKLRSHSAPYNSGQVWIYRDPAKDYSKLSDFDVHSWRPGLRELYERTMAASAVAETILSTHGGGGDWGSALKMAAATLDALETAGEELCRRLLVHFLWQWAGFLGIRPHLENCAACGDSCAAVNEPLWFSAREHTALCGKCARIGASSGETHSDFIQLNLGCRRWFAAVEQLEPSELHRYSLDNKSFNEAKALAAAVMAGSLGKHLASWDW

SEQ ID NO: 65435 - DNA, 1389 bp, Unknown
  Obtained from environmental sample
  misc_feature (1)..(1389): n is a, c, g, or t
atgacagattcggccgaggaggggcttgactggcctgaaccggtaaagcagatgcagagaaactggataggccgttctgagggcgccaacgtgattttcaaggctgccccgtcttcccttaaaaacagcgaagaaatttcttttgagatatacaccaccagaccagatacgcttttcggggcgacctacatggttctctcgcctgagcactcgctcgtggaaaaactcactacgcctgaacagaaggcggcggtgcttgcgtacattgaggaagccgctaaaaaaagcgatcttgagcgcactgatttggcaaaaaccaagacgggcgtgtttacaggctcttacgcgattaatcccgtgaacggcgaaaaaatccccatctggatcgccgattacgttcttatatcatatggaacaggggccatcatggcggttccggcgcatgacgagcgcgattgggaattcgccaaggcgtttaatttgccaatcattcaggtggtagcggaacaggtaacaggtaacagggaacaggtaacagggaaagaagagccgcctgagtgtactactgcggacgggtactccgtaaattcagggccatacaacgggcttccaacggcggagacaaaaaagcgcataacgcaatggcttgaggaacacaggctcggcaaacacatggtaaactataagctgcgggattggattttcagcagacagcgttactggggcgaacctatcccagtggtgcattgcgattcctgcggcatagtcccgctgtacgagaaagacctcccgctgaaactgcccgatgtccagtcttatacgcccacaggcacgggcgagtcccctttggcggccattgccgattgggtgaacacggtctgtccgaaatgcggaaagcccgcgaaacgtgaaaccaatactatgccccaatgggcgggctcctgctggtactatctgcgctaccttgatccccataacgacaaggaatttgccggcagggataagatggattactgggctccggttgatctctacgtgggcggagtggaacacgcggtgcttcatctgctctacgcgcgattctggcacaaggtgctttatgacgccagccttgtaaacagcaaggaaccttttatgcgccttgtgaaccaggggatgatcgtctccttcgcctatcagagaaaagacaaaacgcttgtacccacggatcaaattgagaagaggccggacggcagtttctttgaaaaggcgaccggcgaagaagtaagcgaagtaatcgccaagatgagcaagagccttaaaaacgtcatcaaccccgatgaaataaccaaagacttcggcgcggattcccttcgcgtctacgaaatttcatgggccccctggaggtaa

SEQ ID NO: 65436 - protein, 462 aa, Unknown
  Obtained from environmental sample
  DOMAIN (1)...(462): tRNA synthetases class I (I, L, M and V)
  misc_feature (1)..(462): Xaa is any amino acid
MTDSAEEGLDWPEPVKQMQRNWIGRSEGANVIFKAAPSSLKNSEEISFEIYTTRPDTLFGATYMVLSPEHSLVEKLTTPEQKAAVLAYIEEAAKKSDLERTDLAKTKTGVFTGSYAINPVNGEKIPIWIADYVLISYGTGAIMAVPAHDERDWEFAKAFNLPIIQVVAEQVTGNREQVTGKEEPPECTTADGYSVNSGPYNGLPTAETKKRITQWLEEHRLGKHMVNYKLRDWIFSRQRYWGEPIPVVHCDSCGIVPLYEKDLPLKLPDVQSYTPTGTGESPLAAIADWVNTVCPKCGKPAKRETNTMPQWAGSCWYYLRYLDPHNDKEFAGRDKMDYWAPVDLYVGGVEHAVLHLLYARFWHKVLYDASLVNSKEPFMRLVNQGMIVSFAYQRKDKTLVPTDQIEKRPDGSFFEKATGEEVSEVIAKMSKSLKNVINPDEITKDFGADSLRVYEISWAPWR

SEQ ID NO: 65437 - DNA, 624 bp, Unknown
  Obtained from environmental sample
  misc_feature (1)..(624): n is a, c, g, or t
ttgatccgtgggtacaagcgttttgtcttttctctgataggcgaaggagacgatcatcccctggttcacaaggcgcataaaaggttccttgctgtttacaaggctggcgtcataaagcaccttgtgccagaatcgcgcgtagagcagatgaagcaccgcgtgttccactccgcccacgtagagatcaaccggagcccagtaatccatcttatccctgccggcaaattccttgtcgttatggggatcaaggtagcgcagatagtaccagcaggagcccgcccattggggcatagtattggtttcacgtttcgcgggctttccgcatttcggacagaccgtgttcacccaatcggcaatggccgccaaaggggactcgcccgtgcctgtgggcgtataagactggacatcgggcagtttcagcgggaggtctttctcgtacagcgggactatgccgcaggaatcgcaatgcaccactgggataggttcgccccagtaacgctgtctgctgaaaatccaatcccgcagcttatagtttaccatgtgtttgccgagcctgtgttcctcaagccattgcgttatgcgcttttttgtctccgccgttggaagcccgttgtatggccctga

SEQ ID NO: 65438 - protein, 207 aa, Unknown
  Obtained from environmental sample
  misc_feature (1)..(207): Xaa is any amino acid
MIRGYKRFVFSLIGEGDDHPLVHKAHKRFLAVYKAGVIKHLVPESRVEQMKHRVFHSAHVEINRSPVIHLIPAGKFLVVMGIKVAQIVPAGARPLGHSIGFTFRGLSAFRTDRVHPIGNGRQRGLARACGRIRLDIGQFQREVFLVQRDYAAGIAMHHWDRFAPVTLSAENPIPQLIVYHVFAEPVFLKPLRYALFCLRRWKPVVWP

SEQ ID NO: 65439 - DNA, 654 bp, Unknown
  Obtained from environmental sample
  misc_feature (1)..(654): n is a, c, g, or t
atgggccccctggaggtaagcaaaccctggagcacggcggggcttatcggcgttacgcgctttctggagaggatctggggcattgcaaatgaaaaaataaaagagataaaagaagaaagaaaatcagcggaagatactgagaggctgacgaaactgcttcataaaaccatcaaaaaagtaagcgccgacacagtgtcgatgaattttaacacggcgataagcgccatgatgatctacacaaacgagcttgcaaaactcgccgaaatcccctgctctctctgggagcctcttgtaatcatgctcagcgtttacgcgccccacctcggcgaggaactctgggaaaaactgggtcataaagaatcggtgagcgcctgttcctggccggttttcgacgagcagctaacgcatgacgaagaggttacggtcgtagtccaggtaaacggcaagatacgcgacaagttcacggctgccaccggcaccgccaaagccgaactggaaaaaacggcccttgccctgcccggcgcgctaaagtggacggaagggcatacgatagccaaagtgataacggtgcaggataagttggtgaatatagttatcagggaacggggaacgggaacggggaacagggaacagaaaaagagcaatgagcaatga

SEQ ID NO: 65440 - protein, 217 aa, Unknown
  Obtained from environmental sample
  DOMAIN (49)...(171): Anticodon-binding domain
  misc_feature (1)..(217): Xaa is any amino acid
MGPLEVSKPWSTAGLIGVTRFLERIWGIANEKIKEIKEERKSAEDTERLTKLLHKTIKKVSADTVSMNFNTAISAMMIYTNELAKLAEIPCSLWEPLVIMLSVYAPHLGEELWEKLGHKESVSACSWPVFDEQLTHDEEVTVVVQVNGKIRDKFTAATGTAKAELEKTALALPGALKWTEGHTIAKVITVQDKLVNIVIRERGTGTGNREQKKSNEQ

SEQ ID NO: 65441 - DNA, 744 bp, Unknown
  Obtained from environmental sample
  misc_feature (1)..(744): n is a, c, g, or t
gtgttaataatgttcgaccggaactacgaatcgctggaattcatggattttctcgaacaaaaagggataaaacacctgattcggctgcataaggggaattatgaggcggaaaaagcccagatgcatagtaatgacgaggaagttgaattggtctttaccagagcgcggctggaacacctgaaggtgaaatcgcctgaacggaggcgtgaattggcgcagcagaaatcgaagcgggttcggataataaaaacaaaattcgccaacggggaagaggcgtcattcatgacgaacatgaaggaaggaacaaccgcggagatactggggctgtaccggaagaggtgggcgatagaacaaaaatatcacacgctgaaaaacaagttaaagtttgagagcgttacgggaaaggcaagcatttatgtggagcaggacttttgggcgcaaaccctggtgttcaacatggtacaggatctgataactgcggcggagtgccgtgcggcgaaaaaagcgaagaaaaaacgtctcaaatataaaatacggattaatgagaacatcgcgataggattgttcaaagaaaaatttatccggttgatgattgaagaaaatgaaagtcgaaaggatgaaatgtacaggcagcttactgcagatatggaacgaaacattgtaccaatacggacacttaanagcgcccctcgtaaatggaggtattttaataaatataaatgtaaccaaaaaccttcattttaa

SEQ ID NO: 65442 - protein, 247 aa, Unknown
  Obtained from environmental sample
  misc_feature (1)..(247): Xaa is any amino acid
MLIMFDRNYESLEFMDFLEQKGIKHLIRLHKGNYEAEKAQMHSNDEEVELVFTRARLEHLKVKSPERRRELAQQKSKRVRIIKTKFANGEEASFMTNMKEGTTAEILGLYRKRWAIEQKYHTLKNKLKFESVTGKASIYVEQDFWAQTLVFNMVQDLITAAECRAAKKAKKKRLKYKIRINENIAIGLFKEKFIRLMIEENESRKDEMYRQLTADMERNIVPIRTLXSAPRKWRYFNKYKCNQKPSF

SEQ ID NO: 65443 - DNA, 1329 bp, Unknown
  Obtained from environmental sample
  misc_feature (1)..(1329): n is a, c, g, or t
atgctcgtcgcagtgatacaacttctggccggaaagaggcttgccaaaaactcaaggaatagcaacattcccccatcaatggatccaaaccgggaaaagaagccgaaaccgaaacgaggaaagaagcccggaggtcaacccggtcatgcaggctttacgctgcgacagatagaaaatcccgacaagatagttaaaataaaagtaaaccggaataatctgcctcccggcgattggaagcatgcaggttatgagaaacgccaggtttttgatctgaagattgtcaaacacataacggaatatcaggcggagatactggtcaatgaaaccggcggcaaggtgaccgcagagtttcccgaaggcttagtgcaaaaagcccagtatgggaacggggtaaaagcgcacagcgtgtatatgtcggtgcagcagcttataccgtgcgagcgggtgggcgagcatttcgccagccagttggggctgcctctgagtgccgggacagtgcataacttcaaagaagaggcgtataagcagctagaaccgtatgaaacatgggtaaaagagcagataaggaactcaaaaataatccacgacgatgagacgggcatgctgattgaaggcaagcgggcatggctgcatgtggcgtgtaatgctcaatacacattgtattacccgcatgagaagcgagggaaagcggcgatggatgaaatgggtgtcttgggcgcggaaggcggagtgatgatacatgatcactggaagccctatttcacctacggcaacaaagaacacgggctgtgcaacgcgcattatgtgagggatctgacagccgcgtcggaggaaggacaaaagtggcctgaacgaatgatagaccttttgacggagaccaacaagcaaaccgttgaagcgggtggaaaattgtcggaagatgaacagcatagggtgcggaagaaatatcggaggatacttgcggacgcggaaaaagaaaatccccttcctcttgctcccttgcagggtgaaccaaaaagggggcgggcagcacagacgaagacgcggaatctcctggatcggatgaaggagcatgaagatgacatactgcggttcatgaccgatgttgacgtgccgtttacaaacaaccaggcggagcgggatattcgcatgatgaaggtacaacagaaaatatcaggaagcttccgttcatgggacggcgcaagatttttttgccggatacgcggctacttgtcaacctgtgaaaagcaccatatttcgtccgcagatgccttgaaaatcctttttaacggtaaatttccagattttatgtcctttctggctgaatag

SEQ ID NO: 65444 - protein, 442 aa, Unknown
  Obtained from environmental sample
  misc_feature (1)..(442): Xaa is any amino acid
MLVAVIQLLAGKRLAKNSRNSNIPPSMDPNREKKPKPKRGKKPGGQPGHAGFTLRQIENPDKIVKIKVNRNNLPPGDWKHAGYEKRQVFDLKIVKHITEYQAEILVNETGGKVTAEFPEGLVQKAQYGNGVKAHSVYMSVQQLIPCERVGEHFASQLGLPLSAGTVHNFKEEAYKQLEPYETWVKEQIRNSKIIHDDETGMLIEGKRAWLHVACNAQYTLYYPHEKRGKAAMDEMGVLGAEGGVMIHDHWKPYFTYGNKEHGLCNAHYVRDLTAASEEGQKWPERMIDLLTETNKQTVEAGGKLSEDEQHRVRKKYRRILADAEKENPLPLAPLQGEPKRGRAAQTKTRNLLDRMKEHEDDILRFMTDVDVPFTNNQAERDIRMMKVQQKISGSFRSWDGARFFCRIRGYLSTCEKHHISSADALKILFNGKFPDFMSFLAE

SEQ ID NO: 65445 - DNA, 360 bp, Unknown
  Obtained from environmental sample
  misc_feature (1)..(360): n is a, c, g, or t
atgtctataaccgttccgtcaattccgtgcggaactttaagcgaagtgtcgcgcacctctttcgccttctcgccgaagattgaattgagcagtttgaattccggcgtggtttcggtctcgctttttggcgttaccttgcctacgagtatgtcgccggaacggactctcgcgccgacgcagataatgccttccttgtccaggttgtccaggctcttctcggaagtattcggaatctcatcggtgattttttccggccccagcttggtctcccttacctcggttatatgttcctttatatggatagaggtaaacatatcttccttgaccacgcgctcggagataaggatcgagtcttcgtag

SEQ ID NO: 65446 - protein, 119 aa, Unknown
  Obtained from environmental sample
  misc_feature (1)..(119): Xaa is any amino acid
MSITVPSIPCGTLSEVSRTSFAFSPKIELSSLNSGVVSVSLFGVTLPTSMSPERTLAPTQIMPSLSRLSRLFSEVFGISSVIFSGPSLVSLTSVICSFIWIEVNISSLTTRSEIRIESS

SEQ ID NO: 65447 - DNA, 1719 bp, Unknown
  Obtained from environmental sample
  misc_feature (1)..(1719): n is a, c, g, or t
ttgagcgatcttctcttttcatggtcgggaaatgaatttgcggcttttgggctggaagggcggcctcaccctatttatatgattcaaattgccgatgaaaaaaaacggcagggaatatttgatcgggcttttaaatccgtcgcgcttaaagagaatgtcagattaaatcttgacggggtccgtattccgcgcattgaagttcccgaatttcttcaatctctattaaaacaatgggatatttttataccttccccttattacacaatctacaaagattattttcttgtaagcgaatcggcggaagcccttcttgccgcgttacgcgctatgcagagaaacgaagtgctgcctaaaaccgccacttggcgcaatattgctggtggaaaaaatgttgcaagctcttttagtttgtattactcgcttgatctttcagttcctttctttttgcggaataataccgctcttagcggctttttatcactctatcgccaaggacttgcccgcatgagtctgaataagggacttgttgaaatttccctgtctctcgttcccggttcaggcggcggcataactcttgtaaacggttatccgctggacatcggcggaaggccttctaaccgcgtttacggggcgggtaagggggaagagagcagagtgttctattcttcgggcaataccgcagtctcgttgaaaatttcagataacagtaccagtgaactttccggtcagggtaatcattgggttattcccgccgttgatgttacggtaaaagatgtggcagggtcggtattcgcctgggttgttacggatcgagggcgcgtaacacttgtagacggtaatatggaaattgtccaaggcttcccggtacttacggggcttcaactttcttccgctcccacggcgtttatgggaaaactttacctttgcgatgaagatggcaaggtttattcggttgacgcgaccggtaaacaaggcgtttgggaaacttcatttacatcggctctccgctccccgccgtctttcctgttactttctgacaaaaaaagaaacagcatatattcggcagtttatccaaaaagtttctttggtgaaatctggcttcttgacggcgaagggagaacgctccccaattggcctgctccaatatccatagaaagtgacgatgacgatgaagaagacgaaggcagtagcagtagcagtggcggtggaattggttttggatcgccattgttatttgcgtataaaaacaatatttatgtcgcctttataaatcaatcagggcaaatttcagtttacgatgaagaggcggttcttgtcccgccgttcccaattgcccttgacggagttttttacctacagcctgtttttgacggggaatttatgtggcttgtttcagctaacggaatgtttttcagggtaagcttagagggtgaggttctgtgtcaggatattcccggtttttccgtaaaagaagaaggctacattacgttctttgacagcgatggagataaaattccggaaatttatatcacgggcgaaggcaacgcgctttatgcctatacgcgatttttccgttctcttgtagggcttcccccttccggcgtggggcagaccattatttgttccggcgcagggaaacaaaaaagcggaaatttttggtattggaatggacaagcgattgtatcgctggcaattccgatagctaatgtattttggtga

SEQ ID NO: 65448 - protein, 572 aa, Unknown
  Obtained from environmental sample
  misc_feature (1)..(572): Xaa is any amino acid
MSDLLFSWSGNEFAAFGLEGRPHPIYMIQIADEKKRQGIFDRAFKSVALKENVRLNLDGVRIPRIEVPEFLQSLLKQWDIFIPSPYYTIYKDYFLVSESAEALLAALRAMQRNEVLPKTATWRNIAGGKNVASSFSLYYSLDLSVPFFLRNNTALSGFLSLYRQGLARMSLNKGLVEISLSLVPGSGGGITLVNGYPLDIGGRPSNRVYGAGKGEESRVFYSSGNTAVSLKISDNSTSELSGQGNHWVIPAVDVTVKDVAGSVFAWVVTDRGRVTLVDGNMEIVQGFPVLTGLQLSSAPTAFMGKLYLCDEDGKVYSVDATGKQGVWETSFTSALRSPPSFLLLSDKKRNSIYSAVYPKSFFGEIWLLDGEGRTLPNWPAPISIESDDDDEEDEGSSSSSGGGIGFGSPLLFAYKNNIYVAFINQSGQISVYDEEAVLVPPFPIALDGVFYLQPVFDGEFMWLVSANGMFFRVSLEGEVLCQDIPGFSVKEEGYITFFDSDGDKIPEIYITGEGNALYAYTRFFRSLVGLPPSGVGQTIICSGAGKQKSGNFWYWNGQAIVSLAIPIANVFW

SEQ ID NO: 65449 - DNA, 1158 bp, Unknown
  Obtained from environmental sample
  misc_feature (1)..(1158): n is a, c, g, or t
atgtattttggtgatcaggtgggagtatttatgaaaagagatttgtttttcatgatattagctgcgataatttttttttcctgtgtttcattaaataaagatatttcgcttaacagtcaaaaagatcagtccgaaaaaaacatggaagctattgaggaagcggttgttccgctggaagccgtaggaggagcgcaggctcgcggcaggcagagcgaaataactgcggcgcgtcagttaattacaaacagggaacgcgaagcgtctacagatgcggattattccggcaagcttctggcatggtcgggcaggcttgcgattatcgagggcaagtacagcgaagctcagcgtttgtacagacagtcaacctcggtttctgcgggtaatgtcccagcaataatccttggtattcgtcttgagggagatcccgcgaagcggcttgagttaatagagaaagaactggcaatatcaggacgtcattcttccgctgttggttttggcgaattgcagatagaaagaggagtttcgctgacggaagtgaaccgttttgccgaggcagccggcgcgtttgacgtcgctttttcttctgggattaacaatgtctaccgggagaattacgtaaatatacgtaatcgcgcatgggaattacgtaatacaagcggaatggccgccgggaccataaacatgatgcaggatcgcgttacatggaacgattgcattaagattgcacgtaacgaaacgcagcttttaaggtttataagcggaggaagggacataggcgaggccgagttttttaaccgtcttctggatcgcgcctttatcccgtatacgcaggatattgatgtaaatgaatggccaaaaacaaaaccggatagaaacgaatttgtaacgcgcgccggcgcggcgtggtttatctggcatttgtacgccgaaacacgggcggacaggggtctgctttcccgctattcatcgcgttatgcgacaggcgcaaacccgcgcagtccgatagcggacattcctccgctatcgccgttctttgattcaattcttggcagtgtagagacggaactcttgtcccttcccgacggacggaatttcaggccgactcaatccattcgtggggcggaaatacttgctgttctgaagaagattgacaattag

SEQ ID NO: 65450 - protein, 385 aa, Unknown
  Obtained from environmental sample
  misc_feature (1)..(385): Xaa is any amino acid
MYFGDQVGVFMKRDLFFMILAAIIFFSCVSLNKDISLNSQKDQSEKNMEAIEEAVVPLEAVGGAQARGRQSEITAARQLITNREREASTDADYSGKLLAWSGRLAIIEGKYSEAQRLYRQSTSVSAGNVPAIILGIRLEGDPAKRLELIEKELAISGRHSSAVGFGELQIERGVSLTEVNRFAEAAGAFDVAFSSGINNVYRENYVNIRNRAWELRNTSGMAAGTINMMQDRVTWNDCIKIARNETQLLRFISGGRDIGEAEFFNRLLDRAFIPYTQDIDVNEWPKTKPDRNEFVTRAGAAWFIWHLYAETRADRGLLSRYSSRYATGANPRSPIADIPPLSPFFDSILGSVETELLSLPDGRNFRPTQSIRGAEILAVLKKIDN

SEQ ID NO: 65451 - DNA, 861 bp, Unknown
  Obtained from environmental sample
  misc_feature (1)..(861): n is a, c, g, or t
ttgttggatagctatcccgaaaagacaagtgttggcgagatttacgctccgccgccggggaatacggatttggcggtgagttttttgggaagcggcaccgatatgctgcatctggtctttgatttttcgctggtatttacgctgtggaaagcgtccagctattataaaatcataactaattattatgaaaaattgcctgcgactggctggcccagtttttttctctccaatcacgatatagggcgtagcgttaggcgtttgctatgggagcgcaacaaatacgccaaggcaaaacttcacgctgttctgctgctgaccttgaaagggactccgtttatctactacggcgaagagataggtatggaaaacgccataattcctaaaaggcatatcagggatttgtatggaaaatttttctatccatttttcagagggcgcgaccgcgcgcgtacgcctatgcagtggagcgacaagcaacacgccgggttcagcgagcaaagtccgtggctgcctgtgtcggaaaattatatggaaataaatgtaaaggcacagcaaaaagacaagtattccattttaagcatatacaaaatgttgatattcctcagaaaaaaatatgccgctctccacgcgggcgatatagaattcctaaataaaggcgaagatgattttttgatgtattccagaaagcacggggacgaggagataatagtgcttttaaatttcagcaaaaccgagaaaaaagttcacataaacgctataagatatacctcaaaaatccttttttcaacgcacggcggcacaaccctaaccagcggcggcttaattttgcagccttttgagggaaatgttgtaaaaatttaa

SEQ ID NO: 65452 - protein, 286 aa, Unknown
  Obtained from environmental sample
  misc_feature (1)..(286): Xaa is any amino acid
MLDSYPEKTSVGEIYAPPPGNTDLAVSFLGSGTDMLHLVFDFSLVFTLWKASSYYKIITNYYEKLPATGWPSFFLSNHDIGRSVRRLLWERNKYAKAKLHAVLLLTLKGTPFIYYGEEIGMENAIIPKRHIRDLYGKFFYPFFRGRDRARTPMQWSDKQHAGFSEQSPWLPVSENYMEINVKAQQKDKYSILSIYKMLIFLRKKYAALHAGDIEFLNKGEDDFLMYSRKHGDEEIIVLLNFSKTEKKVHINAIRYTSKILFSTHGGTTLTSGGLILQPFEGNVVKI

SEQ ID NO: 65453 - DNA, 771 bp, Unknown
  Obtained from environmental sample
  misc_feature (1)..(771): n is a, c, g, or t
ttggcggtttttcccctttacaagcgtctaaggtacatgaatctaagagagtcgctttcgtttttcttttttgggaatgtgtgcgttgggtgcgggcgtggttcgcaaaaacttgacccctggctttgccctaattgcaaagaggagcttattgcctgcggtgagcaccctatatggcccggcaaagaagatgcaatttgcctgttccctatgaattcgctgacaagaaacctcattttggctatgaaatacaagggtatgcagaaaatagcctcgtatttggtggcacattcctcagttgggcgcaaaggggaagccctgcaaattttggagggctggggaaaaaatatgccctttatacccgtgcctgtgcataatgcccgaatgagggagcggggttacaaccaaagcgagcttgctgcgtttgagctttccctgcattgcggaggaaaattgcagaaaaacatcttaaaaaggcgaatttacaagccatcgcagacattgctcggcagcggagcgcgttctttgaatgttgcaggggcatttgaagcgaaaaacgcaaaaagtttaaacctcgctccaaaaaacggagttgttgttgtggatgatgtttacacaacgggggctacaacttcttcctgcgcgagggcgctgaaaagagcgggttttgagaatataaaagtttgcaccctgctctacgaacttcccgcaagcgcggtggcagacttggcggcagataaaaaaatggggtggaaaacggagagcaactag

SEQ ID NO: 65454 - protein, 256 aa, Unknown
  Obtained from environmental sample
  misc_feature (1)..(256): Xaa is any amino acid
MAVFPLYKRLRYMNLRESLSFFFFGNVCVGCGRGSQKLDPWLCPNCKEELIACGEHPIWPGKEDAICLFPMNSLTRNLILAMKYKGMQKIASYLVAHSSVGRKGEALQILEGWGKNMPFIPVPVHNARMRERGYNQSELAAFELSLHCGGKLQKNILKRRIYKPSQTLLGSGARSLNVAGAFEAKNAKSLNLAPKNGVVVVDDVYTTGATTSSCARALKRAGFENIKVCTLLYELPASAVADLAADKKMGWKTESN

SEQ ID NO: 65455 - DNA, 777 bp, Unknown
  Obtained from environmental sample
  misc_feature (1)..(777): n is a, c, g, or t
atgaaaaccattgtcgttaaaattggcgggtcgcttgcggtggatgaggctaagttgctggattttgcagttgcggcggcagaggtatccaaggaattttgcttagttattgtgcacggcggcggcaaagacataaacgcaaatttggttttgctgaacgaggaacccaaattcataaacgggcttagggttacaactcccgccataatggatatggtggagatgactctcagcggcaaggtcaataaaaaactcgtgaggatgctgcttttaaacaacgcaaacgccgcaggaatttccggcgtggatgccaaactgctggaagcaaaacccttgcagggcaaaggcgatttagggtcggtcggcgatatattcaaggtgaatacgcagattttggaggctttttttgccgcaaacataaccccagtaatttctccggtatcttatggggacggaatttcttacaacgtgaacgcagacacagccgcctccgagattgctattgcgctcaaagcggatagctttattttgataagcgatataagcggggttttagatcaggataaaaaaatcgtcccacatttaaacgcaggcttggcaaactctntaatccaaagcggcgtaatctccggcggaatgatcccaaaagttcaaagtgctttggaatcaatagaaagaggtttaaaatccatacacatcgttggatgggaaggcgcggagactttcaaaaagcaactctccggtatttctaacagcggaactattataggtaactaa

SEQ ID NO: 65456 - protein, 258 aa, Unknown
  Obtained from environmental sample
  DOMAIN (2)...(235): Amino acid kinase family
  misc_feature (1)..(258): Xaa is any amino acid
MKTIVVKIGGSLAVDEAKLLDFAVAAAEVSKEFCLVIVHGGGKDINANLVLLNEEPKFINGLRVTTPAIMDMVEMTLSGKVNKKLVRMLLLNNANAAGISGVDAKLLEAKPLQGKGDLGSVGDIFKVNTQILEAFFAANITPVISPVSYGDGISYNVNADTAASEIAIALKADSFILISDISGVLDQDKKIVPHLNAGLANSXIQSGVISGGMIPKVQSALESIERGLKSIHIVGWEGAETFKKQLSGISNSGTIIGN

SEQ ID NO: 65457 - DNA, 423 bp, Unknown
  Obtained from environmental sample
  misc_feature (1)..(423): n is a, c, g, or t
atgcaaaaagtaattattgacacgaatgtgttggtttctagtttaattcaaagaagttatcctcattatataatccggggtttatttttgagtggcaaatttaaactttgcatatcggaaagtttatttggggaatatgaagatgttttacataggcgaaaatttgcaaaatatccaaatttttataaaagtgcggattttttattgaaatatataagagaaaattcggcttttttttctccaacaattcatataaatatgctggaagacaaagatgacaatatgttcttggaactagcagacgaaagtaaggcacattttttaataacaggtaacgtaaatgattttgtaattccgaggtataaagagactttaatagtcaacccggtagattattgggagaattacaagccaaacatttga

SEQ ID NO: 65458 - protein, 140 aa, Unknown
  Obtained from environmental sample
  misc_feature (1)..(140): Xaa is any amino acid
MQKVIIDTNVLVSSLIQRSYPHYIIRGLFLSGKFKLCISESLFGEYEDVLHRRKFAKYPNFYKSADFLLKYIRENSAFFSPTIHINMLEDKDDNMFLELADESKAHFLITGNVNDFVIPRYKETLIVNPVDYWENYKPNI

SEQ ID NO: 65459 - DNA, 798 bp, Unknown
  Obtained from environmental sample
  misc_feature (1)..(798): n is a, c, g, or t
atgttggtatcttatgaaacagcgtcacaattaattgaaagcgggaggcttctccatattgcgggaacggaggctctgattaaaaaacttcctaaaggaaaatggatcggtggttccacggagtatttcatggcaaaggaaggcggtaaagtttccggcgatttattgtttgtaacggatttttccaaaacaaagtccgtctacgataaatttaaaattcaatcctatgacgaaaaaaatatctgtaaagtttcatccgacgcttatgaaaacggtttttcaatcctgattgtaccttttgacagcgcggtacataaggaatacgcgcaaaacgccgcaagttatgaaaatatgtttatgcgtcaaattgccggatggatctccggcacgaacctgaataaacaaggacaaacgcctgtggcggtcaatggatttacaggagaagcattttccgacaaggcggtcgcgcttcatttgcaaactaaagaagacaagaccgtttccgtcaacatcatcaacatttttgaacaggataccgactctcctgtaatcgaatttgtagaagagggttttcatgttaaaaaatgcctagtaaacggaaaagagcttgttcttgccgactatatagcaaaaaacaaaatagacacaaagatgccgattgtaggggattattcaggaagcggcgttaacatttcttttaaatcaattgaaaatgggattgttaatttttacgcgccggtatttcaaggaataaagtacaggattgccaaacccgtatccgactatgtggcctgttaa

SEQ ID NO: 65460 - protein, 265 aa, Unknown
  Obtained from environmental sample
  misc_feature (1)..(265): Xaa is any amino acid
MLVSYETASQLIESGRLLHIAGTEALIKKLPKGKWIGGSTEYFMAKEGGKVSGDLLFVTDFSKTKSVYDKFKIQSYDEKNICKVSSDAYENGFSILIVPFDSAVHKEYAQNAASYENMFMRQIAGWISGTNLNKQGQTPVAVNGFTGEAFSDKAVALHLQTKEDKTVSVNIINIFEQDTDSPVIEFVEEGFHVKKCLVNGKELVLADYIAKNKIDTKMPIVGDYSGSGVNISFKSIENGIVNFYAPVFQGIKYRIAKPVSDYVAC

SEQ ID NO: 65461 - DNA, 630 bp, Unknown
  Obtained from environmental sample
  misc_feature (1)..(630): n is a, c, g, or t
atggctgtaacttttagtaatacaccgtcaataattgttcttgacgaaatgcaggtaatgttggatacgattactgaaatgctaagtaattattatcatgtagtaggagtaaccaattttagctccctgttgaaagcaatcgttaaatacaatccttcattgtttttattggatacggaattgtcgaaaccgtcattttattcggccgcaaatacggaaatttcaagcggttttgacgtggcgaagcagattcgcaaaatgcccaaattcgctaaaactcaaattttatttatgacggcgattgcgaaagcggaaaccatcaccaatgcgattaaaagcggcggcggcggcgttattatcaaacccccgagcaaggttgtcttgttgggaaagattcattacctgctgtcgccggtaacgattacgattgaacaaacagaaaaggttttaaccggagacacaaaattttcccaattagcgttttccatgctgattacacgcatgaaaacgctttatgccaaatacccgacaaaggaaacactgcaaacttttgcagaggaaataaccgagtttattgaaaagtccaaggtgcttatggctgcggactttgaagctatatgtaaactataa

SEQ ID NO: 65462 - protein, 209 aa, Unknown
  Obtained from environmental sample
  DOMAIN (9)...(133): Response regulator receiver domain
  misc_feature (1)..(209): Xaa is any amino acid
MAVTFSNTPSIIVLDEMQVMLDTITEMLSNYYHVVGVTNFSSLLKAIVKYNPSLFLLDTELSKPSFYSAANTEISSGFDVAKQIRKMPKFAKTQILFMTAIAKAETITNAIKSGGGGVIIKPPSKVVLLGKIHYLLSPVTITIEQTEKVLTGDTKFSQLAFSMLITRMKTLYAKYPTKETLQTFAEEITEFIEKSKVLMAADFEAICKL

SEQ ID NO: 65463 - DNA, 492 bp, Unknown
  Obtained from environmental sample
  misc_feature (1)..(492): n is a, c, g, or t
atgaggcggtattcgggaaaactgccgttttccagttggatactaattattatcccgcctttggttctgtgggcggttctgacttatttcgcttatgtcgcagatccgcttttgattgatcggggcattaacatctacggcccctgcttctgttttgggctgttctgtatattgctgaatatagggatactttatctctatatacgtcaattgattattaccgacgccaggaacctggcaattgcggtatccgatgtagaaccggtatggactcaggagaacggcctttcggagaatttccgcaagcactaccaacttacagacagggaaaaagacattgttgaagttatgatgcaggggaaaagcaacaaagaaatcgccgatactctgttaatttcgctcaggacggtgggagcctaccttcaaaatgtctacaagaaaaccggcgtgtctaaccgcttcgccctatactcaatgataaagggtaattag

SEQ ID NO: 65464 - protein, 163 aa, Unknown
  Obtained from environmental sample
  SIGNAL (1)...(25)
  DOMAIN (103)...(160): Bacterial regulatory proteins, luxR family
  misc_feature (1)..(163): Xaa is any amino acid
MRRYSGKLPFSSWILIIIPPLVLWAVLTYFAYVADPLLIDRGINIYGPCFCFGLFCILLNIGILYLYIRQLIITDARNLAIAVSDVEPVWTQENGLSENFRKHYQLTDREKDIVEVMMQGKSNKEIADTLLISLRTVGAYLQNVYKKTGVSNRFALYSMIKGN

SEQ ID NO: 65465 - DNA, 2478 bp, Unknown
  Obtained from environmental sample
  misc_feature (1)..(2478): n is a, c, g, or t
gtgacgacgagcacggtgtttagcgcgaacacgaccgtctacgcctattggggctataaaataatgtacaacctcaacggcgggacatcaaccgttccgaagcccgatacgatccgtgctgccgatagcaccctcaagtctttaccgacggcgccgacaaaggccaattcggtattctacggttggtacacggcggcgacgggtggcacggaggttacgacgacgagcacaaagttcatatcggactcgaccgtctacgcccagtgggcctataagataacgttcaaccccaacggcggcacggttacccctaccgccgacacgaccaaagccgatggcaaactcgccgctttgcccgaagagcccacgaagcccggctataaatttgacggctggttcacggcggcgacgggcggcacggaggtgacgacaaactacgtgttcagtgccaacgctaccgtccaagcgaagtgggagcttataacttacgagataacgctcaatcccaaagacggtatgataacggcgacgacaaatgataccaccatcataaccggaaccggtgggaggattgcctctactttacctacgcccacaaaactaggttatacgttcgatggttggtacacgacggaggatacggaagatggtaaaaaggtaactacaggttcgtcaggtacggtgtttaacgaaaacgcgactatctatgccagatggaagattgtagaatacaagataacttacaaactaaacgatggaacagactctaccaatccaaatccgaagacatacacagttgaggactacgttacgctgaatcctccaacaaaacgcgccaacacatttgtcggttggacgggtaccggcattacggacacggcgccggacgtgaatattacgcagggctctggcgatagaacctataccgcgatctggtcggtcaacatttacacgataacgttcgacgccggcgacaccacgatagttttggagaccggtaagacaagcgccctcgccggaaagctcacgtctgtgcccgcggcgccgaaagcggaagccggctacaagtttgacaattggtacacggatgtcctagatagcgtcgtcaaagtaacaacaacctacatattcgacaacgatgccaacgttcgcgcccaatggaagcctatagaatacaaaataacttacaatggggtagacacattaaacggtaccaatccaaatccgtatacatacacaattgaggacgacattatgctgaatgagccgaccaaaatcgcccactcgttcataggttggattggaaccggtattaataaggatacgctaaagacggttcccatttcgcatgacaccggcgccagaacttataacgcgatctggaaggtcaacgtctacacgataacgtttgatgacgacggcaatacggcgacacaggagacaggtaaaacgagcgccacagccggaaagctcacgtctttgcccacgccgacggcaaaaccgggttacctttttgaaggatggtttacggatgttccggacagcgtggtcaaagtgacgacaagctacgtgtttgatgacgatgcgcgcgtctatgcgatatggacgcctatctacactataacgttcgacgccaaaggcggctcggtaactcccgcgaccctcaacaccggctccggcagtaggctcgtgtctttacccacgccaacaaggtatagctacctctttgacggttggttcacggaatcgtcagacgatgaggtatacggtgacaaagcagatacaaatatggtgtttaccggtaacgataccctatatgccggttgggcgacctcatacattgtaaacttcagcgccggcgcaaacggcaaattgacggctaaggtcatcagtgattcaataattacaggtgattcggtacagtgcggcaagagcgttgtattcaccgcagttccagattcgagttacgtcgtaagcggttggaaggtcaacggcacggcggtttccggcgattccagtgtcacttacacgctcaaagacgtaaatattacgatggtgacggtggaagtatcgtttgtcaagtttacatccgtgacgtcgcccgaccgcgtaattccagacgccgcctccaacgcgggcgtagcggcggtagcgccggtgaatcggttcgccgccgagttcacggcaggcccgaatccggtgggcagatcgtccggcgcggtgagcttcttccgcaacggcagccgcgtatcgtcagcgtcgcgtttgacagtgttcgacgcgtcgggtaagacggtcaaaaacatcggcatcaaagataacgcctccggcaacaacggcaggcgggcggtaggctcgtgggacctgcgtgacgcgaaagggcgtcaggtgccggcgggcacgtatttagtcacaggcgtactgaaaacgtccggcggcaagagcgagaaggtgtcggtggtcgtcggcgtgaggtaa

SEQ ID NO: 65466 - protein, 825 aa, Unknown
  Obtained from environmental sample
  misc_feature (1)..(825): Xaa is any amino acid
MTTSTVFSANTTVYAYWGYKIMYNLNGGTSTVPKPDTIRAADSTLKSLPTAPTKANSVFYGWYTAATGGTEVTTTSTKFISDSTVYAQWAYKITFNPNGGTVTPTADTTKADGKLAALPEEPTKPGYKFDGWFTAATGGTEVTTNYVFSANATVQAKWELITYEITLNPKDGMITATTNDTTIITGTGGRIASTLPTPTKLGYTFDGWYTTEDTEDGKKVTTGSSGTVFNENATIYARWKIVEYKITYKLNDGTDSTNPNPKTYTVEDYVTLNPPTKRANTFVGWTGTGITDTAPDVNITQGSGDRTYTAIWSVNIYTITFDAGDTTIVLETGKTSALAGKLTSVPAAPKAEAGYKFDNWYTDVLDSVVKVTTTYIFDNDANVRAQWKPIEYKITYNGVDTLNGTNPNPYTYTIEDDIMLNEPTKIAHSFIGWIGTGINKDTLKTVPISHDTGARTYNAIWKVNVYTITFDDDGNTATQETGKTSATAGKLTSLPTPTAKPGYLFEGWFTDVPDSVVKVTTSYVFDDDARVYAIWTPIYTITFDAKGGSVTPATLNTGSGSRLVSLPTPTRYSYLFDGWFTESSDDEVYGDKADTNMVFTGNDTLYAGWATSYIVNFSAGANGKLTAKVISDSIITGDSVQCGKSVVFTAVPDSSYVVSGWKVNGTAVSGDSSVTYTLKDVNITMVTVEVSFVKFTSVTSPDRVIPDAASNAGVAAVAPVNRFAAEFTAGPNPVGRSSGAVSFFRNGSRVSSASRLTVFDASGKTVKNIGIKDNASGNNGRRAVGSWDLRDAKGRQVPAGTYLVTGVLKTSGGKSEKVSVVVGVR

SEQ ID NO: 65467 - DNA, 309 bp, Unknown
  Obtained from environmental sample
  misc_feature (1)..(309): n is a, c, g, or t
gtgaatatgcccagcacccttgaagccaccgatgtgtttttgaagaataaggtgctgtttgcccccggtaaagcggctaacgcgggcggcgtagcgacatcggcgctggagatgtgccagaactccatgagattgtcatggtcgtttgaagaggtggatcaaaagcttaagagcatcatggtgaatatttataacaacattgccgccgccgcgaaagaggccggctctgaggacaattttgtcgtgggggcgaatatcgccggcttcaaaaaagtcgcggaggcaatgaggcagcaggggacggtttaa

SEQ ID NO: 65468 - protein, 102 aa, Unknown
  Obtained from environmental sample
  DOMAIN (1)...(100): Glutamate/Leucine/Phenylalanine/Valine dehydrogenase
  misc_feature (1)..(102): Xaa is any amino acid
MNMPSTLEATDVFLKNKVLFAPGKAANAGGVATSALEMCQNSMRLSWSFEEVDQKLKSIMVNIYNNIAAAAKEAGSEDNFVVGANIAGFKKVAEAMRQQGTV

SEQ ID NO: 65469 - DNA, 1317 bp, Unknown
  Obtained from environmental sample
  misc_feature (1)..(1317): n is a, c, g, or t
atgacgaacggagcgaggtcgcggccgtgcttgcacggacatgaccgagcgagtgaggacatcgaagggcgaagcccttcattacatctaacggagagatacatgagtgaaaagattgttttagcgtattcgggcgggctggacacaacggtcatcctgccctggctaaaggaaaattacaagggctgcgaggttatcgcctgctgcgtcgacgtgggccaatgcaatgattacgccctgatcgagaaaaaagcagccaaaatcggcgtcggcaaggtggttattattaacgcccgggatgagtttataaccgactttatctatcctatggttaaggcgaacgccgtttacgaggggaagtaccttctgggaacctccgccgcccggcccctgatcgcgaagaagctggtcgatctcgcccttgccgaaggcgcaaagaccatttcccacggggctacgggcaagggaaatgatcagatacgtttcgagctgaccataaaagccttcgctcccgggatgaagatcatcgcgccctggcgtttatgggacattaaatcccgcgaagaggaaataaagtatttggaggatcgcggaattgaggtgcccaagaaagaacagagctacagccgggacgacaacgtatggcatttaagccacgaggggcttgagcttgaagaccccgcccaggaaccggattacaagaaaatattacaactgacagtcaggccggaagacgcgccggatacgcctgagtatgtggagctttgctttgagaaagggattcccgtcagcctgaacgggaaaaacctcgcgccccttgaactgctggagacattaaataaaatcggcggcagaaacggcgtcggcatagtggatctggtcgagaaccgggtggtcggcatgaaatcgcgcggcgtgtatgaaacgccgggcggaagcatcgtgtacgcggcgcacagggagctggaaaatctgtgccttgaccgccagaccacctcgttcaaggcgatggtcgggcaaaagctcgccgaactgatctattcgggagaatggtattcgccgttaagggaagcgctgtccgcctttgtggacaaaacccaggagaccgtcacgggcactgtcaagctgaaattgtataaaggcaatatcgtgccggcgggcagcaaatcgccgtattctctgttcaaccaggaactgtccagctttacaaccggaagcctctacgaccacagggacgcggacggcttcatcaaactgctggggcttccgatgaccgtccgcgctttaatgaaaaaggctgttggggaaaagcattga

SEQ ID NO: 65470 - protein, 438 aa, Unknown
  Obtained from environmental sample
  DOMAIN (40)...(430): Arginosuccinate synthase
  misc_feature (1)..(438): Xaa is any amino acid
MTNGARSRPCLHGHDRASEDIEGRSPSLHLTERYMSEKIVLAYSGGLDTTVILPWLKENYKGCEVIACCVDVGQCNDYALIEKKAAKIGVGKVVIINARDEFITDFIYPMVKANAVYEGKYLLGTSAARPLIAKKLVDLALAEGAKTISHGATGKGNDQIRFELTIKAFAPGMKIIAPWRLWDIKSREEEIKYLEDRGIEVPKKEQSYSRDDNVWHLSHEGLELEDPAQEPDYKKILQLTVRPEDAPDTPEYVELCFEKGIPVSLNGKNLAPLELLETLNKIGGRNGVGIVDLVENRVVGMKSRGVYETPGGSIVYAAHRELENLCLDRQTTSFKAMVGQKLAELIYSGEWYSPLREALSAFVDKTQETVTGTVKLKLYKGNIVPAGSKSPYSLFNQELSSFTTGSLYDHRDADGFIKLLGLPMTVRALMKKAVGEKH

SEQ ID NO: 65471 - DNA, 1374 bp, Unknown
  Obtained from environmental sample
  misc_feature (1)..(1374): n is a, c, g, or t
ttgagcgcgaaattatggggggggcgcttttctggacagactgacggacaggccggcagcttccattcttccatcgcgtttgactcaaggctttacagacatgatataaagggcagcatagcccacgcgcagatgctcggtaaacaggatatcatctccagacaggatgcggaagcgatagtaaaatcgcttgagggcattttggcggacatcgaaagcggcgcgttgaaaatcgacatgaacgccgaggatattcattcctttgttgagtccgagcttgtctcgcgcattggcgatcccggcaggcgtctgcatacgggcaggagccgcaacgaccaggtcgcccttgatatgcggatgtatataaaagaagaaattgacgcgacggccgctctgcttgacaaattgcttgacgcgcttcttgccacggcaaaaaaacataccgcttcgataatgcccggatacacccatctgcaaaaggcgcagcctgttacgcttgcccatcatcttctggcctacgtccaaatgttcagcagggacagcaaaaggcttaaggactgccgcgaaagaaccgacgaaatgccccttggttccggggcgctcgcctccaccagctatccgcttgacagggaatttgtcagggaaaaacttggcttttcaaagataagcgcgaacagtatcgacgcggtatccgacagggatttctgcgcggaattcgttttttgcctgtcccttattatgactcacctgagccgcttctgcgaggagctggtgctgtggtctacggacagcttcggcttcgtggagatttcagacgcttacgcgacaggttcctcaataatgccgcaaaagaagaaccccgacatggcggagcttatcaggggcaaaacaggccgggtctacggcagcctgacatgcctccttaccgtgatgaaaggcctgccgctgtcgtataacaaggacatgcaggaagacaaggaagcggtcttcgacgccgttgacactgtaaaagcctgcctgtcggtattccgcggaatgtttgagacaattacgtttaacacggaaaatatgtataaaagcgcgcttggcggctgcacaaacgccacggacgcggcggactggctggtaaagaaaggcgtttccttcagggatgcccacgaaataaccggcaggcttgtgttatacgccattaagaaaaaaaagcggcttgaagagttaacgttagatgaattaaaagcaatatcgcccgtgtttaacgagacgctttaccaggctatttccgttgaagcctgcgtcaacgccaggaatctgcccggcggcccggctgaaaaagcggtgctggaagcgatagagcaattatcaaagagcaaatga

SEQ ID NO: 65472 - protein, 457 aa, Unknown
  Obtained from environmental sample
  DOMAIN (8)...(302): Lyase
  misc_feature (1)..(457): Xaa is any amino acid
MSAKLWGGRFSGQTDGQAGSFHSSIAFDSRLYRHDIKGSIAHAQMLGKQDIISRQDAEAIVKSLEGILADIESGALKIDMNAEDIHSFVESELVSRIGDPGRRLHTGRSRNDQVALDMRMYIKEEIDATAALLDKLLDALLATAKKHTASIMPGYTHLQKAQPVTLAHHLLAYVQMFSRDSKRLKDCRERTDEMPLGSGALASTSYPLDREFVREKLGFSKISANSIDAVSDRDFCAEFVFCLSLIMTHLSRFCEELVLWSTDSFGFVEISDAYATGSSIMPQKKNPDMAELIRGKTGRVYGSLTCLLTVMKGLPLSYNKDMQEDKEAVFDAVDTVKACLSVFRGMFETITFNTENMYKSALGGCTNATDAADWLVKKGVSFRDAHEITGRLVLYAIKKKKRLEELTLDELKAISPVFNETLYQAISVEACVNARNLPGGPAEKAVLEAIEQLSKSK

SEQ ID NO: 65473 - DNA, 324 bp, Unknown
  Obtained from environmental sample
  misc_feature (1)..(324): n is a, c, g, or t
gtgggcatccctgaaggaaacgcctttctttaccagccagtccgccgcgtccgtggcgtttgtgcagccgccaagcgcgcttttatacatattttccgtgttaaacgtaattgtctcaaacattccgcggaataccgacaggcaggcttttacagtgtcaacggcgtcgaagaccgcttccttgtcttcctgcatgtccttgttatacgacagcggcaggcctttcatcacggtaaggaggcatgtcaggctgccgtagacccggcctgttttgcccctgataagctccgccatgtcggggttcttcttttgcggcattattga

SEQ ID NO: 65474 - protein, 107 aa, Unknown
  Obtained from environmental sample
  misc_feature (1)..(107): Xaa is any amino acid
MGIPEGNAFLYQPVRRVRGVCAAAKRAFIHIFRVKRNCLKHSAEYRQAGFYSVNGVEDRFLVFLHVLVIRQRQAFHHGKEACQAAVDPACFAPDKLRHVGVLLLRHY

SEQ ID NO: 65475 - DNA, 1248 bp, Unknown
  Obtained from environmental sample
  misc_feature (1)..(1248): n is a, c, g, or t
atggccgagtgtggtagtgcgcaacagcgtgatttagcgagagctttaaagataacaaagaaaaacataatatttttatcccccgtgctgaaagttccgacggaacttgagaaggagatagccgtaatagactacaggctgcccgacaagcaggagcttatgaacataataaaaaggataacccaaagccttgacgagaaagacaatctggaaatcctaaaatcgcctgagaaactggagaagataacggaggcggcgcttggtctgacagccgaagaagcggaaaacgtgttcgctaaaagcctagtggagaaagggcagtttgacataacgatagtgctgtcggagaaagaacagataataaggaaatctggagttcttgaatattaccacgctattgagaaaatgcaggaagtaggcggactggaggagctgaagaactggcttactaagaggggaaaagcctttacgccccaagcgagggaattcgggctgcccgaaccgagagggatactgttattgggaatacccggctgcggaaagagcctgacggcgaaagcgatagccggaatgtggcagctgccgctgttgaaactggacgtaggaaaagtattttcaagttatgtgggcagcagcgaggaaaacgtaagaagggcgatacagacagcggagtcgatagcgccgtgcatactgtggcttgacgaaatggaaaaaggattttcaggactaggctcgtccggaatgaccgacgggggaacgacggcgcgcgtgttcgggacgtttctgacatggcttcaggaaaaaacgaccccggtttttgtagttgcgacaagcaacaacgtaagccagcttccccccgaactgttaaggaagggcaggttcgacgaaatattttacgtggatttgccgtccaaagaggagagggcggagatattgaaaatccatcttgaaaaacgcaagaggacgcccggaaattttgacatggaaaaaatagcacgggaaacacacggtttttcaggttccgagatagaggaagtaatagtgtctggattatacgacgcttttaatcagggcgaagaattgaagcagacgcatcttgagcaggtaataaagacgatgataccgttatcgcaaacaatggaagagcaaatcaggggaataagggattgggcgaagctgagggctagaagggcgagcaacatacaatgggaagaagagggcggagccgtgcggcagttggagatgtaa

SEQ ID NO: 65476 - protein, 415 aa, Unknown
  Obtained from environmental sample
  DOMAIN (170)...(356): ATPase family associated with various cellular activities (AAA)
  misc_feature (1)..(415): Xaa is any amino acid
MAECGSAQQRDLARALKITKKNIIFLSPVLKVPTELEKEIAVIDYRLPDKQELMNIIKRITQSLDEKDNLEILKSPEKLEKITEAALGLTAEEAENVFAKSLVEKGQFDITIVLSEKEQIIRKSGVLEYYHAIEKMQEVGGLEELKNWLTKRGKAFTPQAREFGLPEPRGILLLGIPGCGKSLTAKAIAGMWQLPLLKLDVGKVFSSYVGSSEENVRRAIQTAESIAPCILWLDEMEKGFSGLGSSGMTDGGTTARVFGTFLTWLQEKTTPVFVVATSNNVSQLPPELLRKGRFDEIFYVDLPSKEERAEILKIHLEKRKRTPGNFDMEKIARETHGFSGSEIEEVIVSGLYDAFNQGEELKQTHLEQVIKTMIPLSQTMEEQIRGIRDWAKLRARRASNIQWEEEGGAVRQLEM

SEQ ID NO: 65477 - DNA, 579 bp, Unknown
  Obtained from environmental sample
  misc_feature (1)..(579): n is a, c, g, or t
atgagaatacatcaaatactggagacatcagacgccaacggacccggtatacgttttgtgttatgggtacaaggctgcggcagaaaatgctcaggatgtttcaatcccgacacccatgacccatgcggcggatatgattttgaagtatccgaaataattaaacaaataccgctaggcaaagtaagtggtattacgctatcaggcggagaaccgtttgaacaagctgaagaactaatggtattacttaaagaagcaggacgaatggatttaaaccgtttggtatatacaggatatacatatgaagaattgctggcaatggatagttctgcaatcaggaattgtcttgaggaaatagagatgcttatagacggagcgtatgaaaaagagaaaccgccgtatatgccgtggacggggtctggaaaccagcggttaatccaattacaagacggtaaaataaagaaaatatatgagagaagcgattttaaggaaaacggagccgcagagggagaaataataatagccccaaacggcggaatactggcgacgggaataattgacggcagaatatttatggtataa

SEQ ID NO: 65478 - protein, 192 aa, Unknown
  Obtained from environmental sample
  misc_feature (1)..(192): Xaa is any amino acid
MRIHQILETSDANGPGIRFVLWVQGCGRKCSGCFNPDTHDPCGGYDFEVSEIIKQIPLGKVSGITLSGGEPFEQAEELMVLLKEAGRMDLNRLVYTGYTYEELLAMDSSAIRNCLEEIEMLIDGAYEKEKPPYMPWTGSGNQRLIQLQDGKIKKIYERSDFKENGAAEGEIIIAPNGGILATGIIDGRIFMV

SEQ ID NO: 65479 - DNA, 420 bp, Unknown
  Obtained from environmental sample
  misc_feature (1)..(420): n is a, c, g, or t
atgagccgaaacatattaggaaaaggttgggcgtttccagtatcccccgacgtgaaagggaatataaaattctcgcaatacgaaaagagcatagaagaatcaataaggataattctaaacaccacgcccggagagagacttatgcgccccgatttcggatgcatgattaacgagatggtatttgcccccaaccgcccccagtccataacccaagcggagcattacgtaagagaagcgataataaaatgggagccgagggtaattttgaaagaagtaaggggagaacctgatcccgataacgagacggtggtaaatataagaatccattatgagataaggtctgtaaatacattttttaatatggtataccccttttatttggagcgcggcgagacagattcccagaaacagcttagctga

SEQ ID NO: 65480 - protein, 139 aa, Unknown
  Obtained from environmental sample
  DOMAIN (28)...(117): GPW / gp25 family
  misc_feature (1)..(139): Xaa is any amino acid
MSRNILGKGWAFPVSPDVKGNIKFSQYEKSIEESIRIILNTTPGERLMRPDFGCMINEMVFAPNRPQSITQAEHYVREAIIKWEPRVILKEVRGEPDPDNETVVNIRIHYEIRSVNTFFNMVYPFYLERGETDSQKQLS

SEQ ID NO: 65481 - DNA, 2196 bp, Unknown
  Obtained from environmental sample
  misc_feature (1)..(2196): n is a, c, g, or t
atgaaaattaaaataaaactgagtatcatgatgatcgccattgttgcgatcgtagcgggaggtgttgccgtaattcagttggtaaggtcaagcaatataactttaaatcttgccaagcagaaaaccttatacctggcacgacaacgcgcccagtactgggacggacgcttgaacggttatataagcaccttacaagctttgtcgaatatttttaacttttatgaaagtatatcggtggaagaccggcgtcagcagtttgaagataacttaaaaggtatctttgaggatatgcccgattttgtacgaatgggtactatatggaagcctaacgccattgacggacaggacgctgctaatataggcagagtaggatcaacccccacaggacagtttgcttttaccttgacaagagaaaccgggcagatagtgaaaagcgccagcctcgttgtttctgaagcaatgtcaataatgaacggtccaaacggcaaagtagtcaatatgagcgatcccatccctataaaaaatttagggaaagatacctatgcggtcacaatctacgttcccattatcaataaacgtattaatgaaacagtaggagtcgtaatcggtcggttggatattgcaatgatacaaccgctggtagaggcgaccatcaaaaatcttgaggaagttaccagcgcggtcatttactccaacaacgggtttattttggcgaattatttgcctgagtttataggaaaacaaattgactcggaaacacaatacggtaaagacttgaacgatgtaaaaacagctattaaaaacgcgaaagaatgggaagggacagagtttgaccctgaactgcatacaaacatggtgatggcgatagccaatattcccatcggctcttccccgacaacatggtcggtaatgctcggttcaactgaagattacatcttgagagatgtcaactcattaagaacttttgtaattattttgatatcaatagcccttgtagttgcggtggtaattatctactttgtattggacaatactacatctccaattgtcaaggtctctgaaactcttaaagacatatcagaaggcgaaggcgacttaacaaagagcatagtcgtccattccaaagacgaggtaggcgatctcgccctgtatttncacaaaacgattgaaaaaatcaaaagccttgtgcttatcattaaaaagcagtcgcatacgctgtcggatatcggctccgacctgtccagtaacatgacggaaaccgcggcggcaatcaacgagattaccgccaatattcagggaatcaaaggccgcgtcattaaccagagcgccagcgttaccgaaaccaagagtactatggaacaggttatctctaatatcggcaggctcaacagccaggtagaaaaccaggctgaaacaatatcaaaacgatccgcctttattcaggcaatggttaccaatatcgattcggtaaatcagactttgattaaaaatctggaaaacgtgcaaaatctgaaagaagcctccgaagtaggccgcggcggattgcaggaagtgtcggcggatattcaggaaatagcccgcgagtccgaaggcttgctggagattaacgcggtaatggaaaacatcgccagccagaccaatttgctttcaatgaacgcggcgatagaggctgcccacgcgggggaagcgggtaaaggcttcgccgtagtcgccgaagaaatccgcaaactggcggataattccagcgaacaatccaaaactatcggtactgttttgaaaaagataaaagaatcaatggataagataaccaaatccactaccaatgtaatagccaaattcgaagcgattgacacgggcgtcaagacggtggcggatcaggaagataacatccgcaacgctatggaggaacagggcgaaggaagcaagcaaatcctgcaaggcatcagcactttgaacgaggttacccagaatgtaaagagcggttccgaggaaatgcttaacggcagccaggaagttatgaaggaaagccagcaccttgaaaaggtaacgcaggaaataaccggcggcatgaacgagatggccttgggcgcggatcaggtgaacacagcgataaataacgtcaaccagataagtattaaaaaccgcgaaggcatagaatcattgatcagggaagtgtcgaagtttaaggtggaataa

SEQ ID NO: 65482 - protein, 731 aa, Unknown
  Obtained from environmental sample
  SIGNAL (1)...(23)
  DOMAIN (467)...(687): Methyl-accepting chemotaxis protein (MCP) signaling domain
  misc_feature (1)..(731): Xaa is any amino acid
MKIKIKLSIMMIAIVAIVAGGVAVIQLVRSSNITLNLAKQKTLYLARQRAQYWDGRLNGYISTLQALSNIFNFYESISVEDRRQQFEDNLKGIFEDMPDFVRMGTIWKPNAIDGQDAANIGRVGSTPTGQFAFTLTRETGQIVKSASLVVSEAMSIMNGPNGKVVNMSDPIPIKNLGKDTYAVTIYVPIINKRINETVGVVIGRLDIAMIQPLVEATIKNLEEVTSAVIYSNNGFILANYLPEFIGKQIDSETQYGKDLNDVKTAIKNAKEWEGTEFDPELHTNMVMAIANIPIGSSPTTWSVMLGSTEDYILRDVNSLRTFVIILISIALVVAVVIIYFVLDNTTSPIVKVSETLKDISEGEGDLTKSIVVHSKDEVGDLALYXHKTIEKIKSLVLIIKKQSHTLSDIGSDLSSNMTETAAAINEITANIQGIKGRVINQSASVTETKSTMEQVISNIGRLNSQVENQAETISKRSAFIQAMVTNIDSVNQTLIKNLENVQNLKEASEVGRGGLQEVSADIQEIARESEGLLEINAVMENIASQTNLLSMNAAIEAAHAGEAGKGFAVVAEEIRKLADNSSEQSKTIGTVLKKIKESMDKITKSTTNVIAKFEAIDTGVKTVADQEDNIRNAMEEQGEGSKQILQGISTLNEVTQNVKSGSEEMLNGSQEVMKESQHLEKVTQEITGGMNEMALGADQVNTAINNVNQISIKNREGIESLIREVSKFKVE

SEQ ID NO: 65483 - DNA, 1011 bp, Unknown
  Obtained from environmental sample
  misc_feature (1)..(1011): n is a, c, g, or t
gtggaagacggcaaggttcacctgacccagaccgattcaggctgggcaaaattcgcctggggaaaaatttacggccagtggctctgcggcgccgccattggcgcgtatgacacggaaaaatttaccccgcagggaatgttggacgcgttacagcggctgaagccgacaactttctgcgcgccggcgacggttttccgttatctgataaaagaggacctttccggttatgacttcagtttcatccgccacacttcggtggcgggcgaacctttaagcccggaagtgtacaataaactaaaatcgttaacgggccttgaaatccacgaaggcttcggacagtctgaaacttcggtaatggcggcggcgttcaagtggtttcccgtaaggcccggctccatggggaaacccgcccccctgttcaagcttaatctgctggatgaagacggctgcgcctgcgatgacggcatgatcgggaacatgagcatcaccgcggcgggcaaaaatatgtacgagcttggacgcacggcgcctaacgccggacttcccgtaatcggcccctcggaatttcccggccttttcaggggctactggaaagaccaggatagtaccaattcatcctggaacaacggaacttacaaaacaggcgacatggcctggcgcgacggcgacgggtatttgtggtttgtgggcaggaacgacgacgtgatcaaatgctccggttaccgcataggccccttcgaggttgaaagcgccctgatggaacatccctcggttctggagtgcgctgtaaccgccgcgcccgatcccatgcgcggccaggtggtcaaagcgagcatagtgcttgcgcggggtttttcgccctcggacgaacttgtccgcgaactgcaaaaccacgtcaagcgcgtaacggccccctacaagtacccgcgtatagtggaatttctgccggaattgccaaaaacaataagcggcaaaataagacgtaatgttatacgacaagataaaccttaa

SEQ ID NO: 65484 - protein, 336 aa, Unknown
  Obtained from environmental sample
  DOMAIN (1)...(263): AMP-binding enzyme
  misc_feature (1)..(336): Xaa is any amino acid
MEDGKVHLTQTDSGWAKFAWGKIYGQWLCGAAIGAYDTEKFTPQGMLDALQRLKPTTFCAPATVFRYLIKEDLSGYDFSFIRHTSVAGEPLSPEVYNKLKSLTGLEIHEGFGQSETSVMAAAFKWFPVRPGSMGKPAPLFKLNLLDEDGCACDDGMIGNMSITAAGKNMYELGRTAPNAGLPVIGPSEFPGLFRGYWKDQDSTNSSWNNGTYKTGDMAWRDGDGYLWFVGRNDDVIKCSGYRIGPFEVESALMEHPSVLECAVTAAPDPMRGQVVKASIVLARGFSPSDELVRELQNHVKRVTAPYKYPRIVEFLPELPKTISGKIRRNVIRQDKP

SEQ ID NO: 65485 - DNA, 1209 bp, Unknown
  Obtained from environmental sample
  misc_feature (1)..(1209): n is a, c, g, or t
atggggaatagggagcgtagtgcgatattctgtcaatccttgcgggattttccctgtccggtaacgcttgggaaaaatgcgccgtcttttgggcttcaccgctttaagcaaggattgcggtttattccacctgacgatgaagggtttacgctaaggggcgataaacagtggcttgtctacaaggggcggcggcgttcccatcggtttacgatactcggcgatacggcttttgaatacgattgtattcttaaaaaagagccagaaagcaatgtcatttccttacgcatggaaggggctgaaaattttaactttttccggcaaccagattttgtagaagagccttttctgcaaggttcttatgcggtctacaaaaaagatacgctggtaggcgaagggacaggcaagctctgccatattcacaggccggaaattattgacgcaagaggacggcgttgttggggcgatttatctgttgtggggaatgagttactcataactatacctgaacagtggcttgccgaagctaagtatcccgttgtggttgatcctactgttgggactactacggtgggtagccaatacaggtggaggccgtcggctggcgaccctttaacgacattgatgtttgaagtagagatacctgtaaacaggtttctggtaacggacgcaataaacggaagctgtactggctatgcgtatgtaaactctgacgattctgaagcggcaggccgccctgttttatattcggataacagcaacaagccacagacaaggaaatcgcttaatgagaatttaatggatttgcgggtaacaagcagcaagcctaaaggctggcgtacagcaacatttaccagcaatgggagtattgcaagcggcacttatatttggtatggcatcttttgtgaatacttttggttcccccgatttgatactggcgcaaggtgctattctgatttctgggacgcatacaccagtataccaaatacttatcctatttacaatgtaaactggtatgacgatttgttactgtcgatgtattttacttatacctctgcgcaaaattaccaaagaaaattgacgcaaggcgtatcgttatcagatagccggacaataagaaaggaatataagcgcacagctacacaaacggttcatgcagacgcaacgcctacaaagcatctaactatatcaagagtatctcggccgatctga

SEQ ID NO: 65486 - protein, 402 aa, Unknown
  Obtained from environmental sample
  misc_feature (1)..(402): Xaa is any amino acid
MGNRERSAIFCQSLRDFPCPVTLGKNAPSFGLHRFKQGLRFIPPDDEGFTLRGDKQWLVYKGRRRSHRFTILGDTAFEYDCILKKEPESNVISLRMEGAENFNFFRQPDFVEEPFLQGSYAVYKKDTLVGEGTGKLCHIHRPEIIDARGRRCWGDLSVVGNELLITIPEQWLAEAKYPVVVDPTVGTTTVGSQYRWRPSAGDPLTTLMFEVEIPVNRFLVTDAINGSCTGYAYVNSDDSEAAGRPVLYSDNSNKPQTRKSLNENLMDLRVTSSKPKGWRTATFTSNGSIASGTYIWYGIFCEYFWFPRFDTGARCYSDFWDAYTSIPNTYPIYNVNWYDDLLLSMYFTYTSAQNYQRKLTQGVSLSDSRTIRKEYKRTATQTVHADATPTKHLTISRVSRPI

SEQ ID NO: 65487 - DNA, 819 bp, Unknown
  Obtained from environmental sample
  misc_feature (1)..(819): n is a, c, g, or t
atgcgcctagacaaatacctccaatcaaaataccccgaatactcccgcacggatttacagaaaatcattgcggagggcaaggttttgttgaatgggaaagagctgtctaaaaattttcaggtggacgaaaacgcagagctggaaattctgcaaatgcctgtaaaagaggaaagttttttggaaccggagaacattcccttaaacatagtttttgaagatgagcatttggcggtgctgaataaaccgcgaaatatggtgatgcatccggggaacggcataagcaagggaacccttgccgccgcactgctttggcattttaaaaatctttcacagataaacgggccgctacgccccggtattctgcacaggttggacaaagacacccccgggcttttggttgttgcaaaaacggacttggctcataaggagctgacgcaccaactggcggagcggattttggaacgaacataccgagccatcatctggggagttttgcgagacagggaaggcaaaattgatgtgcctatagaacgcgatccaaaaaaccgcctgaaaatgtctgtgcaggcaaatggcaaaaccgccaccaccttttacaaaaccgaggaaacttttggcatagcctccctcgtggaatttcaactggacacaggcagaacgcatcagataagagttcatctccgctatcttgggaaacccgttgtgggcgacccgctttacgatggcagggaagaaaacccaaaagaaaaaaccctatttacagagacttggcgaaaaacttttggaaaatgcccctcccaactttttcaattcctataa

SEQ ID NO: 65488 - protein, 272 aa, Unknown
  Obtained from environmental sample
  DOMAIN (1)...(47): S4 domain
  misc_feature (1)..(272): Xaa is any amino acid
MRLDKYLQSKYPEYSRTDLQKIIAEGKVLLNGKELSKNFQVDENAELEILQMPVKEESFLEPENIPLNIVFEDEHLAVLNKPRNMVMHPGNGISKGTLAAALLWHFKNLSQINGPLRPGILHRLDKDTPGLLVVAKTDLAHKELTHQLAERILERTYRAIIWGVLRDREGKIDVPIERDPKNRLKMSVQANGKTATTFYKTEETFGIASLVEFQLDTGRTHQIRVHLRYLGKPVVGDPLYDGREENPKEKTLFTETWRKTFGKCPSQLFQFL

SEQ ID NO: 65489 - DNA, 831 bp, Unknown
  Obtained from environmental sample
  misc_feature (1)..(831): n is a, c, g, or t
gtgcctattgatattttctatattttttgcacaaaaatgcaaacttacctgaacttgctaaaagatgttaaagagagcggtgcggaaaagaacgaccgcactggcaccggaacgtggagcgtttttgggcggcagattcgctttgatttgagcaaaggattcccgcttttgaccacaaaaaaagtacatctaaaatctatcatcgtggaattgttatggtttttgcgcggagacacaaacacaaaatttctgcacgagcacaaagtaagtatatgggatgagtggcaaaatgaaaacggtgatttggggcctgtgtatggagcgcagtggagaagctggcaaagcacaagcggagaaaagatagaccagatttccgagattttaaaatcgctaaagaataatccagatagccgccgccatatagtctgcgcttggaatgttggggaaatagataaaatggctctgccaccgtgccactgtctttttcagttttatgttgcgaacaacaaattgagctgccagctatatcaacgctccgcagatatatttttgggggtgccattcaacatagcgagctacgccttgctaacccttatgctgtgtcaagtgctgggttatgagcctggtgaatatgtgcatacatttggggatttgcacctgtataaaaaccatttggagcaagcggagttgcagctctcaaggcagcccaaacccctgccacagatgaaaataaatcccgatgtgaaaaatctttttgaatttaaatttgaagatttcgctttggaaaattacgattcgtggccagccattaaggcaccagtggctgtgtga

SEQ ID NO: 65490 - protein, 276 aa, Unknown
  Obtained from environmental sample
  DOMAIN (11)...(276): Thymidylate synthase
  misc_feature (1)..(276): Xaa is any amino acid
MPIDIFYIFCTKMQTYLNLLKDVKESGAEKNDRTGTGTWSVFGRQIRFDLSKGFPLLTTKKVHLKSIIVELLWFLRGDTNTKFLHEHKVSIWDEWQNENGDLGPVYGAQWRSWQSTSGEKIDQISEILKSLKNNPDSRRHIVCAWNVGEIDKMALPPCHCLFQFYVANNKLSCQLYQRSADIFLGVPFNIASYALLTLMLCQVLGYEPGEYVHTFGDLHLYKNHLEQAELQLSRQPKPLPQMKINPDVKNLFEFKFEDFALENYDSWPAIKAPVAV

SEQ ID NO: 65491 - DNA, 852 bp, Unknown
  Obtained from environmental sample
  misc_feature (1)..(852): n is a, c, g, or t
ttgaaaggtaatgttttaacttcttgtggcatatctggcagggagtgttcggcttcgctggaattgctgaacgcaaattccagcgaaggtgggatttgctggttctatggcgaaacggagcctaaaaattttaaagcggtttacgaaaacaggacaacggttttagttcacagttcagggaaaagaatcataggcgtagagcatttaaacgcggccgccctaacattcccgaactgcgaatttgcattgaatgctgccccgcaaggcgaattgcccctattagacggaagcgcaaaattgtggcaggcggcattggccgccgccgccgtaggggcagacctacgtgtctgcccctacaatggcggcggcccctacaatggcaccgcccgccccgataacggcggcggcggcaatttaaatttctacgtcccgcaaaaaaaacaatttgaaataggaacaaatgaacgatatttaaaatacgataacggcgccgccctggaaatccaatacacaataaaccgtttcaatcaggaattcagcgcaacagtccaaataaaaaccccagaagatttggaaaaaatttttttagcgagaacattcatctttgagcaggaactgccagccgccaacctatccgaaaacctcagaagttgcggtttgcttttgcagagcggcaaaaaaaatgatttgcgttttgagaacgaaccggcttatcacaaaattctggattttttaggcgacatcagcatctattcaaacgccttgcctctcggaaaattcaccatcttaaacggcggtcatgagttacatcacacagccactggtgccttaatggctggccacgaatcgtaa

SEQ ID NO: 65492 - protein, 283 aa, Unknown
  Obtained from environmental sample
  DOMAIN (1)...(282): UDP-3-O-acyl N-acetylglycosamine deacetylase
  misc_feature (1)..(283): Xaa is any amino acid
MKGNVLTSCGISGRECSASLELLNANSSEGGICWFYGETEPKNFKAVYENRTTVLVHSSGKRIIGVEHLNAAALTFPNCEFALNAAPQGELPLLDGSAKLWQAALAAAAVGADLRVCPYNGGGPYNGTARPDNGGGGNLNFYVPQKKQFEIGTNERYLKYDNGAALEIQYTINRFNQEFSATVQIKTPEDLEKIFLARTFIFEQELPAANLSENLRSCGLLLQSGKKNDLRFENEPAYHKILDFLGDISIYSNALPLGKFTILNGGHELHHTATGALMAGHES

SEQ ID NO: 65493 - DNA, 501 bp, Unknown
  Obtained from environmental sample
  misc_feature (1)..(501): n is a, c, g, or t
ttgtggattggaacttctggcgatggtgcctattcattttcgcagataaacggttcgccggatagcttagcggcaaaacgtattaggattaaagatggacttttaaacgaaaatatctacgatatagctatagatacaataaaaggcttggtttactttgctcacgatttaggcatcagcgtttattccacagctcttgttcgcaatacatcggattatatgcaaagcgatgcaccaaaacccatagcctacccaaacccgttccgccctgaacagcacaaagttttgaagatagattttataagcgaaagctcctcgctttacattttggattcctccggcaagcgtgtccggttttttaaggggaacgaattgcagggcgggatggctatttgggatggaaggaacgagagcggaaaattagttgcacctgggctatattactttatggcttcggataaaaaaaatgtagctaagggaaaaattctagttgaaaggtaa

SEQ ID NO: 65494 - protein, 166 aa, Unknown
  Obtained from environmental sample
  misc_feature (1)..(166): Xaa is any amino acid
MWIGTSGDGAYSFSQINGSPDSLAAKRIRIKDGLLNENIYDIAIDTIKGLVYFAHDLGISVYSTALVRNTSDYMQSDAPKPIAYPNPFRPEQHKVLKIDFISESSSLYILDSSGKRVRFFKGNELQGGMAIWDGRNESGKLVAPGLYYFMASDKKNVAKGKILVER

SEQ ID NO: 65495 - DNA, 795 bp, Unknown
  Obtained from environmental sample
  misc_feature (1)..(795): n is a, c, g, or t
ttgggcgttgatgaagcggaaattatcggaaagtccgacaaggacggcgcgtggctgcataacgatgacatgaagttgattcatgaaagagaaaaaatgataataaacgaaggccgcgttttagtctttgaagaaaaaatacactcgcccaaaacaggcaatgaaagtttttttgaaacggttagggctccgataaggcagggcggcgttgttatggggatagttgccattgcacataacataagcgaacgtaaagcccttgagcaagagcttgcgtttaagaccgccaaactgcagatgattattgatacaatcccggacatactgttttgcaaagacacgaatttaaaatatacgcaatgcaacaggcgttttgagagattttggggtgttcacgaagccgatgtgctcggtaagtcggatgacgacagattgtggttttctcccgacttgttacaaaggataaatcaggcggaattagacgtaattaatacaggcaaatcggttgtccgcgaattaagcctgtcgtctccgttaacaggtaaaaaggcggtttttgaatcggttttttctccgttaatgcaaaacgatgaagttgtcggaatagtatgcatcgcgcacgacataaccatacgcaagaaaatggaagatgaaatcagagccgctttggactccaaaacgtccttccttgcccacatgagccatgaactcagaacgccgcttaacgtgattatagggccttaccgatttgataatggaagacaccccataaggatgttacaaataatatattga

SEQ ID NO: 65496 - protein, 264 aa, Unknown
  Obtained from environmental sample
  DOMAIN (96)...(209): PAS fold
  misc_feature (1)..(264): Xaa is any amino acid
MGVDEAEIIGKSDKDGAWLHNDDMKLIHEREKMIINEGRVLVFEEKIHSPKTGNESFFETVRAPIRQGGVVMGIVAIAHNISERKALEQELAFKTAKLQMIIDTIPDILFCKDTNLKYTQCNRRFERFWGVHEADVLGKSDDDRLWFSPDLLQRINQAELDVINTGKSVVRELSLSSPLTGKKAVFESVFSPLMQNDEVVGIVCIAHDITIRKKMEDEIRAALDSKTSFLAHMSHELRTPLNVIIGPYRFDNGRHPIRMLQIIY

SEQ ID NO: 65497 - DNA, 1707 bp, Unknown
  Obtained from environmental sample
  misc_feature (1)..(1707): n is a, c, g, or t
ttgaaaataaacaacgcgggaagcacgcttttaagcattgtaaactcaattttggacttttccaaaatcgagtcgggcaagctggaaataacgccgtctgagtattttacggcaagccttttgaacgatgtctctaccgttgtagttacgcggctcggggaaaaacccgtaaagttcagcctggatatcgaagccgatttgccggaaaggatgttcggcgacgacctgcgcgtgaaacagatattaatcaacctcctgaccaacgcggttaaatacacgcgcgagggaagcattgaattaaacatacgccacacgcgcgaaggcaggaccgtgtggctggatattgccgtcagcgacaccggcatcggcgtgcgcgagaacgacctgaaaaaactgttcaatgattatgtccaggttgatacaaagaccaaccgcagcattgaaggcacgggactgggcctgcccattaccaaaaaacttgtagagcttatgcacgggcaaatcggcgcggaaagcgagtacggcaaaggcagtacgttccgcgtgcggctgggccagggctttgtcgataattcgatcctcgggccggacgttgtgaacaaactccgcagtttccagtatgccgaagacaagcgtatcgcaaacaagaagcttttacggcttgatttgagctatgcccgcgtgctggtagttgacgacgtcctgaccaatctggacgttacggcgggcctgttgcgcaaatacaaaatgcaggttgactgcctggacaacgggcctgccgcgattcagcggataaggggcggaaatccggtttacaacgccatattcatggatcacatgatgcccgatatggacggcatagagacggcggacaatatccgggccttaggcacggactatgcgaaaaatataccgataatcgcccttaccgccaacgccatccatggcacggagcagttgttttatgagcacggttttcaggcgtttgtaaccaaacccattgatatgacggaactggatttggttatcagaaaatgggtgcgcgacgaaacccgggacgacgtacccgttatcagcgcgccggtttataacgattattacgaacaaataacgatagaaataccgggcgtggatacgaaaaaagggcttagtctgtacgccggcgacacgggcgtttatctggccctgctgcgctcatacgtcgccaacacgccggggcttctggacaaactgaggatcgtctcgaaagaaacactgccaaaatacaacgtctccgcacacgggttaaaaggctccagcgccaacataggcgcggaaacaatacgggaaacggcttttgaactggaaaaaatatccaaagaaggcaacttgcagggcgtttgggcgctgaacggcaaactcatcgccgatacgaagatcatcgtctccaatataaaaacgtggctggaacaatatgacgccggcaaagagaaaaaacccgtccagaaagcacccgacagggagcttctgaaacgggtccgcataagctgtgaaaattacgacataagaggcgccgataaagttttaacaatactggaaagcgccgattacgaaaaagacggcgatctgataaaatggctaagggacagaatcgaaaactcggagtttactgaagcggcgcaaaaacttaaagaatatgaaaaaggaggcataaaaaatggcaaatga

SEQ ID NO: 65498 - protein, 568 aa, Unknown
  Obtained from environmental sample
  DOMAIN (395)...(481): Hpt domain
  misc_feature (1)..(568): Xaa is any amino acid
MKINNAGSTLLSIVNSILDFSKIESGKLEITPSEYFTASLLNDVSTVVVTRLGEKPVKFSLDIEADLPERMFGDDLRVKQILINLLTNAVKYTREGSIELNIRHTREGRTVWLDIAVSDTGIGVRENDLKKLFNDYVQVDTKTNRSIEGTGLGLPITKKLVELMHGQIGAESEYGKGSTFRVRLGQGFVDNSILGPDVVNKLRSFQYAEDKRIANKKLLRLDLSYARVLVVDDVLTNLDVTAGLLRKYKMQVDCLDNGPAAIQRIRGGNPVYNAIFMDHMMPDMDGIETADNIRALGTDYAKNIPIIALTANAIHGTEQLFYEHGFQAFVTKPIDMTELDLVIRKWVRDETRDDVPVISAPVYNDYYEQITIEIPGVDTKKGLSLYAGDTGVYLALLRSYVANTPGLLDKLRIVSKETLPKYNVSAHGLKGSSANIGAETIRETAFELEKISKEGNLQGVWALNGKLIADTKIIVSNIKTWLEQYDAGKEKKPVQKAPDRELLKRVRISCENYDIRGADKVLTILESADYEKDGDLIKWLRDRIENSEFTEAAQKLKEYEKGGIKNGK

SEQ ID NO: 65499 - DNA, 453 bp, Unknown
  Obtained from environmental sample
  misc_feature (1)..(453): n is a, c, g, or t
atggcaaatgaacagaaaaaaatcatcgcggtggacgacattcccgagaatctggcggctatcaggaataccttgaaggatctgtacgaggtgtatccctgcccctccgcagtgaagatgtttgagttattggagcatgtcaagccggatttaatcatgctggacgtcgggatgccggatatggacggttatgaggcgattaaaaagttgaaaagcgatgatcggttcaaggatatacccgttatattcctgtccgccatgagcgacgagaaaagcgagatggaaggcttaaaacttggcgccgttgactatatccacaaaccctttgtcacccccttgttgctccagcgcataaagatacacttgtccatgtcggaacagcaaaaaataattttggacaggaataaggaaattgagaattttcttaaaaaaatttccaatacccctatgtaa

SEQ ID NO: 65500 - protein, 150 aa, Unknown
  Obtained from environmental sample
  DOMAIN (6)...(119): Response regulator receiver domain
  misc_feature (1)..(150): Xaa is any amino acid
MANEQKKIIAVDDIPENLAAIRNTLKDLYEVYPCPSAVKMFELLEHVKPDLIMLDVGMPDMDGYEAIKKLKSDDRFKDIPVIFLSAMSDEKSEMEGLKLGAVDYIHKPFVTPLLLQRIKIHLSMSEQQKIILDRNKEIENFLKKISNTPM

SEQ ID NO: 65501 - DNA, 1959 bp, Unknown
  Obtained from environmental sample
  misc_feature (1)..(1959): n is a, c, g, or t
ttggttatctatttcgatttagtatttgacattccctcggacttaagtttcacatatcttattgatgataaaaacgaagcggctatcggaaaacgcgcgatggttccttttggaaaaagagacgttctcggctacatcataggacagcgcgatatgctgccggaagggataaaatacgaagccgtaaaaaaaatccgccgtgtggtggatagcgaaccgttattcggcgagagagaaatagaaatcgcaaaatggatggcgggtttttacatttgcggtacggggcaggcgatttccgcgatgattccgtcaggaagaagggaaaaagtccctaccctgcccgcgggcgatgaggaaataattccttcgctttcaatatccgatgagcaggcggcggctttaagcgcgataacctctccggtagaaaataccgattccaattccaacctgccgccgatgttctacctttacggcgttacgggatcaggtaaaacggaagtgtttcttagagcggcgcagtatatgttaaacgaaggaaaatccgttatctatcttgtgcctgaaatatcgcttacccaccaaaccgcgcagatgattggaaaccgtttcggctctcttgccgccactttacattcgggtatgactccctcaacacgtctttcagaatggatcagaataaaaagcggaaaagcgccgattgtcgtaggaccgagaagcgcagtcttcgctcccgtgcctaatcttgggcttatcataatcgatgaagaacatgacggctcatataaatcgggtaacacgcctcgttatcacgcgcggcagatcgcgcttcaccgctgttcaaaagaaggggctcgtcttgttatgggctcggctactccttcggcggaagcgtggaaacttatgcaggaaggcggcataaaaaggcttgatctttcacgccgtctttcaggcggaggaatgcccgaaataaaagccgtaagcctcgcaaaaaccgaaggctgtctttcaaaagaattaaaagaggaaattctgcttactcatcaaatgggaaggcagacgattctttttttgaaccgcagaggtttcgctcatttttatcaatgtcccgaatgcggatgggaacaaacctgcaagcgctgttcggtatcgcttacatggcataaaaaacgaaaccgctgtatgtgccactactgcggctacagcgaagcgccgccctcatcttgtcccaagtgcggatcaattaacgcaggttaccgaggtttcggcacggaaatgatcgaagaagaagtgcggcgcaccttccccgatatgcgcctccgccgcgccgacgccgacactgcggggaaaaagggcgggctggaagaagcgttgttgcttttcaagacaggaatgatagacattctgctcggcactcaaatggtcgccaaaggtttaaattttcccggagttcgccttgtcggcgttgtctttgccgacacaggccttcacctgccggatttccgcgccgcggagcgtaccttttcattgattgtgcaagtggcagggcgcgcggggcgttacttccccgacggcaaagtaatcgttcaaacactaagaatggaagactctgttatcacccgttcctgcgcccttgacgtagacggctttttcaaagcggaactatcccaacgcagggcgcttaacttccctcccttttcaagactgatccgttttacaataagatcaaaagacgagagccgcgcggacacagccatcaaacggcttgcgtctttcgcaaagccgctccttccggcaggttcggatatgttaggccctgcggagtgccccatcgggattatgaatgacaattacagaaggcagcttatcatccgcagttcatcaatgggttctcttcacacttctgcgcgtgagattctcgcgaaatatgaaaaaggcgagggacgcgagggcttatcttga

SEQ ID NO: 65502 - protein, 652 aa, Unknown
  Obtained from environmental sample
  DOMAIN (431)...(521): Helicase conserved C-terminal domain
  misc_feature (1)..(652): Xaa is any amino acid
MVIYFDLVFDIPSDLSFTYLIDDKNEAAIGKRAMVPFGKRDVLGYIIGQRDMLPEGIKYEAVKKIRRVVDSEPLFGEREIEIAKWMAGFYICGTGQAISAMIPSGRREKVPTLPAGDEEIIPSLSISDEQAAALSAITSPVENTDSNSNLPPMFYLYGVTGSGKTEVFLRAAQYMLNEGKSVIYLVPEISLTHQTAQMIGNRFGSLAATLHSGMTPSTRLSEWIRIKSGKAPIVVGPRSAVFAPVPNLGLIIIDEEHDGSYKSGNTPRYHARQIALHRCSKEGARLVMGSATPSAEAWKLMQEGGIKRLDLSRRLSGGGMPEIKAVSLAKTEGCLSKELKEEILLTHQMGRQTILFLNRRGFAHFYQCPECGWEQTCKRCSVSLTWHKKRNRCMCHYCGYSEAPPSSCPKCGSINAGYRGFGTEMIEEEVRRTFPDMRLRRADADTAGKKGGLEEALLLFKTGMIDILLGTQMVAKGLNFPGVRLVGVVFADTGLHLPDFRAAERTFSLIVQVAGRAGRYFPDGKVIVQTLRMEDSVITRSCALDVDGFFKAELSQRRALNFPPFSRLIRFTIRSKDESRADTAIKRLASFAKPLLPAGSDMLGPAECPIGIMNDNYRRQLIIRSSSMGSLHTSAREILAKYEKGEGREGLS

SEQ ID NO: 65503 - DNA, 699 bp, Unknown
  Obtained from environmental sample
  misc_feature (1)..(699): n is a, c, g, or t
atgaccaaaattgacaaacaaaaaatagccaattttcttgatattgcatctgatcacctgtcttcgggataccaaatcgaagccaaagaatatcaatttaacgatgacgagccgaaagagcatattgaaaacgccggcgctgttgagagtgtcgagcaaatagcgcagaaaattcttgtttgcagaaattgccagctttgggaaaaaagaacaaacgccgttcccggagagggagttttacagccgcttgtcatggtaatcggcgaagctcccggcgaagacgaagatcggcacggacgcccctttgtcggcaaagcgggtcagcttttggacaagatgctggactctatcggtctttcgcgcaagacaaattgttttatcgccaatgttgtaaaatgccgccccccgtttaaccgcgacccctaccccgaagaaacatccgcgtgcgcgcattttcttgaacatcagataacgctgttaaaacccaaattcattcttgttgtgggaagaatcgcggcgcagtcgctgttaaaaacaaccgaatcaataggaaaaatacgcgggaagtttacggaattggaagttggagacgtgaaaattccgctcatcgccacataccaccccgccgcgcttttgcgtaacgaagagtataaacgtcccgcgtgggaagacttaaaactccttcattcaaaattttaa

SEQ ID NO: 65504 - protein, 232 aa, Unknown
  Obtained from environmental sample
  DOMAIN (75)...(230): Uracil DNA glycosylase superfamily
  misc_feature (1)..(232): Xaa is any amino acid
MTKIDKQKIANFLDIASDHLSSGYQIEAKEYQFNDDEPKEHIENAGAVESVEQIAQKILVCRNCQLWEKRTNAVPGEGVLQPLVMVIGEAPGEDEDRHGRPFVGKAGQLLDKMLDSIGLSRKTNCFIANVVKCRPPFNRDPYPEETSACAHFLEHQITLLKPKFILVVGRIAAQSLLKTTESIGKIRGKFTELEVGDVKIPLIATYHPAALLRNEEYKRPAWEDLKLLHSKF

SEQ ID NO: 65505 - DNA, 1704 bp, Unknown
  Obtained from environmental sample
  misc_feature (1)..(1704): n is a, c, g, or t
atgaccactacggtaatgaaagaggcggatatcattcttgccacaggcggacccgcaatggtcaagtcggcttattcttcaggcaaacccgccatcggcgtaggatcgggcaacacacctgccattatcgacgacagcgcggacatacttctcgccgtcaactcaatcatacactcaaaaacatttgataacggaatgatttgcgcttccgagcaatctgtaattgttctgcaaagcatttacgataaagtaaaagccgaattcacacgaagaggctgttatttcctcaatcccgaagaaaccgaaaaggtaagaaaaacaattatcgtccgcggcgcgcttaacgcaaaaatcgtcgggcagaaagcggcggcgattgctgaacttgccggcgtaaaggttgatccggctgtaaaaatcctaatcggtgaagttgagagcgtggagctttctgaagaattcgcccacgaaaaactttctccggtgctgggtatgtacaaggcaaaggattttgacgaagcgctggaaaaagccgaccgtttggtgaaagacggaggctacggtcataccaccagcgtgttccttaacccgcaaacaagcgctgaaaagttagccgcattcagttcacgcatgaaaacctgccgtattttgctcaatactccgtcatcacacggcggtatcggcgatttgtacaatttccatatgcgtccttcgctcactcttggatgcggaagttggggcggcaattcagtttcagaaaacgtcggcgtaaaacatctgttaaatatcaaaacgctggcggcaaggagggaaaatatgctgtggttccgtgcgcctgaaaaggtatatataaagaagggatgtctccccgtggctctggacgagcttaaaaccgttatggagaaaaagagggcgttcatcgttaccgatacgttcctgtacgaaaacggttacacaaaaacgataaccgaaaaattggacagcatgggcattgtccatgaaaccttttttgatgtcgctcccgatccgacattgggctgcgcgaaaaaaggcgcggcgcaaatgagcgcattcaaacccgacgtgatcatcgcgctgggcggaggctcggcaatggacgccggcaaaatcatgtgggttctctacgaacacccggaagtggactttgaagacatggcgatgcgttttgccgacatacgcaaaagggtttacaccttcccgaaaatgggaggaaaagcctactttatcgccgtgccgacatccgccggaacgggcagtgaagttacgccgtttgccgttatcaccgatgaaactaaaggaatgaaatatccgctggcggattacgaattattacccaaaatggcgatagttgacgctgatgtgcagatgaacgctcctaaagggcttacaagcgcaagcggcattgacgctgtaacacacgctctggaagcctatgtttcagtcatggcgactgactacaccgacggtttggcgatacaagctctaaaagtaattttcgaatggctgcccgccgcttacaacgaaggcgctgcaaacgttgtggcgcgtgaaaaaatggcaaacgccgccacgattgcggggcatggcgttcgccaacgcattcctcggcgtgtgtcactcgatggcgcacaaactcggcgcgttccaccaccctgccccacggcgtcgccaacgcgcttatga

SEQ ID NO: 65506 - protein, 567 aa, Unknown
  Obtained from environmental sample
  DOMAIN (279)...(565): Iron-containing alcohol dehydrogenase
  misc_feature (1)..(567): Xaa is any amino acid
MTTTVMKEADIILATGGPAMVKSAYSSGKPAIGVGSGNTPAIIDDSADILLAVNSIIHSKTFDNGMICASEQSVIVLQSIYDKVKAEFTRRGCYFLNPEETEKVRKTIIVRGALNAKIVGQKAAAIAELAGVKVDPAVKILIGEVESVELSEEFAHEKLSPVLGMYKAKDFDEALEKADRLVKDGGYGHTTSVFLNPQTSAEKLAAFSSRMKTCRILLNTPSSHGGIGDLYNFHMRPSLTLGCGSWGGNSVSENVGVKHLLNIKTLAARRENMLWFRAPEKVYIKKGCLPVALDELKTVMEKKRAFIVTDTFLYENGYTKTITEKLDSMGIVHETFFDVAPDPTLGCAKKGAAQMSAFKPDVIIALGGGSAMDAGKIMWVLYEHPEVDFEDMAMRFADIRKRVYTFPKMGGKAYFIAVPTSAGTGSEVTPFAVITDETKGMKYPLADYELLPKMAIVDADVQMNAPKGLTSASGIDAVTHALEAYVSVMATDYTDGLAIQALKVIFEWLPAAYNEGAANVVAREKMANAATIAGHGVRQRIPRRVSLDGAQTRRVPPPCPTASPTRL

SEQ ID NO: 65507 - DNA, 375 bp, Unknown
  Obtained from environmental sample
  misc_feature (1)..(375): n is a, c, g, or t
atgatcagcgaagtgcttcgctacaacgcctgcgaagtcccgccgaagatggggacattccctcaatatgatcatcccaaaacattatcncgttacgcgcaaatcgcagacgcgctcaatctcggcggctcaagcgatgaggaaaaacttgaaaatctcatattggccgtggaaaagttgaaagagcagatagggatcaagaagacaatcaaggattacggcatagatgaaaaagattttcttgcccgccttgacgacatgagcgaacaggcctttgacgatcaatgtaccggcgcgaatccccggtatccattaattgaggaaatcaaaaaaatgtaccttaatgtttactacggaaaaaaggagaaagtgtaa

SEQ ID NO: 65508 - protein, 124 aa, Unknown
  Obtained from environmental sample
  misc_feature (1)..(124): Xaa is any amino acid
MISEVLRYNACEVPPKMGTFPQYDHPKTLSRYAQIADALNLGGSSDEEKLENLILAVEKLKEQIGIKKTIKDYGIDEKDFLARLDDMSEQAFDDQCTGANPRYPLIEEIKKMYLNVYYGKKEKV

SEQ ID NO: 65509 - DNA, 300 bp, Unknown
  Obtained from environmental sample
  misc_feature (1)..(300): n is a, c, g, or t
atgagagtcgagtatatcaacccctttgtagaagccgcttatagtgtgctgaaagaggtgttaaattctgacataaagcgcggcgatatctaccttaagcccacttctatggctatcatgggcgttgcggctcttgtcggacttgcgggcgacgtagaggggcgcgttctttttgatatgaaaaaagagtcagcgttatttgtagcgggcaaaatgaacggagaagttttttcaactcttgacgagttggctaaagctaccattcaggaattggcgaacatgattacagcgcaagcgtaa

SEQ ID NO: 65510 - protein, 99 aa, Unknown
  Obtained from environmental sample
  misc_feature (1)..(99): Xaa is any amino acid
MRVEYINPFVEAAYSVLKEVLNSDIKRGDIYLKPTSMAIMGVAALVGLAGDVEGRVLFDMKKESALFVAGKMNGEVFSTLDELAKATIQELANMITAQA

SEQ ID NO: 65511 - DNA, 1353 bp, Unknown
  Obtained from environmental sample
  misc_feature (1)..(1353): n is a, c, g, or t
atggcgaatgcaaatgcaagtacaaacacaatagtaagagacttagaacaggtaaacgccgatttacaggaacaaaaagagcgggtagataatgttgattttaaaatggtcacattctctcttgcgggtaaagattacggcgttgatattatgagcgtaaaagaaatcgcgaaagccgataaatttacatatgtacccaatgccgcctcctatgtccggggcgtgtataacctgcgcggcgatattattccaatagtagatttaaggcagttttttcatttacctatagaaagaaaaaccgaaggcttggataatatgctgatccttcatattaatgatcaggtatatggaacaattgtagacaagatcgataaagttgtaggaataacaaaagatacaatacagccgccgcacccgattttcggcgatatcaatattaaatacataagcggtgttgttgaaaaacagggcgatctttatatcatccttgacgctgttcgtatcttttccattaaagaggaagataaaaacaaaccgcattccgcagtatcatccgacggcgaattctttgtgccgccgccatctgctgcggatcaagcgacggcgcagaaagccgccgctaatacggcaatcggatttatccaggagagccttgccgctttacggcatttctatactaccgttgtgaatgaaaaatggcttttcagacgctttgcggagtggagctccaggagaacgggagatgatttacagctgcggagcgcttcagaagccgacgaattccttgaaggttttgagtctcntgttcaaatcagttctggagcgagacttatgncgctgctgtcagaaagttctgccggattntacgtcgccgaatatcaatatttgaatatcggcagcggaaagggttatgaaacttattcttttgcgtgtatagttaaaacaaagtatcctaatgctcgtattaaaatatgggctaacgataacgatatcatggctgtttcacaagcgcccaatatggtctatgatctggaggatgttcctgaatattgcagaccttttatggtgcgcggaacaaacggatattcctttaatcagcttataaaggactcgattgtttttgaataccatgatataactaatgataacaccttgccggaagtggatattattcttgcaagggatattgtttcatttttaccgcagcagatacaggaaaaacttatcgcggatttttcagagaaactgaaaaataacggtgttgttatcatgggtaggaatgaagaactaaacggtattatttggcagtcaatggccgatgatcctgtttcagcatttttacatagcgcataa

SEQ ID NO: 65512 - protein, 450 aa, Unknown
  Obtained from environmental sample
  DOMAIN (274)...(446): CheR methyltransferase, SAM binding domain
  misc_feature (1)..(450): Xaa is any amino acid
MANANASTNTIVRDLEQVNADLQEQKERVDNVDFKMVTFSLAGKDYGVDIMSVKEIAKADKFTYVPNAASYVRGVYNLRGDIIPIVDLRQFFHLPIERKTEGLDNMLILHINDQVYGTIVDKIDKVVGITKDTIQPPHPIFGDINIKYISGVVEKQGDLYIILDAVRIFSIKEEDKNKPHSAVSSDGEFFVPPPSAADQATAQKAAANTAIGFIQESLAALRHFYTTVVNEKWLFRRFAEWSSRRTGDDLQLRSASEADEFLEGFESXVQISSGARLMXLLSESSAGXYVAEYQYLNIGSGKGYETYSFACIVKTKYPNARIKIWANDNDIMAVSQAPNMVYDLEDVPEYCRPFMVRGTNGYSFNQLIKDSIVFEYHDITNDNTLPEVDIILARDIVSFLPQQIQEKLIADFSEKLKNNGVVIMGRNEELNGIIWQSMADDPVSAFLHSA

SEQ ID NO: 65513 - DNA, 2124 bp, Unknown
  Obtained from environmental sample
  misc_feature (1)..(2124): n is a, c, g, or t
atgcttgatgaacggatgaacggctctgtttataaagaggacacttccgcaatcgaaggtaagcttagggcattgctgccggcatctacaaaaggagctcccgcaaaagcgcctgttaaagcggcacctcctcctgttgccgcgcccgcgcctgcgcccgctccaagcgcagcacctgttgcctccgcgagtcagcctcttactgaaagggaaattgaagagcttaaagaatccgttgacggcggaatgcctatatacagagtttccgtaaagttcgatgagaacagcttaatgaataccgttggcggcattcaagtttatgccgttcttaaagggctggggactgttttaaaaactaaccccgattttgaacaactctacgcggataactttttccctgttgttgattatttctttgcttccaaaaatgacacgcagaaaataaaatcagccgtcattctgccggatgtaagtctggatgcggatgttacaaacattgccaatgtttcagcggcagccgctccggcccctgcggcgccaagaccagcgcctgtacaagccgcgcctgttgccgctcctgtcgctcaggctgctcccgctgctcaggctgctcctgttgcagcgcaagctgctcctgcggcaacggcagccgctcctgccgctgcggccgccccagacgcgaaaaaaagcgcagccgcttcagaagacgcaaagaaagcgggcaaggaagccggatcggttcttcgcgtagactccaaacgtatcgacgatcttttaaatcttgtttcagaaacggttattacgaaagcaactttcaaccagatcaatatgcagtttggcgaacttaccactcatcttcgcgaattagagaatctataccgggataaaattaaaaatctgtttgacagtctgcccgaatatcttgaaggcattcaggatggcaaatcagttaaagatatccgcaaggaaattaacgataatttcggcgatatctttacgatatttgatccttttgaaacgtcattcaagggaattatagcgaaattccgcgccaattcgcagaatctcggacgtatatcaggcgaacttcaggaaggcgttatgcgcatccgcatggttcccatcagccagatattcagccgcttcccgcgccttgtacgcgatctttcaaaatcgctcaacaaaaaaatcaatttggttatcgaaggtgaagacaccgaacttgacaaatcggttatcgaagacctcctcgatcctatcatgcactcggtgcgaaactctatcgaccacggaattgaatccgcggaagaaaggcgcgccgccggcaagccggaagaaggcatggtgttgttaaaagcgactaacgaaggcaacatgatcgtcatcgaaatcgccgacgacggcaagggcattgatgttcaagccgtaaaggaaaaagccatagaacgcggacttatcagcccgaacaaaattcttaccgatgttgaagccttcaatctaatttttgaaccgggcttctcaaccgcaaaacagataaccgcaatttcaggccgcggcgtcggtcttgacgttgtacgccgtcagattgacagccttaacggtaccgttacggttacttcggaacacggcaaggggaccaagtttataattaaactgcctcttactctcgctattatccagggtcttctggttaaggttggaccggaaatctattcaataccgattacatcggttattgaaagtttgagaatcaaaccggaagaaattaagaagatcgataattacgaagtatttaatatccgcagcgatgttatttcattgcttaggcttaaccgcttgtttggaattaaaacggaagaacaaacggaatatcacttcattgtaattgtcggaacggctgagaaaaagatgggctttatggtagacagcctcatcggcgaggaagacgtcgttatcaagccgctaagagatcagtttacgaattctccgggaattgccggggcttcaatattgggagatggatcggtttctcttatcattgatgttggtcagttgttggatttaggacttaaaaaagaaatggagcagcgccgaatccgcgaagcttcaccgggtggcaggtaa

SEQ ID NO: 65514 - protein, 707 aa, Unknown
  Obtained from environmental sample
  DOMAIN (245)...(370): Signal transducing histidine kinase, homodimeric domain
  misc_feature (1)..(707): Xaa is any amino acid
MLDERMNGSVYKEDTSAIEGKLRALLPASTKGAPAKAPVKAAPPPVAAPAPAPAPSAAPVASASQPLTEREIEELKESVDGGMPIYRVSVKFDENSLMNTVGGIQVYAVLKGLGTVLKTNPDFEQLYADNFFPVVDYFFASKNDTQKIKSAVILPDVSLDADVTNIANVSAAAAPAPAAPRPAPVQAAPVAAPVAQAAPAAQAAPVAAQAAPAATAAAPAAAAAPDAKKSAAASEDAKKAGKEAGSVLRVDSKRIDDLLNLVSETVITKATFNQINMQFGELTTHLRELENLYRDKIKNLFDSLPEYLEGIQDGKSVKDIRKEINDNFGDIFTIFDPFETSFKGIIAKFRANSQNLGRISGELQEGVMRIRMVPISQIFSRFPRLVRDLSKSLNKKINLVIEGEDTELDKSVIEDLLDPIMHSVRNSIDHGIESAEERRAAGKPEEGMVLLKATNEGNMIVIEIADDGKGIDVQAVKEKAIERGLISPNKILTDVEAFNLIFEPGFSTAKQITAISGRGVGLDVVRRQIDSLNGTVTVTSEHGKGTKFIIKLPLTLAIIQGLLVKVGPEIYSIPITSVIESLRIKPEEIKKIDNYEVFNIRSDVISLLRLNRLFGIKTEEQTEYHFIVIVGTAEKKMGFMVDSLIGEEDVVIKPLRDQFTNSPGIAGASILGDGSVSLIIDVGQLLDLGLKKEMEQRRIREASPGGR

SEQ ID NO: 65515 - DNA, 1095 bp, Unknown
  Obtained from environmental sample
  misc_feature (1)..(1095): n is a, c, g, or t
atgagtgaattttggaacagccgaataaaaaaactttctccgtatactcccggcgaacaaccgaaggacaggcagataattaaacttaacaccaacgaaaacccctatcctgtttctcccaaagttatagaagcgattaaaaacgccgcagacgagcgtcttcgcctgtatcctgaccctgaatgtacggcgttccgtgaagccgccccccgtccgttacggcgtaagagagcaggagtttttgcaggtaacggctccgatgaaatattagcgtttgctttcggcgctttttttgaaagcggcgaaaaagccgtgcagatacttttccccgacatcacctacagtttttatcctgtntacgccaatctttgggaaatcccgtaccgtacaatcgctcttacgcaggatttttcaataaacataaaagattataaaaccccttgcggcggcgtaatatttcccaatccaaacgccccaacagcggtcgccctgccgttagacgatattctgtctcttgccgaataccttgaaaaacaaggaaaaatccttattgttgacgaagcctacatagcgttttcaggctcaagcggcgtaaaatcggcggttggctctataaaaaaccatcccaatttgttaacagtgcatacaatgtcaaaatccgcgtctcttgccggcttgcgttttggttttgccatcggcaatgaaaaattaatcgaaggtctttgcagaatacgcgattcgttcaattcctacaccgttgatcttcttgctcttgcgggagcaacggcggcagtctccgatgcggcatattacgaagaaattaaccgccgtgttattgccacgcgggaacggacagcggaaactttgcgcaatcttgggtttacagttttgccgtcgtcggctaatttcctatttgtaaagcctcccaatatcggcggcgctgaatttttcgccgcgttaagaagcagaaatattctggtacggcatttcaacaaagacagaattgcggactttttgcgtatcagtatcggaacagacgccgacatggataaagttcttgaagcggcaaaagatatattaaaaggtggaaaatga

SEQ ID NO: 65516 - protein, 364 aa, Unknown
  Obtained from environmental sample
  DOMAIN (24)...(356): Aminotransferase class I and II
  misc_feature (1)..(364): Xaa is any amino acid
MSEFWNSRIKKLSPYTPGEQPKDRQIIKLNTNENPYPVSPKVIEAIKNAADERLRLYPDPECTAFREAAPRPLRRKRAGVFAGNGSDEILAFAFGAFFESGEKAVQILFPDITYSFYPVYANLWEIPYRTIALTQDFSINIKDYKTPCGGVIFPNPNAPTAVALPLDDILSLAEYLEKQGKILIVDEAYIAFSGSSGVKSAVGSIKNHPNLLTVHTMSKSASLAGLRFGFAIGNEKLIEGLCRIRDSFNSYTVDLLALAGATAAVSDAAYYEEINRRVIATRERTAETLRNLGFTVLPSSANFLFVKPPNIGGAEFFAALRSRNILVRHFNKDRIADFLRISIGTDADMDKVLEAAKDILKGGK

SEQ ID NO: 65517 - DNA, 1374 bp, Unknown
  Obtained from environmental sample
  misc_feature (1)..(1374): n is a, c, g, or t
atggtaatttcttcaatagacatacaaaacggcaaagtcgtccagttaaagcagggcgaggaactggtactacagcgtgaaaattctctggaactggcggcggaattcgaccgttacggcgaagtcgcagtcatcgatcttgacgccgcaatggggaagggaagcaaccttgaaatgataaaaccgcttttgcgaaaagccgagtgcagagtaggcggcggcataaaaacgccccagcaggcgcaggaattaatcagtctaggagcgcggaaaataatcgtcggctccggcgctttccgcgaccccgcaaaaaaaggaacaggtatcgcaggcggcgagtttgcggtaaatatccccttcctagaaacaatgtcgaaaaaaatcggacgggagcggctgattgtcgccgtagacgcccgcgccggagaaattgtcgtggacggctggaaaacccccacaggactaaatctcgtagaagccgcaaaacaagttgagccatttgccggcgaactgctttttacctgcgtcgagcgagaaggcactatgacaggcatcgatcttgcccccgctcgcaaattgcgagaagctgtttcgtgccaaattaccgtcgccggcggcgtctccgcgttagctgaagttgaagaaatcgccgctctcggctgtgatgtgcagctcggcatggcattgtataccggaaaaataaatctcgcggatgcctttgtcgtttcgcttaactggaaaaaggggggagccccccccttcgctgcgaaaccttcggtttctacgctatcccccccagcgggggcaacccacgcaacgcccctgttggatatgcctctccttcccgtgatcgttcaatctatagacggacaagtaatgatgacgggcttcaccgataaacaagcgttagccgaaacttttaagcgcggtaatgtttgtttccacagcagaacacgaaataaactctggatgaaaggggaaaattcaggcaatgtgttaaaacttgtcagattgagaaccgactgcgatagagacgcgttactggcgacagcagaacccgcaggtcccgtctgccacacaggcgcatggtcatgttttgctactaacagagattatacattgcaatttttgcagaatataataaaggagcgttttcgcaaccctgcgcccggttcgtatacagccacacttgacgatgatcttgtgcgtgaaaaagtcatggaagaggcgcaagagttatgcgacgcaaaaactcatgaagaaattatatgggaagccgctgatcttctttatttttctgccgtattgatgacaagagccggagtaaccgttcaggaaattcttgacgagcttgatcggaggcataaaaagtaa

SEQ ID NO: 65518 - protein, 457 aa, Unknown
  Obtained from environmental sample
  DOMAIN (374)...(456): Phosphoribosyl-ATP pyrophosphohydrolase
  misc_feature (1)..(457): Xaa is any amino acid
MVISSIDIQNGKVVQLKQGEELVLQRENSLELAAEFDRYGEVAVIDLDAAMGKGSNLEMIKPLLRKAECRVGGGIKTPQQAQELISLGARKIIVGSGAFRDPAKKGTGIAGGEFAVNIPFLETMSKKIGRERLIVAVDARAGEIVVDGWKTPTGLNLVEAAKQVEPFAGELLFTCVEREGTMTGIDLAPARKLREAVSCQITVAGGVSALAEVEEIAALGCDVQLGMALYTGKINLADAFVVSLNWKKGGAPPFAAKPSVSTLSPPAGATHATPLLDMPLLPVIVQSIDGQVMMTGFTDKQALAETFKRGNVCFHSRTRNKLWMKGENSGNVLKLVRLRTDCDRDALLATAEPAGPVCHTGAWSCFATNRDYTLQFLQNIIKERFRNPAPGSYTATLDDDLVREKVMEEAQELCDAKTHEEIIWEAADLLYFSAVLMTRAGVTVQEILDELDRRHKK

SEQ ID NO: 65519 - DNA, 960 bp, Unknown
  Obtained from environmental sample
  misc_feature (1)..(960): n is a, c, g, or t
gtggaaccggcgngtttttttcttgcctcttacgattacttgaccaatcctgaaaattacaaactcgacaggaaacagcgtgagtttttaaagtataaaacatttcacggctgggaaattgtccccaataccttccgtctttgtttgatgaatctgtttctgcacaacatcggcgatctggacggaaaggttccagttatccgcaatgacgcactcctttcagcgccaaaggaaaattttgattatgttttaaccaatccgccattcggcaaaaaaagcagtatgacttttaccaatgatgaaggagaacaggaaaaagaagaccttgtttacaaccgtcaggatttttgggctaccacttcaaacaagcaactcaactttgttcagcatattcatagtatccttaaatccgatggcaaagccgcggtggtagttcccgacaatgtgctgtttgaaggcggcgcaggtgaaatcgtccgcaaaaaactgcttgaaacaactgatttacatacaatcttgcggcttcccacaggagttttttacaaacagggagtaaaagcaaatgtgattttttttgataacaggagcgcaagtcccgatccctggacaaaggaagtttgggtatatgattttcgtacaaatatacattttactctaaaacagaatcccctgcgtttcgaggacttgcaggacttcatcaaatgctataatcccgataatcgccacaaacgcaaagaaacatggagcgataaaaaaccggaaggtaggtttcgtcgcttcacatataaggaaattttggaaagggacaagaccagccttgatattttctggctcaaagacaaatccctgaccgatcttgacagccttcccgatcctgacgttcttgccgccgaaatcatggaaaatcttgaaaccgcattggaaaatttcaaaacattgatgacgaatttgaatacttga

SEQ ID NO: 65520 - protein, 319 aa, Unknown
  Obtained from environmental sample
  DOMAIN (6)...(251): N-6 DNA Methylase
  misc_feature (1)..(319): Xaa is any amino acid
MEPAXFFLASYDYLTNPENYKLDRKQREFLKYKTFHGWEIVPNTFRLCLMNLFLHNIGDLDGKVPVIRNDALLSAPKENFDYVLTNPPFGKKSSMTFTNDEGEQEKEDLVYNRQDFWATTSNKQLNFVQHIHSILKSDGKAAVVVPDNVLFEGGAGEIVRKKLLETTDLHTILRLPTGVFYKQGVKANVIFFDNRSASPDPWTKEVWVYDFRTNIHFTLKQNPLRFEDLQDFIKCYNPDNRHKRKETWSDKKPEGRFRRFTYKEILERDKTSLDIFWLKDKSLTDLDSLPDPDVLAAEIMENLETALENFKTLMTNLNT

SEQ ID NO: 65521 - DNA, 1041 bp, Unknown
  Obtained from environmental sample
  misc_feature (1)..(1041): n is a, c, g, or t
gtggaagaacgtgtggcgaaacttgtcaaggcggaggaaatatccgccacgcttgagagaaagagagagacattagatggtgaagaaattgacgacgacggtcaaataaacggcgtatcgccgaccatcatccttaaaccgattaaaacggataatgattatttgaaccgattgaccggaagagttgcggaagactatcaactatatttaaaattacgagaggattatatcaatttgccgacattttattttgatatggcggattggtttcataaacacggcgacaagaaaaccgcgcttcgcatacttacctccatcgccgatttggaactggaaaacgcttcgctctatcgattgctcggctataggctgaaagagtacggcgagtacgcgcttgaaaagtttgtctgtcaaaaggtggttcaatggcggcccatggaaccgcaaagctaccgcgactacgcgctagccctcgccgacaacggtgagaaacaagcggcgctcgactcgctttatggactgctgacaagactctattcgcaagctactttcaacagcagctacggaatacaggaagttgtgattaccgaaataaatcatctgatcgccaaaaacactaatctggataaatcaaaaatcgatacaagcctgataataaatatgcccgttgatattcgcgtggtcataaactggaatatgaacaacacagacatcgacctgcacgtggtagaccctacaggcgaagaatgttattacggccaccgcgaaacaaagatcggcggacgcatgagttacgatatcacaacgggttacggcccggaacaattcctcttgaagaaagcgataaagggaaaataccgcgtatacgtagactactacggcgacagcaaagtcaccgacgcgggaccggctaccataatggcggagatatacacccaatacgccggcagagccgaacaccggaaagtcgtgtgcttgcagatgtcaaacgcgaaacagagagaggacgggactgtgttggtggcggagtttgagttttaa

SEQ ID NO: 65522 - protein, 346 aa, Unknown
  Obtained from environmental sample
  misc_feature (1)..(346): Xaa is any amino acid
MEERVAKLVKAEEISATLERKRETLDGEEIDDDGQINGVSPTIILKPIKTDNDYLNRLTGRVAEDYQLYLKLREDYINLPTFYFDMADWFHKHGDKKTALRILTSIADLELENASLYRLLGYRLKEYGEYALEKFVCQKVVQWRPMEPQSYRDYALALADNGEKQAALDSLYGLLTRLYSQATFNSSYGIQEVVITEINHLIAKNTNLDKSKIDTSLIINMPVDIRVVINWNMNNTDIDLHVVDPTGEECYYGHRETKIGGRMSYDITTGYGPEQFLLKKAIKGKYRVYVDYYGDSKVTDAGPATIMAEIYTQYAGRAEHRKVVCLQMSNAKQREDGTVLVAEFEF

SEQ ID NO: 65523 - DNA, 582 bp, Unknown
  Obtained from environmental sample
  misc_feature (1)..(582): n is a, c, g, or t
ttgattttcaacaacattcaatggaatgacaggcgggcttatatcggggctttactgtcaataactactggtatgagagcaggcgaagttctaggcttgcggaaaaatgacattgatcccgtaaagaacattttatattgtgaacattcattctctacttacgatggattaaaaacgccgaaaaacggagaaaccagaaaaatcccgttattgccggaagtgaaaaaacaattacttgaattgttggaacaaaatccgcacaaagaaaatgaaaatccgtttattttctatggcttattagaagataaaccaatggacggaaaaattttattatacggattaaaagcggcttgcaagacggcaaaaattgacgaagtaatatttcatagcttgcggcatttttacgcggcgcgtttactggacgttatgacagcggataaaattatgagaataagcggacacaaaacacgggcggtttttgacggatatgcggatcatctgacggatgaaaacattaatgaaatggcgcaagcggcgggaacggtctttcaaaaaattattccctttagggcggcggtgtaa

SEQ ID NO: 65524 - protein, 193 aa, Unknown
  Obtained from environmental sample
  DOMAIN (3)...(173): Phage integrase family
  misc_feature (1)..(193): Xaa is any amino acid
MIFNNIQWNDRRAYIGALLSITTGMRAGEVLGLRKNDIDPVKNILYCEHSFSTYDGLKTPKNGETRKIPLLPEVKKQLLELLEQNPHKENENPFIFYGLLEDKPMDGKILLYGLKAACKTAKIDEVIFHSLRHFYAARLLDVMTADKIMRISGHKTRAVFDGYADHLTDENINEMAQAAGTVFQKIIPFRAAV

SEQ ID NO: 65525 - DNA, 399 bp, Unknown
  Obtained from environmental sample
  misc_feature (1)..(399): n is a, c, g, or t
atgctggatcacaaatttatagtagaaaacctggacgcggtggagaagaatatcgccaaccgctttatgaaggccgatgcccgcgaagtggcgcgcctgtaccaccggcgcacggaattgactacctgtcttcaggcgctgcagcagaagcgtaacgccaacgccgccgccatgaagggaaaactcgaacaggcgcagcgtaacgccctcattgaggaaggaaagaagctcaaggacgagataacgctgacggaatcggaacttggcatcgccgaaaaagagcttaacgacgaggcgcgcaagattcccaacatggcgcatcccgacgcgcctatcggcaaagaagacaaggataacctggaagtaaagcgggttggggaccggccaaatcaattttga

SEQ ID NO: 65526 - protein, 132 aa, Unknown
  Obtained from environmental sample
  DOMAIN (1)...(106): Seryl-tRNA synthetase N-terminal domain
  misc_feature (1)..(132): Xaa is any amino acid
MLDHKFIVENLDAVEKNIANRFMKADAREVARLYHRRTELTTCLQALQQKRNANAAAMKGKLEQAQRNALIEEGKKLKDEITLTESELGIAEKELNDEARKIPNMAHPDAPIGKEDKDNLEVKRVGDRPNQF

SEQ ID NO: 65527 - DNA, 813 bp, Unknown
  Obtained from environmental sample
  misc_feature (1)..(813): n is a, c, g, or t
gtgtcaggcaccaaattttactacctgaagaacgaaggggtatttctggagctgggccttgtgcgttacgcgcttgatattcttcaaaaaaaaggcttcgccccctttattacgcccgacgtggcccgcgaggaaatcctggagggcataggctttaacccgcgtggcgatgaatccaacgtatacacgctggaaggcgaaaacgcctgcctggtgggaaccgcggaaatcacccttggcggctattattcagacacgattctcgcgaaggacaagctgcctgtccgcatggccggcctttcccactgtttccgccgcgaggctggggcagccggacagttctcaaagggactgtaccgcgtacaccagtttaccaagctggaaatgttcgtgtactgcctgccagaagaatccggaaagttccatgaggaattacgcctaatagaggaagaaatctttaagggccttgacattcccttccgcgtggtagacacctgcaccggcgatcttggagcgcccgcctaccgcaaatgggatcttgaggcgtggatgccgggccgcaacggcggcgaatggggcgaagtgacatcgacttcaaactgcaccgattaccagtcaagacggctgaatatacggtacaaggacgacgacggcaaaaacaaattcgtccaccttttgaacggcactgctattgccatatcaagggcgatcatcgccatactggaaaacttccagatggaggacggatccgtacggataccggcggcgcttgtaccatatgtcgggtttgacatcctacaaaagaaaaaataa

SEQ ID NO: 65528 - protein, 270 aa, Unknown
  Obtained from environmental sample
  DOMAIN (16)...(187): tRNA synthetase class II core domain (G, H, P, S and T)
  misc_feature (1)..(270): Xaa is any amino acid
MSGTKFYYLKNEGVFLELGLVRYALDILQKKGFAPFITPDVAREEILEGIGFNPRGDESNVYTLEGENACLVGTAEITLGGYYSDTILAKDKLPVRMAGLSHCFRREAGAAGQFSKGLYRVHQFTKLEMFVYCLPEESGKFHEELRLIEEEIFKGLDIPFRVVDTCTGDLGAPAYRKWDLEAWMPGRNGGEWGEVTSTSNCTDYQSRRLNIRYKDDDGKNKFVHLLNGTAIAISRAIIAILENFQMEDGSVRIPAALVPYVGFDILQKKK

SEQ ID NO: 65529 - DNA, 1773 bp, Unknown
  Obtained from environmental sample
  misc_feature (1)..(1773): n is a, c, g, or t
atgcgttccgaaacacggaactgcgtcatattttccggcaacaaggagaaggtgcgggaggcgaaagccgcgctggaccgtctcagcaaagagtttgaggacagcgcccagtcgttcggcaagagcattgtgtcgcccgacgccaaggcgaagtttgacgaggctatgaaacaatatcacgaaatttataaaccgggcgcgtataaacttgtggaagaaggggaaaaaaacgcgccgaacgcggaaatgatagagcttttggccgccataaaaaactcgtcggacgtagttacgaataccatggacgaagtggctgacctcaaggtagggaatctaagacagtcctcgggcgactgtaccaaccaatccaagaacagcgttaccatgatgcttataattctcgccgtcagcgtcgtcatcgccgtgattttcggcgtatatatcagcgcgctgataagcaaacccttgggtactaccgtgaatatgataaacgagatggctcgcgggcacttgggcatgaggttgcgccttgaccgcagcgacgagatcggcgttatggccaagactatggactctttcgccgacgacttgcagaataacgtggtaggcaacatgaagaaaatttccgacggcaacttggagataaaaatcgacctgaaggacagcaacgacgaggtatccgccgctattaaaaatacggtggaggccctgcacgcgcttatcatagacgacggcggcaaggttcttttggcggcggccggcaaggatatgtcgcagaggcttacccgcgagtacaagggcgattacgccaagatgaaagataacataaacaccgtcgtgcaaaaccttgacaccgcgctgagccaagtgacggaggcggtatcgcaggtaacgagcgcgagcggtcagatttcgcaaggcgcgcagagtttggccgagggagcgaacacgcaggcgagttcgcttgaggaggtttcgtcgagtcttgaggagatgtcctccatgaccaagcagaacgcggacaactccaatcaggcgaagaccttggcgaccgaggccaaagaagccgccaacgagggcgacgcctcaatgaagaagatggccgaggctatcaaagagatcaagacatcgtccgacaataccgcaaagattatcaaatccatagacgacatcgccttccagaccaacctcttggcgctcaacgcggctgtagaggcggcccgcgccggcgaggccggaaagggcttcgcggtcgtggccgaggaggtgcgcaacctagccatgcgcagcgccgaagcggctaagaacaccgcagatatgatcgaggagtctgtgaagaacgccgacggcggggtcaagatcacggaagaggtggccaagtcgctcaatcagatcgtagaccgcgtgggcaaggtgggcaacctgatagccgatatcgccgccgcctccaacgagcaggcgttgggcatagagcaggtgaacaccgccgtggcgcagatgaaccaagtcacacagcaaaacgcggccaactcggaagagtcggccagcgcttccgaggagctctcgagccaagcggcggagctcgcgaatatggtgaacgagttcacgctgagcgccgttagcggcggtatgggcggaaggcgcggcctgccgccgccgaggcaacggccggtcgccggggcccttcccgacaaatcgaagagggcggtcggaacggcgaaagcggtgaaatcggaggaggtcattccgctggacgatgatgagttgagttga

SEQ ID NO: 65530 - protein, 590 aa, Unknown
  Obtained from environmental sample
  DOMAIN (130)...(199): HAMP domain
  misc_feature (1)..(590): Xaa is any amino acid
MRSETRNCVIFSGNKEKVREAKAALDRLSKEFEDSAQSFGKSIVSPDAKAKFDEAMKQYHEIYKPGAYKLVEEGEKNAPNAEMIELLAAIKNSSDVVTNTMDEVADLKVGNLRQSSGDCTNQSKNSVTMMLIILAVSVVIAVIFGVYISALISKPLGTTVNMINEMARGHLGMRLRLDRSDEIGVMAKTMDSFADDLQNNVVGNMKKISDGNLEIKIDLKDSNDEVSAAIKNTVEALHALIIDDGGKVLLAAAGKDMSQRLTREYKGDYAKMKDNINTVVQNLDTALSQVTEAVSQVTSASGQISQGAQSLAEGANTQASSLEEVSSSLEEMSSMTKQNADNSNQAKTLATEAKEAANEGDASMKKMAEAIKEIKTSSDNTAKIIKSIDDIAFQTNLLALNAAVEAARAGEAGKGFAVVAEEVRNLAMRSAEAAKNTADMIEESVKNADGGVKITEEVAKSLNQIVDRVGKVGNLIADIAAASNEQALGIEQVNTAVAQMNQVTQQNAANSEESASASEELSSQAAELANMVNEFTLSAVSGGMGGRRGLPPPRQRPVAGALPDKSKRAVGTAKAVKSEEVIPLDDDELS

SEQ ID NO: 65531 - DNA, 357 bp, Unknown
  Obtained from environmental sample
  misc_feature (1)..(357): n is a, c, g, or t
ttgagcgacttggccacctcttccgtgatcttgaccccgccgtcggcgttcttcacagactcctcgatcatatctgcggtgttcttagccgcttcggcgctgcgcatggctaggttgcgcacctcctcggccacgaccgcgaagccctttccggcctcgccggcgcgggccgcctctacagccgcgttgagcgccaagaggttggtctggaaggcgatgtcgtctatggatttgataatctttgcggtattgtcggacgatgtcttgatctctttgatagcctcggccatcttcttcattgaggcgtcgccctcgttggcggcttctttggcctcggtcgccaaggtcttcgcctga

SEQ ID NO: 65532 - protein, 118 aa, Unknown
  Obtained from environmental sample
  misc_feature (1)..(118): Xaa is any amino acid
MSDLATSSVILTPPSAFFTDSSIISAVFLAASALRMARLRTSSATTAKPFPASPARAASTAALSAKRLVWKAMSSMDLIIFAVLSDDVLISLIASAIFFIEASPSLAASLASVAKVFA

SEQ ID NO: 65533 - DNA, 522 bp, Unknown
  Obtained from environmental sample
  misc_feature (1)..(522): n is a, c, g, or t
gtgctaaactcagctaaactcaactcaactcaactcatcatcgtccagcggaatgacctcctccgatttcaccgctttcgccgttccgaccgccctcttcgatttgtcgggaagggccccggcgaccggccgttgcctcggcggcggcaggccgcgccttccgcccataccgccgctaacggcgctcagcgtgaactcgttcaccatattcgcgagctccgccgcttggctcgagagctcctcggaagcgctggccgactcttccgagttggccgcgttttgctgtgtgacttggttcatctgcgccacggcggtgttcacctgctctatgcccaacgcctgctcgttggaggcggcggcgatatcggctatcaggttgcccaccttgcccacgcggtctacgatctgattgagcgacttggccacctcttccgtgatcttgaccccgccgtcggcgttcttcacagactcctcgatcatatctgcggtgttcttagccgcttcggcgctgcgcatggctag

SEQ ID NO: 65534 - protein, 173 aa, Unknown
  Obtained from environmental sample
  misc_feature (1)..(173): Xaa is any amino acid
MLNSAKLNSTQLIIVQRNDLLRFHRFRRSDRPLRFVGKGPGDRPLPRRRQAAPSAHTAANGAQRELVHHIRELRRLARELLGSAGRLFRVGRVLLCDLVHLRHGGVHLLYAQRLLVGGGGDIGYQVAHLAHAVYDLIERLGHLFRDLDPAVGVLHRLLDHICGVLSRFGAAHG

SEQ ID NO: 65535 - DNA, 1509 bp, Unknown
  Obtained from environmental sample
  misc_feature (1)..(1509): n is a, c, g, or t
atgattaaatacgcaattatccccgaacctgcttttattcaaaatcaaaacggaaatttccaatgtcgtggtatttttctaccgacaatacctgaaaataataacattcaaaaagaagtccaaatttttaacacccagattattaatacctggggcaaggaagcctgtatcggtgattccggcaaaataaatttgataacggcggaaggttttttcgatacagagtcttatcaactggaaattcttccgaatgagattcggttatgctcatcggcggaagcaggcatgtaccgcggccttcagaccctgcggcagctttttctttcggggtaccatgaaggggttctttccatcccttgcggtataattaaagacaaacctcgtttcccctggcggggttttatgctggactgctcgcgatatttttattcggttgaatttataaaaaaattattggacgcgctttcactgcatcacatcaatattttccactggcatcttaccgatgaccagggctggcggcttcccgtcaggcaatacccgctactgactgaaatcggttcaaaacgacgggatcaccgtctgcatgataattgtatcggcggtttttattctgaggcgcanattcnggacatcgttgagtttgcccgccaccgccatatcgaagtagtgccggagatcgatcttcccggacacgccagcgcgattcttgccgcatatccgggccttggctgtaccggcggcccttaccgggtggaagatcgtttcggtatttttgaggacgtactctgcgcgggcaatgacgatatcttccccctggcggaagcgttattcgacaccctggtggagctttttccgtcgaagtatgtacatataggcggcgacgaggttcgctttaaccgctgggctgaatgtcccaaatgccaaaaccgccttcgtgaactcggtcttgaaaaatcggcgcaattacaaagctggattacttcccgtcttgctgctatgcttcaacagcgtgggaaaaccgccataggatgggatgaagtgcttgaaaataccgacaaattccctctgcccgatgaccttatcgtaatgtcatggcgcgaccagaaaggaggcagtaaagccgccgccctcggacaccgtgttataatggcgccgcttacggatggctgctatctggattacaaacacatcagccgggctgaagaacccggcaatctcagcgtcaacacaatcgcgcaatgtttcaatcttaaccccataaccgccgaaatggacgaggccgccgcttctcttgttctgggcggacagggaaacctctggtcggaaattatctatgcgggaaaaatcgctgaatacatgatattcccgaggatctgcgctctcgccgaaaccttctggtcagccgacaaagatcgtaatatagaagattttggcaaacggctcgaaatccaccagcaacggcttgataaactgggactgctgcagtaccgcggccccctaaagtaa

SEQ ID NO: 65536 - protein, 502 aa, Unknown
  Obtained from environmental sample
  DOMAIN (129)...(470): Glycosyl hydrolase family 20, catalytic domain
  misc_feature (1)..(502): Xaa is any amino acid
MIKYAIIPEPAFIQNQNGNFQCRGIFLPTIPENNNIQKEVQIFNTQIINTWGKEACIGDSGKINLITAEGFFDTESYQLEILPNEIRLCSSAEAGMYRGLQTLRQLFLSGYHEGVLSIPCGIIKDKPRFPWRGFMLDCSRYFYSVEFIKKLLDALSLHHINIFHWHLTDDQGWRLPVRQYPLLTEIGSKRRDHRLHDNCIGGFYSEAXIXDIVEFARHRHIEVVPEIDLPGHASAILAAYPGLGCTGGPYRVEDRFGIFEDVLCAGNDDIFPLAEALFDTLVELFPSKYVHIGGDEVRFNRWAECPKCQNRLRELGLEKSAQLQSWITSRLAAMLQQRGKTAIGWDEVLENTDKFPLPDDLIVMSWRDQKGGSKAAALGHRVIMAPLTDGCYLDYKHISRAEEPGNLSVNTIAQCFNLNPITAEMDEAAASLVLGGQGNLWSEIIYAGKIAEYMIFPRICALAETFWSADKDRNIEDFGKRLEIHQQRLDKLGLLQYRGPLK

SEQ ID NO: 65537 - DNA, 465 bp, Unknown
  Obtained from environmental sample
  misc_feature (1)..(465): n is a, c, g, or t
gtggtcgacccggattccggcagggtttctcgtgccccgccgtactcaggaaccgccagggagtcctcgccatttcgcgtacggggatttcaccctctctgtcgggctttcccaatgcccttccgctatgtctcggttttctccaaactcccccctttcgggcaggcggccctacaaccccgccgtcgccggcggtttgggctcctccgatttcgctcgccgctactttcggaatctctgttgatttctgttcccggggtacttagatggttcagttcccccagtctcgcttccgcgccctatttgttcagccgcggatggcgggctcgcgcccgccgggttaccccattcggccgtcggcggatctcaggatgtttgctcctccccgccgcttttcgcagcttgccacggccttcctcgcctcgatacgccaaggcatccacctcaaacccttctctcgcttga

SEQ ID NO: 65538 - protein, 154 aa, Unknown
  Obtained from environmental sample
  misc_feature (1)..(154): Xaa is any amino acid
MVDPDSGRVSRAPPYSGTARESSPFRVRGFHPLCRAFPMPFRYVSVFSKLPPFGQAALQPRRRRRFGLLRFRSPLLSESLLISVPGVLRWFSSPSLASAPYLFSRGWRARARRVTPFGRRRISGCLLLPAAFRSLPRPSSPRYAKASTSNPSLA

SEQ ID NO: 65539 - DNA, 381 bp, Unknown
  Obtained from environmental sample
  misc_feature (1)..(381): n is a, c, g, or t
atgttgtgggtttgcggtttcaggttctatttcactcccctcgccggggttcttttcgcctttccctcacggtacttctgctctatcggtcgtatctcgtatttagccttggatcgtggtcgacccggattccggcagggtttctcgtgccccgccgtactcaggaaccgccagggagtcctcgccatttcgcgtacggggatttcaccctctctgtcgggctttcccaatgcccttccgctatgtctcggttttctccaaactcccccctttcgggcaggcggccctacaaccccgccgtcgccggcggtttgggctcctccgatttcgctcgccgctactttcggaatctctgttgatttctgttcccggggtacttag

SEQ ID NO: 65540 - protein, 126 aa, Unknown
  Obtained from environmental sample
  misc_feature (1)..(126): Xaa is any amino acid
MLWVCGFRFYFTPLAGVLFAFPSRYFCSIGRISYLALDRGRPGFRQGFSCPAVLRNRQGVLAISRTGISPSLSGFPNALPLCLGFLQTPPFRAGGPTTPPSPAVWAPPISLAATFGISVDFCSRGT

SEQ ID NO: 65541 - DNA, 354 bp, Unknown
  Obtained from environmental sample
  misc_feature (1)..(354): n is a, c, g, or t
gtgggtttgcggtttcaggttctatttcactcccctcgccggggttcttttcgcctttccctcacggtacttctgctctatcggtcgtatctcgtatttagccttggatcgtggtcgacccggattccggcagggtttctcgtgccccgccgtactcaggaaccgccagggagtcctcgccatttcgcgtacggggatttcaccctctctgtcgggctttcccaatgcccttccgctatgtctcggttttctccaaactcccccctttcgggcaggcggccctacaaccccgccgtcgccggcggtttgggctcctccgatttcgctcgccgctactttcggaatctctgttga

SEQ ID NO: 65542 - protein, 117 aa, Unknown
  Obtained from environmental sample
  misc_feature (1)..(117): Xaa is any amino acid
MGLRFQVLFHSPRRGSFRLSLTVLLLYRSYLVFSLGSWSTRIPAGFLVPRRTQEPPGSPRHFAYGDFTLSVGLSQCPSAMSRFSPNSPLSGRRPYNPAVAGGLGSSDFARRYFRNLC

SEQ ID NO: 65543 - DNA, 315 bp, Unknown
  Obtained from environmental sample
  misc_feature (1)..(315): n is a, c, g, or t
atgaaccggtttcccatcgactacggctttcgccctcgccttaggggccgacttaccctgggaagattgcctttacccaggaaaccttgggcttccggcggaggggaatcccacccctcttttcgtctacttatacctgcattctctcttccgccccctccagcgcgccttccggcacgccttcgtcggtctgcggaatgctcccctaccaactcacgatcgctcgtgaattccgcggcttcggttgcatgcttagccccgttacattgtctgcgcgccgtgactcgaccagtgagctgttacgcactcttttaa

SEQ ID NO: 65544 - protein, 104 aa, Unknown
  Obtained from environmental sample
  misc_feature (1)..(104): Xaa is any amino acid
MNRFPIDYGFRPRLRGRLTLGRLPLPRKPWASGGGESHPSFRLLIPAFSLPPPPARLPARLRRSAECSPTNSRSLVNSAASVACLAPLHCLRAVTRPVSCYALF

SEQ ID NO: 65545 - DNA, 321 bp, Unknown
  Obtained from environmental sample
  misc_feature (1)..(321): n is a, c, g, or t
gtgacggcgcttccactcgctgccgccagatcactaagacccgctttcgcgcctgcccggcctgtcggcctcgcagtcaggcccccttgtgcctttacactcatacgccgatttccaaccggcgcgaggggaccatcgcgcgcctccgttactgtttgggaggcgaccgccccagtcaaactgcctgcctaccgctgtccccgcgccggtttcacggcgcgggttagaagcctagccaggaaagggtggtatttcaccgttggctccgcgcaagctgacgcccacgcctcgcagcctcccacctatcctacacatgcctag

SEQ ID NO: 65546 - protein, 106 aa, Unknown
  Obtained from environmental sample
  misc_feature (1)..(106): Xaa is any amino acid
MTALPLAAARSLRPAFAPARPVGLAVRPPCAFTLIRRFPTGARGPSRASVTVWEATAPVKLPAYRCPRAGFTARVRSLARKGWYFTVGSAQADAHASQPPTYPTHA

SEQ ID NO: 65547 - DNA, 303 bp, Unknown
  Obtained from environmental sample
  misc_feature (1)..(303): n is a, c, g, or t
gtgccaaaccttcccgtcgatgtggactcttggggaagatcagcctgttatccccggagtaccttttatccgttaagtgacggcgcttccactcgctgccgccagatcactaagacccgctttcgcgcctgcccggcctgtcggcctcgcagtcaggcccccttgtgcctttacactcatacgccgatttccaaccggcgcgaggggaccatcgcgcgcctccgttactgtttgggaggcgaccgccccagtcaaactgcctgcctaccgctgtccccgcgccggtttcacggcgcgggttag

SEQ ID NO: 65548 - protein, 100 aa, Unknown
  Obtained from environmental sample
  misc_feature (1)..(100): Xaa is any amino acid
MPNLPVDVDSWGRSACYPRSTFYPLSDGASTRCRQITKTRFRACPACRPRSQAPLCLYTHTPISNRREGTIARLRYCLGGDRPSQTACLPLSPRRFHGAG

SEQ ID NO: 65549 - DNA, 438 bp, Unknown
  Obtained from environmental sample
  misc_feature (1)..(438): n is a, c, g, or t
gtgcgtacacctccagcctatcaaccaggtagtctccctggcgccttcgggggggtcgaacccccagggatggctcatcttgaggcaggcttcccgcttagatgccttcagcggttatcctttccggacatggctacccggcgcttgcacttggcagtacaaccggcacaccagcggtccgtccgtctcggtcctctcgtactaaaaacagctcctctcagccatccaacgcccatggcagatagggaccgaactgtctcgcgacgttctgaacccagctcacgtaccgctttaattggcgaacagccaaacccttgggacctgcttcagccccaggatgcgatgagccgacatcgaggtgccaaaccttcccgtcgatgtggactcttggggaagatcagcctgttatccccggagtaccttttatccgttaagtga

SEQ ID NO: 65550 - protein, 145 aa, Unknown
  Obtained from environmental sample
  misc_feature (1)..(145): Xaa is any amino acid
MRTPPAYQPGSLPGAFGGVEPPGMAHLEAGFPLRCLQRLSFPDMATRRLHLAVQPAHQRSVRLGPLVLKTAPLSHPTPMADRDRTVSRRSEPSSRTALIGEQPNPWDLLQPQDAMSRHRGAKPSRRCGLLGKISLLSPEYLLSVK

SEQ ID NO: 65551 - DNA, 300 bp, Unknown
  Obtained from environmental sample
  misc_feature (1)..(300): n is a, c, g, or t
atgcttttggaagggctggccggggattgcccggcggaacaacaatatggtcaagcctcgcggcggattagtactggtcggctaaacacgttaccgtgcgtacacctccagcctatcaaccaggtagtctccctggcgccttcgggggggtcgaacccccagggatggctcatcttgaggcaggcttcccgcttagatgccttcagcggttatcctttccggacatggctacccggcgcttgcacttggcagtacaaccggcacaccagcggtccgtccgtctcggtcctctcgtactaa

SEQ ID NO: 65552 - protein, 99 aa, Unknown
  Obtained from environmental sample
  misc_feature (1)..(99): Xaa is any amino acid
MLLEGLAGDCPAEQQYGQASRRISTGRLNTLPCVHLQPINQVVSLAPSGGSNPQGWLILRQASRLDAFSGYPFRTWLPGACTWQYNRHTSGPSVSVLSY

SEQ ID NO: 65553 - DNA, 339 bp, Unknown
  Obtained from environmental sample
  misc_feature (1)..(339): n is a, c, g, or t
atgaccttaaagcagatttttatcaataatatgaaggaattccgcaaaaaagaagggcgatcccagatgaaactggcggaattatgtaacacatcacccacttacatcggagaaatagaggttggaaaaaaattcccttccataggtatgattgaaaaaatagccgctattctgaagataaagccataccatttttttatagaccatacagaacaaaacgccgatctaaataccgataatccctaccccaaactgccaaagtcaatgcaaaatgaaataagaaaaggattgaacttttcaatcgatgaattaatcagagaaacccttgagaaatattga

SEQ ID NO: 65554 - protein, 112 aa, Unknown
  Obtained from environmental sample
  DOMAIN (11)...(65): Helix-turn-helix
  misc_feature (1)..(112): Xaa is any amino acid
MTLKQIFINNMKEFRKKEGRSQMKLAELCNTSPTYIGEIEVGKKFPSIGMIEKIAAILKIKPYHFFIDHTEQNADLNTDNPYPKLPKSMQNEIRKGLNFSIDELIRETLEKY

SEQ ID NO: 65555 - DNA, 531 bp, Unknown
  Obtained from environmental sample
  misc_feature (1)..(531): n is a, c, g, or t
atggacgactccaaaatacttataataatccccacctacaacgagcgcgagaacatcacgctgatcatcccggagatcaaaaagtctctgccgggagcgcacgtcctcgttgtggacgactcctcccccgacggaacgagcgccgctgtcaaggagatggccgccggaggggtagagggccttttcgtgctcgaccgcgccgccaagcaggggctcgggcgcgcctacatcgccggtttcaagtgggcgctggaacgcggctacgagtacattttcgagatggacgccgacttctcgcacaacccggagtacctgcccaagttcatcgaggcggcgcaatcggccgacctcgtcatcgggtcacgctacgtaagcggcgtgaacatcgtcaactggacgatgtcgcggctgctcctaagctacttcgggaacatgttcgcgcgtttcgtgaccggtttgcgcatcgccgacagcaccggcggcttcaagtgcttccgccgctccgtgctcgaatcgctcaacttatactga

SEQ ID NO: 65556 - protein, 176 aa, Unknown
  Obtained from environmental sample
  DOMAIN (7)...(174): Glycosyl transferase family 2
  misc_feature (1)..(176): Xaa is any amino acid
MDDSKILIIIPTYNERENITLIIPEIKKSLPGAHVLVVDDSSPDGTSAAVKEMAAGGVEGLFVLDRAAKQGLGRAYIAGFKWALERGYEYIFEMDADFSHNPEYLPKFIEAAQSADLVIGSRYVSGVNIVNWTMSRLLLSYFGNMFARFVTGLRIADSTGGFKCFRRSVLESLNLY

SEQ ID NO: 65557 - DNA, 858 bp, Unknown
  Obtained from environmental sample
  misc_feature (1)..(858): n is a, c, g, or t
gtgcgaatggccgcaatactggacggaaagtctttcgctaaggagaccgaggcgcttatatcggaacgggttagccggttcaaagagattgcggggcgtgttccgcgccttgccacaatacttgtcggcgacgacccgtcctccgccacatacgtgaagatgaagggcaacgcctgctctcgggtggggatgctttcgctcaagatagagatggggcgcgatacgacgacggaggagcttttggcgcggattagcgagctgaacggcgaccccctgacggacgggattctgctgcagcaccccgtccccaagcagatagacgaacgcgccgcgtttgaggctatctcgattggcaaggacgtggacggcgtgacctgccttggcttcggcctgatgtccatgggatgcgccgcctacggcagcgccacgccggcggggataatgcggctgctcgaccgctacgagatccccgtagaggggcgccatgccgtcgtcgtcggcaggagcccgatactcgggaagcctatggccatgatgctgctcaaccgcaacgccacggtcacaatctgccactccaagacggacggcctgccggagattgtaaggcgggcggacattgtggtaggcgccgtggggaagccggagttcatacaagcggattggataaaggagggcgccgtggcggtcgacgccggctaccacgttggcggcgtgggcgacatagacctgaaaaacgccgcgtcaaaggttagcgcctacacgccggtaccggggggcgtggggcctatgaccatctccacattgatactgcaaacgatgcgcgccgccgagaagacggtcgggatcgcggagaaataa

SEQ ID NO: 65558 - protein, 285 aa, Unknown
  Obtained from environmental sample
  DOMAIN (5)...(122): Tetrahydrofolate dehydrogenase/cyclohydrolase, catalytic domain
  misc_feature (1)..(285): Xaa is any amino acid
MRMAAILDGKSFAKETEALISERVSRFKEIAGRVPRLATILVGDDPSSATYVKMKGNACSRVGMLSLKIEMGRDTTTEELLARISELNGDPLTDGILLQHPVPKQIDERAAFEAISIGKDVDGVTCLGFGLMSMGCAAYGSATPAGIMRLLDRYEIPVEGRHAVVVGRSPILGKPMAMMLLNRNATVTICHSKTDGLPEIVRRADIVVGAVGKPEFIQADWIKEGAVAVDAGYHVGGVGDIDLKNAASKVSAYTPVPGGVGPMTISTLILQTMRAAEKTVGIAEK

SEQ ID NO: 65559 - DNA, 966 bp, Unknown
  Obtained from environmental sample
  misc_feature (1)..(966): n is a, c, g, or t
gtgaagatcgtaatactggatggtcataccgagaaccccggtgacttaagctgggaagggctcgaaaaatttggtgaacttaaagtctatgaccggacttctttaacagaccccaaagaatctatcgcgagaattggagatgcggaagcggtgtttacaaataagactccgataacggcagaagtgttcaacgcctgtccctcgataaaattcgtcggcgtgcttgccacaggttacaatgtagtggatgtgaatgccgccaaggcaaagggcatccctgtctgcaatattcctacctatggaactgcggctgtgggccagtttgcaatcgccctgcttctggaaatctgccaccacatcgggcatcacgacagggcagttcacgaaggtaggtgggaaaacaacgtagactggtgtttttgggactacccactgattgaactcgcaggaaaaactattggcatcatcggctttggccgcatcgggcagacaaccggcgcgatagcaaaagccctggacatgaaggtcattgcctttgacagtgttccatctgatagcggcaagcagatagcggaatacgtcagtctcgacaagcttttcgccgagtccgatgtaatcgcgctccactgccccctgttccccgaaacccagggcataatcaacaagaccaacatcgccaagatgaaagacggcgtaatcattctgaataattcacgcgggcccctggtggtggagcaggatctggccgatgcccttaacagcggtaaggtatacgcggcgggcctcgatgtcgtttcctcggaaccaatcaagggaaacaatcccttgctcaaagcgaagaactgctttataacccctcacatttcatgggcgccaaaggaaagccgccagagactaatggatatagccgtaggtaatttggccgccttcgtcaagggcagtccgataaatgtagtaaacaagtaa

SEQ ID NO: 65560 - protein, 321 aa, Unknown
  Obtained from environmental sample
  DOMAIN (3)...(320): D-isomer specific 2-hydroxyacid dehydrogenase, catalytic domain
  misc_feature (1)..(321): Xaa is any amino acid
MKIVILDGHTENPGDLSWEGLEKFGELKVYDRTSLTDPKESIARIGDAEAVFTNKTPITAEVFNACPSIKFVGVLATGYNVVDVNAAKAKGIPVCNIPTYGTAAVGQFAIALLLEICHHIGHHDRAVHEGRWENNVDWCFWDYPLIELAGKTIGIIGFGRIGQTTGAIAKALDMKVIAFDSVPSDSGKQIAEYVSLDKLFAESDVIALHCPLFPETQGIINKTNIAKMKDGVIILNNSRGPLVVEQDLADALNSGKVYAAGLDVVSSEPIKGNNPLLKAKNCFITPHISWAPKESRQRLMDIAVGNLAAFVKGSPINVVNK

SEQ ID NO: 65561 - DNA, 501 bp, Unknown
  Obtained from environmental sample
  misc_feature (1)..(501): n is a, c, g, or t
ttgaagggcttgaaactggtttccatcgcgccgaaacttggctttcgggacagcaggcgaatcgagggaaagtatacctttacaacggaagacatcgaaagcaacagatcgtttgacgacactatctgtgttttcccgcgtgtatacgacatgcttacacctgacggaaacatgggtggtaacggcgcgctgcaaggggagggctacaagggacatatctttgttgtgcttgaaccaaacagtacccgctcttataacattccctaccggactatgcttcctgtgagtatcgacaatctcctgatttcagggcgctgtatttcatcaacccatgtggcacagtcgagcatccgggccgtctatgcctgtatgctgacagggcaggctgcgggaaccgccgcctctttgtcgattcgggataagtgcgttcccgaaaaagtaaatatccgcaaacttcaggatcatctggtaaagcagggaatcgaaattcccaaaaactaa

SEQ ID NO: 65562 - protein, 166 aa, Unknown
  Obtained from environmental sample
  misc_feature (1)..(166): Xaa is any amino acid
MKGLKLVSIAPKLGFRDSRRIEGKYTFTTEDIESNRSFDDTICVFPRVYDMLTPDGNMGGNGALQGEGYKGHIFVVLEPNSTRSYNIPYRTMLPVSIDNLLISGRCISSTHVAQSSIRAVYACMLTGQAAGTAASLSIRDKCVPEKVNIRKLQDHLVKQGIEIPKN

SEQ ID NO: 65563 - DNA, 996 bp, Unknown
  Obtained from environmental sample
  misc_feature (1)..(996): n is a, c, g, or t
atggcttttatgaaagtacttattacggccaaagaagtagaagttcgggaacaggttgatgttctggttgtcggcggagggcctgcgggcatcggggcagcggtttccgcggcaagaaccggcggcagggtgctactgcttgaaaaaagggcttttctgggcgggaacattacttccgcctatgtggaaagctgcaactggtttttgaataataccctgttttccgtccatggcctttacaaggaaatagaggacggctataaggccgagtacgggcgggggcacgaaattcgggattacgcgccattccggttcaacggggaatacctcaaaattttcctggatgaattaatggccagggaaaatgtcaaggtgcttttttactcgtttgtaaacgatgtggtaattgaaaacaaccgcatcaaagcggttattatccagaccaagagcgggccgatggcggtaagcgccaaggtggttattgacgctaccggggacggggacgtggctttcgcggcgggccttccctttaagcaggggcgggacaaggacggctattgccagccgggcacgctgaatctgcggcttgccggggtggatgcgaaatttttcgcccagggacctgcagaacaggacaaactaaaagccattgataaaaaatttcaacaagattacgatgcgggaaaaattcaccttgactgtaaacggcgcgaattcattatggggcggctgacctcaggcggcgttatcggcagttttaattatccctgttcgtatatgattgatccaacgagttctgttgatctaaccaaaggcgaaatggaatgccgccagtacatcaaacaagtccttcactggatgcgtgtgaacctgggcggctttgaagggcttgaaactggtttccatcgcgccgaaacttggctttcgggacagcaggcgaatcgagggaaagtatacctttacaacggaagacatcgaaagcaacagatcgtttga

SEQ ID NO: 65564 - protein, 331 aa, Unknown
  Obtained from environmental sample
  DOMAIN (19)...(316): HI0933-like protein
  misc_feature (1)..(331): Xaa is any amino acid
MAFMKVLITAKEVEVREQVDVLVVGGGPAGIGAAVSAARTGGRVLLLEKRAFLGGNITSAYVESCNWFLNNTLFSVHGLYKEIEDGYKAEYGRGHEIRDYAPFRFNGEYLKIFLDELMARENVKVLFYSFVNDVVIENNRIKAVIIQTKSGPMAVSAKVVIDATGDGDVAFAAGLPFKQGRDKDGYCQPGTLNLRLAGVDAKFFAQGPAEQDKLKAIDKKFQQDYDAGKIHLDCKRREFIMGRLTSGGVIGSFNYPCSYMIDPTSSVDLTKGEMECRQYIKQVLHWMRVNLGGFEGLETGFHRAETWLSGQQANRGKVYLYNGRHRKQQIV

SEQ ID NO: 65565 - DNA, 489 bp, Unknown
  Obtained from environmental sample
  misc_feature (1)..(489): n is a, c, g, or t
atgaagcgtgcgcctgttattccaaaacatacgctcaatactcaaccggttgaagatacttcgttatcgacaccagctgccccgatggtggattcgttaattgcgcgcgtaggagaaatggctcgcggtaatgccattactttgcctgtatgtggtcgggatgtgaagtttactcttgaagtgctccggggtgatagtgttgagaagacctctcgggtatggtcaggtaatgaacgtgaccaggagctgcttactgaggacgcactggatgatctcatcccttcttttctactgactggtcaacagacaccggcgttcggtcgaagagtatctggtgtcatagaaattgccgatgggagtccccgtcgtaaagctgctgcacttaccgaaagtgattatcgtgttctggttggcgagaaggatgaccagcagatggctgcattatccagattggtaaaagggatcgcccaatcaagtgggatcctctag

SEQ ID NO: 65566 - protein, 162 aa, Unknown
  Obtained from environmental sample
  DOMAIN (67)...(154): ParB-like nuclease domain
  misc_feature (1)..(162): Xaa is any amino acid
MKRAPVIPKHTLNTQPVEDTSLSTPAAPMVDSLIARVGEMARGNAITLPVCGRDVKFTLEVLRGDSVEKTSRVWSGNERDQELLTEDALDDLIPSFLLTGQQTPAFGRRVSGVIEIADGSPRRKAAALTESDYRVLVGEKDDQQMAALSRLVKGIAQSSGIL

SEQ ID NO: 65567 - DNA, 597 bp, Unknown
  Obtained from environmental sample
  misc_feature (1)..(597): n is a, c, g, or t
ttgacattattccttcctgtctggctgtgcaccgtagagaaactggagttaatgcgcaaatttgatgaaggtaaactgcccaccgatccacacctgatgctccgactggccattgaaactgttgctcatgactatgatgtcatagttattgacagcgcgcctaacctgggtatcggcacgattaatgtcgtatgtgctgctgatgtgctgattgttcccacgcctgctgagttgtttgactacacctccgcactgcagtttttcgatatgcttcgtgatatgctcaagaacgttgatcttaaagggttcgagcctgatgtatgtattttgcttaccaaatacagcaatagtaatggctctcagtccccgtggatggaggagcaaattcgggatgcctggggaagcatggttctaaaaaatgttgtacgtgaaacggatgaagttggtaaaggtcagatccggatgagaactgtttttgaacaggccattgatcaacgctcttcaactggtgcctggagaaatgctctttctatttgggaacctgtctgcaatgaaattttcgatcgtctgattaaaccacgctgggagattagataa

SEQ ID NO: 65568 - protein, 198 aa, Unknown
  Obtained from environmental sample
  DOMAIN (17)...(150): CobQ/CobB/MinD/ParA nucleotide binding domain
  misc_feature (1)..(198): Xaa is any amino acid
MTLFLPVWLCTVEKLELMRKFDEGKLPTDPHLMLRLAIETVAHDYDVIVIDSAPNLGIGTINVVCAADVLIVPTPAELFDYTSALQFFDMLRDMLKNVDLKGFEPDVCILLTKYSNSNGSQSPWMEEQIRDAWGSMVLKNVVRETDEVGKGQIRMRTVFEQAIDQRSSTGAWRNALSIWEPVCNEIFDRLIKPRWEIR

SEQ ID NO: 65569 - DNA, 645 bp, Unknown
  Obtained from environmental sample
  misc_feature (1)..(645): n is a, c, g, or t
atgttcagaatgaaactcatggaaacacttaaccagtgcataaacgctggtcatgaaatgacgaaggctatcgccattgcacagtttaatgatgacagcccggaagcgaggaaaataacccggcgctggagaataggtgaagcagcggatttagttggggtttcttctcaggctatcagagatgccgagaaagcagggcgactaccgcacccggatatggaaattcgaggacgggttgagcaacgtgttggttatacaattgaacaaattaatcatatgcgtgatgtgtttggtacgcgattgcgacgtgctgaagacgtatttccaccggtgatcggggttgctgcccataaaggtggcgtttacaaaacctcagtttctgttcatcttgctcaggatctggctctgaaggggctacgtgttttgctcgtggaaggtaacgacccccagggaacagcctcaatgtatcacggatgggtaccagatcttcatattcatgcagaagacactctcctgcctttctatcttggggaaaaggacgatgtcacttatgcaataaagcccccttgctggcgggggcttgacattattccttcctgtctggctgtgcaccgtagagaaactggagttaatgcgcaaatttga

SEQ ID NO: 65570 - protein, 214 aa, Unknown
  Obtained from environmental sample
  misc_feature (1)..(214): Xaa is any amino acid
MFRMKLMETLNQCINAGHEMTKAIAIAQFNDDSPEARKITRRWRIGEAADLVGVSSQAIRDAEKAGRLPHPDMEIRGRVEQRVGYTIEQINHMRDVFGTRLRRAEDVFPPVIGVAAHKGGVYKTSVSVHLAQDLALKGLRVLLVEGNDPQGTASMYHGWVPDLHIHAEDTLLPFYLGEKDDVTYAIKPPCWRGLDIIPSCLAVHRRETGVNAQI

SEQ ID NO: 65571 - DNA, 969 bp, Unknown
  Obtained from environmental sample
  misc_feature (1)..(969): n is a, c, g, or t
ttggatgaataccgggggaaggaatttaacggcgtctggcctaccctgcctgaattgttcaggatcaccgtttcccggcatgggcagcggcaatgttttaccgtatttgagcctgaccgcgtaagccttaactacactgaagcactggcgctaattcaggcagtggcaagatggctttacagcaaagggatccgtaagggcgacaaaatagccttaacaagtaaaaattcgcccgaatgggctatcgcttacctgggcatagttttcgcgggagcaatcgtggttcctatcgattaccagttgaaaagcgaagaaaccgagcttttgatgagaacagcccgcgcaaaaatcctctttgttgacgaggaaaagtacgtttattttaaggaaaatcccaaaggcctaacagatattgtatcccttaaaaaaggcgtagggcagtatatatacgatctgaacgggccggaagcgaccattgaggaagctacggaaaatgatctggcagccatactttttacatcaggaactacaggggatccaaagggagtaatgctgacccaccagaatctggtgtccgactgtttcctggcacaagctattccctttgatgtgtatcacaccgacgttttctacgccattctccccattcaccatatttacgccatgctggcggttttcatcgaaacaataggtaccggagcagaagttgttttcggaaaaaaattggtaaccgcgctaatgcttaaagagctcaaagaaggcaaggtaaccatgcttttgggggtgcccttgcttttcaataaactccttgacggcatactccggggaataaaagccaaaggacccatagtttacggaattataagctttctgatggcaatctcgggccttatcaaaaaaacattcaaggttaatcccggtaaaaagatcttccactcaatccttgaaaaagcctccttagcacaataa

SEQ ID NO: 65572 - protein, 322 aa, Unknown
  Obtained from environmental sample
  DOMAIN (44)...(321): AMP-binding enzyme
  misc_feature (1)..(322): Xaa is any amino acid
MDEYRGKEFNGVWPTLPELFRITVSRHGQRQCFTVFEPDRVSLNYTEALALIQAVARWLYSKGIRKGDKIALTSKNSPEWAIAYLGIVFAGAIVVPIDYQLKSEETELLMRTARAKILFVDEEKYVYFKENPKGLTDIVSLKKGVGQYIYDLNGPEATIEEATENDLAAILFTSGTTGDPKGVMLTHQNLVSDCFLAQAIPFDVYHTDVFYAILPIHHIYAMLAVFIETIGTGAEVVFGKKLVTALMLKELKEGKVTMLLGVPLLFNKLLDGILRGIKAKGPIVYGIISFLMAISGLIKKTFKVNPGKKIFHSILEKASLAQ

SEQ ID NO: 65573 - DNA, 711 bp, Unknown
  Obtained from environmental sample
  misc_feature (1)..(711): n is a, c, g, or t
atgcgtactttgaaaagctttttctttttattgtttttgccttttttggcagtatttatatcctgttccgcaagaatagatggcgttgtattggggggaggcgctgccgagataagtgtcagggcatcccttgggcccagaacagtaagccttgttcagtccctgaaaagctttatgggggataccaggaatacgcctatccttaatgcggaaaccataaaccgctcattggctgctgcatccggcattaaatccgcttcgctttcaaatacaagctctgaagctcttgaagggaatatatcgatctccaacataggggattttttgctttccgaaaggggtatgttcattacctataacgaaggcgcggcgtcatcttcaattaccgtagtcctggacagggattccgcgcccctgcttatttcccggctttctccggaagtgggggagtacctttccgcccttatggctcctgtggcgctaagcgaatacatgccggcaagggaatacctcaaccttgtggcaatgatctacggcagccctttggcggatgaaatcgccgccgccaggatcagggcatctattgagtttccccgccaggttacatcggtgtcaggggggagttccgccggaaggcgtgcggaattcgatattccgcttctggatattctggttctggaaaagccccttcgatacgaggttaactggtaa

SEQ ID NO: 65574 - protein, 236 aa, Unknown
  Obtained from environmental sample
  SIGNAL (1)...(24)
  misc_feature (1)..(236): Xaa is any amino acid
MRTLKSFFFLLFLPFLAVFISCSARIDGVVLGGGAAEISVRASLGPRTVSLVQSLKSFMGDTRNTPILNAETINRSLAAASGIKSASLSNTSSEALEGNISISNIGDFLLSERGMFITYNEGAASSSITVVLDRDSAPLLISRLSPEVGEYLSALMAPVALSEYMPAREYLNLVAMIYGSPLADEIAAARIRASIEFPRQVTSVSGGSSAGRRAEFDIPLLDILVLEKPLRYEVNW

SEQ ID NO: 65575 - DNA, 885 bp, Unknown
  Obtained from environmental sample
  misc_feature (1)..(885): n is a, c, g, or t
ttgccgcttttgaagccgaagaaagcagttgaggtaaccaggcttcatagcctcgccagacaaatcccattcaggtacggagaaagcgggttaatcatgcagcctcctttccgttcgccccaccactcgtcaagcgctgaaggagtgcttgggggagggaggaacatcaggccaggcgaaataaccctggctcattatggaaccctctttctggatgaagcgcctgaattccgcttgcccgtacttcaatcgctaagggaacctctggaagataaagtcatcaccatagtccgcgccgaaagctaccacaggcttcctgctgattttcagcttatcctggcagcaaatagctgcccatgcgggcggctgggcgcggttcaagccagcgaggatgaaacttatactgcctgctccttcgactcaggctgcatctgttctccagacgaaattcgccgttactggaaaaaaatgggaggcgctcttcttgaccggattgaccttagggttcccgtccgcgccccaggagttttaaaaccagccggagaagacggcgaaaaaagcgatgaaataaggcggagggttattgaagccgttgaaatacagagggaacgtttcaaaagctcaattattaggcgcaactcaaggatgctccccggccaaattgataagttttgtcagatgaccaagaaagccgaagaaacatttataattgcctcatctaaactgggattgtccggccgggcatgccatgggattcttaaaatcgccagaactatagccgacctggaaaaaagagacgttattgacaccgctcacattctggaagccattcaacaccgccgcctcggcgacgatccatacgatatactttcgattgaatgctaa

SEQ ID NO: 65576 - protein, 294 aa, Unknown
  Obtained from environmental sample
  DOMAIN (1)...(179): Magnesium chelatase, subunit ChlI
  misc_feature (1)..(294): Xaa is any amino acid
MPLLKPKKAVEVTRLHSLARQIPFRYGESGLIMQPPFRSPHHSSSAEGVLGGGRNIRPGEITLAHYGTLFLDEAPEFRLPVLQSLREPLEDKVITIVRAESYHRLPADFQLILAANSCPCGRLGAVQASEDETYTACSFDSGCICSPDEIRRYWKKMGGALLDRIDLRVPVRAPGVLKPAGEDGEKSDEIRRRVIEAVEIQRERFKSSIIRRNSRMLPGQIDKFCQMTKKAEETFIIASSKLGLSGRACHGILKIARTIADLEKRDVIDTAHILEAIQHRRLGDDPYDILSIEC

SEQ ID NO: 65577 - DNA, 546 bp, Unknown
  Obtained from environmental sample
  misc_feature (1)..(546): n is a, c, g, or t
atggaagtcaacaaaaagcagctggctgacattttcggtgcgagtatccgtaccattcagaactggcaggaacagggaatgcccgttctgcgaggcggtggcaagggtaatgaggtgctttatgactctgccgccgtcataaaatggtatgccgaaagggatgctgaaattgagaacgaaaagctgcgccgggaggttgaagaactgcggcaggccagcgaggcagatctccagccaggaactattgagtacgaacgccatcgacttacgcgtgcgcaggccgacgcacaggaactgaagaatgccagagactccgctgaagtggtggaaaccgcattctgtactttcgtgctgtcgcggatcgcaggtgaaattgccagtattctcgacgggctccccctgtcggtgcagcggcgttttccggaactggaaaaccgacatgttgatttcctgaaacgggatatcatcaaagccatgaacaaagcagccgcgctggatgaactgataccggggttgctgagtgaatatatcgaacagtcaggttaa

SEQ ID NO: 65578 - protein, 181 aa, Unknown
  Obtained from environmental sample
  DOMAIN (1)...(164): Phage DNA packaging protein Nu1
  misc_feature (1)..(181): Xaa is any amino acid
MEVNKKQLADIFGASIRTIQNWQEQGMPVLRGGGKGNEVLYDSAAVIKWYAERDAEIENEKLRREVEELRQASEADLQPGTIEYERHRLTRAQADAQELKNARDSAEVVETAFCTFVLSRIAGEIASILDGLPLSVQRRFPELENRHVDFLKRDIIKAMNKAAALDELIPGLLSEYIEQSG

SEQ ID NO: 65579 - DNA, 540 bp, Unknown
  Obtained from environmental sample
  misc_feature (1)..(540): n is a, c, g, or t
atgtcggttttccagttccggaaaacgccgctgcaccgacagggggagcccgtcgagaatactggcaatttcacctgcgatccgcgacagcacgaaagtacagaatgcggtttccaccacttcagcggagtctctggcattcttcagttcctgtgcgtcggcctgcgcacgcgtaagtcgatggcgttcgtactcaatagttcctggctggagatctgcctcgctggcctgccgcagttcttcaacctcccggcgcagcttttcgttctcaatttcagcatccctttcggcataccattttatgacggcggcagagtcataaagcacctcattacccttgccaccgcctcgcagaacgggcattccctgttcctgccagttctgaatggtacggatactcgcaccgaaaatgtcagccagctgctttttgttgacttccattgttcattccacggacaaaaacagagaaaggaaacgacagaggccaaaaagctcgctttcagcacctgtcgtttcctttcttttcagagggtattttaa

SEQ ID NO: 65580 - protein, 179 aa, Unknown
  Obtained from environmental sample
  misc_feature (1)..(179): Xaa is any amino acid
MSVFQFRKTPLHRQGEPVENTGNFTCDPRQHESTECGFHHFSGVSGILQFLCVGLRTRKSMAFVLNSSWLEICLAGLPQFFNLPAQLFVLNFSIPFGIPFYDGGRVIKHLITLATASQNGHSLFLPVLNGTDTRTENVSQLLFVDFHCSFHGQKQRKETTEAKKLAFSTCRFLSFQRVF

SEQ ID NO: 65581 - DNA, 384 bp, Unknown
  Obtained from environmental sample
  misc_feature (1)..(384): n is a, c, g, or t
ttgtatagcggtaaacttttttattttacttgtattggagagaagaaagaactaatagatatttacaattatttcaaagaatctgatgaatttacttgtacattacaacaagaattatatcgggaggaatattggtgtgaaataatgccaaaaaaggcaactaaaggaaatgcaatattggcattaaaggaagagctaaaatgtgataaaataatatcatttggggactctataaatgatataccaatgtttgaaatatcggatgagagttacgctgttgaaaatgctgttgatgaactaaaaaaacatgcgacaggaataataatgtcaaatgaaaaagatggagtagctcattggttggaagaaaattataagagaatataa

SEQ ID NO: 65582 - protein, 127 aa, Unknown
  Obtained from environmental sample
  DOMAIN (1)...(120): haloacid dehalogenase-like hydrolase
  misc_feature (1)..(127): Xaa is any amino acid
MYSGKLFYFTCIGEKKELIDIYNYFKESDEFTCTLQQELYREEYWCEIMPKKATKGNAILALKEELKCDKIISFGDSINDIPMFEISDESYAVENAVDELKKHATGIIMSNEKDGVAHWLEENYKRI

SEQ ID NO: 65583 - DNA, 546 bp, Unknown
  Obtained from environmental sample
  misc_feature (1)..(546): n is a, c, g, or t
ttggtcgctattgatacgttcatggttggaaatctcaaaggaataggaaaaatataccttcaaaccgttgtggactgccattcccgattcgcattcggacatctttacacgtcaaaagttcccgttacggctgtccacgtgcttaatgaccaagtactgccgttttttgaagggtataattgtcccgtcgttaccattctcaccgacaacggtcgggagtactgcggacggcaggacagccatccctttgaactgtttcttcagcttgaagatatagaacaccggacaacgcagatacgccgaccgcaaagcaacggcattgtagagaggctgcaccgtacgctgttagacgaacatttccgtatccagggcaggattaagttttatgaaagccttgatgagatgcagtcggatttggataattatcttcacgcgtataattatgaaagggcgcatcaggggcgcaatatgaacggcagaacgccccatcaggccttcgttgaaggcattcccgattatgttgaaaaggaggattcggcagcttaa

SEQ ID NO: 65584 - protein, 181 aa, Unknown
  Obtained from environmental sample
  DOMAIN (1)...(167): Integrase core domain
  misc_feature (1)..(181): Xaa is any amino acid
MVAIDTFMVGNLKGIGKIYLQTVVDCHSRFAFGHLYTSKVPVTAVHVLNDQVLPFFEGYNCPVVTILTDNGREYCGRQDSHPFELFLQLEDIEHRTTQIRRPQSNGIVERLHRTLLDEHFRIQGRIKFYESLDEMQSDLDNYLHAYNYERAHQGRNMNGRTPHQAFVEGIPDYVEKEDSAA

SEQ ID NO: 65585 - DNA, 366 bp, Unknown
  Obtained from environmental sample
  misc_feature (1)..(366): n is a, c, g, or t
atgaccactaatttaactgtaacacaaaaagcggcgaggcgaaagctcaatcttttggaattggctgacgacctcggtaatgtaagcgaagcctgcaggcgtatcggttattcccgtgaacaattctatgaaatcagacggaattatcaaaccttcggctcgcaagggctcttggataaagcgagaggaccaaagaaccctcatcctaacagagcatcagacgaacaggaaaaagccgtccttgattactgccttgagtatcccgtacacggcgctctcagggtaagccagcagttaatactgaggggcactcatataggagtcggagcgattcgggggatatggcaaaggcataatttactgtga

SEQ ID NO: 65586 - protein, 121 aa, Unknown
  Obtained from environmental sample
  misc_feature (1)..(121): Xaa is any amino acid
MTTNLTVTQKAARRKLNLLELADDLGNVSEACRRIGYSREQFYEIRRNYQTFGSQGLLDKARGPKNPHPNRASDEQEKAVLDYCLEYPVHGALRVSQQLILRGTHIGVGAIRGIWQRHNLL

SEQ ID NO: 65587 - DNA, 351 bp, Unknown
  Obtained from environmental sample
  misc_feature (1)..(351): n is a, c, g, or t
atgacttgctttggtcagagtttcaacagtcccgagtcgttaaaacagtatcttgacaaacaacctgccaacagccccgataaatcaataaaggttacaatgattgttaataatcttatactaaaaaatgtcgcagatgttataagatcatcgggcaaatatgtaagccttaacctttctggcaatgtattaaccagtattccagaaaaagcttttgatgattgcaaaagtcttgtcagtgtaactatacccaatagcgttaccagtattgaagatcatgcttttgaagattgttccaaccttaccagtataaccataccgaacataaaggatattgcggacaatacttag

SEQ ID NO: 65588 - protein, 116 aa, Unknown
  Obtained from environmental sample
  misc_feature (1)..(116): Xaa is any amino acid
MTCFGQSFNSPESLKQYLDKQPANSPDKSIKVTMIVNNLILKNVADVIRSSGKYVSLNLSGNVLTSIPEKAFDDCKSLVSVTIPNSVTSIEDHAFEDCSNLTSITIPNIKDIADNT

SEQ ID NO: 65589 - DNA, 840 bp, Unknown
  Obtained from environmental sample
  misc_feature (1)..(840): n is a, c, g, or t
atggtcatcaaagaatctaaagtaaaattaagtatagcgaaaaagtgccgtgttttagaggtaaatcgaagcagttattataaatggcttaataaaaaaccattaaaaattgacgaaaatgccgaaacggaaataataaaaacgtatcataaacataaaggcacatacggaagagcaagaattactcaagctctgaaaaacgatggaattgttataaaccacaaaaaagtataccgcataatgtgtaaattgggcttaaaagccattatacgcaagaaatggagtattagaaaatatataaaagaaaacgtggcttgtaatatattgaatcgtgaatttaaaaccgatgaaccgtttaagaaacttgtgtgcgacgtaacagaaatgaaacgcattaatgacaaccgttattatttattcagcgtaatggatttatataataacgcaataatcaccgcgagcatgtcagagcataacgactgggggcttgtcgctaaagggcttgaaaatattccctgtcaattagagaaaataatgcttcattcggatcaaggaccgcagtttacttcaaaggcatatcatgaattaaccgaacaaaaaaacatcttattatcaatgtctcgtgtaggaaattgttatgataacgccgttaaagaaagttttttcgggcattttaaggaagaattttatgtttattataatccaaaaacacaagaagaattatataaaaacgtaagcgacttcattgaatattacaataatgacaggattcaaatgaggtttagaatgagtccaaatcagtatttaaagagtaataatatacaggtggggtttttataa

SEQ ID NO: 65590 - protein, 279 aa, Unknown
  Obtained from environmental sample
  DOMAIN (114)...(270): Integrase core domain
  misc_feature (1)..(279): Xaa is any amino acid
MVIKESKVKLSIAKKCRVLEVNRSSYYKWLNKKPLKIDENAETEIIKTYHKHKGTYGRARITQALKNDGIVINHKKVYRIMCKLGLKAIIRKKWSIRKYIKENVACNILNREFKTDEPFKKLVCDVTEMKRINDNRYYLFSVMDLYNNAIITASMSEHNDWGLVAKGLENIPCQLEKIMLHSDQGPQFTSKAYHELTEQKNILLSMSRVGNCYDNAVKESFFGHFKEEFYVYYNPKTQEELYKNVSDFIEYYNNDRIQMRFRMSPNQYLKSNNIQVGFL

SEQ ID NO: 65591 - DNA, 2400 bp, Unknown
  Obtained from environmental sample
  misc_feature (1)..(2400): n is a, c, g, or t
gtggaaacagatagtgacattctggctgagtatgtcgaagagtcgcgtgagcatctcaatcatatagaatcaattttcgaatctataagaaagacgggtgagtcccaccccgattccataaatgaattgttccgcgctatccataccataaagggttctgctggctttttgggtttaaccgccatcgggacacttacccacgcgatggaaagccttttggactctgtacgcgaaggtcggttaacaatgaccccggatattacagaagttcttatgaagggcagtgatatgctggccgatatgtttgacgatgtttctaaaagcggtgagtttgatattaacgatgttgtagttacgctgaaagcattaaacagcggagaagcagcacctgcagctgcggctccagccaaggccgcaaaaaaaccagcagcaaaagccgcagctccatcagatgaggcatcgaaaatgtcagtctctgatgtgttggctaagttccctgagcttgctggtaccgtggagcaaccaccagcagcccaacctgcacctgcagctcaaccagccgccgctccggctgcgccagccgccaccgctggagccgcgccaccttcgcaagcgtcacttaaagctgctgctgctgctactgatgctaaacacgaagaattcttacgtataaaggttgacctgcttgaccgccttatgatgcttgcgggtgagcttgtccttgttcgcaaccagcaacttatgcacatggaacaatcggatgccacattgcgcagcataacgcagagccttgattccgttacaacggagcttcaagaaaccataatgcgcactcgaatgcagcccataggtaccgtgttctcccgttattccagaatgacgcgcgaccttgctcgcaaactcaacaaaacaataaactttgtaactcagggtgatgaagtagaacttgataaaaatattttggaagccatcggcgaccctctaactcacttggttcgcaatgcctgtgaccacggtattgaaactatggaagaaagagcggcagaaggtaaaaccgatcctcccaccgtaactctttccgcatatcacgaaagcggacaaattcatgtagatgttaaagataatggaaaaggcatgggtcatgaagctatccgcaaaaaatgcttagaaaagcacctcanaactgaagatgaactcgccagaatgagcgagatggatttgctcaatttggtgtttttgccaggtttctcaacagctcaggtaatttccgatgtttcgggtcgtggcgttggaatggatgttgttaaaacaggtgttgaaaagttcggcggttcagtttccttgacctctgtagaagggcaaggttcaacggtaaaacttcgcttgcctttaacacttgcaattataccttctcttattgttcaaagcggagaagagcgttttgcaattccgcaggtcaatttggaagaacttgtttgcctttacgacaaagatgcctttacaagaattgaatgcgcaggcgcaagggaagtgttccgtttgcgcgatactttgctcccgatggttcgtttgcgcgaagcgcttgctcgccagagaatgttcgacgaagacgctctttccgaggtcaccgagcaaaactccgaggctcgcaaagagctcgccataaagttcaaagaagcggaagagagcggccattcaatgcattattcgttgaattttgctgttctgcgttcaggtggcttgcgttttggcttgattatagatcgtattcacggcagcgaagaaattgttgttaagccaatgcatagagctgtaaaaagcatttcgctttattccggtgcaacagtgctaggagacggcaaagttgccatgattttagatgccactggtttggcaaggcactacaacgtgcgtgatgtaagtggtggcagagaagataccaaaaagcagaaaaccacaatggacgacggtaccgagctccgttcgcttctcctattctcaaatggcggcaacgaacagtttggcgtttccatgcaagatgttaagcgtgttgaagcagtagaaacttctgccatagagaaaataggttctcaggaatacataacattagatggcgtttccactcgcgttgttcgcttagaagacgggctccgtgttcaaagcagctctcagccagaaaatatgttcttcttaattccgcaaaatgcccgcaaaccttatggcttgttaattgaaaagctaatagacagcggtcattacgaagttaagctcaacaaagatagctatcaagcagatggcgtggaaggcacagcgttaattaaaaagaaaatgacagttcttgtcaatttggagcaattgatgcaccttgttgatggaatgtggtatggaggtcaggtatga

SEQ ID NO: 65592 - protein, 799 aa, Unknown
  Obtained from environmental sample
  DOMAIN (219)...(278): Signal transducing histidine kinase, homodimeric domain
  misc_feature (1)..(799): Xaa is any amino acid
METDSDILAEYVEESREHLNHIESIFESIRKTGESHPDSINELFRAIHTIKGSAGFLGLTAIGTLTHAMESLLDSVREGRLTMTPDITEVLMKGSDMLADMFDDVSKSGEFDINDVVVTLKALNSGEAAPAAAAPAKAAKKPAAKAAAPSDEASKMSVSDVLAKFPELAGTVEQPPAAQPAPAAQPAAAPAAPAATAGAAPPSQASLKAAAAATDAKHEEFLRIKVDLLDRLMMLAGELVLVRNQQLMHMEQSDATLRSITQSLDSVTTELQETIMRTRMQPIGTVFSRYSRMTRDLARKLNKTINFVTQGDEVELDKNILEAIGDPLTHLVRNACDHGIETMEERAAEGKTDPPTVTLSAYHESGQIHVDVKDNGKGMGHEAIRKKCLEKHLXTEDELARMSEMDLLNLVFLPGFSTAQVISDVSGRGVGMDVVKTGVEKFGGSVSLTSVEGQGSTVKLRLPLTLAIIPSLIVQSGEERFAIPQVNLEELVCLYDKDAFTRIECAGAREVFRLRDTLLPMVRLREALARQRMFDEDALSEVTEQNSEARKELAIKFKEAEESGHSMHYSLNFAVLRSGGLRFGLIIDRIHGSEEIVVKPMHRAVKSISLYSGATVLGDGKVAMILDATGLARHYNVRDVSGGREDTKKQKTTMDDGTELRSLLLFSNGGNEQFGVSMQDVKRVEAVETSAIEKIGSQEYITLDGVSTRVVRLEDGLRVQSSSQPENMFFLIPQNARKPYGLLIEKLIDSGHYEVKLNKDSYQADGVEGTALIKKKMTVLVNLEQLMHLVDGMWYGGQV

SEQ ID NO: 65593 - DNA, 576 bp, Unknown
  Obtained from environmental sample
  misc_feature (1)..(576): n is a, c, g, or t
atgtacagatcggccgagtctggcggagcagtatttcaaaaggccatctccataaatcccagggaaggacgttaccgtttcgagcttggggtgttgtactacctcggcaagcgtatcaaggaagccggcacggaatttgacgccgccttaaaactgaatcccaatgacgctcaggttctgatgtacatgggaaaaatcttaaaagattccaaggattacgtgggggcaattccgtatcttgaaaaagcgtcccatgatcaggtatacaagctccgttcaatcattgaaatagggagctgttatatatcccttaagatgctggacaaggcgacatccgaactggaaagggcgataaatcttatcgttaaggaatccgacctggacagcctttatgccaggtattttctggccatgtgctatgaattaaccgggagcattccaaaggctttagcccagtgggacaagatctacgcacaaaaaaagaatttcagggatgttggagaaaagctcacaaaatacattgaatacagaagcgaaatggaggaaaaagaatctaaagaaccttcaggatcgtaa

SEQ ID NO: 65594 - protein, 191 aa, Unknown
  Obtained from environmental sample
  DOMAIN (23)...(56): Tetratricopeptide repeat
  misc_feature (1)..(191): Xaa is any amino acid
MYRSAESGGAVFQKAISINPREGRYRFELGVLYYLGKRIKEAGTEFDAALKLNPNDAQVLMYMGKILKDSKDYVGAIPYLEKASHDQVYKLRSIIEIGSCYISLKMLDKATSELERAINLIVKESDLDSLYARYFLAMCYELTGSIPKALAQWDKIYAQKKNFRDVGEKLTKYIEYRSEMEEKESKEPSGS

SEQ ID NO: 65595 - DNA, 615 bp, Unknown
  Obtained from environmental sample
  misc_feature (1)..(615): n is a, c, g, or t
atgaagatcctatgtgtgtcagatcagatagacccgttgatctacactaacagcataaagcaaagatttgccgatgtggactttattctttcagccggagacctccctcttgattaccttgattttattatctctaccctgaataaacctctgttctttatcatgggcaaccaccataccgacaagtctgacgatgatacccacggggcaacctacattgacgtaagaataaagcgcgaggccggactgattgtcgccggtctcggcggttccatgcgctacaacaggggggaaaatcaatttactgattttcaaatgaagatccgtatactgaaactgcttcccgcaatggtttttaaccgcattttccgcggacggtatctggacgtgcttttaacccacgcttccccgcggggaattcacgacaaggaagacaaatgccacaagggctttaagtgctttctctggtttattaaggtcttcaaacccaagtaccttgttcacggccatattcacctctatgatttgtccgaagtaaggacaacaaaatactgcgatacattggtcattaacgcatacggccattatcttatagacatgggagaaactgcatga

SEQ ID NO: 65596 - protein, 204 aa, Unknown
  Obtained from environmental sample
  DOMAIN (1)...(174): Calcineurin-like phosphoesterase
  misc_feature (1)..(204): Xaa is any amino acid
MKILCVSDQIDPLIYTNSIKQRFADVDFILSAGDLPLDYLDFIISTLNKPLFFIMGNHHTDKSDDDTHGATYIDVRIKREAGLIVAGLGGSMRYNRGENQFTDFQMKIRILKLLPAMVFNRIFRGRYLDVLLTHASPRGIHDKEDKCHKGFKCFLWFIKVFKPKYLVHGHIHLYDLSEVRTTKYCDTLVINAYGHYLIDMGETA

SEQ ID NO: 65597 - DNA, 945 bp, Unknown
  Obtained from environmental sample
  misc_feature (1)..(945): n is a, c, g, or t
atgagtcttgactacacaagcctggatcaccagcgggctgctcatgattttaaccgcgccagaaacagagccacactttccaggatccagcatttcctgaacgccgacaaggataagctcctttcgcttaacgatgtaaaggaaatccttaaacccaagaacgaagtttaccgcggaatgcaggctgtacccatcagcaaaattgtcggcagtgagggccgttaccgggacttcaccaaatattttctcccccgccgggaatttttaaggtacagatggcaaaacgtagatctggcccagataagggacatcccgcttccggcaattcagctttacgaaatcggcggagtttatttcgtccgcgacggaaaccaccgggtttcagtattcggttcccagggcggcgaagtaatagacgccgaagtaacaagcctttcgacggaaattgaaataaagccttccatgactgtcgaagatcttaaagcggaagtaattgaatacgaaaaaaaaatattttatgaaaaaactttattcggggaacttacaggagacacaaatcttgacttcaccaatcccggccgctatgacgtaatttacaaccatatcctcgttcacaagtattacttaaatcagaatttagcggaggagatccctttcgataaagctctggtttcatggtacaataacgtgtactgtcccataatcaaaatcattgacgaagacatgctttgccttaactttccggggagaagcccgagcgatctttacgtatggatcgtcaagcactgggatcgtttgaaaaagaacaacggccttcattattcagtagccgaggcgtcaaaggatttttcggacaagtacggagacagcaggggaaggctttttcgctttatcccggctttgcttgcaaagcttttcaaaaatcgccgcaaaaagcggcaataa

SEQ ID NO: 65598 - protein, 314 aa, Unknown
  Obtained from environmental sample
  misc_feature (1)..(314): Xaa is any amino acid
MSLDYTSLDHQRAAHDFNRARNRATLSRIQHFLNADKDKLLSLNDVKEILKPKNEVYRGMQAVPISKIVGSEGRYRDFTKYFLPRREFLRYRWQNVDLAQIRDIPLPAIQLYEIGGVYFVRDGNHRVSVFGSQGGEVIDAEVTSLSTEIEIKPSMTVEDLKAEVIEYEKKIFYEKTLFGELTGDTNLDFTNPGRYDVIYNHILVHKYYLNQNLAEEIPFDKALVSWYNNVYCPIIKIIDEDMLCLNFPGRSPSDLYVWIVKHWDRLKKNNGLHYSVAEASKDFSDKYGDSRGRLFRFIPALLAKLFKNRRKKRQ

SEQ ID NO: 65599 - DNA, 2316 bp, Unknown
  Obtained from environmental sample
  misc_feature (1)..(2316): n is a, c, g, or t
gtggagagtccgaccggttccggaaagacaactcagcttcccgtgatactctatgaagccggatatacgaagaatggaatcatcggagttacccaaccgcgccgtatcgcggcggtatccgtaagtgaatttatagcgcgtcaaacaggtactacaatgccaggactcatcggatacaagatgagattcgccgatcagaccaatcatgagactaaaataaaaataatgaccgacggaatgctccttcaggagatgaaaatcgatccttggctgtcaaaatacggcgttttaatcgttgatgaggcacatgaacgaagtttaaacatcgattttatccttggattgctaaaaagagttcttgaaagcaggcgtgattttaaagtgatcatatcttccgcgactataaacgcggaaattttttccgaatactttaataattgccccattgtaaagatagaagcgcaacgtttccccgtaacattgatctatgatcctgttttaacaggcgaaccggaagaaagagaagaaagaaatcgtgataaaacaggttataacaggcaaataaacaataaagacgaggcaattttattaaaaatcgagacaattactacacgttttataagtgaaaaacgcgaaggggacattttaatttttctttcaggcgaaaaaatgataaaagattgcatatcaaggcttgcttttagttccgtgggaaaatatttacaccttgttccattgtacggcaggctcggcaaagaagaacaggaaagagtgttcgatccggcgcctaaaggcaaaaccaaagttgttttatcaacgaatatcgccgaaacttcggttactattgacggaattaccgcagtaattgattcaggattggcaaaactcaactggtataaccccaaaacatttacttccagtcttatagaatcgccgatttccattgcttctgcgaaccaacgcaagggaagagcgggaagaacgcgcgaaggaacgtgttatcgactgtacacacgcaaagattttgaacaaagaccgctttatactaccgaagaaatcttccgtactgatctatccgaagttattttacgcatggctgaccttggaattaccgattttgagaactttgattttatcgcagcccctgaaaaagaaggattactcggcggagtagagacattaaatctgcttgatgcgcttgaaaaagaccgcactttatcaaatatcggcaaattaatgactgaatttcctcttgcgcctcgtcaatcaagaattattgtggaagcgatactaaaatatcccgatatgatcaaagaaacgctgattgcggcggcatttttatcgacacaaagcccttatatccttcctcccggtgaagaaaccgacgcaagacaagctcatcatcgtttccgcgatgatcacggcgattttgtttcgtacttaaaactttataaatcgtacaatgattcgacaaataaattaaatttctgcgaaaaaagctatcttgacgagcgcgcaatggcggaaatagtgaatgtaaccgctcaacttgaagaaattatctctaaaatgaaaattccggtacatcaaagagcgcaaccgctttccgcaagcgaaattgacgattatttgtgctgtatcgggcgcggaatgatacaatttgtctgtattcgcgagagaggacacggcgaatctcgtacgcacgaagcgcgggggaaaataggctcataccgcagtttaacggcggataaaataattattcatccgggatcggttatgttccgtatggacccgcaatttattgtcgccggagaaattgtacgcacgtcaaaaatgtacgcaatgtcggtctctccgctttcaaaagatgtattgaatcgcataagacccggtcttttctccggcgacgcggacggaaaattcgccgacagacccgaaaaacaaaagaaaacgcgcgattttaccaacaacattaaaatttcaggcgaagtgtttgaaattgccaatgtaaaaggaaagaaaacggtaattcttccgtgggaaaaacttgaactgataaaaaataatttatcgggcgaaaggattcataagagcataaagggaaaaattacggtaaaaaatcaatactatctgcttgcgggagaaaaactcagtcttattctctctcttgcgccggttttagacgtagacggcgctttttcccgcaaaattccgcacagagaaaactttgattcgcgggaaaagctttccgcgctgataaaacatttggaagatctcgcgaagcctgttgtatggaaaaaaggcgtaaagatttag

SEQ ID NO: 65600 - protein, 771 aa, Unknown
  Obtained from environmental sample
  DOMAIN (389)...(481): Helicase associated domain (HA2)
  misc_feature (1)..(771): Xaa is any amino acid
MESPTGSGKTTQLPVILYEAGYTKNGIIGVTQPRRIAAVSVSEFIARQTGTTMPGLIGYKMRFADQTNHETKIKIMTDGMLLQEMKIDPWLSKYGVLIVDEAHERSLNIDFILGLLKRVLESRRDFKVIISSATINAEIFSEYFNNCPIVKIEAQRFPVTLIYDPVLTGEPEEREERNRDKTGYNRQINNKDEAILLKIETITTRFISEKREGDILIFLSGEKMIKDCISRLAFSSVGKYLHLVPLYGRLGKEEQERVFDPAPKGKTKVVLSTNIAETSVTIDGITAVIDSGLAKLNWYNPKTFTSSLIESPISIASANQRKGRAGRTREGTCYRLYTRKDFEQRPLYTTEEIFRTDLSEVILRMADLGITDFENFDFIAAPEKEGLLGGVETLNLLDALEKDRTLSNIGKLMTEFPLAPRQSRIIVEAILKYPDMIKETLIAAAFLSTQSPYILPPGEETDARQAHHRFRDDHGDFVSYLKLYKSYNDSTNKLNFCEKSYLDERAMAEIVNVTAQLEEIISKMKIPVHQRAQPLSASEIDDYLCCIGRGMIQFVCIRERGHGESRTHEARGKIGSYRSLTADKIIIHPGSVMFRMDPQFIVAGEIVRTSKMYAMSVSPLSKDVLNRIRPGLFSGDADGKFADRPEKQKKTRDFTNNIKISGEVFEIANVKGKKTVILPWEKLELIKNNLSGERIHKSIKGKITVKNQYYLLAGEKLSLILSLAPVLDVDGAFSRKIPHRENFDSREKLSALIKHLEDLAKPVVWKKGVKI

SEQ ID NO: 65601 - DNA, 642 bp, Unknown
  Obtained from environmental sample
  misc_feature (1)..(642): n is a, c, g, or t
atgttctttcgccgcgttgtgctctgtcttctgggaaacttcgtgcttgcttttggcgtggctatggcggtgaaagccgatctgggaatcacccctgtcaattccatcgcctttgtcctgagcaagatttttcctatcgatcacggcctcttgaccggcgtcatatacgccagctatgtattgattcaactggcaatactgaggagggaattccgcatctataacctgttgcaggccggacttggcctgttgttcggctggtttgtctttctatgtaaccatatacttgttttcccgactccggaattctatttcgtacggctcttattcctgctggccggcgtaatcataatcggcctgggaataatgctttacctcagggccaatatcctgccccaaccggcggaagggcttatactggcgattcagaaaaagaccggctgggaactgcataatatcaaggtcgctttcgattcttcggttgttgttatagcggcggcaatttccttaatcgctatcaaaaggatcatcggtatcagggaaggaacacttatcgcaatgatcggtataggcaagtgtttaggcttttttaccaaacacctgggcgggaagatagatgcgtttttcaggctttccaagtaa

SEQ ID NO: 65602 - protein, 213 aa, Unknown
  Obtained from environmental sample
  SIGNAL (1)...(23)
  DOMAIN (5)...(86): Uncharacterized BCR, YitT family COG1284
  misc_feature (1)..(213): Xaa is any amino acid
MFFRRVVLCLLGNFVLAFGVAMAVKADLGITPVNSIAFVLSKIFPIDHGLLTGVIYASYVLIQLAILRREFRIYNLLQAGLGLLFGWFVFLCNHILVFPTPEFYFVRLLFLLAGVIIIGLGIMLYLRANILPQPAEGLILAIQKKTGWELHNIKVAFDSSVVVIAAAISLIAIKRIIGIREGTLIAMIGIGKCLGFFTKHLGGKIDAFFRLSK

SEQ ID NO: 65603 - DNA, 906 bp, Unknown
  Obtained from environmental sample
  misc_feature (1)..(906): n is a, c, g, or t
atgattatccagggtcccaaaaggacttttatctgtgaatgtattaattttgcaaacctgaccgaagatacggtcaggttggaattcgactggactggcccggcgcctgtgccgggacaattttttctgataaaacccaatcgctcaagtgtgtttttggcacggccttttagcgtttcaggctggattccacgaaaaagcacagtttttaagggagctgaagacaggcgcaaaaacatcgacaggcgcgcaaacgctaacgggaatgcagggggctatatgcgccaccctgattcggaccggcgggttaacacaggcgggatcctaaaatttttcgtagcccggcgtggaaaaggcagtacggagctttcggaaatgggaaccggcgaaaaagcggagctctcaggcccgttgggtaactattggcctttggagcaaattcccagaggtgcggttgccctggtcggaggcggcgtcggcatatcgcctcttttgccgcttgttccggaattaaaaaaaaggccatttgatttcttcgttggatataaaacacgcacatttggcctggaagacttaaaaaaccgtgctatcggagggttgcgttcactcattatagccaccgaagacggttccgatggagttaaggggcgcatcctggattttttttcgccgatggggtacagcggcgtgtttgcctgcggccccgagccgatgcttcgggaggtagccgacagaagcgtggcgtgcggaattccctgctttataagtaccgaaaggcacatggcatgcggggtaggagcctgtcttggctgcaagattagaaccaccaggggtagccggcgctgttgcgcggacggcccgatattctcaggcgaggagatctgctttgaaagcaaaagagcctga

SEQ ID NO: 65604 - protein, 301 aa, Unknown
  Obtained from environmental sample
  DOMAIN (153)...(244): Oxidoreductase NAD-binding domain
  misc_feature (1)..(301): Xaa is any amino acid
MIIQGPKRTFICECINFANLTEDTVRLEFDWTGPAPVPGQFFLIKPNRSSVFLARPFSVSGWIPRKSTVFKGAEDRRKNIDRRANANGNAGGYMRHPDSDRRVNTGGILKFFVARRGKGSTELSEMGTGEKAELSGPLGNYWPLEQIPRGAVALVGGGVGISPLLPLVPELKKRPFDFFVGYKTRTFGLEDLKNRAIGGLRSLIIATEDGSDGVKGRILDFFSPMGYSGVFACGPEPMLREVADRSVACGIPCFISTERHMACGVGACLGCKIRTTRGSRRCCADGPIFSGEEICFESKRA

SEQ ID NO: 65605 - DNA, 1026 bp, Unknown
  Obtained from environmental sample
  misc_feature (1)..(1026): n is a, c, g, or t
ttggctgcaagattagaaccaccaggggtagccggcgctgttgcgcggacggcccgatattctcaggcgaggagatctgctttgaaagcaaaagagcctgatctctccgttaccattgctggggtcaaactgcggaacccggtcatcgctgcctccggaacattcggttatggccgggaatacgaaggccttttggacatcgccggcctgggaggcatctgtacgaaaggccttacattggatcccagaccgggaaactcgggggtgagaatctacgaggttccctccggaatgatgaactccatcggcctggaaaatccgggcattctcgcttttatagaaaccgagttgccgggtctaagaaaactcggcccggcgataatagcaaacctttcaggatcgaccgtttccgaatatgtccagggagcccgcctgctgggcgatgcagacgtggacatgatagagctgaacatctcctgccccaacataaaatccggcgggatgacctttggccttgagcctgaaaccgccgcttccttgaccaggcaggtacgcaaggccgcttcaaaaaagccactaatggtaaagctctcgccaaacgccccggacatcgcggcggtggctcaggcttgtgtaagagccggggctgacgccctttcgcttgtgaatactttcaaggccatggctatcgatatcaattccagaaagccggtttttgaaaatgttagcgcgggcctttccgggccttgcataaagccaatcgccctgcgtatggtttgggaactatacgaagcggtaaaggttcccattatagggataggcggcatagcttccgctgccgacgccctggagtaccttctcgccggagccgccgccatccaggtaggcagcgcgactttcgcccacccgcctgcaatgaacgaaatcacagccggtatcaaggcttacatgaaagaaaaagagtttacgaaaatcagcagcctgagcatcaggaagactgaaaatttgccagcgatacacaagtaa

SEQ ID NO: 65606 - protein, 341 aa, Unknown
  Obtained from environmental sample
  DOMAIN (34)...(317): Dihydroorotate dehydrogenase
  misc_feature (1)..(341): Xaa is any amino acid
MAARLEPPGVAGAVARTARYSQARRSALKAKEPDLSVTIAGVKLRNPVIAASGTFGYGREYEGLLDIAGLGGICTKGLTLDPRPGNSGVRIYEVPSGMMNSIGLENPGILAFIETELPGLRKLGPAIIANLSGSTVSEYVQGARLLGDADVDMIELNISCPNIKSGGMTFGLEPETAASLTRQVRKAASKKPLMVKLSPNAPDIAAVAQACVRAGADALSLVNTFKAMAIDINSRKPVFENVSAGLSGPCIKPIALRMVWELYEAVKVPIIGIGGIASAADALEYLLAGAAAIQVGSATFAHPPAMNEITAGIKAYMKEKEFTKISSLSIRKTENLPAIHK

SEQ ID NO: 65607 - DNA, 672 bp, Unknown
  Obtained from environmental sample
  misc_feature (1)..(672): n is a, c, g, or t
atgctgcctgacttaataagccctcataaagcttcgtttaaggattacactgagttgcgtgcacaagtgaacacaaccagagcggtggtttttctggccggtaatatggttacgaattcgcaaaattccataggcggggtatccgcgcgggtatacaggggcggaacctacgggtttgcctcgggcgcggaatactcagatgagagtatcagaaatgtgctggccgccgctgccagaaacgcgaaatttatgaacacccatatcaataaaggtcttgggccactgccggctgtcgcgccgggcaaagtcggattgaagaaagaacattcagaaaatgtagagcagagcgttttaattgaatatgccaaagcgctggattccctgattgttgagcgatacaagaacctgtcaagccggatggttcgtgtaaattgccttgacatagaaaagctacttgctgtaagagatggcgcggacagtcattactatcaaccgcgctcgtttgtctatgtgcaaatgtccgtagaaactgacgacaagattcccgtagagctctttaccccgataggcggattcggccgctttggcgagttgttttccgatccggcgctgctcacggagagtctggacaggcagtacgaacagctatgcaaaaacgctcggccaatctga

SEQ ID NO: 65608 - protein, 223 aa, Unknown
  Obtained from environmental sample
  misc_feature (1)..(223): Xaa is any amino acid
MLPDLISPHKASFKDYTELRAQVNTTRAVVFLAGNMVTNSQNSIGGVSARVYRGGTYGFASGAEYSDESIRNVLAAAARNAKFMNTHINKGLGPLPAVAPGKVGLKKEHSENVEQSVLIEYAKALDSLIVERYKNLSSRMVRVNCLDIEKLLAVRDGADSHYYQPRSFVYVQMSVETDDKIPVELFTPIGGFGRFGELFSDPALLTESLDRQYEQLCKNARPI

SEQ ID NO: 65609 - DNA, 591 bp, Unknown
  Obtained from environmental sample
  misc_feature (1)..(591): n is a, c, g, or t
atgggaaggtattttgatctatttgacaggtataacgccagagttactttctttgtctatgggaaagccaatcctttctgcgccaaagcgttgaacagggggcacgatgtcggttaccacagccttagtcaccaggacttgcggcaaatgtcaagggatgaaatgtaccgtgaaacaatcgagccggtaaaatcgttcagggacgccggcattcccctcttgtcattcgcctatccttatggcttttacgagccatggatgcatgatgtccttcttcgttcctttgggacgctgagaggttacggggttactttttgcctgtacagtgaagctgagatcaaaaacggatatatttcttcccgctccattgataacacgataatccctttggatgaggatttctacagtatcgtaaacagtatgctgatgacggtaaaatttattgacaagaatttggtattgccgctgactactcatgacatatcggcaatggcttcctggggtatcagtccccgccgccttgaatatttgttaaaaaaagctaacgaattggggtttagattttaccgtttcagcgattttgccaggtag

SEQ ID NO: 65610 - protein, 196 aa, Unknown
  Obtained from environmental sample
  DOMAIN (1)...(100): Polysaccharide deacetylase
  misc_feature (1)..(196): Xaa is any amino acid
MGRYFDLFDRYNARVTFFVYGKANPFCAKALNRGHDVGYHSLSHQDLRQMSRDEMYRETIEPVKSFRDAGIPLLSFAYPYGFYEPWMHDVLLRSFGTLRGYGVTFCLYSEAEIKNGYISSRSIDNTIIPLDEDFYSIVNSMLMTVKFIDKNLVLPLTTHDISAMASWGISPRRLEYLLKKANELGFRFYRFSDFAR

SEQ ID NO: 65611 - DNA, 915 bp, Unknown
  Obtained from environmental sample
  misc_feature (1)..(915): n is a, c, g, or t
atgaacgagtaccagccgcaaatcccgtgggaaattacccgcgccgcggtgagcattgccgcatggtgggtgctgttttaccgcttccaccggcccgaatcgccgcggcggcgcattgccctccttatcgccatgccggcggcttacgctttctggatactcatgcctatgagcattgtcgccaacgccgtttcatgggcggtcattaccgtagtctttgccttcatctgcggggatttgcgccgttccctttttaccgcttttttctacatcggcatggaggcatccatcgacaacacccgctccgccctgattgccctgctgtttaaccggttttttccttcccattcatccagccagtatttacagtacaatctgcaatacttcatcgtcttcggcttatgctgttgttattatatgataatgaggcggtattcgggcaaactgccgctcgccagttggatactgattattatcccccctatgattctgtgggcggttctgacttattacgcccatgtcgcggatccgcttctgatggaacagggtatcaacatttacggccccggcttctgtttcgggctgttttctatattactgaacccttggatactctacctgtatatccgccaactggttattaccgacgcccagcacctgaaaatagcggtttcagacgcagggcctgtatggactcaggaaaagggcctgtcggataatttttgcaaacattaccaactgaatgaccgggaaaaagacatagttgaagtaatgatgaaaggcaaaagcaacaaggaaatcgccgataccctgcacatttcaatcaggacagtgggggcttatcttcaaaatgtctacaagaaaaccggcgcgcccaaccgcttcgccctttactcgctgataaaaggggaataa

SEQ ID NO: 65612 - protein, 304 aa, Unknown
  Obtained from environmental sample
  DOMAIN (244)...(301): Bacterial regulatory proteins, luxR family
  misc_feature (1)..(304): Xaa is any amino acid
MNEYQPQIPWEITRAAVSIAAWWVLFYRFHRPESPRRRIALLIAMPAAYAFWILMPMSIVANAVSWAVITVVFAFICGDLRRSLFTAFFYIGMEASIDNTRSALIALLFNRFFPSHSSSQYLQYNLQYFIVFGLCCCYYMIMRRYSGKLPLASWILIIIPPMILWAVLTYYAHVADPLLMEQGINIYGPGFCFGLFSILLNPWILYLYIRQLVITDAQHLKIAVSDAGPVWTQEKGLSDNFCKHYQLNDREKDIVEVMMKGKSNKEIADTLHISIRTVGAYLQNVYKKTGAPNRFALYSLIKGE

SEQ ID NO: 65613 - DNA, 1623 bp, Unknown
  Obtained from environmental sample
  misc_feature (1)..(1623): n is a, c, g, or t
atgaaaaataaaaaaccaaatataacacagttcagtttaaggtggaaatttttcgctttttttgtcgggctgggattaggtatttcactggtaatgtatatcccttattcaaggtatatcaaaacctcttaccgatccacgcttacccatgtcctgcaaatggtagcaaaagaataccccgccttatccgatcccgccaatcttgtcagactggggaatgaaggttcgcaagattactggacccttaccagtcacatggatgaaatcgccaaaatttttgacatcgcctacatttattatgtcaggcggagcggggatacttttgaattcgtgctttcttccgaatatacgcccgatatgagccttgacgatgtattctcaaaatacgaacggcatgacattcctcagccgatgaatgacgcatataagacaggaactttacggataagccccgccccttttaccaacgtatggggcacgtttgtatcggcatatatccccataatgagcaacggtacaatagcaggcatattgggggctgattacgagatttccaaaattaagttttttgaattagaagctcaaatatcgttaatagtttcggttattatcgccgcagtgatggggtttttactctccacgtcccttatcaaaccggttgtcaggcttttcggcgtattaaaagcaattgccgcaggagaccttacccagcgcattgaggcgaaaggcaaagacgaaattgccacaatgacaacgctcttaaaagaaacacaggaaggcataaaaaatcttattgtaattatcaaaaatcagtcggtaacgctggccgacatcggcgataatcttgccgccaacatgaccgaaaccgccgatgcggtaaaccagattaccgccaacattcagagcatcaaaagccgtgtcattaaccagagcgcaagcgtaagcgaaacacacgccactatggaacaggttgtaaacaacattaacaaactggatggtctggtggaaaaccagagcgaaaatgtttcgcaagtttcatcggcaatagaggaaatggcggcaaatatcgattcggttagctccactcttgccaataacgccgccaatgttcaaaccttgcgggatgcttctgaagtaggacgttcagggttgcaggaagtggcaacggacatacaggaaatcgcaagggaatccgaaggtcttatggaaattaattccgttatgcaaaatatagcaagtcagaccaatttgctttcgatgaacgccgctattgaagcggcgcacgcgggggaagcgggaaaaggctttgccgtagtcgccggtgaaatccgcaaacttgccgagagttccagcgcacagtccaaaaccatcagtgaagttttaaaaaagataacaggttcaataggcaagatcacccaatccaccgaaaacgtccttaccaagtttggggcgatagatgaaagcgtaaaagtggtatcggatcaggaagagcatatccgtaactcaatgaaagaacagggaacgggaagccgccagattgttgacggagttaccgaagttaatgaaataacccgcaaagtaaaacaggctccgaagaaatgcttgaaggcagcaaggaagtaa

SEQ ID NO: 65614 - protein, 540 aa, Unknown
  Obtained from environmental sample
  DOMAIN (194)...(263): HAMP domain
  misc_feature (1)..(540): Xaa is any amino acid
MKNKKPNITQFSLRWKFFAFFVGLGLGISLVMYIPYSRYIKTSYRSTLTHVLQMVAKEYPALSDPANLVRLGNEGSQDYWTLTSHMDEIAKIFDIAYIYYVRRSGDTFEFVLSSEYTPDMSLDDVFSKYERHDIPQPMNDAYKTGTLRISPAPFTNVWGTFVSAYIPIMSNGTIAGILGADYEISKIKFFELEAQISLIVSVIIAAVMGFLLSTSLIKPVVRLFGVLKAIAAGDLTQRIEAKGKDEIATMTTLLKETQEGIKNLIVIIKNQSVTLADIGDNLAANMTETADAVNQITANIQSIKSRVINQSASVSETHATMEQVVNNINKLDGLVENQSENVSQVSSAIEEMAANIDSVSSTLANNAANVQTLRDASEVGRSGLQEVATDIQEIARESEGLMEINSVMQNIASQTNLLSMNAAIEAAHAGEAGKGFAVVAGEIRKLAESSSAQSKTISEVLKKITGSIGKITQSTENVLTKFGAIDESVKVVSDQEEHIRNSMKEQGTGSRQIVDGVTEVNEITRKVKQAPKKCLKAARK

SEQ ID NO: 65615 - DNA, 696 bp, Unknown
  Obtained from environmental sample
  misc_feature (1)..(696): n is a, c, g, or t
atgaaaaacacgatgggtaagctgcgcgggcttttgcgaatactgttcggaatgtttgttataacagcttgtataattggctgctcagataaaaaaacaggccaaagcgctgaaggaaaagcagaacagcggcaggataataatgagaaaattgcttcaaagccaaattcagaggagactgataatacagcgcaggacggaggattaacacaaaatgtgtttacacagcttgcaatgaaaaacccgcgtatgaatggccctgaagttttagcgcttcaaaaccggttactggaattacaattttatgaattaggcgaggctgacggttattacggacccatgacagagaccgttattaaaaaaatccaggattatcgcggtttgcctgctaccgggatagttgataaagaactctgggattttatttttgatgatgagtaccgtacaaccttgtttttttctggtatacagacatacaaccgggataatcttgggagaagtgaaaacttaggtcttggtatttatggaagcggtgattatgaagataatatattcgtttattatacggtaaaagataaaaaaataaaaataatcgagtctttgaacggacagcttatgtatagcatcagaatgacatgctattttataaatgaaaatgactgtcgtatcgaattcagtcttctcggccgattctga

SEQ ID NO: 65616 - protein, 231 aa, Unknown
  Obtained from environmental sample
  DOMAIN (85)...(146): Putative peptidoglycan binding domain
  misc_feature (1)..(231): Xaa is any amino acid
MKNTMGKLRGLLRILFGMFVITACIIGCSDKKTGQSAEGKAEQRQDNNEKIASKPNSEETDNTAQDGGLTQNVFTQLAMKNPRMNGPEVLALQNRLLELQFYELGEADGYYGPMTETVIKKIQDYRGLPATGIVDKELWDFIFDDEYRTTLFFSGIQTYNRDNLGRSENLGLGIYGSGDYEDNIFVYYTVKDKKIKIIESLNGQLMYSIRMTCYFINENDCRIEFSLLGRF

SEQ ID NO: 65617 - DNA, 1146 bp, Unknown
  Obtained from environmental sample
  misc_feature (1)..(1146): n is a, c, g, or t
gtgatagatcatgtaacgccggcaaaggattctctgaccgcacagcaggggaaaaccctgcgggactgggcgcggcggcacaatatcagggacttttttgacattggccgcaacggcgtctgccacgcgatttttccggaaaaaggatttgtccgcccgggctttacaataatcatgggcgacagccatacctgtacctacggtgcgttcggcgcttttgccgcgggagtcggaaccaccgatcttgaggttggaatacttaagggcgtctgcgccttccgcaaacctgaaaccctgcggatcaatctgtccggagaactgccgcagggcgttttccccaaagacgtaatccttgcgatcatcgcaaaaatcggcgtttcgggcgcgtcgggaaaggttatggaactgcgagggcctgtaatttcttcgatgagcatggaaggcagaatgacaatctgcaacatggcggtagaagcgggagcgaccagcggcgtatgtatgcccgacatgacaaccgtaaactacctgtggccgtttatcggggccagcgcttgcgctgcaagcgggggcggcgccgtaaacggcgataaaacttattcaagcaaagaagaagccttaaaggatttttcaaaatgggcaagcgatgatgacgcggaatattcgggcgttgtcgatattgactgcacaaaactggagccgctggcgacggtcggctataagcccgacgaggtaaaacctgtgcgggaacttgcgggaacaaaaatagatcaggcgtacatcggctcatgcaccaacggcagaatcgaagacctgcgcgccgccgccgctgttctgcgcggcaaaaaaatcgccgatacggtgcgcgcgattatcgcgccggctaccacggacatttacgcgcaggctctcaaagaagggctggtacaaatctttcttgacgcgggctgctgcgtgacaaacgccacctgcggcgcgtgcctgggaatgtccaacggagtgcttgccgaaggggaggtttgcgcttccaccacgaaccgcaatttttacgggcgcatgggcaagggcggcatggtacacctcatgagtccgacgtcggctgcagcttcggcaattgccggggcaattacagcgggggggcaggcatga

SEQ ID NO: 65618 - protein, 381 aa, Unknown
  Obtained from environmental sample
  DOMAIN (1)...(373): Aconitase family (aconitate hydratase)
  misc_feature (1)..(381): Xaa is any amino acid
MIDHVTPAKDSLTAQQGKTLRDWARRHNIRDFFDIGRNGVCHAIFPEKGFVRPGFTIIMGDSHTCTYGAFGAFAAGVGTTDLEVGILKGVCAFRKPETLRINLSGELPQGVFPKDVILAIIAKIGVSGASGKVMELRGPVISSMSMEGRMTICNMAVEAGATSGVCMPDMTTVNYLWPFIGASACAASGGGAVNGDKTYSSKEEALKDFSKWASDDDAEYSGVVDIDCTKLEPLATVGYKPDEVKPVRELAGTKIDQAYIGSCTNGRIEDLRAAAAVLRGKKIADTVRAIIAPATTDIYAQALKEGLVQIFLDAGCCVTNATCGACLGMSNGVLAEGEVCASTTNRNFYGRMGKGGMVHLMSPTSAAASAIAGAITAGGQA

SEQ ID NO: 65619 - DNA, 2085 bp, Unknown
  Obtained from environmental sample
  misc_feature (1)..(2085): n is a, c, g, or t
ttggcaaagtattttacaatgcctgcggcaagcaagcctgtaaatcgtccccgccatgaattgccgccgcctaagaacggcaattttaacgtaaatattattacagaccctgaacttacatcgaccaactttacaatctattacaaaatgaacaaaggtgcgcaaagaggaacgattgcgtcttacagagaatcggtaatcgattatttaattgactatatgctcacgcttcgattggaagaagcgcactccgatccgcagtcggcgtctaacggctcttggggcggtatatggcggtgggctgcgaactctaagttttattctatgggcgctgatccaaagacgggcagagtagaggactctattagagaacttcttttggaaaaagaagcgatgcgccgttttggatttacggagagcgagcttgcgctggcaaaattggatattgtttcgtacatggaaaaattggtatctgaaaaagacagaacggaaacccgcaagtttatcagaggatttacaagtcatttcttgtacggcgaagatatggcggatgttgaatgggaagcgaaagccgtcagcgccatgcttccgagcatcggcttaaaagatattttacaggcggcaagaaattatttttcggcgaatgatatcaatgtttttttaatcgctccgcaggcggaagcggaaaatcttccctcggcgganaaaataaaagcgatttttaatgagacgcaagccgccaaaatcgagcgcagaanagataatgcgctttcaggcgatttgatggacaaagcgccgccagccggagaaataacatcggaaaatgttgattcgccgacaggggcgcatattattactttgtcaaacggggcaaagataatttttaaggagaccaaaaataaaaataacgagattgtaatgtacgcaatggcaaatggcggagcggctaacgctacagagaaaacaattacctctgtaaatcttctttccgaaatgataaacgtatctggtcttggtccgtattcaagaaatgaacttttagtaaagcttgcggggaagcaagtttcagcgtctttctggaattcatattttttccgcggtttccagggggcgtctacaacggctgatataaaaacgctttttcagatgatacatcttttctttactcagccaagacttgatgaaaatgcaatcgcggcaatgcttgatcaatacaggacagcgcttaaacataaaaacgatgatcctgaaactgtgttttcgcgcgaattgacaaaaacaatttacaataaccatccgctttttaaaccgcttgaatatgacgatattgccaaagtttccataaaagacgccgatgactttttgaaacagtgtattaacccgagcgattatacttttgtgtttacaggcaacgtcaatcttaatgtcatacgggaattgtcggcaacctatatcggctctattcctgtttataagtcgatgaacaagtggaataatccgggattaaagcgccctgccgatggaagaagaacaatttataagggacaagaagatcggagtatggtttatcttagctggtttgcaaacggacccgcggatttcagcgaacagaggaatcagattgcgtcgcttttatccgaataccttgagataattttaaacgacgaaatccgcgaaaaattgggcggagtatattcaatttccgccggcgcgtcagtatctacaattccgtacggcgaatacagaataaacgtgttttttgtgtgtaatccttcccgcgttgatgaattaattaacgcggtacgcgatattttaacaggtcttacaaaacagcctcttaatcaggatacatttaacaaatcaaaagaggctctgttaaaggggcatgaaagatcgattcaaacaaatttgtacatagcgcagagttacgcgaattcatcggtgctttacaatacgccgctttcaaggcttaattcaagaccggacgcaataaaagcggtaaccattcaaaacgttcaagacctctgcaaagagacgctggctgcgggctctgtgcaagttgttttgtttcctgagaagaagtaa

SEQ ID NO: 65620 - protein, 694 aa, Unknown
  Obtained from environmental sample
  DOMAIN (445)...(625): Peptidase M16 inactive domain
  misc_feature (1)..(694): Xaa is any amino acid
MAKYFTMPAASKPVNRPRHELPPPKNGNFNVNIITDPELTSTNFTIYYKMNKGAQRGTIASYRESVIDYLIDYMLTLRLEEAHSDPQSASNGSWGGIWRWAANSKFYSMGADPKTGRVEDSIRELLLEKEAMRRFGFTESELALAKLDIVSYMEKLVSEKDRTETRKFIRGFTSHFLYGEDMADVEWEAKAVSAMLPSIGLKDILQAARNYFSANDINVFLIAPQAEAENLPSAXKIKAIFNETQAAKIERRXDNALSGDLMDKAPPAGEITSENVDSPTGAHIITLSNGAKIIFKETKNKNNEIVMYAMANGGAANATEKTITSVNLLSEMINVSGLGPYSRNELLVKLAGKQVSASFWNSYFFRGFQGASTTADIKTLFQMIHLFFTQPRLDENAIAAMLDQYRTALKHKNDDPETVFSRELTKTIYNNHPLFKPLEYDDIAKVSIKDADDFLKQCINPSDYTFVFTGNVNLNVIRELSATYIGSIPVYKSMNKWNNPGLKRPADGRRTIYKGQEDRSMVYLSWFANGPADFSEQRNQIASLLSEYLEIILNDEIREKLGGVYSISAGASVSTIPYGEYRINVFFVCNPSRVDELINAVRDILTGLTKQPLNQDTFNKSKEALLKGHERSIQTNLYIAQSYANSSVLYNTPLSRLNSRPDAIKAVTIQNVQDLCKETLAAGSVQVVLFPEKK

SEQ ID NO: 65621 - DNA, 663 bp, Unknown
  Obtained from environmental sample
  misc_feature (1)..(663): n is a, c, g, or t
atgaaaataaatagaatatctaaacgactccctttaattttatgctcggtattgctggcgtttcttatcattacttgcctttctacgtcaaactatgcgggattaggcaatggctcggatgttattccgcttacaagcagggctttaacggggaaacttcctaacggactgcgttattatatattggaaaattctctgccggagaacatggctcagcttgcgcttgttgtaaacgctggttctgttttggaaagggaagaccagagagggttggcgcattttgtagagcatttggcttttaacggaactaaacgttttcctaataactcgataattgagtattttagatcattgggtatgcgcttcggcggagactccaacgcttatacgtcatataacgaaaccgtttatcattttgatattcccgttgagaaagtcggcggaacaaagcgtatacctgaaaaggcgttagctgttcttgacgactggacttatgcggtaacttttttaagcgaagatgtaaaaagcgaaagccgtgttgtgcttgaagaattgcggtcaaggtctgacgcaatggacagggtgcgaaaaaaacttctgcccattctttttgcggggagcgcttacgctgatcgtcaaactatcgggcttgcggaattatag

SEQ ID NO: 65622 - protein, 220 aa, Unknown
  Obtained from environmental sample
  SIGNAL (1)...(25)
  DOMAIN (59)...(206): Insulinase (Peptidase family M16)
  misc_feature (1)..(220): Xaa is any amino acid
MKINRISKRLPLILCSVLLAFLIITCLSTSNYAGLGNGSDVIPLTSRALTGKLPNGLRYYILENSLPENMAQLALVVNAGSVLEREDQRGLAHFVEHLAFNGTKRFPNNSIIEYFRSLGMRFGGDSNAYTSYNETVYHFDIPVEKVGGTKRIPEKALAVLDDWTYAVTFLSEDVKSESRVVLEELRSRSDAMDRVRKKLLPILFAGSAYADRQTIGLAEL

SEQ ID NO: 65623 - DNA, 354 bp, Unknown
  Obtained from environmental sample
  misc_feature (1)..(354): n is a, c, g, or t
atgaacggtctgatacttttaattatttctataattacgcttttatttgcctatctgctttatggcaggtttcttgcccgaaaatggggaatagacccttcccgaaaaaccccggcgcatgaattggaagacggacaagagtatgtaccgacatctccggcagtgcttttcggacacgagttcgcttccattgccggagcgggaccgataaacggacctatatcgccgctatgttcggatgggttccggcgctgttatggcttctttttggaagcgtcttcttcggcgcagtgcatgatttcgcggcgctttacacgtcggttaaaaacaaaggtaaatcaatcggatatgtaa

SEQ ID NO: 65624 - protein, 117 aa, Unknown
  Obtained from environmental sample
  misc_feature (1)..(117): Xaa is any amino acid
MNGLILLIISIITLLFAYLLYGRFLARKWGIDPSRKTPAHELEDGQEYVPTSPAVLFGHEFASIAGAGPINGPISPLCSDGFRRCYGFFLEASSSAQCMISRRFTRRLKTKVNQSDM

SEQ ID NO: 65625 - DNA, 828 bp, Unknown
  Obtained from environmental sample
  misc_feature (1)..(828): n is a, c, g, or t
atgttcggatgggttccggcgctgttatggcttctttttggaagcgtcttcttcggcgcagtgcatgatttcgcggcgctttacacgtcggttaaaaacaaaggtaaatcaatcggatatgtaattgagttatatgtggggaaaacaggcaaacgtcttttcttgatttttgtatggcttttttcaatacttatcgcgtcggctttcgctgacatagtagcgggcacatttaacggatttaacgaggttaaaacgcgtaacgtaataagcggttctgtagcgtccagttcaagcttttttataatcgcggcgataattcttggtttatttatccgtaggcgcaaggcttccggtttggcaagcggcatcatcgcaatcgatcttcttattatctgcattgtctttgggattttttttcctttttatatggaaaaatcaatctggctctaccttatcttcgcctatatcttcatagcttcaattcttcccgtgtggtcattaggccagccccgtaattatcttaattcatttttattgatatctatgatgctggcggcttttattggagttatttttaccgcgcccccaatttcaatccccgcgttcacgggcttcaatataaaaggcaatcttttgttcccgggactttttgtcactatcgcctgcggcgcgatttccggctttcactcccttgtagccaccggagcggcgtcaaaacaggtaagcaatgaaaaacacatgcttcccatttcctatggcgccatgttagttgaaactctcgtagcggttctagcgcttatcgccgtcggtccctctcggccaatctga

SEQ ID NO: 65626 - protein, 275 aa, Unknown
  Obtained from environmental sample
  SIGNAL (1)...(25)
  DOMAIN (1)...(274): Carbon starvation protein CstA
  misc_feature (1)..(275): Xaa is any amino acid
MFGWVPALLWLLFGSVFFGAVHDFAALYTSVKNKGKSIGYVIELYVGKTGKRLFLIFVWLFSILIASAFADIVAGTFNGFNEVKTRNVISGSVASSSSFFIIAAIILGLFIRRRKASGLASGIIAIDLLIICIVFGIFFPFYMEKSIWLYLIFAYIFIASILPVWSLGQPRNYLNSFLLISMMLAAFIGVIFTAPPISIPAFTGFNIKGNLLFPGLFVTIACGAISGFHSLVATGAASKQVSNEKHMLPISYGAMLVETLVAVLALIAVGPSRPI

SEQ ID NO: 65627 - DNA, 399 bp, Unknown
  Obtained from environmental sample
  misc_feature (1)..(399): n is a, c, g, or t
gtgcgggggcagaaagtagaagacatcaaaatgggaagccattttgagcgggtaaacgttatcggcgctctttgcagcaaagagcatatagccgttgaatgctataaacattcgacagacagcgctttttttgaagactggtttgaaaattattttataaaagaaattcccaaaggatgcacggcaataatggacaatgcaaggttccactcaaaggagcggctgcgcaagctagcgagaggaaaggtgagattattgttcctgccgccgtattcaccagactacaaccctatagaaaaatcatgggcaaatatgaaacgctatctccgcgataatatgcataattataaatttgttgattctgcaatttatgactattttggctattcagttatttaa

SEQ ID NO: 65628 - protein, 132 aa, Unknown
  Obtained from environmental sample
  misc_feature (1)..(132): Xaa is any amino acid
MRGQKVEDIKMGSHFERVNVIGALCSKEHIAVECYKHSTDSAFFEDWFENYFIKEIPKGCTAIMDNARFHSKERLRKLARGKVRLLFLPPYSPDYNPIEKSWANMKRYLRDNMHNYKFVDSAIYDYFGYSVI

SEQ ID NO: 65629 - DNA, 366 bp, Unknown
  Obtained from environmental sample
  misc_feature (1)..(366): n is a, c, g, or t
atgtatagcatagattatatacggcgtgcggtagcctacaaagacgaagggcatactttcagggaattgaaagatgcgtttaatatcccggcagaaacgtattatcaatggaaagaaaagctcgaaaacggatatgacgggaaaaaagtctttcgggaacggtcgcgaaaaatagacaaagagaaactaaaaaaagccgtagaggaaaaaccggatacgtatctctatgaactggcacagctgtttgattgcacgccccaagcggtttttctcatgcttgaaaaactcaatataacgcgaaaaaaaagtccttcacttattatgaaaaatccgaagaaaaacgcacagaatttattacacggctaa

SEQ ID NO: 65630 - protein, 121 aa, Unknown
  Obtained from environmental sample
  DOMAIN (1)...(120): Transposase
  misc_feature (1)..(121): Xaa is any amino acid
MYSIDYIRRAVAYKDEGHTFRELKDAFNIPAETYYQWKEKLENGYDGKKVFRERSRKIDKEKLKKAVEEKPDTYLYELAQLFDCTPQAVFLMLEKLNITRKKSPSLIMKNPKKNAQNLLHG

SEQ ID NO: 65631 - DNA, 369 bp, Unknown
  Obtained from environmental sample
  misc_feature (1)..(369): n is a, c, g, or t
atggcatatagcattgattttataagaagggcaattacttacaagcagaatggacatacttttgcgcaattgcgggaggcatttgacatcccgtccgcgacatattacgactgggaagcaaagctaaataacgggcattttgatataattgtcaggcgcgagcgtcataggaaaatagacaaagaagcgcttataaaggcagtagcggaaaaaccggacgctttccttaaggaatatgcggagcaattcagttgtacgccaactgctgtcttctacgcccttgaaaaactaaacataacacgaaaaaaaagacctttacctattgtgaaaagtccgagcaggagcgggaggagtttgccgcaaggctga

SEQ ID NO: 65632 - protein, 122 aa, Unknown
  Obtained from environmental sample
  DOMAIN (1)...(122): Transposase
  misc_feature (1)..(122): Xaa is any amino acid
MAYSIDFIRRAITYKQNGHTFAQLREAFDIPSATYYDWEAKLNNGHFDIIVRRERHRKIDKEALIKAVAEKPDAFLKEYAEQFSCTPTAVFYALEKLNITRKKRPLPIVKSPSRSGRSLPQG

SEQ ID NO: 65633 - DNA, 594 bp, Unknown
  Obtained from environmental sample
  misc_feature (1)..(594): n is a, c, g, or t
ttgatggcagagccgggctggtggggcggagcccatcccttcgccctgcttgattattcagtcgtgcataacggcgaaatatcttcctacgacaccaaccggcgcgcgattgaaatgtacggttacaaatgcacgctccagaccgacaccgaagttattacctatataatagattacctgcacagaaaacaaaaactttcttttaccgaaatcgcttcggttatcgcggcctcgttctggcagaccattgagaaacagccgcccaaagaacgggagacgcatgaattcctccgcataatgttcagcgcccagcttataacaggaccgttctcaatcctggtcggctttgacggcggactcatggcgttaaacgacaggcttaaactgcgcagcatggtagtcggggaaaaagacaatatggtttatatagcgagcgaggaagcggccatccgcatcatagaaccgaaccttaataccgtatgggcgcccaagggcggccagccggtaatcgcctgtttgaacggctggacagacgggctgcgaaacgcagctttaagaaccgcgcgccccggcagcatggaaggcaaagaataa

SEQ ID NO: 65634 - protein, 197 aa, Unknown
  Obtained from environmental sample
  misc_feature (1)..(197): Xaa is any amino acid
MMAEPGWWGGAHPFALLDYSVVHNGEISSYDTNRRAIEMYGYKCTLQTDTEVITYIIDYLHRKQKLSFTEIASVIAASFWQTIEKQPPKERETHEFLRIMFSAQLITGPFSILVGFDGGLMALNDRLKLRSMVVGEKDNMVYIASEEAAIRIIEPNLNTVWAPKGGQPVIACLNGWTDGLRNAALRTARPGSMEGKE

SEQ ID NO: 65635 - DNA, 1620 bp, Unknown
  Obtained from environmental sample
  misc_feature (1)..(1620): n is a, c, g, or t
atgggcgcccaagggcggccagccggtaatcgcctgtttgaacggctggacagacgggctgcgaaacgcagctttaagaaccgcgcgccccggcagcatggaaggcaaagaataatggcaataaacttgttgtaccccgaatatgaagttttaagaaatcaggacagatgcatctgctgccgcgcctgcgaacgccagtgcgccaatgaaactcacgaatatgtagatggcattgacaaaatggtctgtgatgacgcgaaatgcgtaaactgccaccgttgcgtttcgctctgcccgacccgcgcccttaaaattgttaaaagcggcaacacctataagcaaaacgcgaactggaacggcaaaaccattgacgagatttacaaacaggcggccacgggcggcgtattgttgtcaagcatgggcaatcccgacgattatccggtgtattttgataaaatgctgttaaacgcctcgcaggttaccaacccgtcaatagacccgctgcgcgagcctatggaaacaaggatatctctcggcgcgaagccgaagcgcatagaaagggacaagagcggccgcattaagaacaatctgccgccgcatctgcacctgtcaatgccggttatgttttcggcgatgagttacggttccataagttacaacgcccacgaaagcctggcgcgcgccgccgaggaattgggcattctgtacaataccggcgaaggcggattgcatgaagatttttataaatacggcaagaacaccattgtgcaggtcgcctctgggcgtttcggcgttcatcccgaatacctgaactcgggcgcggcgattgagataaaaatggggcagggggcgaaacccggcatcggcggacatctgcccggaacaaaaatcgtaggcgacatttcccgcaccagaatgatccccgaaggctcggacgcgatctcgcccgcgccgcaccacgacatctattctatagaagacttgcgccagcttgtcttttccctgaaagaggcgacgaattatcaaaagcccgtcattgtcaaaatagccgcggtgcataacgtcaccgccatcgccagcggcattgccagaagcggcgccgatattatagccattgacggcttccggggcggaacgggagccgcgccgacgcgcatacgcgaccatgtcggcattcccatagagcttgcccttgccggcgttgacaagcgcctgcgcgacgagggcatccgcgacaatgtatcgattgttgtcggcggcagtatccgctccagcgccgatattatcaaagccgtcgccctgggcgcggactgcgtctacatcgcgtcggccgcgctgatcgcgcttggctgccatctgtgcagaagctgtcacgcgggcaaatgcaactggggcatcgcgactcaggttccggaactggtcaagcgcctgaacccggacctcggatacaagcgccttatcaacctgatgaccgcgtggcagcacgaaataaaagagatgatgggcggcatgggaataaactcgattgacggcctgaaagggaacaggctcatgcttcgcggcgtgggtcttaacgaaaaagaacttgaaatcctcggcattaaacacgccggagaataa

SEQ ID NO: 65636 - protein, 539 aa, Unknown
  Obtained from environmental sample
  DOMAIN (109)...(436): Glutamate synthase central domain
  misc_feature (1)..(539): Xaa is any amino acid
MGAQGRPAGNRLFERLDRRAAKRSFKNRAPRQHGRQRIMAINLLYPEYEVLRNQDRCICCRACERQCANETHEYVDGIDKMVCDDAKCVNCHRCVSLCPTRALKIVKSGNTYKQNANWNGKTIDEIYKQAATGGVLLSSMGNPDDYPVYFDKMLLNASQVTNPSIDPLREPMETRISLGAKPKRIERDKSGRIKNNLPPHLHLSMPVMFSAMSYGSISYNAHESLARAAEELGILYNTGEGGLHEDFYKYGKNTIVQVASGRFGVHPEYLNSGAAIEIKMGQGAKPGIGGHLPGTKIVGDISRTRMIPEGSDAISPAPHHDIYSIEDLRQLVFSLKEATNYQKPVIVKIAAVHNVTAIASGIARSGADIIAIDGFRGGTGAAPTRIRDHVGIPIELALAGVDKRLRDEGIRDNVSIVVGGSIRSSADIIKAVALGADCVYIASAALIALGCHLCRSCHAGKCNWGIATQVPELVKRLNPDLGYKRLINLMTAWQHEIKEMMGGMGINSIDGLKGNRLMLRGVGLNEKELEILGIKHAGE

SEQ ID NO: 65637 - DNA, 999 bp, Unknown
  Obtained from environmental sample
  misc_feature (1)..(999): n is a, c, g, or t
gtgtttaatgccgaggatttcaagttctttttcgttaagacccacgccgcgaagcatgagcctgttccctttcaggccgtcaatcgagtttattcccatgccgcccatcatctcttttatttcgtgctgccacgcggtcatcaggttgataaggcgcttgtatccgaggtccgggttcaggcgcttgaccagttccggaacctgagtcgcgatgccccagttgcatttgcccgcgtgacagcttctgcacagatggcagccaagcgcgatcagcgcggccgacgcgatgtagacgcagtccgcgcccagggcgacggctttgataatatcggcgctggagcggatactgccgccgacaacaatcgatacattgtcgcggatgccctcgtcgcgcaggcgcttgtcaacgccggcaagggcaagctctatgggaatgccgacatggtcgcgtatgcgcgtcggcgcggctcccgttccgccccggaagccgtcaatggctataatatcggcgccgcttctggcaatgccgctggcgatggcggtgacgttatgcaccgcggctattttgacaatgacgggcttttgataattcgtcgcctctttcagggaaaagacaagctggcgcaagtcttctatagaatagatgtcgtggtgcggcgcgggcgagatcgcgtccgagccttcggggatcattctggtgcgggaaatgtcgcctacgatttttgttccgggcagatgtccgccgatgccgggtttcgccccctgccccatttttatctcaatcgccgcgcccgagttcaggtattcgggatgaacgccgaaacgcccagaggcgacctgcacaatggtgttcttgccgtatttataaaaatcttcatgcaatccgccttcgccggtattgtacagaatgcccaattcctcggcggcgcgcgccaggctttcgtgggcgttgtaacttatggaaccgtaactcatcgccgaaaacataaccggcattga

SEQ ID NO: 65638 - protein, 332 aa, Unknown
  Obtained from environmental sample
  misc_feature (1)..(332): Xaa is any amino acid
MFNAEDFKFFFVKTHAAKHEPVPFQAVNRVYSHAAHHLFYFVLPRGHQVDKALVSEVRVQALDQFRNLSRDAPVAFARVTASAQMAAKRDQRGRRDVDAVRAQGDGFDNIGAGADTAADNNRYIVADALVAQALVNAGKGKLYGNADMVAYARRRGSRSAPEAVNGYNIGAASGNAAGDGGDVMHRGYFDNDGLLIIRRLFQGKDKLAQVFYRIDVVVRRGRDRVRAFGDHSGAGNVAYDFCSGQMSADAGFRPLPHFYLNRRARVQVFGMNAETPRGDLHNGVLAVFIKIFMQSAFAGIVQNAQFLGGARQAFVGVVTYGTVTHRRKHNRH

SEQ ID NO: 65639 - DNA, 348 bp, Unknown
  Obtained from environmental sample
  misc_feature (1)..(348): n is a, c, g, or t
ttgattaagcggttcacaaagggacagaaaatgaaaaaactaatcagcgggaaagtaagggaagtatacgacatttctgacgaaatgtcgttcgaggtctctgacgacaggcttgtcatcgtcacgacggacaggatttctgcgtttgacgtaattctgcccaaacccgtgctcgataaaggcaaggttctgaacgccgtttccctgttctggtttaaatacacgaaagacattatccccaatcacattatttcaagcgattttaaagacatgcccgagtttttccggaaggacgaattcgagggacggacggttatggttaaaaagcgtgaagatactgccgtttga

SEQ ID NO: 65640 - protein, 115 aa, Unknown
  Obtained from environmental sample
  misc_feature (1)..(115): Xaa is any amino acid
MIKRFTKGQKMKKLISGKVREVYDISDEMSFEVSDDRLVIVTTDRISAFDVILPKPVLDKGKVLNAVSLFWFKYTKDIIPNHIISSDFKDMPEFFRKDEFEGRTVMVKKREDTAV

SEQ ID NO: 65641 - DNA, 570 bp, Unknown
  Obtained from environmental sample
  misc_feature (1)..(570): n is a, c, g, or t
gtgaagatactgccgtttgaattcatcgtcaggggatatatgttcgggaatatgtgggaagcatattccaaaggcgaaaaattctgcggtcaaaagatcgagggcgattataagctggctgaaaaactggccgtcccgctctttaccccttcgacaaaagcgagaatcgggcatgacgagtatatctctgttcaacacgttaaggacgtgattggagcggagattgtcggcaggatagaaacagtctgcctaaagctttacaacacctgctacaactacgcttataacaagaacataattatcgccgatacgaaatttgaattcggccttgacgcaaacaacagcctctttgccgcggacgagctatttacgccggattcaagcaggttctggagccttccggattataaggcgggggtttcgccaaaaagttacgacaagcaattggtaagggactggctcactgaaaacacaataaacggcgagatgcagtttgataacgtgagcgacgatgttttaaggaaaacatccgagatttacgcggagtgccttcaaaaaataaccggatga

SEQ ID NO: 65642 - protein, 189 aa, Unknown
  Obtained from environmental sample
  DOMAIN (1)...(172): SAICAR synthetase
  misc_feature (1)..(189): Xaa is any amino acid
MKILPFEFIVRGYMFGNMWEAYSKGEKFCGQKIEGDYKLAEKLAVPLFTPSTKARIGHDEYISVQHVKDVIGAEIVGRIETVCLKLYNTCYNYAYNKNIIIADTKFEFGLDANNSLFAADELFTPDSSRFWSLPDYKAGVSPKSYDKQLVRDWLTENTINGEMQFDNVSDDVLRKTSEIYAECLQKITG

SEQ ID NO: 65643 - DNA, 2064 bp, Unknown
  Obtained from environmental sample
  misc_feature (1)..(2064): n is a, c, g, or t
ttgaaagacaatatgcagatgcttgtttcattggctaacgagaatatttcttatgagatggaattgctaaaaggcgacgctaccgccgtggcccagacattgataggccatcctgtccatgaaatgcagcaattgctggttgaacagattgccgcctaccccaattttgaggcggtggcaataatcaatgaaaaagggacaaccgtcacgtcatatagcgcgggttcctcacccccgtctgataacgccaacctgggcaaatatagggaaatggcgctggcagggcagagggttattacttccacttacaaggatgctgacggcaagctggttttttatgtctttgttccgatggatgagtccggcttcaaaagtgagactgcctccaatcccgcaattctcggcgcgaccgtttccggcctgtatttcaatgacatagtaacccggcttatgatggggaggccggagatcatcaccattgtggatgataagggaaaaatcatcgcggatgttcagaataaaaaatgggttgaagcgcagttgaattttctggaactcgccaagactaattcaaaatattctgattacgccggggtaatagagaggatgctctcaaaagacgttgacaatacggcccgctacaaactgaaaggcatggacggcgaaaaatttgataatgtcgtcgcctttatgcctattgtgtcgcctgaacgctgggctatttcggtctcgacggcgatagcggacagcgcttattacacggtaacggggatgataggcgtttcgggtattatcttcctggtgcttggcatggtcgccgcggctgtggcgtcgggatttatagcaaagccttttgaacttttaaaagaagccacgaaagcaaagaccgcctttatcgcgaacatgagccatgatctgcgtacccccctgaacgcgatagtaagcctttcgcagctcagccgcaccatgaatctgccggaaggagtcatggctcaccaggcaaaaatctacgagtcgggcatgacgattcttggcgtggttaacgatcttcttgatatttccaatattgaatccggaaaattcggggtaatctccgccgaatacaacctgccggattttattatggctacggcaagttccaacatgcgccatatcggcggttcaaaggatctcgcgcttactattattccggatgacaaactcccggtcaagcttaacggcgactcattaaggataaggcaggttttcaataatctgctgaggaatgccattgcccatagcaaaaaggggactattgaatggcggatttcgacggaaaaaggggagggcgacgcggtatggcttgtctcctctgttttggatcccggacaggagattagccctgaggatgtcgataaactgttccttgattattccagccttgacacgcagaagaagcgctcctcggaagggacggggctgggcctttcactgacgaaaaaaatcatcgacattatgaaaggctccatagccgtgcaaaactccttcgggaaagggacgctttttacggtcaggttattgcataagcacgttaacgacgaggtgatcagcgccgaatctctgggaaaactgaagaattttaaatcttccgaaagcaagaaacaggacgatttctcaaatatgcagcgcgtccagctccccgacgcccatgtgctggtggttgatgacgtggaaaccaaccttgaagtggcgaagggcatgctcctgccctatgggatgaaagttgactgcgtcttaagcgggaaggaagcggtagaacttgtccgcaggggcgagccccgctacagcgcgattttcatgaaccgctggatgcctgaaatggacggtattgcggcggtgcgcattattcgcaatgaaattgacggtgattacgcgaagactgtcccgataatcgcccttaccgccaatgccgtaatcggcaataacgccttctttataaaatccggtttccaggcggtgctttcaaaacccttcagcgtccgcagactggatgaagtggtaaaccaaattattaaaaataattag

SEQ ID NO: 65644 - protein, 687 aa, Unknown
  Obtained from environmental sample
  DOMAIN (294)...(359): His Kinase A (phosphoacceptor) domain
  misc_feature (1)..(687): Xaa is any amino acid
MKDNMQMLVSLANENISYEMELLKGDATAVAQTLIGHPVHEMQQLLVEQIAAYPNFEAVAIINEKGTTVTSYSAGSSPPSDNANLGKYREMALAGQRVITSTYKDADGKLVFYVFVPMDESGFKSETASNPAILGATVSGLYFNDIVTRLMMGRPEIITIVDDKGKIIADVQNKKWVEAQLNFLELAKTNSKYSDYAGVIERMLSKDVDNTARYKLKGMDGEKFDNVVAFMPIVSPERWAISVSTAIADSAYYTVTGMIGVSGIIFLVLGMVAAAVASGFIAKPFELLKEATKAKTAFIANMSHDLRTPLNAIVSLSQLSRTMNLPEGVMAHQAKIYESGMTILGVVNDLLDISNIESGKFGVISAEYNLPDFIMATASSNMRHIGGSKDLALTIIPDDKLPVKLNGDSLRIRQVFNNLLRNAIAHSKKGTIEWRISTEKGEGDAVWLVSSVLDPGQEISPEDVDKLFLDYSSLDTQKKRSSEGTGLGLSLTKKIIDIMKGSIAVQNSFGKGTLFTVRLLHKHVNDEVISAESLGKLKNFKSSESKKQDDFSNMQRVQLPDAHVLVVDDVETNLEVAKGMLLPYGMKVDCVLSGKEAVELVRRGEPRYSAIFMNRWMPEMDGIAAVRIIRNEIDGDYAKTVPIIALTANAVIGNNAFFIKSGFQAVLSKPFSVRRLDEVVNQIIKNN

SEQ ID NO: 65645 - DNA, 429 bp, Unknown
  Obtained from environmental sample
  misc_feature (1)..(429): n is a, c, g, or t
atgatcatagaatccatgaagatggaactggaaataaagaccacggaaacaggaaaggtgcatttcatagtcccggccggaacccaggttgccgctcagcagcctgttgcgcaaatcggcggagcagccggcgccgcgcccgcagcccccgctgcgccggcagcccctgccgcgccggcagcccctgccgcgccggcagccccaagcgcgtcaagtggcggcaaaacagtgcccgctccggttgccggaacgatcctccgctatgcggtaagcgaaggcgccgatgtcagcccaaccacgaccatcattatcattgaatcaatgaaaatggaactggaaataaaagccggttcagcgggaaaggtacacttcctggttccagccggaacccaggtggcgtcacagcagccggtagccgaaataaattag

SEQ ID NO: 65646 - protein, 142 aa, Unknown
  Obtained from environmental sample
  DOMAIN (75)...(141): Biotin-requiring enzyme
  misc_feature (1)..(142): Xaa is any amino acid
MIIESMKMELEIKTTETGKVHFIVPAGTQVAAQQPVAQIGGAAGAAPAAPAAPAAPAAPAAPAAPAAPSASSGGKTVPAPVAGTILRYAVSEGADVSPTTTIIIIESMKMELEIKAGSAGKVHFLVPAGTQVASQQPVAEIN

SEQ ID NO: 65647 - DNA, 1635 bp, Unknown
  Obtained from environmental sample
  misc_feature (1)..(1635): n is a, c, g, or t
atgcctaaaattaaactcactgaccttgtgttgagggacgcccaccagtccctgtttgccacccgtatggtaacgtcggatatgctgccgatttgcgacaaactcgacaaagcgggctttttcgctctggaagcatgggggggagccacgtttgactcctgtatccgcttcctcaacgaagatccctgggaaaggctgaaaaagctgaaaaaagccctgcccaacacaaagatcatgatgctgctgcggggccagaacctgctcggctacaggcattacgccgatgacgtggttgctaaattcgtggaatacgccgccaaggacggcattgacattttccgtatttttgacgcggttaacgatccccggaatttcaagaccgccgcacaggcggcgaagaagaccggcaagcacattcaggcgactatttcttacgcggtgacgcccttccatactatcgaaaaatacgcggattttgccaaacaactcgtggaaatcggcgcggactcaatctgcataaaggatatggccggcctcctcaagccatacgaagggtataacctggtaaaggcgataaaaagaacggcgaacctgccaatcgaaatccacactcatgccacaacgggcatgtcggtggcgactcttgccaaatgcgccgaggccggagccgatatacttgacacaaccatttcttcaatgtcaatgggcacaagccacagccccaccgaaactatggtagagatcttccggggaaccgaatacgaaacgggcatggatataaatctcctcctggaaatcgccgcttatttccgtaaagtgcggaacaactataaaaagtttgaatccagcttcctcggcgcggatacccgcattctggtcagccagattccgggcgggatgttgagcaacctggaaagccagctaaaggaacagggagccgcccaaaaaatggacgacgtgctgaaagagattgccgtggtacagaaggacgcgggctatccgccgctggtaacgcctaccagccagatcgtgggaacccaggctgtgttcaacgtgctgttcggccgttacaacaagctttccggcgaattccaggaccttgtggccggaaaatacggagcctgccccgcgcccaaaaacgccgaccttgtaaagaaggcccttgaagcccttaaaatggaaaaagaaattacccaccgcccggctgacgacattccggccgaatacggcaagctggaggaagaagctaaaaaagtcctgggaaccggcaccgttactcccgaagacgtgctgacctacgccatgttccccaaagttgcgcctaacttcttcaaaacacgggcggacggccccgtagtcttcaagccggaagacgcggcccccgccgcggccccggcggcaaaagcggcgcccgggcaggccgaaaagtacaatgttaacgtgaacggaacagactacgcggtagtagtctcccccgccggaacagtggcggtaaccgcagcagccggtgctgcccctgccgcagccgcatccggcgcccccagcggcggtgtcacaataccggcgccggttgccggaaccatcctccgctacagcgtggcggaaggcgcgcaagtgcaaaagggcgcgacataa

SEQ ID NO: 65648 - protein, 544 aa, Unknown
  Obtained from environmental sample
  DOMAIN (12)...(276): HMGL-like
  misc_feature (1)..(544): Xaa is any amino acid
MPKIKLTDLVLRDAHQSLFATRMVTSDMLPICDKLDKAGFFALEAWGGATFDSCIRFLNEDPWERLKKLKKALPNTKIMMLLRGQNLLGYRHYADDVVAKFVEYAAKDGIDIFRIFDAVNDPRNFKTAAQAAKKTGKHIQATISYAVTPFHTIEKYADFAKQLVEIGADSICIKDMAGLLKPYEGYNLVKAIKRTANLPIEIHTHATTGMSVATLAKCAEAGADILDTTISSMSMGTSHSPTETMVEIFRGTEYETGMDINLLLEIAAYFRKVRNNYKKFESSFLGADTRILVSQIPGGMLSNLESQLKEQGAAQKMDDVLKEIAVVQKDAGYPPLVTPTSQIVGTQAVFNVLFGRYNKLSGEFQDLVAGKYGACPAPKNADLVKKALEALKMEKEITHRPADDIPAEYGKLEEEAKKVLGTGTVTPEDVLTYAMFPKVAPNFFKTRADGPVVFKPEDAAPAAAPAAKAAPGQAEKYNVNVNGTDYAVVVSPAGTVAVTAAAGAAPAAAASGAPSGGVTIPAPVAGTILRYSVAEGAQVQKGAT

SEQ ID NO: 65649 - DNA, 669 bp, Unknown
  Obtained from environmental sample
  misc_feature (1)..(669): n is a, c, g, or t
ttgaatattatttggttaagcgtctctgccggaagcggtcccgaagaatgcgcacacgcgtgcgcgttaaccgttaaggcattactgctggaaattcaaagccttccggaaaaaaacattaaaggcgaagttatcgaaagcgaaccctctcaggtaaaaggaaatcttagatcggcgcttatcgctctggaaggaaacgatacggaaatctttatccaatcgtgggtagggattattcaatggatatggaagagtaaatacaggcctcaccataaaagaaaaaactggtttgtctctgtaaaaccctactttacgccggaacagggaaaagagttttctcttcaggacatacgctttgaaacggcgaaggcgggagggccggggggccagcatgtcaacaagaccgagactgccgtgagggctgtccatgtccctaccggaaaaaacgtcattgctaggggagaaaggtctcagcttatgaacaaaaaacttgcccttgcgaggcttgcgtctcttttcgctgacgataaatccgaaaaagagaaacaaaaccgctcgaatctgcgccattctcattgggaacttgagaggggcaatcccgtccgcgtatatgacggggaaacattaaaactgattaaaaggaaaaataatgacagaaacaaagattaa

SEQ ID NO: 65650 - protein, 222 aa, Unknown
  Obtained from environmental sample
  DOMAIN (103)...(216): Peptidyl-tRNA hydrolase domain
  misc_feature (1)..(222): Xaa is any amino acid
MNIIWLSVSAGSGPEECAHACALTVKALLLEIQSLPEKNIKGEVIESEPSQVKGNLRSALIALEGNDTEIFIQSWVGIIQWIWKSKYRPHHKRKNWFVSVKPYFTPEQGKEFSLQDIRFETAKAGGPGGQHVNKTETAVRAVHVPTGKNVIARGERSQLMNKKLALARLASLFADDKSEKEKQNRSNLRHSHWELERGNPVRVYDGETLKLIKRKNNDRNKD

SEQ ID NO: 65651 - DNA, 1182 bp, Unknown
  Obtained from environmental sample
  misc_feature (1)..(1182): n is a, c, g, or t
atgacagaaacaaagattaaacccatctctgtaaagggaaaaaataacgaggctctggttttcgcaaaagccatagaagcgtcgtgtgaaaataaaatacgcctataccttgatcatcccgattttgcgaaaacaaaggtaaggattatgcctgacgttcatttgggaaaaagcacggttataggctggacagccacttatgattcacttatcatcccgtcatatttaggccttgatataggctgcggaatatgcgcctgcaatttaggaaaagggaagctggcgtttgacaaactggacaaatttataaaaaaacgcgttccgtccggccaggatgtccgcgattctctccatgaagatttggaagaaatgaatgaatttatctgttcagttaacggcaatccggatttttccaaagcggaagattttaaaactgagattgagaaactttgtgaaaaacagggaaaatattccgagcgtatattcacttctctgggaacacttggcggcggtaatcattttatagaaatcgacgttgacgagaaccgtaaccgctggcttttaatacattccggttcaagaatactcggggcttataccgccgaatatcatgaaattctcgcgttacgcgaaacctcagtttacagtcccattaaatacctttcgggcgtgtcggcggaaaattatcttgccgatattaattttgtccagcattatgcctgtttaaaccgctctcttatggctaaaaccatagttaaagggttttttgacgccgacatccgtgaaatggaattcatagattgcgctcataattttatagacactaccgaaaaaattatccgcaagggagcgatttccgcaatgaaaggacagcctgtggtcattcccttttcaatggcggaaggcgcggtcttgggcaaaggcaagggaaacagcgagtggaattattccgcgcctcacggctcgggcaggaagaaagcccgcacagacgcaagaagcctgtcccttgacgaataccgcaaggaaatgcgcggcatctggtctagcgttatttgtaaggacacgctggaagaaagccctatggcttataaaaaggcaaaggacgtgcttgattacataggggaatcggtagagatagaacggcgtttgaaacctgtttataattttaaggcgattaattga

SEQ ID NO: 65652 - protein, 393 aa, Unknown
  Obtained from environmental sample
  DOMAIN (1)...(391): Uncharacterized protein family UPF0027
  misc_feature (1)..(393): Xaa is any amino acid
MTETKIKPISVKGKNNEALVFAKAIEASCENKIRLYLDHPDFAKTKVRIMPDVHLGKSTVIGWTATYDSLIIPSYLGLDIGCGICACNLGKGKLAFDKLDKFIKKRVPSGQDVRDSLHEDLEEMNEFICSVNGNPDFSKAEDFKTEIEKLCEKQGKYSERIFTSLGTLGGGNHFIEIDVDENRNRWLLIHSGSRILGAYTAEYHEILALRETSVYSPIKYLSGVSAENYLADINFVQHYACLNRSLMAKTIVKGFFDADIREMEFIDCAHNFIDTTEKIIRKGAISAMKGQPVVIPFSMAEGAVLGKGKGNSEWNYSAPHGSGRKKARTDARSLSLDEYRKEMRGIWSSVICKDTLEESPMAYKKAKDVLDYIGESVEIERRLKPVYNFKAIN

SEQ ID NO: 65653 - DNA, 1812 bp, Unknown
  Obtained from environmental sample
  misc_feature (1)..(1812): n is a, c, g, or t
gtgtcatggctggtgcgggaagaccttacaatatccgcggaagaaaataactttgaagtaaaccgccgcgccgccgccgaaaccgaacagaccctggaaaaaacgcgcctgctttccctgtcgttttcacggacggcggctctcgcgaaaggcgcggacgcaatacaggaagaagcagattatttcttttctcagaatccgcagattgcggctcttttctatacctcagcctcatcttccgcgtggacaaacaaggtatttatcaacgggcggtttttcctttcacagggaattgacgcggagcttgcggacgcatatttcaacaacagtaataaaacgcaggaagacgccgcactgggacggacgatactcgttaacgcctcgcccctttttaataaaacacaggggtcaacgtatcttgcggcattattttttcccatacaggaaggaagctcgcttccttcaggaagttcacttcctacaggaagcggctgcgttttgttttctaccgaaaatcttaacgaaagtttcggcatgggcgttaacgcgtctttccttattaacgcggacggagatattatagcggacgcagacatagaaagggtaagaactcaaacaaatcttgcacaacaggagattgttaagagtatatttaacagccccgaccgcaacaggcagatgttagttgaaattgacaaagtacgctgttatcttgcatataccaaacttaatacggcgggaagcgttgtaataaccacaatcgaatacgataaagtctttgaaggcataaacgcgaccacccggcgcaacctctatcttaccgccgccgtcctgtttctctcgattatgtgcatctggtttttcgcaaaaaccatttccgtgccgcttaaaacgcttgccggcgcggcgcgttctgtcgaaggcggcatttttaatattgaacttaagcctaaaagcggcgatgaaattggcctgttaacatccagcttcggaaaaatgtgcgccgcccttaatattttcggaaagtttacaaaccgcgatattgcggtccaggccatgcgcggccaaataaaacccggcggcttgtcgaaacacgcaacgatctttttttccgacatacgcggctttaccgaaaaatcagaaaactttgtaaaggtattcggcggcgaagcttccgaccatattgttttttggcttaacgaatatttgtcaaacatggtctattgtgttgaaaagaccaacggcattattgacaaatttatcggggacgccgtaatggcccattggggaaccgccttcaccgcaggaagcccgcaggaagacgcttttaactgcgttaaggcggcgctgatgatgagggaaatgctcataaaaatgaacaaaggccgtaaagaggaaaacataggggcgccgcccatacatataggctgcggaattaatacgggcgttgttacggcggggcagataggttccgacctccgcatggaatataccgtcataggcgatcctgttaatctcgcctcccgcgtcgaagcgcttaacaaacctttaggcaccgatattcttatcaccgaagatacatggagactgtcgggggacaaatttgtcacagaggaaatgccggccgtgtcagttaaaggaaaggcgaaacccgtgcgtatttttgccgttgttaatttctctggagaagacaaaggacctcagtcattgaatgaagtacgagctcttttgggaattgatccgcccgatctttcaaaagtagacgttaacgctgatgaaaagaaatataaaatcggagaggctcaaaaataa

SEQ ID NO: 65654 - protein, 603 aa, Unknown
  Obtained from environmental sample
  DOMAIN (270)...(339): HAMP domain
  misc_feature (1)..(603): Xaa is any amino acid
MSWLVREDLTISAEENNFEVNRRAAAETEQTLEKTRLLSLSFSRTAALAKGADAIQEEADYFFSQNPQIAALFYTSASSSAWTNKVFINGRFFLSQGIDAELADAYFNNSNKTQEDAALGRTILVNASPLFNKTQGSTYLAALFFPIQEGSSLPSGSSLPTGSGCVLFSTENLNESFGMGVNASFLINADGDIIADADIERVRTQTNLAQQEIVKSIFNSPDRNRQMLVEIDKVRCYLAYTKLNTAGSVVITTIEYDKVFEGINATTRRNLYLTAAVLFLSIMCIWFFAKTISVPLKTLAGAARSVEGGIFNIELKPKSGDEIGLLTSSFGKMCAALNIFGKFTNRDIAVQAMRGQIKPGGLSKHATIFFSDIRGFTEKSENFVKVFGGEASDHIVFWLNEYLSNMVYCVEKTNGIIDKFIGDAVMAHWGTAFTAGSPQEDAFNCVKAALMMREMLIKMNKGRKEENIGAPPIHIGCGINTGVVTAGQIGSDLRMEYTVIGDPVNLASRVEALNKPLGTDILITEDTWRLSGDKFVTEEMPAVSVKGKAKPVRIFAVVNFSGEDKGPQSLNEVRALLGIDPPDLSKVDVNADEKKYKIGEAQK

SEQ ID NO: 65655 - DNA, 1332 bp, Unknown
  Obtained from environmental sample
  misc_feature (1)..(1332): n is a, c, g, or t
gtgnatagggtttttgctgaactctttgatttttcaaaatggaacaacccgcagattttgagcattgtaaatatgaccgtttcgcacaagtggcttgcggttgcatctgtttttgtgttcataggagcgtggggaaaaagcgcgatgttccctctgcatatatggttgccaaacgctatggaaggcccaacgcctgtcagctcaataatacatagtgcgacaatggtagtagctggtgtttatttaaccgcaaggcttttcccattttttgcaagcattggaaccgtgcttgaggttgccgcatttataggggctttcaccgccttgttcgctgcgattatagcttgtacgcaaaaagacataaagcgtattttggcatactcaactcttagccagctcggttatatgatgttcgcacttggagttggcggttatacagcttctatgttccacgtttttacgcacgcctttttcaagtgcatgttgttcttgatagcgggttctgttatacacgctgtgcatagcaatagcttagacgagatgggcgggcttcgcaaaaaaatgccatttgcttatttctcctgtttaatcgcttgccttgcaatcgctggcgttcccccgttttcgggcttttggagcaaagacgaaattctgctttccgcgtatgcggctgggaattacacggtattcttcacagggcttttaacgggtggcttaaccgcattctatatgttcagaatgttctttttaacattccacggcaaagctcgcaacgaacacgccgctgcccacgcccacgaagacccttggatgaccttccccatagttgttctggcaattcctgcggcagctattggctttgtttctcataagttcttcgcggattttgtgcaggtaccaccgcttgcagaagttggaaatattggcaacactcccctgccgcatatagaatggctgccgatagctgcttctgctatgggtattctcggtttggctaccgcttggtttttatacgctcgcaagggcacaaatgcagaagctgctctggaaacagatattcgcccaccgttgtacaaaaccatttacaacaaattttactttgacgagatgtattacgctttcacccgtggctttttaatcaaatgcgtggcaggtttcttaaaagcctttgaccactacatagtagatgcttttggtgattttatcgctggagttttgcagtggcttggcagaggcgtgcgtttggttcagagcggctctnttgccgtttacgcttctgttttaatcactggcattgtttttggaatgtggctgctttgtcttatgccgtaa

SEQ ID NO: 65656 - protein, 443 aa, Unknown
  Obtained from environmental sample
  DOMAIN (12)...(236): NADH-Ubiquinone/plastoquinone (complex I), various chains
  misc_feature (1)..(443): Xaa is any amino acid
MXRVFAELFDFSKWNNPQILSIVNMTVSHKWLAVASVFVFIGAWGKSAMFPLHIWLPNAMEGPTPVSSIIHSATMVVAGVYLTARLFPFFASIGTVLEVAAFIGAFTALFAAIIACTQKDIKRILAYSTLSQLGYMMFALGVGGYTASMFHVFTHAFFKCMLFLIAGSVIHAVHSNSLDEMGGLRKKMPFAYFSCLIACLAIAGVPPFSGFWSKDEILLSAYAAGNYTVFFTGLLTGGLTAFYMFRMFFLTFHGKARNEHAAAHAHEDPWMTFPIVVLAIPAAAIGFVSHKFFADFVQVPPLAEVGNIGNTPLPHIEWLPIAASAMGILGLATAWFLYARKGTNAEAALETDIRPPLYKTIYNKFYFDEMYYAFTRGFLIKCVAGFLKAFDHYIVDAFGDFIAGVLQWLGRGVRLVQSGSXAVYASVLITGIVFGMWLLCLMP

SEQ ID NO: 65657 - DNA, 519 bp, Unknown
  Obtained from environmental sample
  misc_feature (1)..(519): n is a, c, g, or t
atgacaagcaaatttgcgcaaattcaaaacatgatttacgaaattcgaggacaaaaggtcatgctcgacagcgaccttgcggctttgtacgatgttgaattaaaagtaatgaaccaggctgtaaaacgtaatattgggcgcttcccgtttgattttatgtttcaattaactgatatagaatggaaaaatctaaggtcacaatttgtgacctttagcaaagacaccagaaaatacaaaccttacgctttcaccgaacatggaatactgatgctctccagtgttttgaactccgacagggcagttaaagtaaatattcaagtgatgaggatatttatacaaatgcgtcattacacgctttcacaaaacgcggcaaatgagcaaattgccgaactgcgtaaactccttatgctctacattgaaaaaaacgacaagcgggtaaatgaaattattatcgtcctgaataatcttattactgagccgccaaaaaccaaaaagataggctttaatgtcgaacaataa

SEQ ID NO: 65658 - protein, 172 aa, Unknown
  Obtained from environmental sample
  misc_feature (1)..(172): Xaa is any amino acid
MTSKFAQIQNMIYEIRGQKVMLDSDLAALYDVELKVMNQAVKRNIGRFPFDFMFQLTDIEWKNLRSQFVTFSKDTRKYKPYAFTEHGILMLSSVLNSDRAVKVNIQVMRIFIQMRHYTLSQNAANEQIAELRKLLMLYIEKNDKRVNEIIIVLNNLITEPPKTKKIGFNVEQ

SEQ ID NO: 65659 - DNA, 510 bp, Unknown
  Obtained from environmental sample
  misc_feature (1)..(510): n is a, c, g, or t
atggcgaatacccggtatgtcatttcgttagtgctgaacgcccaccttccctatgtcagggaatatgttgatacggcgcgcccgtccgagctttttgaagacgaggaggcggacctaaagtccgtggaaaaaccagaaaacgccttcgaagccgagcgggaacaggagcaggatcaggagcttcttgtcccctgttcagtcgaggaaagctggttttttgaggctgtttctgaaacgtatcttcccttgcttggagtgtttgaccggcttgagggagcccatattcccttccgtctggngatttccctttcgccggttttggggcaaatgttttgcgatgattatctgataaaaaatacgttgcccatctggaacgccagatggaatttggcaggcatgaggttgaacggcttgacggacgggacgaatacgttcttgcgcagcattattttaaccaggcgattgaacggcatacagcttttacaatacgttatgaccgcgatattctaa

SEQ ID NO: 65660 - protein, 169 aa, Unknown
  Obtained from environmental sample
  misc_feature (1)..(169): Xaa is any amino acid
MANTRYVISLVLNAHLPYVREYVDTARPSELFEDEEADLKSVEKPENAFEAEREQEQDQELLVPCSVEESWFFEAVSETYLPLLGVFDRLEGAHIPFRLXISLSPVLGQMFCDDYLIKNTLPIWNARWNLAGMRLNGLTDGTNTFLRSIILTRRLNGIQLLQYVMTAIF

SEQ ID NO: 65661 - DNA, 879 bp, Unknown
  Obtained from environmental sample
  misc_feature (1)..(879): n is a, c, g, or t
atggaatttggcaggcatgaggttgaacggcttgacggacgggacgaatacgttcttgcgcagcattattttaaccaggcgattgaacggcatacagcttttacaatacgttatgaccgcgatattctaaaagctcttgagtattaccggaaaaagggaagaattgaaatacttgcagctcccgctacaaatgcctttcttccttttctctgccggtttccccaggcgttgcgggctcagatggaaacggcgctttcattctaccgttataccatgggaatttcccctatgggtttctggcccggtgaactgggctggtcaaatgatctgtccccttatattcagtcttacgggttcaattattccattgtcaacagccacggcctgctttttggcaggccgcctccttcgcgcgggacattttatcctgtcaaaaccggagacgggctttttgttctggcttgtgattacaacgcttcaacccttgttagaggaatgaaaaaaaaagggccgtaccgcgacaataaccgcgacacggtcaatgaacctgaaaatgcggagataaactattttattgctaaaaatggtgaaaagtaccattccggttacaaataccggcagatcgggaacaacggtttgtatactcccgctgcggccaaatcctgcgcccaggatcatgcgcgtgagcttctggaaaatataagcggcaggcttaccgcggcgtcggcgtatataaaggaaacgcccatcagcctttgcgcgttcaatgcggacagcttcggccgtcgatggcatgagggcgcccactttattgaaagccntgttcaggttggcagcaggttacagggaactgcaatttatgactctcggccattctga

SEQ ID NO: 65662 - protein, 292 aa, Unknown
  Obtained from environmental sample
  DOMAIN (2)...(275): Glycosyl hydrolase family 57
  misc_feature (1)..(292): Xaa is any amino acid
MEFGRHEVERLDGRDEYVLAQHYFNQAIERHTAFTIRYDRDILKALEYYRKKGRIEILAAPATNAFLPFLCRFPQALRAQMETALSFYRYTMGISPMGFWPGELGWSNDLSPYIQSYGFNYSIVNSHGLLFGRPPPSRGTFYPVKTGDGLFVLACDYNASTLVRGMKKKGPYRDNNRDTVNEPENAEINYFIAKNGEKYHSGYKYRQIGNNGLYTPAAAKSCAQDHARELLENISGRLTAASAYIKETPISLCAFNADSFGRRWHEGAHFIESXVQVGSRLQGTAIYDSRPF

SEQ ID NO: 65663 - DNA, 1059 bp, Unknown
  Obtained from environmental sample
  misc_feature (1)..(1059): n is a, c, g, or t
ttgtcggcgataaccgcgcttaccgctctgatagcgcttaccgccgtaaccgcaaccgccgcggacaaggataccttgacattcgcggctgtgggcgacatcatgatggggttaaactaccccgacaacgccccggttctgcccccgcaggacggcgctctcacctttcagagcgtggcgggagtcttacgcaacgccgacatcaccattggcaacctggagggggtgctgctggattccggcgggtcgcccaagaggtgcgccaatcccagcgtctgctatgttttcaggtcgccggaacggtacgttaagcatcttgtggacgccgggttcgacctgatgtccgtggccaacaaccactccggcgacttcggggacgccgggcgagccggcacggtgagggcgctaacctccgcgggaataggctttgccgggtttgaggggacggcggaaacctacgtccttgagcgggaggggatccgctacgggtttgtggctttcgcgccgaacgtcggcacggtgagcttccacgaccagcccagggctagggagctgatagccgagttgaggaaaaaatgcgacatcctgatagtgtgcatgcacatcggcgcggaggggcccaggcacgcgcgcgtaacccgccaatcggagctcttcgtgggcgagaaccgcggcaacccatacgccttcgcgcgcttggccatagacagcggcgccgatatggtcatcggccacggcccgcacgtccctagggcggtagacctctacaaggggaaattcatcgcctacagcctcggcaacttcgctacgaacaccagcgtaaacatctccggggagagcggctacgcgcccatcgtgaagatacggacagaccggaatggcaacttcatagacggcgagatcgtctccgcgatacagcatggcgagcgcggcgaacgccggccgtttttagaccccataggcgcgtgcattagggagatgaagcggttgacggaaatcgatctgccggaaaccgaaatttcaattgacgggaagaccggtagaattaccaagaagtga

SEQ ID NO: 65664 - protein, 352 aa, Unknown
  Obtained from environmental sample
  SIGNAL (1)...(20)
  misc_feature (1)..(352): Xaa is any amino acid
MSAITALTALIALTAVTATAADKDTLTFAAVGDIMMGLNYPDNAPVLPPQDGALTFQSVAGVLRNADITIGNLEGVLLDSGGSPKRCANPSVCYVFRSPERYVKHLVDAGFDLMSVANNHSGDFGDAGRAGTVRALTSAGIGFAGFEGTAETYVLEREGIRYGFVAFAPNVGTVSFHDQPRARELIAELRKKCDILIVCMHIGAEGPRHARVTRQSELFVGENRGNPYAFARLAIDSGADMVIGHGPHVPRAVDLYKGKFIAYSLGNFATNTSVNISGESGYAPIVKIRTDRNGNFIDGEIVSAIQHGERGERRPFLDPIGACIREMKRLTEIDLPETEISIDGKTGRITKK

SEQ ID NO: 65665 - DNA, 2043 bp, Unknown
  Obtained from environmental sample
  misc_feature (1)..(2043): n is a, c, g, or t
ttgacgggaagaccggtagaattaccaagaagtgacggacaatttttaaagttgcgacattctggattacttcgctttgctcgtaatgacggtcattgcgaggagcgaagcgacgaagcaatccatgattttgattttttaaggatcaacacaatggcctttgtaaaaacactttataacacaaacttcctagagtacgcctcctacgtcataaaggaccgtgctattccgcacgtcgacgacgggctcaaacccgtgcagcgccgtattctgcacacgctatacgaggtgaacgacggtaagttccacaaggtagctaatatcgtcgggcaatgtatgaagtatcacccgcacggcgacgcctccatcggcaacgctctcgtggcgcttgcaaacaaagacttattcattgacaggcagggaaatttcggcaacatctttaccggcgatcccgcttccgccgtccgttatatagaatgccgtctgtcgcagcttgccgttgagacgcttttcaacccggagatcaccgaatacgttgactcatacgacgggcgcaaccgcgaaccggtcacgctgccggcgaagctgcccgtccttttggcgctcggcgcggaggggatagcggtggggatgtccaccaaaattcttccccacaatctaatcgaacttctcgaagcgcaaatagcctacctgcgcggcgaccagcacttggtctttccggatttccctaccggcggtctggccgacgtctccgagtacaacgacggcaacggcaaggtgctgcttcgcgcaaaactcgacacgagcgatccaaagcgcattgtcatacgggaattgccgttcggttctacaaccgagtccataatggcctccatagagaacgccgcccgtaagggtaaactgaagatcgccggcatcagcgactacacggcggagaacgtggagatagaggtgcggctggcgcgcggaatccacacgcaagacaccgtagacgccctctacgcctttacagattgcgaatcgtcggtttccgtaaacatgatggtaatcagcgacgaaaaacccgtggtaatgtccgtgactgaggtcatcaaacgaaattcggacaggcttgtggagatactgaccgccgaactgaaactcgaagagcgtaaactgaaagacaagctccacgcaaaaacgcttgagcagatattcatagagaaccgcgtatacaagaagattgaggcgatgaagaccgccgaatcggtagtacaagcggtttttaacggattggcgccgtttcagcgggagatcaaacgtgaggtgactaacgaggatgtagatacgttactgaaaattcccatcaggcgcatatccctctacgacatcaatagagcgaaaaaagagatggaggacatcaaaaaccgccttaaagagatcaagcggcacttgggcgcgattgttgattacacggtagatttcttgggcaagataatcaataaatacaaaccgatgtacaaacgcaagacggagctggtctcgttcaaaaaggtggatgtgcgagaggccgcccagcgcaacctgaaactgcgctacgacaaagacaccgggtatctcggctacgaggtcaacggcaacctgctcttcgacgtgtcgccatacgacagagtcttggtgataagaaaaacaggcgcgttctcggtgataggcgttccagaaaagctgttcgttgacaaggggatgctgcactgcggattcgtggacaaagaccttgtcttcaccgcgatttacagggacgaagagacgaaatttccatacatcaagcgcttcaagatagagcaattccaattgaacaagggatacgcgatagtgccggaaaattgtacgctgcttagactgacgacagaccccgacgcggtggtgacgatagagtacaagcccaaaccgaggctgaaagtcttggaggagaacttcaaggtgaaaaacttcttggtgaaaaacgccaaggccggcgggattcggctggcgaataaggagatgaagtccgtgaggatggggtaa

SEQ ID NO: 65666 - protein, 680 aa, Unknown
  Obtained from environmental sample
  DOMAIN (74)...(497): DNA gyrase/topoisomerase IV, subunit A
  misc_feature (1)..(680): Xaa is any amino acid
MTGRPVELPRSDGQFLKLRHSGLLRFARNDGHCEERSDEAIHDFDFLRINTMAFVKTLYNTNFLEYASYVIKDRAIPHVDDGLKPVQRRILHTLYEVNDGKFHKVANIVGQCMKYHPHGDASIGNALVALANKDLFIDRQGNFGNIFTGDPASAVRYIECRLSQLAVETLFNPEITEYVDSYDGRNREPVTLPAKLPVLLALGAEGIAVGMSTKILPHNLIELLEAQIAYLRGDQHLVFPDFPTGGLADVSEYNDGNGKVLLRAKLDTSDPKRIVIRELPFGSTTESIMASIENAARKGKLKIAGISDYTAENVEIEVRLARGIHTQDTVDALYAFTDCESSVSVNMMVISDEKPVVMSVTEVIKRNSDRLVEILTAELKLEERKLKDKLHAKTLEQIFIENRVYKKIEAMKTAESVVQAVFNGLAPFQREIKREVTNEDVDTLLKIPIRRISLYDINRAKKEMEDIKNRLKEIKRHLGAIVDYTVDFLGKIINKYKPMYKRKTELVSFKKVDVREAAQRNLKLRYDKDTGYLGYEVNGNLLFDVSPYDRVLVIRKTGAFSVIGVPEKLFVDKGMLHCGFVDKDLVFTAIYRDEETKFPYIKRFKIEQFQLNKGYAIVPENCTLLRLTTDPDAVVTIEYKPKPRLKVLEENFKVKNFLVKNAKAGGIRLANKEMKSVRMG

SEQ ID NO: 65667 - DNA, 387 bp, Unknown
  Obtained from environmental sample
  misc_feature (1)..(387): n is a, c, g, or t
gtgccggagagcctttcggaatccgctaaaattgacggggctaatgacctaactattctttttaggatcatcaccccgcttataaagccgactatggttgtgctcgtgctgtactacggcattgggcactggaatgcctggttcaatgcttccatttatatcaaggactttaccaaactccccatccagaatattttgagggccatattggtagccaactccgatattctgaatgcggcagccacggaaaaagatcagatcaatcagtttgcggaatccatcaagtacgcggctattgttataactactgttccgatactcttcatttaccccttcttgcagcgctactttgtcaaaggtgtgatgatcggggctattaagggctaa

SEQ ID NO: 65668 - protein, 128 aa, Unknown
  Obtained from environmental sample
  misc_feature (1)..(128): Xaa is any amino acid
MPESLSESAKIDGANDLTILFRIITPLIKPTMVVLVLYYGIGHWNAWFNASIYIKDFTKLPIQNILRAILVANSDILNAAATEKDQINQFAESIKYAAIVITTVPILFIYPFLQRYFVKGVMIGAIKG

SEQ ID NO: 65669 - DNA, 1818 bp, Unknown
  Obtained from environmental sample
  misc_feature (1)..(1818): n is a, c, g, or t
ttgaaggaaagaaacatggaaaaaaaatcgggcaactacgtgtcggatatccacaacgaggattacgaaagcgaatatctggaatcccgcctggacgcttcaaccttgatcaacatcgctggccgtgaaacggaatccctgaacggcaaatggaatttcgcagcggatctttacgacacctgccgacgagcgcattggtaccgggagcagcgctttgacaaagacgggagggagatccctctggattatgactgggaaggctgggacaggatcacagttcccggttcctggaacctggaaaaacctgaactgcgttattttgagggttccggcatatataccaggactttccgctacattccgaaaatatccggcgaacgcctcattctccgttttgaaggctctgcgtaccgcactacggttttcatcaacggggaaatcatcggaacgcatgacggagcgtctaccccctttaacgctgatattaccgacgcagttaaaaacgaaaaccgaatagtggttgtagctgacgcacgccgcagccatacgcggatacccatggaaaacaccgactggttcaactacggcggtatttaccgcgacgtttatcttgtccgccttccatcaatttttatcaaggactggtttgttcgtcttgcgcctgacggaacttattcaacgattttggcggatgttactgttgcaagcaccgatagttcacaggtaaacggaacagctttactaaaaatccctgaactatcaataaatcaggaaattgttattaaggacggaaagggcgaggcaaaaattaccgcaaaactaaaactctggaaccaggataatcccaagctctataatgtctccgtatcttttggctcangcgatcaaagcgatacagtaaacgatcgcataggtttcagggaaataaaaaccagcgggcatgatattacccttaacggcaaaaaaatattcctgagcggcgtttgcgttcacgaagaccattttgtcctgggaaagacaaccacagaggaaattatcaggcagaccatccgtgaccttaaagcgatgaacggcgtctatctcaggcttgcgcattatccccatgacgcgcgctttgcgcggatagcggacgaggaaggtgtattgctctgggaagaagtgcctgtttattggtctgtcgctttcgataatcccgacacatacgccgacgcggagaatcagttgagcgagctggtactgagagatcgcaaccgcgcgagtgtaatcatctggtcggtgggtaatgaaaacgcggacagcgattcaaggcttgcgtttatgtcgaagctggcgcaaaaggcgaaagcccttgacggctcacggctggtatcggcggcctgcctcatcaaccacgagaagcttcaaattcaggatcgccttgcagattatcttgacgtgattggaatcaacgaatattacggctggtatagtccgaattttgaacacctgccgaagatattcgcgaattccaatcccggaaaacccgtgcttgtctgcgaattcggcgcggacgcccgcctgggacagcgggggagcgtggatgagctttggactgaagacaaacaaaaacggctttatgaacagcaggtggaaactttcaagaagtgtccctacatagccggcacgactccctggatactgtacgatttccgctgtccccggcggctcaaccgttatcaggaaggttttaaccgaaagggccttatcgacgccgagcgaaaaagcaaaaaacccgcgttttatgtaatgcagaaattctacgaggagatgaatcgataa

SEQ ID NO: 65670 - protein, 605 aa, Unknown
  Obtained from environmental sample
  DOMAIN (309)...(605): Glycosyl hydrolases family 2, TIM barrel domain
  misc_feature (1)..(605): Xaa is any amino acid
MKERNMEKKSGNYVSDIHNEDYESEYLESRLDASTLINIAGRETESLNGKWNFAADLYDTCRRAHWYREQRFDKDGREIPLDYDWEGWDRITVPGSWNLEKPELRYFEGSGIYTRTFRYIPKISGERLILRFEGSAYRTTVFINGEIIGTHDGASTPFNADITDAVKNENRIVVVADARRSHTRIPMENTDWFNYGGIYRDVYLVRLPSIFIKDWFVRLAPDGTYSTILADVTVASTDSSQVNGTALLKIPELSINQEIVIKDGKGEAKITAKLKLWNQDNPKLYNVSVSFGSXDQSDTVNDRIGFREIKTSGHDITLNGKKIFLSGVCVHEDHFVLGKTTTEEIIRQTIRDLKAMNGVYLRLAHYPHDARFARIADEEGVLLWEEVPVYWSVAFDNPDTYADAENQLSELVLRDRNRASVIIWSVGNENADSDSRLAFMSKLAQKAKALDGSRLVSAACLINHEKLQIQDRLADYLDVIGINEYYGWYSPNFEHLPKIFANSNPGKPVLVCEFGADARLGQRGSVDELWTEDKQKRLYEQQVETFKKCPYIAGTTPWILYDFRCPRRLNRYQEGFNRKGLIDAERKSKKPAFYVMQKFYEEMNR

SEQ ID NO: 65671 - DNA, 813 bp, Unknown
  Obtained from environmental sample
  misc_feature (1)..(813): n is a, c, g, or t
atgggcgtgcttgtttctgaaatcgatccgttaaattatgaaaaccccgatcttgacgttctaaaacagatgggcgccgagccttctttaatttcctatctgaccggtgaacaattttaccgtaaaggtgattttgataaagctattttagaatatacggcggctattaaccgtaacaatgaattcctgcaaagttatatttcccgtggaaacgcatggatgaaaaaacgcgattacagccgcgccattgatgattatacgcgggcgataagactggacggaaacaaagccgaagtttacaactaccgtggttttgcccgggaggagatggccgccagaaacaactttaacggaatggcccttgccattgaagactattcacgcgcaatttctattaacaaaaattatgttgacgcgcttatcaaccgctcgcacgcatattatcaaatggaagactttgcgcgtgtaattgaagactgcgacagaattatcgcccttgaaccgtcaaacgccattatctggaacaggcgtggcagcgcgtggtattcaagagagaacgacgatnaggcgataaatgattttacggaagccgtaagacttaaaagcgattatacaatagcatggtacaaccgcgcaaacgcatggtacaataaaagcgaattggaaaaggctttagcggacttaaacagatgtattgccataaatccctcattcgcggacgcgtatctaagcaggggaaaaatttatcaactaatggaaaacattgagaaagctgaagcggatttctcttccgcacaacaactgaaaaaataa

SEQ ID NO: 65672 - protein, 270 aa, Unknown
  Obtained from environmental sample
  DOMAIN (171)...(204): Tetratricopeptide repeat
  misc_feature (1)..(270): Xaa is any amino acid
MGVLVSEIDPLNYENPDLDVLKQMGAEPSLISYLTGEQFYRKGDFDKAILEYTAAINRNNEFLQSYISRGNAWMKKRDYSRAIDDYTRAIRLDGNKAEVYNYRGFAREEMAARNNFNGMALAIEDYSRAISINKNYVDALINRSHAYYQMEDFARVIEDCDRIIALEPSNAIIWNRRGSAWYSRENDDXAINDFTEAVRLKSDYTIAWYNRANAWYNKSELEKALADLNRCIAINPSFADAYLSRGKIYQLMENIEKAEADFSSAQQLKK

SEQ ID NO: 65673 - DNA, 1416 bp, Unknown
  Obtained from environmental sample
  misc_feature (1)..(1416): n is a, c, g, or t
atggattatcaacagaagcttaacaaattgggacttgaagttccttttatactattacccaagttcgcgcaaacttctccgtcagagcttgcaaagtggcccgtgatcgcatgcgatcaatttactcaggaccgcgattattgggagagggcaaaaatagcgacggcaggttctccctcaacattaaatttaattttccccgaaatatatctttgcgatgacgatgttggacaaagaattacgaatatacattcaaccatgaagcgttacctgcaagaaaatgtttttgctaaagcgcggcagggatttatttacattgaaagggacactccctattataaaaaacggcgcggtttaatcgcggccattgatttggaacagtacgactggcatccccaatcacgcccattaatccgttgtactgaaggcgcggtgccggaacgtcttcccccccgaatggacattcgccgaggcgcgcctctggaacttccacacgtcatactgcttattgacgatgagacggacagtcttctgccagccattagcgaaatagtaaaaaatacgactccatgttacagtacgccattaatgatggattccggtagtgtgacaggctggtttctggacattgagaacggcgaagaaactgtttcattaattacggaaaaatttgacgctctttataatcgttctacagggcgttatgacggagaagggaagccttttctctttgccgtaggagacggcaaccattccattgcggcggcaaaaggcatttgggaagagtacaaaaccgctaatggttacaaagcggccgggcagctagaagcagcctggcagccagaggctgccaaagacagccttcccgttcatccctgccgttatgcgctggcagagatcgaaaatatctatgatccggcgattcaatttgagccgatacaccggctggtattaaacgctgactttgatgaaatggtaaaaattctttccgctttgcctgatttttcctgccgtcccataaacagcgcgcaagctctttcaaaattatgcgcccaacaaccgcaggcgccggccgcaaaccactttggcgttatctcgcaaaaccgttatgcgcttatagaaacttccgccgtcggaatcgccacttcctgccttcaaccgttattggacaaatacgccggggccagtccccaactaattgactacatccacgacgaagaagagttatttcgtatatcaggcgaaggcgggcaaacggacacaagccgcaagagggcgggaatcttattgccatcttttcaaaaatcactactctttgaaacagtagcccgccttggtcccctcccccgaaaaagtttttcaatgggccattccgtagaaaagcgtttctattttgagtgcagaaaaataaattaa

SEQ ID NO: 65674 - protein, 471 aa, Unknown
  Obtained from environmental sample
  DOMAIN (11)...(468): Protein of unknown function (DUF1015)
  misc_feature (1)..(471): Xaa is any amino acid
MDYQQKLNKLGLEVPFILLPKFAQTSPSELAKWPVIACDQFTQDRDYWERAKIATAGSPSTLNLIFPEIYLCDDDVGQRITNIHSTMKRYLQENVFAKARQGFIYIERDTPYYKKRRGLIAAIDLEQYDWHPQSRPLIRCTEGAVPERLPPRMDIRRGAPLELPHVILLIDDETDSLLPAISEIVKNTTPCYSTPLMMDSGSVTGWFLDIENGEETVSLITEKFDALYNRSTGRYDGEGKPFLFAVGDGNHSIAAAKGIWEEYKTANGYKAAGQLEAAWQPEAAKDSLPVHPCRYALAEIENIYDPAIQFEPIHRLVLNADFDEMVKILSALPDFSCRPINSAQALSKLCAQQPQAPAANHFGVISQNRYALIETSAVGIATSCLQPLLDKYAGASPQLIDYIHDEEELFRISGEGGQTDTSRKRAGILLPSFQKSLLFETVARLGPLPRKSFSMGHSVEKRFYFECRKIN

SEQ ID NO: 65675 - DNA, 696 bp, Unknown
  Obtained from environmental sample
  misc_feature (1)..(696): n is a, c, g, or t
atgacgaagatgatcaagcggcaaaaagaaatagtatatgaatattttgaaacttcctcagacccgggaaggcgtggcgcacaggccgcggaagaacataaccgttttatagaaggcgccttaacccggcctgagactttacaagaacatctattacgccaattacagcttgagccagtcgatgaagagttacgggaaatcgccgagactctgattcaaaatttaaacgatgacggctttcataaagaaaaacctgaaactttattcgcgtccccacaacaaagactaggtgaagctatggagttggtaagggggcttgagcccgcagggtgctgtacaagcggctaccgtgaatcgctcctcgcgcaaatcgcgctgttaggtgacgctccatgtgaaatatccgtaatggaaaaagtgctggataaccttgaccttgttgaccgtgaaaaatacgctaccctcgcaaaaaaaacaggtcttgacgatgaggaagaaacccgtattatctgcgaatatatcaaaaaactttaccccttccctggtcgcgcattcgcctccaccgaagtacgttttgtcgtgccggacatcaaagtcgtcagaaataacgatggctttacaatcaatctgaacgatgaagcgtttcccgtacttggcataaataaaaatttgaagtcttccagaaagcacggataa

SEQ ID NO: 65676 - protein, 231 aa, Unknown
  Obtained from environmental sample
  DOMAIN (30)...(225): Sigma-54 factor, core binding domain
  misc_feature (1)..(231): Xaa is any amino acid
MTKMIKRQKEIVYEYFETSSDPGRRGAQAAEEHNRFIEGALTRPETLQEHLLRQLQLEPVDEELREIAETLIQNLNDDGFHKEKPETLFASPQQRLGEAMELVRGLEPAGCCTSGYRESLLAQIALLGDAPCEISVMEKVLDNLDLVDREKYATLAKKTGLDDEEETRIICEYIKKLYPFPGRAFASTEVRFVVPDIKVVRNNDGFTINLNDEAFPVLGINKNLKSSRKHG

SEQ ID NO: 65677 - DNA, 585 bp, Unknown
  Obtained from environmental sample
  misc_feature (1)..(585): n is a, c, g, or t
atgagagccgaaggcatagatctattattgaaaacaaaagaaaaaaccggcatgcccatcgttacggaaataatgaacgccgaacatctggacttgttcgataaggttgacgtgattcaagtgggcgcgcggaatatgcaaaacttcgagcttctgaaggaactggggcaggtgaaaaagcccatcctcctaaagcgcggattcgccaacaccctgcaggagcttttaatgagcgcggagtacatcatggcggaaggaaacgataatgtaatcctctgcgaaaggggaatacgcacctttgaaacttacacgaggaacaccctcgatctgtccgcggtgcctgtgttgaaagagctctcccatctgccggtgatcatcgatccgagccacgctatcggcgtttcgcgttatgtgaaaccaatggcgctggcgtcggtggcgtcaggcgcggacgggcttatcatcgaagtgcacaatgatccgaagaacgccgcttgcgacggcgctcagtccctcacgctggaacagttcgccgatgtcgctgagaaggtgcggcggatacgcgaagttatagtagagctttag

SEQ ID NO: 65678 - protein, 194 aa, Unknown
  Obtained from environmental sample
  DOMAIN (1)...(193): DAHP synthetase I family
  misc_feature (1)..(194): Xaa is any amino acid
MRAEGIDLLLKTKEKTGMPIVTEIMNAEHLDLFDKVDVIQVGARNMQNFELLKELGQVKKPILLKRGFANTLQELLMSAEYIMAEGNDNVILCERGIRTFETYTRNTLDLSAVPVLKELSHLPVIIDPSHAIGVSRYVKPMALASVASGADGLIIEVHNDPKNAACDGAQSLTLEQFADVAEKVRRIREVIVEL

SEQ ID NO: 65679 - DNA, 834 bp, Unknown
  Obtained from environmental sample
  misc_feature (1)..(834): n is a, c, g, or t
atgaacatcggcattaccggcctgggcctaatcggcggttccttcgccaaagcgtataaggccgccggacacaccgtcttcgcggacgagattgataaaagtatatttgattttgcccttctttcaggcgcggtagacgcgccgctggacgccgaagcgattaaacactgcgacttgatcctgatcgcgctgtatccccaggcggcgatagaatttctggataagacggcgcggcatatccagggttccgccacagtcatagactgctgcggcacaaaaaagaatatatgcgccgcggggtttaaggcctccagccagtacggcttcacatttgttggcggacaccctatggccggcactgagcactcggggtttaaacacagcaaacaaaatatgttcaaaggcgcgtccatgatcatagtgccgcccgtgtatgacgacataatgtttcttgataagatcaagaccctgctcgcgccggcggaattcggcaggctgaccgttaccaccgctgaaaaacacgacgcgatgatcgcgtttacctcgcaaatggcccatctggtatccaacgcttttattaaaagcccgaccgtacttgagcataagggattttccgccggaagctacaaggacctgacgcgcgtagcatggcttaacgagcggatgtgggcggaacttttcctggaaaacaaaacgaatctgctccatgagcttgatctgtttctggcttccctaaaggagtacagggacgcgctgcagaaggaggactcagccagactccagtccctccttctcgacggcaagcgccttaaagaagaggtcgaccgccgatga

SEQ ID NO: 65680 - protein, 277 aa, Unknown
  Obtained from environmental sample
  SIGNAL (1)...(28)
  DOMAIN (5)...(271): Prephenate dehydrogenase
  misc_feature (1)..(277): Xaa is any amino acid
MNIGITGLGLIGGSFAKAYKAAGHTVFADEIDKSIFDFALLSGAVDAPLDAEAIKHCDLILIALYPQAAIEFLDKTARHIQGSATVIDCCGTKKNICAAGFKASSQYGFTFVGGHPMAGTEHSGFKHSKQNMFKGASMIIVPPVYDDIMFLDKIKTLLAPAEFGRLTVTTAEKHDAMIAFTSQMAHLVSNAFIKSPTVLEHKGFSAGSYKDLTRVAWLNERMWAELFLENKTNLLHELDLFLASLKEYRDALQKEDSARLQSLLLDGKRLKEEVDRR

SEQ ID NO: 65681 - DNA, 993 bp, Unknown
  Obtained from environmental sample
  misc_feature (1)..(993): n is a, c, g, or t
atgctgcctattgtcggagcgcttgggcggaaagcttcgtttgtcctgaaaggccggcttcccgagcgaccgctttcaccgttatacgaagagcttgtcagccacggagccgaattgtcgccccagggcactgtcccgtttcttgccgaaggcaagcttgtgccggggtcttattcgcttaacgccggcgtatcgtcacaatttatcagcggcctgttgttcgccctgcccctgctcgacggggacagtgaattgcaactaacagggcaggtggaatcctttccctatattgagcttactctggctatgctggaaacatttggcatacaaaccgattttaagaacgatattttttcgataccgggcaggcaaacatattgctctccgggcaaggttcaggtagagggcgattggtcaaacgccgcgttctggttaagcgcgggggccatcggaaaaggcagcattacctgtaccggtttgaattttaaatcacggcagggcgaccgcgcgattctggacattcttaaaaagttcggcgcgtatattgaggttaaagaaaaagattccaccgtaattgtatccggcggaaaactgaggggaattgagatcgacgcgcgggatattcccgatctcgtgccgattttggcggttgtcggatcgagagccgaaggaaccaccgttattcgcaacgccggaaggctgcgtaccaaggaaagtgacaggctcgccgccgtaagcgccgtattgcgtgaattaggcgctgacgcggacgaaacagaggacggattggtcatacacggtggaaaggctttcaaaggcggacaagtatcgtcctgcggggatcacaggatcgcgatgtcctcggcaatagccgcagcattgtgcgcggggccggttgttattcagggagcgcaggctgtcaataaatcatacccaggtttctttgacgatctgcgtttgctgggcccattggtcgaagcgataaaagtataa

SEQ ID NO: 65682 - protein, 330 aa, Unknown
  Obtained from environmental sample
  DOMAIN (1)...(318): EPSP synthase (3-phosphoshikimate 1-carboxyvinyltransferase)
  misc_feature (1)..(330): Xaa is any amino acid
MLPIVGALGRKASFVLKGRLPERPLSPLYEELVSHGAELSPQGTVPFLAEGKLVPGSYSLNAGVSSQFISGLLFALPLLDGDSELQLTGQVESFPYIELTLAMLETFGIQTDFKNDIFSIPGRQTYCSPGKVQVEGDWSNAAFWLSAGAIGKGSITCTGLNFKSRQGDRAILDILKKFGAYIEVKEKDSTVIVSGGKLRGIEIDARDIPDLVPILAVVGSRAEGTTVIRNAGRLRTKESDRLAAVSAVLRELGADADETEDGLVIHGGKAFKGGQVSSCGDHRIAMSSAIAAALCAGPVVIQGAQAVNKSYPGFFDDLRLLGPLVEAIKV

SEQ ID NO: 65683 - DNA, 504 bp, Unknown
  Obtained from environmental sample
  misc_feature (1)..(504): n is a, c, g, or t
atgtcttcgcaatacgggaaaaaactaagaatctcgatcttcgggcaatcgcattctccggcgattggcgtgagtattgacggtttgccggccggaatcaaaattgatattgatgaattaaaaacattccttaaacgcagagccccagggcaaaacgacatttccacggcgcgcactgaagaagacaaaccggaaatattgtcagggctggttgaaaacgttacctgcggcgcgccgcttgccataatcatccgcaacaaagacccccgttcagccgattaccgcgaacttgcgggatattcccccgtcatcacatgcagattttaccgcgcacataaagtatggcggatttcaggatgttgcgggcggcgggcatttttccggcagactgaccgtgccgttatgcgccgccggagggatatgtttgcaaatattgcgcgatattggaatcagtatcggggcgcatatattgcggatcggcaacgtacaagacgattcgtttga

SEQ ID NO: 65684 - protein, 167 aa, Unknown
  Obtained from environmental sample
  DOMAIN (9)...(162): Chorismate synthase
  misc_feature (1)..(167): Xaa is any amino acid
MSSQYGKKLRISIFGQSHSPAIGVSIDGLPAGIKIDIDELKTFLKRRAPGQNDISTARTEEDKPEILSGLVENVTCGAPLAIIIRNKDPRSADYRELAGYSPVITCRFYRAHKVWRISGCCGRRAFFRQTDRAVMRRRRDMFANIARYWNQYRGAYIADRQRTRRFV

SEQ ID NO: 65685 - DNA, 792 bp, Unknown
  Obtained from environmental sample
  misc_feature (1)..(792): n is a, c, g, or t
ttgcgggatattcccccgtcatcacatgcagattttaccgcgcacataaagtatggcggatttcaggatgttgcgggcggcgggcatttttccggcagactgaccgtgccgttatgcgccgccggagggatatgtttgcaaatattgcgcgatattggaatcagtatcggggcgcatatattgcggatcggcaacgtacaagacgattcgtttgaccctgtggctgtatcgactgcggacttcgaggcgattctgaaaaacccgctacctgtactcaggcgtgaagcgggtgaatccatgaaaaagcaaattctggaagcgcgggagaaaggcgattcggtcggaggcattgtcgaggctgcggcaatcggactgcccgtcgggttaggcgatcctatattcgacggcattgagaaccggatcgccgggattgtcttcggcataccgggcgcgaagggcgttgaattcggaagcggtttcgccgttgccggacgcaggggatcggaaaacaacgatagcttttttatggacggggaaaaggtaaaaacgcgcacaaacaactcaggcggcatattgggagggataacaaacggtatgcccttgttgttccgcgtagcgttcaagcccacgccgtccatcggcatggaacaggacagcgtcagcctgtctcggtcggaaaacgccgttttgcgggtaaaaggccgtcatgatccctgcatcgttccccgcgccctgccctgtgtggaagctgcggcggctatcgcgttatacgacgcttatttggatcaataa

SEQ ID NO: 65686 - protein, 263 aa, Unknown
  Obtained from environmental sample
  DOMAIN (1)...(263): Chorismate synthase
  misc_feature (1)..(263): Xaa is any amino acid
MRDIPPSSHADFTAHIKYGGFQDVAGGGHFSGRLTVPLCAAGGICLQILRDIGISIGAHILRIGNVQDDSFDPVAVSTADFEAILKNPLPVLRREAGESMKKQILEAREKGDSVGGIVEAAAIGLPVGLGDPIFDGIENRIAGIVFGIPGAKGVEFGSGFAVAGRRGSENNDSFFMDGEKVKTRTNNSGGILGGITNGMPLLFRVAFKPTPSIGMEQDSVSLSRSENAVLRVKGRHDPCIVPRALPCVEAAAAIALYDAYLDQ

SEQ ID NO: 65687 - DNA, 582 bp, Unknown
  Obtained from environmental sample
  misc_feature (1)..(582): n is a, c, g, or t
atgccgatggacggcgtgggcttgaacgctacgcggaacaacaagggcataccgtttgttatccctcccaatatgccgcctgagttgtttgtgcgcgtttttaccttttccccgtccataaaaaagctatcgttgttttccgatcccctgcgtccggcaacggcgaaaccgcttccgaattcaacgcccttcgcgcccggtatgccgaagacaatcccggcgatccggttctcaatgccgtcgaatataggatcgcctaacccgacgggcagtccgattgccgcagcctcgacaatgcctccgaccgaatcgcctttctcccgcgcttccagaatttgctttttcatggattcacccgcttcacgcctgagtacaggtagcgggtttttcagaatcgcctcgaagtccgcagtcgatacagccacagggtcaaacgaatcgtcttgtacgttgccgatccgcaatatatgcgccccgatactgattccaatatcgcgcaatatttgcaaacatatccctccggcggcgcataacggcacggtcagtctgccggaaaaatgcccgccgcccgcaacatcctga

SEQ ID NO: 65688 - protein, 193 aa, Unknown
  Obtained from environmental sample
  misc_feature (1)..(193): Xaa is any amino acid
MPMDGVGLNATRNNKGIPFVIPPNMPPELFVRVFTFSPSIKKLSLFSDPLRPATAKPLPNSTPFAPGMPKTIPAIRFSMPSNIGSPNPTGSPIAAASTMPPTESPFSRASRICFFMDSPASRLSTGSGFFRIASKSAVDTATGSNESSCTLPIRNICAPILIPISRNICKHIPPAAHNGTVSLPEKCPPPATS

SEQ ID NO: 65689 - DNA, 1227 bp, Unknown
  Obtained from environmental sample
  misc_feature (1)..(1227): n is a, c, g, or t
atggagcttgagagaactatacaatcatctatagaaaaaatcagcagaggcttccctgcgcttttgcttacaggaatgagacagatcggcaaaagctgggtcatggaacatcttggagggaaaaaccgccgttatgtgacgcttgacgatattaaagcaagagcgctggcaagatccgatcctcaaagatttatcgatgaaaaccctccgcccgtgataatagacgaggcgcaatatgccccggaactttttacctatataaaaatctacgcggataaaaaaaagaaagacggtcttttcctgctgaccggctcgcaaaaatacagtcttataaagggtatacaggaaagccttgccggacgcgtggctattcttaatatgctcggtttatcctataaggaaataatcaagaaaccaaaagattcaacgccgtttctgccgtctcttaacctgacaaaaaaagctccgtcaggcaaaccattaacttcgctcgaagtttttaaattagtctggcagggttcgtttccccgcataatcacaaataaaaacgcttccgccgcaagaaaacttttttatgattcatatatacaaacttatatcgaaagggatgtaaaggatttttacaatatcgagaatgaaataaacttttataattttcttacagccgcggcggcaaggacaggacagcttctcaattactccgatcttgcgcgcgatgttcacatagatataagaaccgcgaaattgtggctcgaaatccttgaacgatcctgccttattcaactgctttatccttatagttcaaatacggcaaaacgcgcgataaaaactcctaaattgtattttctggacacaggacttgcgtcgcatctgtgttcatgggaaaccgccgacgcgctcagaaacggcgcgcagagcggagccatgctggaaacctatgtgttcgccgagattcttaaatcatattggcataacggcgacaatccgaatatctatttctaccgcgataccgatcaaaaagaagtggattttgttatcgaaaaaaatatgactctctatcccattgaagttaaaaagactgccaatccaaacgctgacgactgcaagagttttaaaaatctgtcggttttcaaaaaaccaataggagcgggagcggtaatttgcctgtatcagaaaacaacatctattgccaaaaatgtcatttcggttccggtatgggagatatag

SEQ ID NO: 65690 - protein, 408 aa, Unknown
  Obtained from environmental sample
  misc_feature (1)..(408): Xaa is any amino acid
MELERTIQSSIEKISRGFPALLLTGMRQIGKSWVMEHLGGKNRRYVTLDDIKARALARSDPQRFIDENPPPVIIDEAQYAPELFTYIKIYADKKKKDGLFLLTGSQKYSLIKGIQESLAGRVAILNMLGLSYKEIIKKPKDSTPFLPSLNLTKKAPSGKPLTSLEVFKLVWQGSFPRIITNKNASAARKLFYDSYIQTYIERDVKDFYNIENEINFYNFLTAAAARTGQLLNYSDLARDVHIDIRTAKLWLEILERSCLIQLLYPYSSNTAKRAIKTPKLYFLDTGLASHLCSWETADALRNGAQSGAMLETYVFAEILKSYWHNGDNPNIYFYRDTDQKEVDFVIEKNMTLYPIEVKKTANPNADDCKSFKNLSVFKKPIGAGAVICLYQKTTSIAKNVISVPVWEI

SEQ ID NO: 65691 - DNA, 423 bp, Unknown
  Obtained from environmental sample
  misc_feature (1)..(423): n is a, c, g, or t
ttgtcaaaagccgatgttgcttctgaattacctggattccccgaatactcaggcggcatacctcagcatccgtttgcaatagaaagttattttcgcccatttggaccgggcagaaaacttgtccgccctgtaattgaagacggaaaaaaacacaaggaaatcgccaaagacaaagacggcttttacaaaacggaaattacgaatattaacggcaatattttcaccgcaagaataaagcgcggcttccgccaccagatacgctgtcatctctgctggataggtttcccgattcaaaatgacccattgtacttgttccctaacggagaaccgcagacaggcaatcttgccctgcgcgcgtattcgcttgtttttgatgatcccgtaaacggtaagcggcgcgagtatcgaattgagacgtattaa

SEQ ID NO: 65692 - protein, 140 aa, Unknown
  Obtained from environmental sample
  misc_feature (1)..(140): Xaa is any amino acid
MSKADVASELPGFPEYSGGIPQHPFAIESYFRPFGPGRKLVRPVIEDGKKHKEIAKDKDGFYKTEITNINGNIFTARIKRGFRHQIRCHLCWIGFPIQNDPLYLFPNGEPQTGNLALRAYSLVFDDPVNGKRREYRIETY

SEQ ID NO: 65693 - DNA, 813 bp, Unknown
  Obtained from environmental sample
  misc_feature (1)..(813): n is a, c, g, or t
atgaaagaagataacgccaaactggaagaattcgccgaaaagacgaaatcttatgactcttcaattgagcagctgctcaaggacacccaggatgtcgaagccgccctgaaacagggaggaattcccgatcccgagttcatgaaaataaaattgtccataaccatgcttaccattgtggctaattacctggtaaagaacaagatttatgtgtcggattttggaaagataaatgaaaacctgctgacagaggcgagaaaatcaatgcacaaatgccttgtttatcttgaagaggttgtcaccaacattattgacgcgcctttttccgattacgcggatggactcgcgaaaattgcggctgtcagccccgcccagcgttattcccttgtcgagaaaatcggccagcagttaactaacctgaaagaagcgtatggaaaaaattccaaatggacaaatataattctggaatttgaagggcgttatgccattgtcgcgaaaaatttaatcaatctgcgcgattattttgttaacagcgattttgaatcgccgcattacgaacctaccgtccgccatataagaaaagtcagggagcttctggagcagtccgcggacgggtacaggaaaaaatacgagctttccacaaaagccactgaggattttcaaaaggccataaattacctttcagccctaaaacggctggatatttttaccggggatcaggaatcggcggtgaccaccaaaaagaaaattgaaacatggacggctaaaatgaaggcggacgcggaaaagctgaaaaaagagcaggctaaggtatga

SEQ ID NO: 65694 - protein, 270 aa, Unknown
  Obtained from environmental sample
  misc_feature (1)..(270): Xaa is any amino acid
MKEDNAKLEEFAEKTKSYDSSIEQLLKDTQDVEAALKQGGIPDPEFMKIKLSITMLTIVANYLVKNKIYVSDFGKINENLLTEARKSMHKCLVYLEEVVTNIIDAPFSDYADGLAKIAAVSPAQRYSLVEKIGQQLTNLKEAYGKNSKWTNIILEFEGRYAIVAKNLINLRDYFVNSDFESPHYEPTVRHIRKVRELLEQSADGYRKKYELSTKATEDFQKAINYLSALKRLDIFTGDQESAVTTKKKIETWTAKMKADAEKLKKEQAKV

SEQ ID NO: 65695 - DNA, 1788 bp, Unknown
  Obtained from environmental sample
  misc_feature (1)..(1788): n is a, c, g, or t
ttgataggggggcacatgcttgaggagcttacgataagaaattttgcccttgtcgattctatttccctctccttccggcccggctttaacgtgcttacgggcgagaccggcgcgggcaagtcgataattgtcggctccctcgggtttcttatgggcgcgaaaaccgaagccgacgttatacgatcaggctgcgaggaggcgggcgtttcggccattgtatcaataggcaagggaaacaacggcgcttttgaatggctcagaagccgtgaaatcaacagcgaggaggacactgtcattgtccgccggaacattaaaacatcgggcaaaggatcaatttacatacaggaaacgccggtaacaaggacggatcttgcgggttttatgaccctgcttttcgatcttcacgggcagcatgaccacgggtcattgctgagaaaggaaaaccaccgccgctttctggactcctttgccggcattgaggaagaagttttggcttacaacagggtttttaccgaactttccgaaaagcgcaaaacgctggaggcgtcgttcagctcccagaaggacagggaggcgaagctggaaattctgcgctacgccgtggatgagatttccgccgcggcccttcgcgtcggtgaactgcgcgatcttgaaaacgaggcgcagatgctttcgggttttgaaaaactcgccgcccatataaacggcgcctcggattccttttttaacggggaaggctcattggtaagccttgcccgccgctgcagaagcgcccttgacggcgcggcgtcaattgacgcgtctctgtccgtgttacaaaaacgtattgaagatatgtattacgaggcggaagatatcgcgggcgaattgcgttcataccgcgatggcttaacgtatgacccccgccgccagcaggcaatcgacgagcggcttgccctgttatacaaactcaaacgcaaatactgcgaggccgcaacaggcgattcggtttccgttgaggactccatcctcgcttaccgcgcctcggctgaagccgagatagaggccttatcaaacatcgaggaaaaccgggaaaacctcaaagcgaccataggggcattggaaaaagatgtcgcttccagagccgccgccctgcgccagaaaaggacggccgccgccggggtattgggtcagcagatctcgggaattctcaaaaggctcggaatgcccaacgcccggttttccccctcgataaaccctaaaacccagcaggcgcaggatggccgtcagaccgtcgtctcgggcccctgnggcgctgaagaagtcgagtttcttatctcgcgaaacacgggcgagccgctcaaagacctttccagaatagcgtcaggcggggagctttcncgcgtcatgctggcgataaagtccgtcctgtctgccgcgggcgcctccggtggaggcggcgcccccgcagggggcgatagcgtggagacattaatctttgatgaaatcgacgcggggataggcggggaagtcgcccttgcggttggggagtaccttgaaaaaatgggtgagagccggcagatattctgcgtcacccatcttgcgagcatcgcggtgcgcgccggcaatcatttcaaggtggagaagcggacggaagacggcaggacttttacgggggtcggccccttgagcgcggatggcagaagaaaagagattgccaggatgctggcgggggacggaggcaaggcggctcttgcccatgcggatgatttaatcgccaaatatggtaaagcgggagggaagttatga

SEQ ID NO: 65696 - protein, 595 aa, Unknown
  Obtained from environmental sample
  DOMAIN (6)...(549): RecF/RecN/SMC N terminal domain
  misc_feature (1)..(595): Xaa is any amino acid
MIGGHMLEELTIRNFALVDSISLSFRPGFNVLTGETGAGKSIIVGSLGFLMGAKTEADVIRSGCEEAGVSAIVSIGKGNNGAFEWLRSREINSEEDTVIVRRNIKTSGKGSIYIQETPVTRTDLAGFMTLLFDLHGQHDHGSLLRKENHRRFLDSFAGIEEEVLAYNRVFTELSEKRKTLEASFSSQKDREAKLEILRYAVDEISAAALRVGELRDLENEAQMLSGFEKLAAHINGASDSFFNGEGSLVSLARRCRSALDGAASIDASLSVLQKRIEDMYYEAEDIAGELRSYRDGLTYDPRRQQAIDERLALLYKLKRKYCEAATGDSVSVEDSILAYRASAEAEIEALSNIEENRENLKATIGALEKDVASRAAALRQKRTAAAGVLGQQISGILKRLGMPNARFSPSINPKTQQAQDGRQTVVSGPXGAEEVEFLISRNTGEPLKDLSRIASGGELSRVMLAIKSVLSAAGASGGGGAPAGGDSVETLIFDEIDAGIGGEVALAVGEYLEKMGESRQIFCVTHLASIAVRAGNHFKVEKRTEDGRTFTGVGPLSADGRRKEIARMLAGDGGKAALAHADDLIAKYGKAGGKL

SEQ ID NO: 65697 - DNA, 600 bp, Unknown
  Obtained from environmental sample
  misc_feature (1)..(600): n is a, c, g, or t
gtggaaagacatgaatggttttcggtctacaggcgctggctttcaggtgaaataaagccttccagacgctgtatgctggaattttccattgaaaggggcggcaaatatgccgttaataatagtgtatgcctgaatgacgtggtgatttcatctttggggatagcgaagctgatacgtttgcaggcaagaacagaggttgcccccggcgaatttgcggaaattggctcctatcgctcggacgggcttataatcgctactcccaccggttccacgggttattccatggcggccggcgggccgatattggatccggagatggaagcgcaaattatcagccctatctgcccctttaccttgtcgaaccgcccgctggtgcttccgtcacggcaggcattacagataacggtttgcaaggaacagcggagcggggtgctgctgacttgcgacgggcaggaaacctttgatctggaaccgggtgacctggtcaccataaaacattcgccgcattacgcgcttctgattaccgcggggtattcgtcgtattacaaagcgttagcggaaaaattggcgtggacccttgataggggggcacatgcttga

SEQ ID NO: 65698 - protein, 199 aa, Unknown
  Obtained from environmental sample
  DOMAIN (3)...(176): ATP-NAD kinase
  misc_feature (1)..(199): Xaa is any amino acid
MERHEWFSVYRRWLSGEIKPSRRCMLEFSIERGGKYAVNNSVCLNDVVISSLGIAKLIRLQARTEVAPGEFAEIGSYRSDGLIIATPTGSTGYSMAAGGPILDPEMEAQIISPICPFTLSNRPLVLPSRQALQITVCKEQRSGVLLTCDGQETFDLEPGDLVTIKHSPHYALLITAGYSSYYKALAEKLAWTLDRGAHA

SEQ ID NO: 65699 - DNA, 1449 bp, Unknown
  Obtained from environmental sample
  misc_feature (1)..(1449): n is a, c, g, or t
atggcgaaaattttcgccgaatatccgcaggcggttgaaaatacggtaaaaatcgcccggcgctgcaacgccgacgtgccgaaaatagagactaaagaactgccgcagtatcttcctgaatttgaaatccccgaaggttttaaagggccgggcgaatacttaaggcatcttacggacgaagggctcgccagacgttatgcgaaaataaaagaaagcgatgtaaataaatgggaagaaataaaaaaaagggcggattatgaacttgatacgataatcaacatgggatatacgggatactttcttattgtcgcggattttataaactacgcgaaagggcgggatattcccgttggtccggggcgcggttccggagcgggttccattgtcgcctattccctgcgtattaccgacattgatcctttaaaatacggccttatatttgaacgtttcttaaaccccgagcgtatttccatgcccgattttgacattgatttcgccaatgaagggcgcgaagaagtaataagctatgttacgcgcaaatacggcaaggaaagggtggcgcagataatcacatttgggacattgggcgcaaaagcggttatcaaggacgtggcgagagttttgggaatatcgatccccgaatcggaaatgataacaaaacttatctcatttgatcccgaaatgaccctggataaggcgaaggaggaggaaccccgccttcaggaactggaaagcgatccccgttttacggaattatttgccatcgcatataaattagaagggcttaaccgccattcaagcattcatgccgcgggtatcgtcatcggaaaaaaaccgctgattgaattagtgcctctctatcaggaacgggaagaaaagggcggcaatatcgccacacagtacagtatgaactttctggaagaatgcggtcttgttaaaatggattttctcggtcttaaaaaccttgatattatcaaacattcaaaggaattaatccgtcagcgcggcggcaagtattccaattttaatatagaagatattcccgaagatgacaaaaagacttttaaaatgttaggtgaaggaaaaagccacgctatctttcagttcgcttccgacggtatgcaggatattttaagacagacaaaacccacgtccatagatgacttaacggccctgaacgcgatgtaccgtcccggtcctatgcaatttattccacgttttgtggaggcaaaaaccggtaaagcgccaataacgtatcccgatccgagtcttgaaaaggttttaaaagaaacctacggcgttattgtctatcaggaacaggttatggaagtggcaagaataatagccggttacagcatgggaaaagccgatctcctccgcagggcaatgggaaaaaagaaaaaagaaattattgacggggaaaaaaccccgtttttggaaggcgcgtaa

SEQ ID NO: 65700 - protein, 482 aa, Unknown
  Obtained from environmental sample
  DOMAIN (1)...(482): Bacterial DNA polymerase III alpha subunit
  misc_feature (1)..(482): Xaa is any amino acid
MAKIFAEYPQAVENTVKIARRCNADVPKIETKELPQYLPEFEIPEGFKGPGEYLRHLTDEGLARRYAKIKESDVNKWEEIKKRADYELDTIINMGYTGYFLIVADFINYAKGRDIPVGPGRGSGAGSIVAYSLRITDIDPLKYGLIFERFLNPERISMPDFDIDFANEGREEVISYVTRKYGKERVAQIITFGTLGAKAVIKDVARVLGISIPESEMITKLISFDPEMTLDKAKEEEPRLQELESDPRFTELFAIAYKLEGLNRHSSIHAAGIVIGKKPLIELVPLYQEREEKGGNIATQYSMNFLEECGLVKMDFLGLKNLDIIKHSKELIRQRGGKYSNFNIEDIPEDDKKTFKMLGEGKSHAIFQFASDGMQDILRQTKPTSIDDLTALNAMYRPGPMQFIPRFVEAKTGKAPITYPDPSLEKVLKETYGVIVYQEQVMEVARIIAGYSMGKADLLRRAMGKKKKEIIDGEKTPFLEGA

SEQ ID NO: 65701 - DNA, 1662 bp, Unknown
  Obtained from environmental sample
  misc_feature (1)..(1662): n is a, c, g, or t
atgcttgttccgttcgccgggtacggttttaataaaagccacgccgccgcttattcggtgttggcgtatcaaaccgcctaccttaaagccaattttcccgctgaatacatggccgctacgttgatagttgaaataaaaagcaccgacaggcttttatacagcattgtcgaaacccgcaaaatgggaataagcgtcgatccgccgaatataaattattcggacaaactttttaccgtagtggacggcagaattgtatacggctttttgggaattaaaggcgtaggcgacgctccggccgatgaaattgtgcggggcagaaaagacggtcattataaaagttttatggattttttgaatagggtagatataaagtccgtaagcaaaaaagttatagaactgcttattcaaacaggagcgtttgacgattttaatgtgtcgcgcgaaactcttgccggcaatatggaaaaggcgattgagtacgctcaaaaaagaaaagaggacaaacagcttggacagtcaaaccttttcggcgaatcaaacgacgccgatatgcccgatttcaagtttgcggaatttccgcctgtaagcagagcggaaagattaaaccttgaaaaaaaacttataggattttatttttccggtcatccgttagacgaatataaagaaatatggcaggatgttgtaagcgtaaatcttgggcaagttgagacatacaagacgggaaactgcgttcttgtgggaataattaaaaatataaaaccgataacaacagcgaaaggcggcaaaatggctttcgcaactcttgaagattacaacggcgagattgaagttacgtttttttctggagcgtgggaaaggtgcgagcgtcttgtcagcgacgattcagtcgttatattaaaaggaaaaattgattatcaaaaagacaaagacagatacagtttcctggcggacggcgttataagcaaacaggaagttccgacagttgtaaaagaagttaaagagcttgacgaaaaaaacaaattgcataaaaacacatggctttacatggcagacttaaaaagttcgtatatcttgcaggcgaaaaaaggaaactatacggttataggtttcttaaaatcgctcagggattttaaggataaaaacggaaacgacatggcgttcggaacattgcaggattttgaaggcgaaattgaccttgtgtttttttccaaagtgtacgccgaatgcagacatttgctcaaacttaatgaaatgatcgccttaaaaggaagcgtagacccggaaaatgaacaaaaacccggaaaggtaagttttaaagtttccagcatggctgatttgccttttttaagccgtacagcagccaaaaaggccgccgccgacgagaaaccgcccgcgcctactcttgttaaaaatactgaaagacattcagacgaagtccacataagactgcgtaaaggcgcttcggataataaagacgaaatgcttgagttacgcgattatcttgccgaaaattccggttcaaatactatttttatacatattcccgttaatagcgaggaaaaaattatacgcgccgcttccggtcttgatatgtcaggtaacggatatgtaatggaaggcttaaaacaatgtaagtgcgtcgcggaagcatggaggaaataa

SEQ ID NO: 65702 - protein, 553 aa, Unknown
  Obtained from environmental sample
  DOMAIN (365)...(446): OB-fold nucleic acid binding domain
  misc_feature (1)..(553): Xaa is any amino acid
MLVPFAGYGFNKSHAAAYSVLAYQTAYLKANFPAEYMAATLIVEIKSTDRLLYSIVETRKMGISVDPPNINYSDKLFTVVDGRIVYGFLGIKGVGDAPADEIVRGRKDGHYKSFMDFLNRVDIKSVSKKVIELLIQTGAFDDFNVSRETLAGNMEKAIEYAQKRKEDKQLGQSNLFGESNDADMPDFKFAEFPPVSRAERLNLEKKLIGFYFSGHPLDEYKEIWQDVVSVNLGQVETYKTGNCVLVGIIKNIKPITTAKGGKMAFATLEDYNGEIEVTFFSGAWERCERLVSDDSVVILKGKIDYQKDKDRYSFLADGVISKQEVPTVVKEVKELDEKNKLHKNTWLYMADLKSSYILQAKKGNYTVIGFLKSLRDFKDKNGNDMAFGTLQDFEGEIDLVFFSKVYAECRHLLKLNEMIALKGSVDPENEQKPGKVSFKVSSMADLPFLSRTAAKKAAADEKPPAPTLVKNTERHSDEVHIRLRKGASDNKDEMLELRDYLAENSGSNTIFIHIPVNSEEKIIRAASGLDMSGNGYVMEGLKQCKCVAEAWRK

SEQ ID NO: 65703 - DNA, 417 bp, Unknown
  Obtained from environmental sample
  misc_feature (1)..(417): n is a, c, g, or t
atgccatcattatttaatttcgaggtccatacgccccgcaggattttttattcgggcaaggtgcaggcgatcatcatcagccttgaggacggcgaaatcggcatatacgcaaaccactccccctttaccgcgcattccgttaccggaatgctgcgcattaaagacgacaccggcaactggcgctccgcgtttgtctgcggcggcattttggaagtgaaagaacataaagacgtgctgatggttgagagcgccgaatggcccgaagaaatcaatgttgagcgtgttcttggacttaaaaagcaagccgaagaaatattgaaggatacgcatttaaaatttgagattgacaaagccaaaaaacaactgcaccacgccgaatgcagactgaaagttttagaaacaatgaagaaaaaataa

SEQ ID NO: 65704 - protein, 138 aa, Unknown
  Obtained from environmental sample
  DOMAIN (4)...(86): ATP synthase, Delta/Epsilon chain, beta-sandwich domain
  misc_feature (1)..(138): Xaa is any amino acid
MPSLFNFEVHTPRRIFYSGKVQAIIISLEDGEIGIYANHSPFTAHSVTGMLRIKDDTGNWRSAFVCGGILEVKEHKDVLMVESAEWPEEINVERVLGLKKQAEEILKDTHLKFEIDKAKKQLHHAECRLKVLETMKKK

SEQ ID NO: 65705 - DNA, 1401 bp, Unknown
  Obtained from environmental sample
  misc_feature (1)..(1401): n is a, c, g, or t
gtgggaatgagtaatataggatatattacacagataatcgggcctgttgtggatgtccgtttcacagaggggcagaccccgcttattctgaacgcgctgaaagtaaaaaccggcgaaagcgggggcggccgcgtcgtcacccttgaagtgctccagcatatcggggacaaccgcgtgcgctgcgtcgcgatgtccgccgccgaaggattgtcccgggggcttaaggccgaagacacgggccggcccatcagcgtgcccgtaggcaaggaagtgctggggcgcatgttcagcgtaaccggcgaccccattgacgacaagggcgccttcagcgccgcacagtacgattcgatacaccgtggggcccccggttttaacgaacagcggccggcgaccaccctgcttgagaccggaataaaggtaattgatctgatcgcgccctacgcgaaaggcggcaagataggactgttcggcggagctggcgtcgggaaaaccgtcgttattatggagctgatccgcaacatagctaccgaacactcgggctattcggtgtttgccggcgtcggggagcgctcgcgcgagggggccgacctctggaaggaaatgaccgaaagcggcgttatcgacaaaaccgcccttgttttcggacagatgaacgagcctcccggggccaggatgagggtagccctcgccggccttaccatggcggaacatttccgcgatcaggacaggcaggacgtgcttctctttgttgacaatattttccggttcattcaggctggcgcggaagtctcggcgcttctcgggcgcatacccagcgcggtcggttaccagccgactctcgccaacgagatgggcagccttcaggagcgcatagccagcacttcgaagggttcaatcacaagtattcaggcggtttatgtgcctgccgacgaccttaccgatcccgcgcccgcgacaaccttcgcgcaccttgacgccaccaccacgctttcgcgcaaaatcgtagagttgggaatatacccctcagttgacccgctcgcctcaagctcacgcatccttgacgcggctattgtaggcgacgatcactacaacaccgcccgccgcgcccagcagattttacagcgttacaaggaactgcaggacataatcgccattctgggcatggacgaactctccgaggaggacaagctgaccgtctcccgagccaggaagatccagcgtttcttcagccagcccttctttgtcggggaaaaatttaccggcattcccggcaaatatgtgggagttaaggataccgtgcgaggttttaaaatgatacttgacggcgaatgtgacgcgataccggagcagtccttttacatggccggcagtattgacgacgtactggagaaggcgaaataa

SEQ ID NO: 65706 - protein, 466 aa, Unknown
  Obtained from environmental sample
  DOMAIN (9)...(80): ATP synthase alpha/beta family, beta-barrel domain
  misc_feature (1)..(466): Xaa is any amino acid
MGMSNIGYITQIIGPVVDVRFTEGQTPLILNALKVKTGESGGGRVVTLEVLQHIGDNRVRCVAMSAAEGLSRGLKAEDTGRPISVPVGKEVLGRMFSVTGDPIDDKGAFSAAQYDSIHRGAPGFNEQRPATTLLETGIKVIDLIAPYAKGGKIGLFGGAGVGKTVVIMELIRNIATEHSGYSVFAGVGERSREGADLWKEMTESGVIDKTALVFGQMNEPPGARMRVALAGLTMAEHFRDQDRQDVLLFVDNIFRFIQAGAEVSALLGRIPSAVGYQPTLANEMGSLQERIASTSKGSITSIQAVYVPADDLTDPAPATTFAHLDATTTLSRKIVELGIYPSVDPLASSSRILDAAIVGDDHYNTARRAQQILQRYKELQDIIAILGMDELSEEDKLTVSRARKIQRFFSQPFFVGEKFTGIPGKYVGVKDTVRGFKMILDGECDAIPEQSFYMAGSIDDVLEKAK

SEQ ID NO: 65707 - DNA, 834 bp, Unknown
  Obtained from environmental sample
  misc_feature (1)..(834): n is a, c, g, or t
atgttccgccatggtaaggccggcgagggctaccctcatcctggccccgggaggctcgttcatctgtccgaaaacaagggcggttttgtcgataacgccgctttcggtcatttccttccagaggtcggccccctcgcgcgagcgctccccgacgccggcaaacaccgaatagcccgagtgttcggtagctatgttgcggatcagctccataataacgacggttttcccgacgccagctccgccgaacagtcctatcttgccgcctttcgcgtagggcgcgatcagatcaattacctttattccggtctcaagcagggtggtcgccggccgctgttcgttaaaaccgggggccccacggtgtatcgaatcgtactgtgcggcgctgaaggcgcccttgtcgtcaatggggtcgccggttacgctgaacatgcgccccagcacttccttgcctacgggcacgctgatgggccggcccgtgtcttcggccttaagcccccgggacaatccttcggcggcggacatcgcgacgcagcgcacgcggttgtccccgatatgctggagcacttcaagggtgacgacgcggccgcccccgctttcgccggtttttactttcagcgcgttcagaataagcggggtctgcccctctgtgaaacggacatccacaacaggcccgattatctgtgtaatatatcctatattactcattcccactcctttctttcatacacttttcactctttacttttcactagttacttgtcagctaacgccgtcgcgccgccgcttatctccgccatttcctgcgtaattccggcctggcgcgcgcggttgtag

SEQ ID NO: 65708 - protein, 277 aa, Unknown
  Obtained from environmental sample
  misc_feature (1)..(277): Xaa is any amino acid
MFRHGKAGEGYPHPGPGRLVHLSENKGGFVDNAAFGHFLPEVGPLARALPDAGKHRIARVFGSYVADQLHNNDGFPDASSAEQSYLAAFRVGRDQINYLYSGLKQGGRRPLFVKTGGPTVYRIVLCGAEGALVVNGVAGYAEHAPQHFLAYGHADGPARVFGLKPPGQSFGGGHRDAAHAVVPDMLEHFKGDDAAAPAFAGFYFQRVQNKRGLPLCETDIHNRPDYLCNISYITHSHSFLSYTFHSLLFTSYLSANAVAPPLISAISCVIPAWRARL

SEQ ID NO: 65709 - DNA, 783 bp, Unknown
  Obtained from environmental sample
  misc_feature (1)..(783): n is a, c, g, or t
atgctggcggataccgtgccgtatttcagcaggattcagaaatccatgtacgatattctttcaagcgaaaaatatatcggaagcgcgtttttcagaaagcccgaaccgtcgaggcccagccacagcgcgataattgtcataaccagctataaggggctcgcaggcggctataacgcgaatgttttccgcaatgtaaacgagttatgcgcaaaactggaaaatccggtgctgatacttatcggcggcaatgtcggctatcgctattttgttcattctccgtatccaattcttgaaaatttttctttccatcccgaaatacccaccgtggaacacgccgcagaagtttccgaatatgtagtttcgcagtacctttggggagcttttgattcaatacatatcgcgtatacccacatgttcagcatggtaaaactcctgccgaccatacatcagattattccccttgtaaaagaaaaaatacaaaaagacctttttgaaatcggcggcgaaaagagggttgatttgaaatttgaattcctgccgtcaatcggggcggtttttgacatgctggttccccagtatataaagggcgtaatttacggggcgatggtggaagctcacgccagcgagcagagttcccgcatgaaggcgatggacgaggcttccaaaagcgccgaagacatgctcgccgcgttgaagataagctacaaccgcgcgcgccaggccggaattacgcaggaaatggcggagataagcggcggcgcgacggcgttagctgacaagtaa

SEQ ID NO: 65710 - protein, 260 aa, Unknown
  Obtained from environmental sample
  DOMAIN (2)...(257): ATP synthase
  misc_feature (1)..(260): Xaa is any amino acid
MLADTVPYFSRIQKSMYDILSSEKYIGSAFFRKPEPSRPSHSAIIVITSYKGLAGGYNANVFRNVNELCAKLENPVLILIGGNVGYRYFVHSPYPILENFSFHPEIPTVEHAAEVSEYVVSQYLWGAFDSIHIAYTHMFSMVKLLPTIHQIIPLVKEKIQKDLFEIGGEKRVDLKFEFLPSIGAVFDMLVPQYIKGVIYGAMVEAHASEQSSRMKAMDEASKSAEDMLAALKISYNRARQAGITQEMAEISGGATALADK

SEQ ID NO: 65711 - DNA, 705 bp, Unknown
  Obtained from environmental sample
  misc_feature (1)..(705): n is a, c, g, or t
gtggcctaccgcgcggtcagcctgcttctgcggcgcccgcccgggcgcgaggcttttcccggcgacgtgttctaccttcattcgcggcttctggaacgcgccgtaaaactttcaccttcgaaaggcggcggctcaatcaccgctatgccgattatcgagactcaggcgggcgacatttcggcctacattcccaccaatgtaatctcgattacggacgggcagatattccttgattcggagttgtttaactccggtttccgcccggccatagacgtaggcctttcggtaagccgcgtcggaggctcggcgcagacaaaggccatgcgaaaaatttccggacgtatcaggctggaccttgcccagtaccgcgaaatggcggccttcgcccagttcggcagtgatttggacaaggccacccaggacaagctggcccagggcgaaaggcttatggaagtgctgaaacagcctcagctttcgccgtacccgctggaagtacagatcgccattctctttctcgcggtgaacggctatcttcttgatattaagacggaaaatgtttccgcgtttgtaaaagatttcctgtcgcaccttaaagatcaaaaacaggagctaatgagggcgattgcggaaacgggcgttgtttccaaagaacaggaagacgaattgcggctgacagtggaagcctttaagggaataaagaagtaa

SEQ ID NO: 65712 - protein, 234 aa, Unknown
  Obtained from environmental sample
  DOMAIN (1)...(97): ATP synthase alpha/beta family, nucleotide-binding domain
  misc_feature (1)..(234): Xaa is any amino acid
MAYRAVSLLLRRPPGREAFPGDVFYLHSRLLERAVKLSPSKGGGSITAMPIIETQAGDISAYIPTNVISITDGQIFLDSELFNSGFRPAIDVGLSVSRVGGSAQTKAMRKISGRIRLDLAQYREMAAFAQFGSDLDKATQDKLAQGERLMEVLKQPQLSPYPLEVQIAILFLAVNGYLLDIKTENVSAFVKDFLSHLKDQKQELMRAIAETGVVSKEQEDELRLTVEAFKGIKK

SEQ ID NO: 65713 - DNA, 468 bp, Unknown
  Obtained from environmental sample
  misc_feature (1)..(468): n is a, c, g, or t
ttgatctttaaggtgcgacaggaaatcttttacaaacgcggaaacattttccgtcttaatatcaagaagatagccgttcaccgcgagaaagagaatggcgatctgtacttccagcgggtacggcgaaagctgaggctgtttcagcacttccataagcctttcgccctgggccagcttgtcctgggtggccttgtccaaatcactgccgaactgggcgaaggccgccatttcgcggtactgggcaaggtccagcctgatacgtccggaaatttttcgcatggcctttgtctgcgccgagcctccgacgcggcttaccgaaaggcctacgtctatggccgggcggaaaccggagttaaacaactccgaatcaaggaatatctgcccgtccgtaatcgagattacattggtgggaatgtaggccgaaatgtcgcccgcctgagtctcgataatcggcatagcggtgattga

SEQ ID NO: 65714 - protein, 155 aa, Unknown
  Obtained from environmental sample
  misc_feature (1)..(155): Xaa is any amino acid
MIFKVRQEIFYKRGNIFRLNIKKIAVHREKENGDLYFQRVRRKLRLFQHFHKPFALGQLVLGGLVQITAELGEGRHFAVLGKVQPDTSGNFSHGLCLRRASDAAYRKAYVYGRAETGVKQLRIKEYLPVRNRDYIGGNVGRNVARLSLDNRHSGD

SEQ ID NO: 65715 - DNA, 1113 bp, Unknown
  Obtained from environmental sample
  misc_feature (1)..(1113): n is a, c, g, or t
atggaacaactacggatacaggataagatggcaaggtcaaggcagtacgactctctggaagacgcattatctcaggtgcttgacgattccgaaggcgcagggcttgggcttgttatccttgtcctcatgttaagaaaaatcggtcttgatgacgacgcgtttacaattaaaactaaaaacaactgtacaattgcaagtatttcaattccgcttgataaaacaatgatagaaaatatgtcggctctgtcggcggaaattgtggagaatgttaacagtctgccgcaatttccggaaaatgtcctgcttatacaaaaacttattaacgatcccgcatccgatatgccgatgattgcaaggcaaatttcgatggatccggcgcttaccgcggatctgttaaaaattgtcaactcagcgcaatatatgttgtctaaaaaaaccgataatatttctgatgccgtgaaaatgattggaataaagggcattaaaaatttgctttattcctatggaacgcaaaaaatattgggcgacgatacggttgaaaaaaagagactttgggaacattcttacaaaaccgcgttttatgctttcaatttggttaagaactttaaaaatgtttcagggcttctggacgacgtgtatatcggcggaatgttacacgacatggggaaaatagttttttccaacgtacatcccgagcttttaaacaaaattaaagggttctgcggcgaaaaaagcctacccatatctacatttgaagatctttccgccggcatgaaccatgcggaacttggggcccttatcgccgaaaagtggaatttccctgaaaagttagtatctgcaattcggtatcatcacgatcctgacaccgcgccttttgattgtaaagatatggttgatacggtttatcttgccaatatgttctgcgagtatgaaaataaaaatatcagctatgaacagttagaacaaggtccgctggaaaactacggattaaaaaaccaaaaacaagttgacacattgattgcaaaggctttccgcaggctttatgaaagaaggacaactctgatttatgttcctgaagcggcttacgattctcggcttcaaatcttttgctga

SEQ ID NO: 65716 - protein, 370 aa, Unknown
  Obtained from environmental sample
  DOMAIN (184)...(306): HD domain
  misc_feature (1)..(370): Xaa is any amino acid
MEQLRIQDKMARSRQYDSLEDALSQVLDDSEGAGLGLVILVLMLRKIGLDDDAFTIKTKNNCTIASISIPLDKTMIENMSALSAEIVENVNSLPQFPENVLLIQKLINDPASDMPMIARQISMDPALTADLLKIVNSAQYMLSKKTDNISDAVKMIGIKGIKNLLYSYGTQKILGDDTVEKKRLWEHSYKTAFYAFNLVKNFKNVSGLLDDVYIGGMLHDMGKIVFSNVHPELLNKIKGFCGEKSLPISTFEDLSAGMNHAELGALIAEKWNFPEKLVSAIRYHHDPDTAPFDCKDMVDTVYLANMFCEYENKNISYEQLEQGPLENYGLKNQKQVDTLIAKAFRRLYERRTTLIYVPEAAYDSRLQIFC

SEQ ID NO: 65717 - DNA, 423 bp, Unknown
  Obtained from environmental sample
  misc_feature (1)..(423): n is a, c, g, or t
ttgataaaatattcgctttcccctgaacggtacagcctgcgcttgatttcaatttccggcatatccatcggaagaagccctgtttcatttgcgatggcgagggtaacttccgcgacattgaggggttttctggcttccgtgccgccgaaaatcacgtcttccattttttccgcgcgaagggattttattgcgtgttcgcccaagacccatttgattgagtcaacgacattggattttccgcagccgttcggacccaagagtgcagttataccgtcgttaaattcgatatctgtgcggtcagcaaaagatttgaagccgagaatcgtaagccgcttcaggaacataaatcagagttgtccttctttcataaagcctgcggaaagcctttgcaatcaatgtgtcaacttgtttttggttttttaa

SEQ ID NO: 65718 - protein, 140 aa, Unknown
  Obtained from environmental sample
  misc_feature (1)..(140): Xaa is any amino acid
MIKYSLSPERYSLRLISISGISIGRSPVSFAMARVTSATLRGFLASVPPKITSSIFSARRDFIACSPKTHLIESTTLDFPQPFGPKSAVIPSLNSISVRSAKDLKPRIVSRFRNINQSCPSFIKPAESLCNQCVNLFLVF

SEQ ID NO: 65719 - DNA, 2061 bp, Unknown
  Obtained from environmental sample
  misc_feature (1)..(2061): n is a, c, g, or t
atgttcctgaagcggcttacgattctcggcttcaaatcttttgctgaccgcacagatatcgaatttaacgacggtataactgcactcttgggtccgaacggctgcggaaaatccaatgtcgttgactcaatcaaatgggtcttgggcgaacacgcaataaaatcccttcgcgcggaaaaaatggaagacgtgattttcggcggcacggaagccagaaaacccctcaatgtcgcggaagttaccctcgccatcgcaaatgaaacagggcttcttccgatggatatgccggaaattgaaatcaagcgcaggctgtaccgttcaggggaaagcgaatattttatcaatggaactcaggttcgccttaaagacatacgagagcttttttgggacaccggcgtaggcaagaccgcctattccgtaatggaacagggaaaaatcgatcagatactttcgtcaaaaccggaagagcggcgctatctttttgaagaagcggcgggcattacccgctaccgggaacggggagcggaggcggagcgtaaccttgccaaaaccgaggaaaatgtgcgtcaggttgatttgatactgaacgaagtaaaacgcgcccatgacagtttaaaaatacagtcggaaaagacgcttaaataccgcacgctccgcgatgaaatttttaactatgaattagacatacagcttttacgtttgaagcaattcaagtatgaaagagacgaaaagaacgaaacattaagacgcagaacgcaagaccgtgacagaatacgcgcggaaatggaagcggaaaacacggcattggaagagcacatggacgaagtaaactccatggaagccaggcttgtagaacttcaaaaaaatatctacggtcttgcccttgaaaaaaacgcaaaagaaaacgaagttcgcctttttaacgaacagcgaggcgaaaataaagttaaaatcggtcaaaatgaggaacgagaaaaacaagcggttcaaaaaataacggaactaaacgccgacgccgaggggcaggacgcggttgtacaggacttaaaaaaacagtgcgaaagcatagaagaaaatatccgctcttttgaggaaaatatccagcttgccgcggggcgcatcagcgaaaacgacaaagattcgcacatggcggaaaatgaaattcacgaaatagaaaaagaacttgccgagttggaaaaagacctcgctaaaataacggacgacattgtagaggaactggacgccggtcttaaaaaagcgggctattccgcggctgaacgcaagaacgcggaagaggctttgcgtgaaacgcttgaccgccttaaaactctactcgccgacagggaagcgctcattcacgaccttgcagctgtctcaaacgcttcaggctcggtagacgcgcaggaaataaaacgcattacagaaaatttatcgaacagccttgcgcaagccgcagacggcgcaaataaggcggtagaactttttaacaattaccgtgaacattcacccgtctttatcgacgaatttttggctcctcagggaattatcacaaagaaacgcgcattggatacgcaaatcaggaacgcgaaagacggcattgaggaaagacgccagcgcattaaaaaactgcacgaagacaacgtaacccttatggcaaaaatgaatgaatatcgggcaacccttgaagacttaaaagtaaaccgcgctcaaatgaacgcacgagcccagtccgccgaagatcaagcccggcttatcaggcgcgaattgtcggggcaggaagggctgttaaaaaatatccgtgatgaactttccctgtaccgcataagactggaagaaattaacgagcgcattacggcgactcanacggaaattgcggagattgaggaaaagactaaagcgtattccgccgatttggaaaggctggaaaatgacattcgcaaaagaaacgataatgtcgccagtaaaaaagaaattatcaacaagcgtatggcgaactttccaaagtgcaggaagcgctggaaaaaattcacttggaacttgtccaatccgaaatggagataa

SEQ ID NO: 65720 - protein, 686 aa, Unknown
  Obtained from environmental sample
  DOMAIN (2)...(617): RecF/RecN/SMC N terminal domain
  misc_feature (1)..(686): Xaa is any amino acid
MFLKRLTILGFKSFADRTDIEFNDGITALLGPNGCGKSNVVDSIKWVLGEHAIKSLRAEKMEDVIFGGTEARKPLNVAEVTLAIANETGLLPMDMPEIEIKRRLYRSGESEYFINGTQVRLKDIRELFWDTGVGKTAYSVMEQGKIDQILSSKPEERRYLFEEAAGITRYRERGAEAERNLAKTEENVRQVDLILNEVKRAHDSLKIQSEKTLKYRTLRDEIFNYELDIQLLRLKQFKYERDEKNETLRRRTQDRDRIRAEMEAENTALEEHMDEVNSMEARLVELQKNIYGLALEKNAKENEVRLFNEQRGENKVKIGQNEEREKQAVQKITELNADAEGQDAVVQDLKKQCESIEENIRSFEENIQLAAGRISENDKDSHMAENEIHEIEKELAELEKDLAKITDDIVEELDAGLKKAGYSAAERKNAEEALRETLDRLKTLLADREALIHDLAAVSNASGSVDAQEIKRITENLSNSLAQAADGANKAVELFNNYREHSPVFIDEFLAPQGIITKKRALDTQIRNAKDGIEERRQRIKKLHEDNVTLMAKMNEYRATLEDLKVNRAQMNARAQSAEDQARLIRRELSGQEGLLKNIRDELSLYRIRLEEINERITATXTEIAEIEEKTKAYSADLERLENDIRKRNDNVASKKEIINKRMANFPKCRKRWKKFTWNLSNPKWR

SEQ ID NO: 65721 - DNA, 324 bp, Unknown
  Obtained from environmental sample
  misc_feature (1)..(324): n is a, c, g, or t
atggatgtaaagcaattaaccgatatcatgaatgaatcagtcggggaaattgtgcaaacgcttgtcaacaatggttattcacagactcaggaatttgaagccgataataccgcaatgtcgctcatgtcaagtgccggatataatccgtcaggtttgatagatatgcttaaatcattgagcgatgtccagaaagcaggcactggttttggcaaaacgcacccaagccccgcccagcgtatagctaacgctgaaaagtcggtggcaagatatccggttgttaattcagattcaagaattgcgcggtttaatgcggtgtcaaagtaa

SEQ ID NO: 65722 - protein, 107 aa, Unknown
  Obtained from environmental sample
  misc_feature (1)..(107): Xaa is any amino acid
MDVKQLTDIMNESVGEIVQTLVNNGYSQTQEFEADNTAMSLMSSAGYNPSGLIDMLKSLSDVQKAGTGFGKTHPSPAQRIANAEKSVARYPVVNSDSRIARFNAVSK

SEQ ID NO: 65723 - DNA, 2832 bp, Unknown
  Obtained from environmental sample
  misc_feature (1)..(2832): n is a, c, g, or t
ttgggcgaacacgccattaaatccctgcgcgcggaaaaaatggaagacgttatctttggcggtacggaagccagaaaacctctcaacgtggcggaagttaccctcgccatcgccaacgaaacaggtcttcttcccatggacatgccggaaatcgaaattaaaaggcggctgtaccgttccggagaaagcgaatacttcatcaatggggcgcaggtgcgtcttaaagatatacgagaacttttttgggacaccggcgtaggcaagaccgcctattctgtaatggaacagggaaaaatcgatcagatactttcatcaaagccggaagaaagacgttatctttttgaagaagcggcgggcatcacgcggtacagggaacggggagcggaggcggagcggaaccttgccaaaaccgaggaaaatgtgcgccaggttgatttgatactgaacgaggtaaaacgctcccatgacagtttaaaaatacaatctgaaaaaacgcttaaataccgcacaatgcgcgatgaaatttttaactatgaactggatattcagcttttacggctaaaacagtttaagtacgaaagagacgaaaaaaacgaaacattaaggcgcagaacgcaggaccgtgacaggatacgcgccgaaatggaagcggaaaaccaggcgctggaagcgcacatggacgaagtaaactccatggaagcgaggctcgtggagcttcaaaaaaatatttacggtcttgcgcttgaaaaaaacgcaagggagaacgaaatgcgcctgttcaacgaacagcgcggtgaaaataaagtaaaaatcggacaaaatgaagaacgcgaaaaacaggctgttcaaaaaataacggaattaaacgctgacgctgaggggcaggacgcggttgtacaggatttaagaaaacaatgtaaaagcatagaagaaaatattcgctcctttgaagaaaatatccagcttgcagcgggacgcatcagcgaaaacgacaaagaatcgcacagggcggaaactgaaattcacggcatagaaaaagaacttgccgcctttgaaaaagagcttgcaataataacagacgacattgtagcggaattggacgccggtttaaaaaaagccggctattcagccacagaacgcaagaacgcggaagaagctttacgcgaaacgcttgtccgcctaaataccctcctctccggcagggaggcgatgataggcgatcttgccgcaacttcaaatactacagggagcgtagacgcggcggaaataaagcgcattaccgatattctgcaaaaaagccttgcggaagccgcagccggagcgaataaagccgtagaactttttaacagttaccgtgagcattcgccaacctttattgatgaattcttggcccctcagggaattattacaaagaaacgcgcattggacgcgcagatcagaaccgcaaaagacggcattgaagaaaggcggcaacgcattaaaaaactacatgaagacaatatcaatcttttggcaaaaattgacgaataccgcgcaactctggagaacatgaaaattaaccgcgctcacatgaacgcccaagcacagtccgcggaagatcaagcgcgtcttataaggcgcgaattgtccggtcaggaaggactccttaaaaatatccgcgacgaactttccctgtaccgtaaaagactggaagaaactaacgcgcgtattacagggattcaaactgaaatagcgggtatcgaagaaaagactaaagcttattcttccgaattggaaaaattggaaaatgatatccgcaaaagaaacgataatgttgccagtaaaaaagaaattatcaataaacggatggctgaactttccaaagtgcaggaagcgctggaaaaaattcatgtggaacttgcccagtccgaaatggaaataaaaaacactcaggaaaattttagggagacgcattccagggatttaatggagtttgaagagcgcatttttaacattacaacacagcctgccgtgctgcgcgaaaaacttgcagccgcccgcacaaaatcaaaagaactcggttccgtaaaccttatggctcccgaagaatacgccgaaacaaaacagcggtacgactttcttaacacccaaatggaagactttcaaaaagcgcgcaaagaccttgaagaccttacggcggaaatacggcaggaaacttcacagttattcattgacacctataaccgtatcaagaaaaattttcacaatatgttccgccgtcttttcggcggcggcagagcggaactgcggctttccgacccgaaccacgttttggaatcgggcatagaaatcttcgcccagccgcccggaaaaaaactggaacatttaagtctgctctcgggaggcgaatgttcaatgacggcggtagctctcttattcgccacctacatggtaaagccaagccccttctgtcttctggacgaaattgacgccgcccttgacgaacaaaacgtcgggcgctttgttcacctgctaaacgagttcagcgacacaagccagttcatcatcattacacacaataagaaaaccacaacgggagctggaacgcttatcggcgtaaccatgcaagagtccggagtaacaaaagtaatttccgcccgcttcaaagaaggcgaactggatgtagccgacggaccgccgccgcaaacagagttatgggaagccgacggcaaattcgaagaagaagatgtcacccccgaagcgggaagacagcttcccgccggcatgaatgacccgaagaaagtaacagacgcgcagttaagaccgattagatcgcggacaactcaagaataa

SEQ ID NO: 65724 - protein, 943 aa, Unknown
  Obtained from environmental sample
  DOMAIN (1)...(875): RecF/RecN/SMC N terminal domain
  misc_feature (1)..(943): Xaa is any amino acid
MGEHAIKSLRAEKMEDVIFGGTEARKPLNVAEVTLAIANETGLLPMDMPEIEIKRRLYRSGESEYFINGAQVRLKDIRELFWDTGVGKTAYSVMEQGKIDQILSSKPEERRYLFEEAAGITRYRERGAEAERNLAKTEENVRQVDLILNEVKRSHDSLKIQSEKTLKYRTMRDEIFNYELDIQLLRLKQFKYERDEKNETLRRRTQDRDRIRAEMEAENQALEAHMDEVNSMEARLVELQKNIYGLALEKNARENEMRLFNEQRGENKVKIGQNEEREKQAVQKITELNADAEGQDAVVQDLRKQCKSIEENIRSFEENIQLAAGRISENDKESHRAETEIHGIEKELAAFEKELAIITDDIVAELDAGLKKAGYSATERKNAEEALRETLVRLNTLLSGREAMIGDLAATSNTTGSVDAAEIKRITDILQKSLAEAAAGANKAVELFNSYREHSPTFIDEFLAPQGIITKKRALDAQIRTAKDGIEERRQRIKKLHEDNINLLAKIDEYRATLENMKINRAHMNAQAQSAEDQARLIRRELSGQEGLLKNIRDELSLYRKRLEETNARITGIQTEIAGIEEKTKAYSSELEKLENDIRKRNDNVASKKEIINKRMAELSKVQEALEKIHVELAQSEMEIKNTQENFRETHSRDLMEFEERIFNITTQPAVLREKLAAARTKSKELGSVNLMAPEEYAETKQRYDFLNTQMEDFQKARKDLEDLTAEIRQETSQLFIDTYNRIKKNFHNMFRRLFGGGRAELRLSDPNHVLESGIEIFAQPPGKKLEHLSLLSGGECSMTAVALLFATYMVKPSPFCLLDEIDAALDEQNVGRFVHLLNEFSDTSQFIIITHNKKTTTGAGTLIGVTMQESGVTKVISARFKEGELDVADGPPPQTELWEADGKFEEEDVTPEAGRQLPAGMNDPKKVTDAQLRPIRSRTTQE

SEQ ID NO: 65725 - DNA, 327 bp, Unknown
  Obtained from environmental sample
  misc_feature (1)..(327): n is a, c, g, or t
ttgcctacgccggtgtcccaaaaaagttctcgtatatctttaagacgcacctgcgccccattgatgaagtattcgctttctccggaacggtacagccgccttttaatttcgatttccggcatgtccatgggaagaagacctgtttcgttggcgatggcgagggtaacttccgccacgttgagaggttttctggcttccgtaccgccaaagataacgtcttccattttttccgcgcgcagggatttaatggcgtgttcgcccaagacccatttaattgcgtcaactacattggattttccgcagccgttggccccaaaagagcggtaa

SEQ ID NO: 65726 - protein, 108 aa, Unknown
  Obtained from environmental sample
  misc_feature (1)..(108): Xaa is any amino acid
MPTPVSQKSSRISLRRTCAPLMKYSLSPERYSRLLISISGMSMGRRPVSLAMARVTSATLRGFLASVPPKITSSIFSARRDLMACSPKTHLIASTTLDFPQPLAPKER

SEQ ID NO: 65727 - DNA, 1113 bp, Unknown
  Obtained from environmental sample
  misc_feature (1)..(1113): n is a, c, g, or t
ttgatggccgagaggcgntattttacattcatcaacggtaaacgcaagaacgctaaagttaacgattttatcgacacccgtcccgcgtgggcttcgatttccggcaaatattttactttcatcgccattccgtacctcgcgcagtatacgctcaatttctcggaaaaagcggaaccggggcttatagcggcttcccgtttgaatatcatacgccccgcggtaaatgtttccaaagtagaagacaattaccgtttttatttgggaccaaaaacgcatgacgcgctttcaatttacaatacgggtaaaaatacttacggcataaaagacgccaatattatggatgtggcaaattccggcggaattttagcgccgattgaaaaattgttaaaatggcttcttcttatcttttataaaattgttcccaatttcggaatcgcgatgctcctgtttacattgttcataaaaattcttttcttcccgttaaccaaaaaaggctcggaagcgacaatgcgaatgcaggcttttgcgccaaggataaaggaaatacaggaaaaatataaaaacaatccgcaaaaattaaatacggagcttgggaatctttacaaaaaggaaggatacaacccgctttcaggctgtcttcccatgctgcttcaaatgccgataattatcgccatgtaccagctttttaacaatcattttgatatgcgcggagcgggatttattcccggctggatacccgatctttcacttcccgaatatattgtaaaattccccgacggttttaaactgccgtttttaggctggacagcgttacgcgcattaccgtttatatatgtcggctctcagttaatctacggaaaagttacgcagatgccgggacagcagtctaacagtcaggctaagatgatgatgtatgcaatgccgatagtatttttctttgtgctttacaatttgccgtccgggttgttgatatactggatattctctaacctgcttacactggctcaacagttgataattaataaatatgttatggcacaaaaagcgaatcagccgcaggcggaaccggagacgaaaatcgcccccggcaaaaagaaaaagaagaacttttaa

SEQ ID NO: 65728 - protein, 370 aa, Unknown
  Obtained from environmental sample
  DOMAIN (141)...(345): 60Kd inner membrane protein
  misc_feature (1)..(370): Xaa is any amino acid
MMAERRYFTFINGKRKNAKVNDFIDTRPAWASISGKYFTFIAIPYLAQYTLNFSEKAEPGLIAASRLNIIRPAVNVSKVEDNYRFYLGPKTHDALSIYNTGKNTYGIKDANIMDVANSGGILAPIEKLLKWLLLIFYKIVPNFGIAMLLFTLFIKILFFPLTKKGSEATMRMQAFAPRIKEIQEKYKNNPQKLNTELGNLYKKEGYNPLSGCLPMLLQMPIIIAMYQLFNNHFDMRGAGFIPGWIPDLSLPEYIVKFPDGFKLPFLGWTALRALPFIYVGSQLIYGKVTQMPGQQSNSQAKMMMYAMPIVFFFVLYNLPSGLLIYWIFSNLLTLAQQLIINKYVMAQKANQPQAEPETKIAPGKKKKKNF

SEQ ID NO: 65729 - DNA, 618 bp, Unknown
  Obtained from environmental sample
  misc_feature (1)..(618): n is a, c, g, or t
atggagtttgaatttgagggtcgcaccgaaaaagaagcgattgacagggcggctggagaacttggtcttgaaaaagacgattttgacgtagagattcttgagacccaaaaaagcggtttgttcaagaaaggtttagtgcgtatcaaggtgcatgttggaaatttcggagttaataccaaaccaaaaccatcgcgtccttcttcggaaagcagcgacatggagagggacagaatcggcaactcggtgagcaaggcggtttttggagaacccgctccgcagaatgaatttgaaacaaaaatggttgaatttacaagcgggcttattgaacgcatgggctatccgggaacggtctccgttcttttccgtgaaaaaaacaagcttggagtaaaaatcgattcgacacattcatcgatactaatcggtaaaaaaggcaagaacttggacgcgcttcagttactgctgaacatctacgcgggtcgtcttggaaaagaagatgtccgtgtaattttagacacggaaaattaccgtatccgcagggaagaatccttgtgcgtcttgcctacaatgtcgctgaaaaagtccgcgaaagcaaaggctctatcttacttgaaccgatga

SEQ ID NO: 65730 - protein, 205 aa, Unknown
  Obtained from environmental sample
  misc_feature (1)..(205): Xaa is any amino acid
MEFEFEGRTEKEAIDRAAGELGLEKDDFDVEILETQKSGLFKKGLVRIKVHVGNFGVNTKPKPSRPSSESSDMERDRIGNSVSKAVFGEPAPQNEFETKMVEFTSGLIERMGYPGTVSVLFREKNKLGVKIDSTHSSILIGKKGKNLDALQLLLNIYAGRLGKEDVRVILDTENYRIRREESLCVLPTMSLKKSAKAKALSYLNR

SEQ ID NO: 65731 - DNA, 813 bp, Unknown
  Obtained from environmental sample
  misc_feature (1)..(813): n is a, c, g, or t
atgataatcggcatagacataggcagcaccactaccaaggcagtttcgctggaagatggcaaggtcgtaaaaaaaataaaaaccagggccgaggacgcgattacctcggcttcaggcgcgtttggcaagatcatcctggaaaacggaatcaggatgaccgacataaagcagataatgatcaccggcgcgggagcgactaaaattgatggggagctgttcggtattcncacggaaaaggtaaacgaaatcacctcgataggcattggcggcaagtacctttcaggccaggaaaatatcatcattgcgaatgtcggaaccggaaccgcgatcatcgaagcccaaagggacaagatcattcacctgggcggttcgggcgtgggtggtggtaccatcctcgggcttgcgaaaaaactcctttcgctttcggatttcaaagacattatgaagctggcaggggaggggagcctcgatcctgttgaccttcttctcgaagacatcatggtagctgattttagctttctcgggaaaaaatcgacggcctccaatttcggtaaaatgctggacacagcccggaacgaagacattgccctggggataataaacatggtctttcaggtaataggaatgatttcggttttcgccgcgcgaagccgtaacatcgacagggtaattgttacaggctcaggcagccataaccctttgggccagaatatacttgccggcattacgcgaatgcactcaatcgtctttgaataccccgaagacgccgaatacacaactgcggtaggcgcggggctttatggcagccagtaa

SEQ ID NO: 65732 - protein, 270 aa, Unknown
  Obtained from environmental sample
  DOMAIN (3)...(268): BadF/BadG/BcrA/BcrD ATPase family
  misc_feature (1)..(270): Xaa is any amino acid
MIIGIDIGSTTTKAVSLEDGKVVKKIKTRAEDAITSASGAFGKIILENGIRMTDIKQIMITGAGATKIDGELFGIXTEKVNEITSIGIGGKYLSGQENIIIANVGTGTAIIEAQRDKIIHLGGSGVGGGTILGLAKKLLSLSDFKDIMKLAGEGSLDPVDLLLEDIMVADFSFLGKKSTASNFGKMLDTARNEDIALGIINMVFQVIGMISVFAARSRNIDRVIVTGSGSHNPLGQNILAGITRMHSIVFEYPEDAEYTTAVGAGLYGSQ

SEQ ID NO: 65733 - DNA, 561 bp, Unknown
  Obtained from environmental sample
  misc_feature (1)..(561): n is a, c, g, or t
atggctacgccctgtccgtcatgccacggcgagggcgagattattgagaaaccctgccaggaatgcgggggatccggtacacagaagaaacgccagaagataatggttaccattcctccgggagtggaaaacggcaaaagggtgttaattccccgccagggcgacgcgggagtggcaggcggctccacaggcgacctctacgtttttatccgcgtaaaaccccatgaattttttgagcgcgagggcgaggatctttactgtgctattccaatttccataacccaggcggcacttggcgcagagattcaggttgcaaccctcgaaggcaaatccatcaaggtaaaggttccgccaggaatacaaaacggcaaactgctccgcatccgcgatgaaggcgttcctgtgtcgggccgcaggggaaacctctatatcaagatgatggttcaggtacctgcaaagctttcaaagcgcggacgggaacttatggaggagctttcccgcgtggaaggtgaaaacagtaaccccaagcccataccgctttcggatctttcggaccactag

SEQ ID NO: 65734 - protein, 186 aa, Unknown
  Obtained from environmental sample
  DOMAIN (46)...(166): DnaJ C terminal region
  misc_feature (1)..(186): Xaa is any amino acid
MATPCPSCHGEGEIIEKPCQECGGSGTQKKRQKIMVTIPPGVENGKRVLIPRQGDAGVAGGSTGDLYVFIRVKPHEFFEREGEDLYCAIPISITQAALGAEIQVATLEGKSIKVKVPPGIQNGKLLRIRDEGVPVSGRRGNLYIKMMVQVPAKLSKRGRELMEELSRVEGENSNPKPIPLSDLSDH

SEQ ID NO: 65735 - DNA, 1332 bp, Unknown
  Obtained from environmental sample
  misc_feature (1)..(1332): n is a, c, g, or t
atgatcagatggccgagtcgggcgagggatcaatttttccgctcggacaaactggcggtagtccgcgcgttagacgatctcggaatctcatggatcgaggcggggaatccgggaagcaacccaaaggatatggaatttttccgtcttgccgccgacctcaggcttaaacacgcgaaactctgcgccttcggctcaacaagaaagaaaggagtcaaagcgggtgatgactcgggggttctaagcctgcttgacgcgcagactcaggctgtcgtgatcttcggcaagagctgggactttcatgttacggaagtgttacgcgtaacccatgaggaaaaccttgccatgattgcggaaacaataacattcctcaaagaaaaagggcggaaagttttttacgacgcggaacatttttttgacggctggaaggcaaaccccgattacgcccttgttactttaaagacggcgatggaagccggcgcggagcgcataatactgtgcgatacaaacggcggaacattccccgatattatagaaaaagccgtcaaggaagccgcaaaaactgtcaacgctgacggcgccccctgcgtcctgggcattcacgcgcacaacgacgctgatatggcaagcgccaacgcgataaccgccgttcttgccggatgccgccatgttcagggaacccttgtcggtttcggcgagaggtgcggcaacacaagtcttgcggcggttatacccagccttgaacttaaacttggtttccgctgtctgccggaaggaaagatggaaatgctttccgaaataacccggtttgtggctgagacggcaaatgtcgccgtgccgggaaatatgccctatgtgggaagccacgcgtttacccacaaggcgggaatgcacgccgacgggattttaaaagaccgcaaatcatttgagcatatcgatccttcccttgtggggaacgaccggcatttcttaatgagcgaagtcggcggacgctcggcaatagcggagagagcgaaaaagatcgagccttccataacaaaggatcaccctgtaacagccgccctcgctcaaaagttaaaaaccctcgaggctgagggctggcagtttgaaggagccgacggcagttttgatcttctggttcgccgcgagcttgggcgttacaaaccgctgtttaacattaaagcttaccgcgttgtaagcgaacaccccacaggcgaaaccatagcctgttcgcacgcgtgggtcaaagtccatgttgacggacaggaagaagtagcagccgccgagggagacgggcctgtcacgcgatggacggcgcgcttcgcagggccttga

SEQ ID NO: 65736 - protein, 443 aa, Unknown
  Obtained from environmental sample
  DOMAIN (8)...(276): HMGL-like
  misc_feature (1)..(443): Xaa is any amino acid
MIRWPSRARDQFFRSDKLAVVRALDDLGISWIEAGNPGSNPKDMEFFRLAADLRLKHAKLCAFGSTRKKGVKAGDDSGVLSLLDAQTQAVVIFGKSWDFHVTEVLRVTHEENLAMIAETITFLKEKGRKVFYDAEHFFDGWKANPDYALVTLKTAMEAGAERIILCDTNGGTFPDIIEKAVKEAAKTVNADGAPCVLGIHAHNDADMASANAITAVLAGCRHVQGTLVGFGERCGNTSLAAVIPSLELKLGFRCLPEGKMEMLSEITRFVAETANVAVPGNMPYVGSHAFTHKAGMHADGILKDRKSFEHIDPSLVGNDRHFLMSEVGGRSAIAERAKKIEPSITKDHPVTAALAQKLKTLEAEGWQFEGADGSFDLLVRRELGRYKPLFNIKAYRVVSEHPTGETIACSHAWVKVHVDGQEEVAAAEGDGPVTRWTARFAGP

SEQ ID NO: 65737 - DNA, 1146 bp, Unknown
  Obtained from environmental sample
  misc_feature (1)..(1146): n is a, c, g, or t
atgaaatttagtattgcggtaattcccggagacggaatagggcctgaggtgacagcgcctgctcttaaagttcttgacgttattgggaacaagtacggacatgaattcaaatatgtcgaacttgaagccggcgggctcgctatcgatcacacgggagagccgctcccccagaaaactcttgaaacggcgaaacagtgcgacgcgcttctcctgggcgcggtcggcggcccaaagtgggacacgcttccagggcatctgcgtcccgaaagagctctgctgggtcttcgcgccgggcttggcgttttcgccaaccttcgtccggcggcattgctccctcagttaaagtcagcttgccctgttaaagacgaggtgctaatcgctagtaatagtgaggggaaagccgcttttgatttattgattgtaagggaattgacgggcgggctttacttcggcaagcgcggaagattggacgagccttcaaacggccacagccccggttcggcttttgataccgaaacatattcatggatggaaattgagcgcgtgctccgcgcgggttatgaagcggcggcagtgcggcggaaaaaactctgcgttgtggacaaggccaatgtgcttgaatcttcccgcttctggcgcgaagtcgccgcggtggtttcaaaagattatcccgacatagaaacaagttatctctatgttgacaatgccgccatgcagttgattcgcgctccggggcaattcgacgttatcgtaacgtcaaatctctttggggacatactttccgatgaggcatccgtacttacgggttcaatcggaatgcttgcctcagcaagcctgggcgaacaagtacagggcggaaacagaccgggaatgtacgagcctattcacggctcggcgccggacatcgcggggaaggatttagccaatcctctcgcgacaattctttctgcggcgatgatgcttcgctactcattcggtcttgagaaggaagctgtcgctgttgaaaccgctgttaacaatgtgctggatcagggactgaggacgggagacatagcaagccgaagtggcggcgcggcaaacaacgaaaaaattgtgggtaccaaagaaatgggcgaagcggtactcaaggcattggagaaattatga

SEQ ID NO: 65738 - protein, 381 aa, Unknown
  Obtained from environmental sample
  DOMAIN (4)...(374): Isocitrate/isopropylmalate dehydrogenase
  misc_feature (1)..(381): Xaa is any amino acid
MKFSIAVIPGDGIGPEVTAPALKVLDVIGNKYGHEFKYVELEAGGLAIDHTGEPLPQKTLETAKQCDALLLGAVGGPKWDTLPGHLRPERALLGLRAGLGVFANLRPAALLPQLKSACPVKDEVLIASNSEGKAAFDLLIVRELTGGLYFGKRGRLDEPSNGHSPGSAFDTETYSWMEIERVLRAGYEAAAVRRKKLCVVDKANVLESSRFWREVAAVVSKDYPDIETSYLYVDNAAMQLIRAPGQFDVIVTSNLFGDILSDEASVLTGSIGMLASASLGEQVQGGNRPGMYEPIHGSAPDIAGKDLANPLATILSAAMMLRYSFGLEKEAVAVETAVNNVLDQGLRTGDIASRSGGAANNEKIVGTKEMGEAVLKALEKL

SEQ ID NO: 65739 - DNA, 1389 bp, Unknown
  Obtained from environmental sample
  misc_feature (1)..(1389): n is a, c, g, or t
atgaaaagcgattctgtaaacaagggcattgcccgcgcgccccaccgctcgctttttaaggcgttgggatttattgaggaagagtttaaaaggccgttgattggtattgcctgcgcgaagagcgaaatagtgccgggtcatctgcacctggacaacatcgcgcgcgctgttgcggacggtgtccgcatggcgggaggagcgcctgttatcttcccggtaatcggcgtttgcgacggaatagcgatggggcatgtgggaatgaagtactctctgccgacaagggaattgatcgccgactcggttgagtgcatggccctggctcacgcttttgacgcgcttgtctttatccccaactgcgacaagattgtgcccggcatgttgatggcgtcggcgcggcttaaccttcccgctgtttttgtttcaggcgggcctatgcttgccgggcgcaaggacgggaaaccgctgacgcttacgacaatgttcgaggcggtaggcgctgttgccgccgggaagatcagcgagcgcgaacttgaagagcttgaaaacctttcctgcccgggctgcggttcctgcgccggaatgtttaccgcgaactcgatgaactgcgtgacggaagcgcttggcatggctctgccgggcaacggaactattcccgccgtgatggcggagcgtgtccgtctcgcgaaaaaaacaggaatgttgatcatggacgtacttaaaaaagatttgcgtccaaaacaaatacttacgcaggccgcgtttatgaacgccctcgccctcgacatggcgctcggctgttcaacgaataccgctcttcatcttcccgcagttgcgggagaagctggcatcaaactcgatctggaacttcttaacaaggtaagcgctgtaactcccaatctttgccgtcttgctccagcgggaaaggacgcaatcgaagacttgcacacggcgggagggattccggcggtttttaaagaactatccaaaaagaaccttgtcgatcttaaagccgcgacagtgtacggctgtctcggcgacgcgttgagcaaagcggaaaaccgcaaccccgatgtcataagaccgctggaaagtccatactcggtgacaggcgggcttgccgcgctgaaggggaatatcgctcaggacggctgtgtcgtgaagcgaagcgcggttgcgccttccatgctgaagcacgaaggaccggcaagggttttcgattcggaggaagccgcatttgacgccatcatgggaaaaaaaattaacgcgggggatgttgtcgttatccgttacgaaggaccgaggggcggccccggcatgaaagagatgctcgctcctacggcggcccttgccggcatgggactgacgacaaggtgccctcggccgatctga

SEQ ID NO: 65740 - protein, 462 aa, Unknown
  Obtained from environmental sample
  DOMAIN (31)...(462): Dehydratase family
  misc_feature (1)..(462): Xaa is any amino acid
MKSDSVNKGIARAPHRSLFKALGFIEEEFKRPLIGIACAKSEIVPGHLHLDNIARAVADGVRMAGGAPVIFPVIGVCDGIAMGHVGMKYSLPTRELIADSVECMALAHAFDALVFIPNCDKIVPGMLMASARLNLPAVFVSGGPMLAGRKDGKPLTLTTMFEAVGAVAAGKISERELEELENLSCPGCGSCAGMFTANSMNCVTEALGMALPGNGTIPAVMAERVRLAKKTGMLIMDVLKKDLRPKQILTQAAFMNALALDMALGCSTNTALHLPAVAGEAGIKLDLELLNKVSAVTPNLCRLAPAGKDAIEDLHTAGGIPAVFKELSKKNLVDLKAATVYGCLGDALSKAENRNPDVIRPLESPYSVTGGLAALKGNIAQDGCVVKRSAVAPSMLKHEGPARVFDSEEAAFDAIMGKKINAGDVVVIRYEGPRGGPGMKEMLAPTAALAGMGLTTRCPRPI

SEQ ID NO: 65741 - DNA, 540 bp, Unknown
  Obtained from environmental sample
  misc_feature (1)..(540): n is a, c, g, or t
ttgggagtagaggcgccggcagacggcggccgtcccgaatccgaggcctctcaaacggctgacgacgggcggctatccggacgcgacgcggtctacttcgtctccgacgcgcacttcgggctggaccgaagcgagcgtgtgagggtcgagcgcttccgcgaattcgccgcgcacgtgcgcgcccgcgccgcgacgctctatatcgtgggcgacttcttcgacttctgggtcgagtacaaagacgccatccgccccgagtacttccccatcttgcacgaactgcgcgccatcgtcgacgccggcgtgccggtacactacatcgccgggaaccacgacttcgccatggggaacttcatggagaaatacgtcgggctgacgctccaccgcggctgcgtcgacgcggagctgcaggggcgccgcctccatataagccacggacacaaagtgggcaggaaactcccgcagcgcctatccgacgcgctgcttgccataaaacgctgcaacgcctctacaagatactgcacccgaacatcggcgtaa

SEQ ID NO: 65742 - protein, 179 aa, Unknown
  Obtained from environmental sample
  misc_feature (1)..(179): Xaa is any amino acid
MGVEAPADGGRPESEASQTADDGRLSGRDAVYFVSDAHFGLDRSERVRVERFREFAAHVRARAATLYIVGDFFDFWVEYKDAIRPEYFPILHELRAIVDAGVPVHYIAGNHDFAMGNFMEKYVGLTLHRGCVDAELQGRRLHISHGHKVGRKLPQRLSDALLAIKRCNASTRYCTRTSA

SEQ ID NO: 65743 - DNA, 363 bp, Unknown
  Obtained from environmental sample
  misc_feature (1)..(363): n is a, c, g, or t
atgaacataatgcaaaaactgtcttccaaaaaccttttagtttttaacttggtcttaataggcgccattttcggcttttctttggcgtttttatcgttttcctgctctacgccgggatcgcgcgtaaaggcgcaggaaagtaaggtcgtcattcccgaagattcgctcgcggtcgcggaagcagtgcaaactacttttcgcgcggtcgcggaaaaaatgctgccttccgttatagaattaaaaaccgtttccgtcagaaaacagcagtctcccaattttaacggtataccctgggaatttttctttggtccgcgcgatagggaaccaagcgacagggatcgtgaatatcgatctcagggctag

SEQ ID NO: 65744 - protein, 120 aa, Unknown
  Obtained from environmental sample
  SIGNAL (1)...(29)
  misc_feature (1)..(120): Xaa is any amino acid
MNIMQKLSSKNLLVFNLVLIGAIFGFSLAFLSFSCSTPGSRVKAQESKVVIPEDSLAVAEAVQTTFRAVAEKMLPSVIELKTVSVRKQQSPNFNGIPWEFFFGPRDREPSDRDREYRSQG

SEQ ID NO: 65745 - DNA, 1017 bp, Unknown
  Obtained from environmental sample
  misc_feature (1)..(1017): n is a, c, g, or t
ttggtcgggaaagacgagcgtaaagaccttgcgatgatttcgtttaaaaccaacgactcctaccctctcgcgtctttgggcgattccgacagcgtttcggtcggcgactgggcgattgccatcggcaatccgttaggtgaacaattttcattctccgtaacgatgggaattgtgagcgcggtgggacgcacgggcggaccgggcggcaatatcaatgattttattcagacggacgcgcctattaatcaggggaattcgggcggtcctcttgtcaacatcagaggagaagtaatagggatcaatacatggatagcgagtaatctttcaggcggcggaagcgtcgggcttggtttcgctatcccaattaataacgtaaaacgttctattgatgaatttataaatacgggtactacaagatacggatggctcggcgtttcactaatggaagcaaccaaagagacagcggcaagtcttggcattgaaaacaaacgcggcgctcttgccgctcaggtattcctcggctctcccgccgacaagggcggaatcagacccggcgattttatcacgcatgttaacggcaaagaagccagaggcattcaacagcttcaaatgattgtcggcgatttaaaacccggcgataacgcgaaatttacggtcatccgcgacaagcagacaaaagaaatacaggtgcgaatagaagtccgcacggatcaagtcgcttcagataacaaaaaactttggcccggcgtaacggttgtgccgttgaatgaccaaatcaggcagagtatggaacttgataaggacgcaaaaggtttatttgtcgcgcaggttatatctggaactcccgccgatattgtcggtttaaggcagggagacagaataacggcggtaaacgggacaacggtaggcgacattgcggcgttctacaaggtgttacgcgaaaaggcaaccgaagaactttggtttggatttataagaagcgaatccacaatggaatcgctgaaatttaaacggtaa

SEQ ID NO: 65746 - protein, 338 aa, Unknown
  Obtained from environmental sample
  DOMAIN (2)...(129): Trypsin
  misc_feature (1)..(338): Xaa is any amino acid
MVGKDERKDLAMISFKTNDSYPLASLGDSDSVSVGDWAIAIGNPLGEQFSFSVTMGIVSAVGRTGGPGGNINDFIQTDAPINQGNSGGPLVNIRGEVIGINTWIASNLSGGGSVGLGFAIPINNVKRSIDEFINTGTTRYGWLGVSLMEATKETAASLGIENKRGALAAQVFLGSPADKGGIRPGDFITHVNGKEARGIQQLQMIVGDLKPGDNAKFTVIRDKQTKEIQVRIEVRTDQVASDNKKLWPGVTVVPLNDQIRQSMELDKDAKGLFVAQVISGTPADIVGLRQGDRITAVNGTTVGDIAAFYKVLREKATEELWFGFIRSESTMESLKFKR

SEQ ID NO: 65747 - DNA, 624 bp, Unknown
  Obtained from environmental sample
  misc_feature (1)..(624): n is a, c, g, or t
atgaaattattttttcaatactgttcgtatggctttagcaattgctacattcttgggatggagaattccatcaagaaccagccgaatgccgctattatagttgatccgggaagcatggaaaaaaatgtattggatataatagaaaataataattttgatttaaaagccgcgctgataacgcatgagcatttaaaccatgttcagggactgcggacattaaacaaaatttataacaccggagtaatcgccataaaccaaaatattatggatcaaaaaacaacaaggataaaagacggcgataaacttattgtcggcggttttaccatcgatgttatttccataccgggacattccgccgattctgttgtttataaaataggagacctgctttttacaggcgacgttcttacggcgggacttgtaggaagcacggcaagcgcctacggagcggcgacgcagatgaacaaactgcgaagccgtcttctttcgctccctggcgattatgtcgttcttcccggacacggaccgcctacgactcttgaagccgaaaggcgctacaatatggacatcttcaagttcgatcaaagccgcaccaaacgccctgtttttagagtagagctttaa

SEQ ID NO: 65748 - protein, 207 aa, Unknown
  Obtained from environmental sample
  DOMAIN (12)...(174): Metallo-beta-lactamase superfamily
  misc_feature (1)..(207): Xaa is any amino acid
MKLFFQYCSYGFSNCYILGMENSIKNQPNAAIIVDPGSMEKNVLDIIENNNFDLKAALITHEHLNHVQGLRTLNKIYNTGVIAINQNIMDQKTTRIKDGDKLIVGGFTIDVISIPGHSADSVVYKIGDLLFTGDVLTAGLVGSTASAYGAATQMNKLRSRLLSLPGDYVVLPGHGPPTTLEAERRYNMDIFKFDQSRTKRPVFRVEL

SEQ ID NO: 65749 - DNA, 927 bp, Unknown
  Obtained from environmental sample
  misc_feature (1)..(927): n is a, c, g, or t
atgttaaagggacgatccctgattgaaccgggtaatttcagccttgaggagatggacaggctgtttgccctggcggaaaaaatcgaaacggaagagcggtatttgcgggacagttgcaggggaaagctgctggcgacgcttttttttgagccgagtaccagaacccgcctgagtttcgaggccgcaatgctcaggctgggggggagctgcctgggttttgccgatcccggctccagctcggcggccaagggcgagagccttgccgacacggtgcggatggcggcgagttatgcagacgcgattgttatgcgaaacccaaaggaaggcgcggcgctgctcgcgtcccgttattcgcctgtcccggtgattaacgcgggcgacgggggccatcatcatcccacccagacgcttaccgatctgcttacaatcagacggctgaggggggatatagaaaactttaccatcggcttctgcggcgatctgaaattcgggcgcactgtccattcgctggcaaaggcgcttgcccgtcatgcgaatatcaagatggcctttatctctcccgaggaactggttattcccgaatatattaaccagcacctgaaaaaacataaaatcgaattcacggaaacaagaaaccttgaggaagcgatgcccatgcttgacgtgctgtatatgacgcgcgtgcagaaggagcggtttttcaatgaagaggattatatccgcctgaaagacacttttgttctcaataaagaaagaatggcgtatggtaaaggcaccctgatcattttacatccgctgccgcgtgtgaatgaaatttccgtcgaggtggaccgcgatccgagggcggcttattttaagcaggccaagtacggaatgtatgtccgcatggcgttattggcttcattactgggggtagaaaatgcttaa

SEQ ID NO: 65750 - protein, 308 aa, Unknown
  Obtained from environmental sample
  DOMAIN (150)...(302): Aspartate/ornithine carbamoyltransferase, Asp/Orn binding domain
  misc_feature (1)..(308): Xaa is any amino acid
MLKGRSLIEPGNFSLEEMDRLFALAEKIETEERYLRDSCRGKLLATLFFEPSTRTRLSFEAAMLRLGGSCLGFADPGSSSAAKGESLADTVRMAASYADAIVMRNPKEGAALLASRYSPVPVINAGDGGHHHPTQTLTDLLTIRRLRGDIENFTIGFCGDLKFGRTVHSLAKALARHANIKMAFISPEELVIPEYINQHLKKHKIEFTETRNLEEAMPMLDVLYMTRVQKERFFNEEDYIRLKDTFVLNKERMAYGKGTLIILHPLPRVNEISVEVDRDPRAAYFKQAKYGMYVRMALLASLLGVENA

SEQ ID NO: 65751 - DNA, 438 bp, Unknown
  Obtained from environmental sample
  misc_feature (1)..(438): n is a, c, g, or t
atgcttaatatcgaaaaaattaataatggcattgtcattgatcatattaaggccgggcagggtattaaggtttttaactggcttggcctggacaaggccaagtatacggtagctttcgtgattaacgccaattcaggaaaagtcggtaaaaaagatgttattaaaattgataatgatattagcattaatcttgatgtcctcgggctgattgaccccaatattacgataagtattattaaaaatcaaagtgttgtggagaaaagaaaactctggctgccgaaaaaagtggaaaatgtgctgatttgcaagaatccgcggtgtatcacctcgacggaaaagtatattccccatgtttttcatcttgtgagccctgaactgcaaacctaccgctgcgagtactgcgatgaaataagatcggcggaagattttagaaattag

SEQ ID NO: 65752 - protein, 145 aa, Unknown
  Obtained from environmental sample
  DOMAIN (94)...(145): Aspartate carbamoyltransferase regulatory chain, metal binding domain
  misc_feature (1)..(145): Xaa is any amino acid
MLNIEKINNGIVIDHIKAGQGIKVFNWLGLDKAKYTVAFVINANSGKVGKKDVIKIDNDISINLDVLGLIDPNITISIIKNQSVVEKRKLWLPKKVENVLICKNPRCITSTEKYIPHVFHLVSPELQTYRCEYCDEIRSAEDFRN

SEQ ID NO: 65753 - DNA, 804 bp, Unknown
  Obtained from environmental sample
  misc_feature (1)..(804): n is a, c, g, or t
atgtggatgagggttgtatttaaaaatttcagaattattgatgaagctacagattttttcggggcgcttgttgttgaaaatgggttgattcaggagcttattgataccggcaatatccctgacggcgatattgttgttgacggcgcgtcgcatggcgacggcgcatcgcatagcgatgcgatggcttttggagaatcggctgttttgttgcccgcttttattgatttacattcacactttcgagagccgggctttcctgaaaaagagacgttggaatccgcttctcttgcggcagccgcaagcggattcgcaactgtcgtctgtatggcaaataccaaacctgtaattgacactgttgataaagcccgcgcattaaaggcccgaagcgacgcgcttggtttgatcgatctgtatccggtgttgtcattgaccaaaaatatggaaggtttggagctttccgggattaaggatttaccatgtgagaaaaacggcattaggctgcccctcatgctttcagaagacggcaaggatgtcgctgatgacggtttgttccttgccgcgatgaaagaggcaaaacggctggggatacccgtgtcatgccattgcgactttggcgggactgaggtccaggcggtaaaatcagcgggctgcataagagccgagtggtcgcgtatagaagaaaatatcgccgtgcgccgtgcgattgagcttggtagaaaacagggctgccatattcatattgcccatgtttcaacaaaagaatctgcggggataatccgtgaggtaaaagaaagtttccgttag

SEQ ID NO: 65754 - protein, 267 aa, Unknown
  Obtained from environmental sample
  misc_feature (1)..(267): Xaa is any amino acid
MWMRVVFKNFRIIDEATDFFGALVVENGLIQELIDTGNIPDGDIVVDGASHGDGASHSDAMAFGESAVLLPAFIDLHSHFREPGFPEKETLESASLAAAASGFATVVCMANTKPVIDTVDKARALKARSDALGLIDLYPVLSLTKNMEGLELSGIKDLPCEKNGIRLPLMLSEDGKDVADDGLFLAAMKEAKRLGIPVSCHCDFGGTEVQAVKSAGCIRAEWSRIEENIAVRRAIELGRKQGCHIHIAHVSTKESAGIIREVKESFR

SEQ ID NO: 65755 - DNA, 366 bp, Unknown
  Obtained from environmental sample
  misc_feature (1)..(366): n is a, c, g, or t
gtgacagccggcgaagatgcaacactgggacgttttaaatgccggcttctgtcccttgaagccgttaccaaagatgtaacatatccaaaaatgaaaatctggatcagcgaagacggtctgttacgcaaaaccgaggattatagcctttcaggtcaattactgcggacatcggcaataccggattattatcaaatcagcggacgctttgttcccaaacagattttatttgtagacgcgctgcagggggcaaaaatcaatggaaaatttgtaaatgaaaaaactcaaattaccatttccaaaccttcttttaacaaagtagctgattcgattttttcaaaaacttttttagaatcggttaataaatga

SEQ ID NO: 65756 - protein, 121 aa, Unknown
  Obtained from environmental sample
  misc_feature (1)..(121): Xaa is any amino acid
MTAGEDATLGRFKCRLLSLEAVTKDVTYPKMKIWISEDGLLRKTEDYSLSGQLLRTSAIPDYYQISGRFVPKQILFVDALQGAKINGKFVNEKTQITISKPSFNKVADSIFSKTFLESVNK

SEQ ID NO: 65757 - DNA, 1668 bp, Unknown
  Obtained from environmental sample
  misc_feature (1)..(1668): n is a, c, g, or t
atgacaaggctgcacgccggcggtaaattcgataaaaagtcttataaagtttccggtggcttgcacggcgtcggcgtttctgtcgtaaacgcgctttccgagtggtgcgaggcttatgttcaccttgacgggaaagttttcacacagcggtataaaatcggcattcccgacagccccgctaaggaaattcagcccacaggactcccttacgcttattcgccgaatcgccaggggactgttgtccgctggaaagccgacacgacaatttttgaaactacaacttataattttgacgcgctttccaatcgtctgcgcgagcttgcgtttttaaacaaaggtttaaaaatcactatccgcgacgaacggctttctacgcccaaagttcacgattttatgtttgaaggcggcgtaaaaagttttgtcggctacctgaacgaaaataaaaccgtactttacaatgagccgatttaccttgaaggcgtccgcgatgacggcttaggcggtcaggttgaagtagagacggcgatacagtacaacgacggctttaacgaaataatgttttcgtttgtaaacgatattaacacccgcgaaggcggcactcatcttgtcgggtttaaatccgcgcttactcgcactttgaatgaatttttaaaaaagtcaaaacactcaaaaaagttagacgaaactctttcaggcgacgatgtgcgcgaaggactgactgcggtactgtcggttaaagttcccaatccgcagtttgaagggcagacaaaaggaaagctgggcaactcggaagtgaagggtatagtggagtcccttgtaaacgaacagcttgaactttactttgacaaacaccctgatgtaattaataacatacttgaaaaatcggtgttagctgcaaaggcgcgtattgccgcgcgtcaggcgagagacgctacacgcagaaagaacgcgatggacagcgcgggattgcccggcaaacttgccgactgctccgagaaagaccccgcaaagtgcgaactttttatagtagagggcgactccgcgggcggctcagccaaaggcggcagagacaggcgcactcaggcgatacttccgctgtggggcaagatgttaaatgtagaaaaacagcgtatcgagaaagtaattacaaacgaaaaattacagcccgtcatcgcaagcataggagccggctgcggcaatgaatttgacgtttctaaaattcgctatcataaaatcatcataatggctgatgccgatgttgacggctctcatatccgcacattgcttttaacattcttctaccgttacatgacgccgcttattgagcaagggcacgtttatcttgccatgccgccgctttacaaggtgagttacgataaaaagtcattctacgcttacgacgacgctgaaaaggaccgtattcttgcggattcgggcaaagacgctgaaaaagtttcagttcagcggtacaaggggttaggtgaaatgaaccctgaccagttgtgcgacacaacaatggacccgaacaagcgcaatattattcaggtgcatttggacgacgttcccgaagcggaaagaatttttaccacgctgatgggcgaggttgtcggtccgcgccgtgagtttatcgaggaaaacgcgctgttggtcagtaacttggacgtttag

SEQ ID NO: 65758 - protein, 555 aa, Unknown
  Obtained from environmental sample
  DOMAIN (338)...(449): Toprim domain
  misc_feature (1)..(555): Xaa is any amino acid
MTRLHAGGKFDKKSYKVSGGLHGVGVSVVNALSEWCEAYVHLDGKVFTQRYKIGIPDSPAKEIQPTGLPYAYSPNRQGTVVRWKADTTIFETTTYNFDALSNRLRELAFLNKGLKITIRDERLSTPKVHDFMFEGGVKSFVGYLNENKTVLYNEPIYLEGVRDDGLGGQVEVETAIQYNDGFNEIMFSFVNDINTREGGTHLVGFKSALTRTLNEFLKKSKHSKKLDETLSGDDVREGLTAVLSVKVPNPQFEGQTKGKLGNSEVKGIVESLVNEQLELYFDKHPDVINNILEKSVLAAKARIAARQARDATRRKNAMDSAGLPGKLADCSEKDPAKCELFIVEGDSAGGSAKGGRDRRTQAILPLWGKMLNVEKQRIEKVITNEKLQPVIASIGAGCGNEFDVSKIRYHKIIIMADADVDGSHIRTLLLTFFYRYMTPLIEQGHVYLAMPPLYKVSYDKKSFYAYDDAEKDRILADSGKDAEKVSVQRYKGLGEMNPDQLCDTTMDPNKRNIIQVHLDDVPEAERIFTTLMGEVVGPRREFIEENALLVSNLDV

SEQ ID NO: 65759 - DNA, 828 bp, Unknown
  Obtained from environmental sample
  misc_feature (1)..(828): n is a, c, g, or t
atgtcgctggcggacagggcggaagaattggggatgactcaccttgcgctgacggatcacgggaatatgtttggcgctatggactttatcgccgcctgcggtcataaaaagcggaaaagacctttaaaacctatagtcggatgcgaggtctatgtctctcccggctcgcgccacgaaaaaaaaggctctgaaaacgaaaataaatattaccaccttgttcttcttgcctataatcgaaccggttattttaatcttgtaaaattatgttccctcgcttacacggaaggcttttattacagacccagaatagatgaagaaattttatcgaaataccgcgaagggcttatcgctctttccgcctgcgcctcaggggaaattccccgctatattcaagccggtaaaattgacgaggctgaaaaaaaagctatttattaccgcgaccttttcggcaaagacgccgacggtaaccccaatttttatcttgagatacaggatcacggcattccgtcgggggtaatgaggggcagcgacttgtctcaaaaagacattaacgaggcggtagcagggatttccaaaaagacgggtattcctcttgtcgcgacaaacgacgttcattatttgaataaggacgattatatttcgcatgacgttcttctttgcattggaacgggaaaagtgcgcacggaagaaaagcgtaaaaagtattacggggatcaattttactttaaaacaggcgatgaaatggcggcgcttttcgccgagtatccgcaggctatcgagaatacggtaaaaatagcgcagaggtgtaacgccgacgtgccaaaatag

SEQ ID NO: 65760 - protein, 275 aa, Unknown
  Obtained from environmental sample
  DOMAIN (1)...(208): PHP domain
  misc_feature (1)..(275): Xaa is any amino acid
MSLADRAEELGMTHLALTDHGNMFGAMDFIAACGHKKRKRPLKPIVGCEVYVSPGSRHEKKGSENENKYYHLVLLAYNRTGYFNLVKLCSLAYTEGFYYRPRIDEEILSKYREGLIALSACASGEIPRYIQAGKIDEAEKKAIYYRDLFGKDADGNPNFYLEIQDHGIPSGVMRGSDLSQKDINEAVAGISKKTGIPLVATNDVHYLNKDDYISHDVLLCIGTGKVRTEEKRKKYYGDQFYFKTGDEMAALFAEYPQAIENTVKIAQRCNADVPK

SEQ ID NO: 65761 - DNA, 372 bp, Unknown
  Obtained from environmental sample
  misc_feature (1)..(372): n is a, c, g, or t
atgggttatacgggatattttttgattgtttgggattttataaaatacgcaaaggagaacaatattcccgtgggccccgggcgcggttcgggggcgggttctatagtcgcttattccctgcgtattaccgatattgatcccttaaaatacggccttatatttgaacgttttttaaaccccgatcgtatttccatgcccgattttgacattgattttgcgaatgagggacgcgaggaagtaataaattatgttacgcgcacttatgggaaggaaagggtagcgcagatcatcacatttggaacattgggcgcaaaagcggttattaaggatgtagccagagtattgggaatatcaattccggatcggaaatga

SEQ ID NO: 65762 - protein, 123 aa, Unknown
  Obtained from environmental sample
  DOMAIN (1)...(123): Bacterial DNA polymerase III alpha subunit
  misc_feature (1)..(123): Xaa is any amino acid
MGYTGYFLIVWDFIKYAKENNIPVGPGRGSGAGSIVAYSLRITDIDPLKYGLIFERFLNPDRISMPDFDIDFANEGREEVINYVTRTYGKERVAQIITFGTLGAKAVIKDVARVLGISIPDRK

SEQ ID NO: 65763 - DNA, 2505 bp, Unknown
  Obtained from environmental sample
  misc_feature (1)..(2505): n is a, c, g, or t
atgattacaaaacttatttcgtttgatcctgaaattactctggataaagcaaaggaagaggagccgcgccttcgtgaactggaaaacgatccgcgttttacggaattattcgccatcgcgcataaattagagggacttaaccgtcattcaagcatacacgccgcaggtatcgtaatcgggaaaaaacccctgattgaactggtgccgctctttcaggaaagggaggaaaagggcggcaatatcgccacacagtacagcatgaactttcttgaagaatgtggtcttgttaaaatggactttctcggcctaaaaaaccttgacatccttaaacattcgcaggaattaatccgcaggcgcggaggcaagtattcaaattttaaaattgaagatattcccgaagatgacaaaaaaacctttaagatgttaggtgaaggaaaaagccacgctgtctttcagtttgcctctgacggtatgcaggatattttaagacagacaaaacctacttccatagaagacttaacagccttaaacgcgatgtaccgtccgggacccatgcagtttattccccgttttgtggaatgtaaaaacggaaaagcgccaatcacttatcccgatccaagccttgaaggaattcttaaagaaacttacggcgttatcgtttatcaggaacaggtcatggaagtggcaagaataatcgccggttacagcatgggaaaagcagacctcctgcgccgcgccatgggaaaaaagaaaaaagaaattcttgacggggaaaaaattccgttcctggaaggcgcggcaaaacaggggtactccgcgcagagggcaggggccattttcgatatgcttgttccgtttgcgggctatgggtttaataaaagccacgccgccgcttattcggtgttggcgtaccaaaccgcctacctaaaagcgaattttcccgcggaatacatggcggctacattgatagtcgaaataaaaagcgcggacaggcttttagacagcattgtcgaaacccgtaaaatggggataagcgtcgatcctcccaatataaattattccgataaactttttacggtagttgacggcagaattgtatacggctttttggggattaaaggcgtaggcgacgcgcccgccgatgaaattgtacgcgccaggaaagacggtcattataaaagttttatggatttcctgaacagggtggatataaaagccgttagtaaaaaagttatagaactgcttattcaaacaggcgcgtttgatgatttcaatgtatctcgcgaaactcttgcgggcaatatggaaaaggcgatagagtacgcgcaaaaaataaaagaggacaaacagcttggacagtcaaacctgttcggcgattcaagcgaagcaggtatgcccgattttaaatttacggaatttccgcctgtaggcagggctgaaagattgaaccttgaaaaaaaattaataggattttatttttctggtcatccgttagacgaatataaagaaatatggcaggatgttgtaagcgtaaatcttggacaagttgaaacttacaagacgggaaactgcgttcttgtgggaataataaaaaatataaagcagataacaaccgctaaaggcggcaagatggcttttgctactcttgaagattacaacggagagattgaagttacgtttttttccggtccgtgggaaaggtgcgagcgtcttatcagcgacgattcggttgtaatattaaaaggaaaaattgattatcaaaaagataaagacagatacagtttcttggcggacggcgttataagcaaacaggaagttccggcggttgtaaaagaagttaaggagcttgacgaaaaaaataaactgcatagaaacacatggctttacatggcggatttaaaaagctcatatatcttacaggcgaaaaaaggtaattatacggttatcggtaatttaaaatcgcttagagattttaaagataaaaatggaaacgacatggcttttggaacattacaggattttgaaggcgagatcgatttagtatttttctccaaagtttacgccgattgccgccatttgcttaaacttgatgaaatgatcgccttaaaaggaagcattgaccctgagaacgaacaaaaacccggaagggtgagttttagagtttccagcatggctgacttgccgtttttaagccgcgccgccgcaaaaaaagccgccgccgacgaaaaagcgcctgtgcccgatcttgtaaaaaataccgagaaacatcttgacgaggtacacataaggcttcatcaaggcgcatctggaaataacgatggaatgctggagttacgcgattatcttgcggagaattcaggttcaaataccatttttattcatattcccgttgagaatgaagaaaaaatagtgcgggcggcgacaggcttggatatgtcaggtaacggatatgtaatggaaggtttaaaacaatgtaaatgcgttgcggaagcgtggaggaaatga

SEQ ID NO: 65764 - protein, 834 aa, Unknown
  Obtained from environmental sample
  DOMAIN (646)...(727): OB-fold nucleic acid binding domain
  misc_feature (1)..(834): Xaa is any amino acid
MITKLISFDPEITLDKAKEEEPRLRELENDPRFTELFAIAHKLEGLNRHSSIHAAGIVIGKKPLIELVPLFQEREEKGGNIATQYSMNFLEECGLVKMDFLGLKNLDILKHSQELIRRRGGKYSNFKIEDIPEDDKKTFKMLGEGKSHAVFQFASDGMQDILRQTKPTSIEDLTALNAMYRPGPMQFIPRFVECKNGKAPITYPDPSLEGILKETYGVIVYQEQVMEVARIIAGYSMGKADLLRRAMGKKKKEILDGEKIPFLEGAAKQGYSAQRAGAIFDMLVPFAGYGFNKSHAAAYSVLAYQTAYLKANFPAEYMAATLIVEIKSADRLLDSIVETRKMGISVDPPNINYSDKLFTVVDGRIVYGFLGIKGVGDAPADEIVRARKDGHYKSFMDFLNRVDIKAVSKKVIELLIQTGAFDDFNVSRETLAGNMEKAIEYAQKIKEDKQLGQSNLFGDSSEAGMPDFKFTEFPPVGRAERLNLEKKLIGFYFSGHPLDEYKEIWQDVVSVNLGQVETYKTGNCVLVGIIKNIKQITTAKGGKMAFATLEDYNGEIEVTFFSGPWERCERLISDDSVVILKGKIDYQKDKDRYSFLADGVISKQEVPAVVKEVKELDEKNKLHRNTWLYMADLKSSYILQAKKGNYTVIGNLKSLRDFKDKNGNDMAFGTLQDFEGEIDLVFFSKVYADCRHLLKLDEMIALKGSIDPENEQKPGRVSFRVSSMADLPFLSRAAAKKAAADEKAPVPDLVKNTEKHLDEVHIRLHQGASGNNDGMLELRDYLAENSGSNTIFIHIPVENEEKIVRAATGLDMSGNGYVMEGLKQCKCVAEAWRK

SEQ ID NO: 65765 - DNA, 615 bp, Unknown
  Obtained from environmental sample
  misc_feature (1)..(615): n is a, c, g, or t
atgcgttgcggaagcgtggaggaaatgatgcgttttatttttggaattctggctttagtgacaggtatttactcattaataatttttatacgaataattttttcatggtttggaagcatggtttacggaaaacccgtagagataataaataaaattacagacccgtatcttgactggtggagggaaaaactgcgtttaaatgtaggaggttttgatttctcggtaattccggcggttgtatttctttcattcattcaaaatgtttttaaaattctttcaataacagaaaaaataactatcggttttttgcttgcgcaaatattattatcgttatggaatattttttcttttatcatagtattttttattattgtaattgtcatacgcgctataggttatctgcataacggcgatatatacagtcctttctggggttttatagattctatctcacagccgttattgtacagaatgaacagaatattttttggcaaaaagataggaaattacttagcgggaatatttttatcgttattatttttagttatattacttgtcggcggaaagtttataatattaattctttccggtattttatataggctgcctatataa

SEQ ID NO: 65766 - protein, 204 aa, Unknown
  Obtained from environmental sample
  DOMAIN (10)...(92): YGGT family
  misc_feature (1)..(204): Xaa is any amino acid
MRCGSVEEMMRFIFGILALVTGIYSLIIFIRIIFSWFGSMVYGKPVEIINKITDPYLDWWREKLRLNVGGFDFSVIPAVVFLSFIQNVFKILSITEKITIGFLLAQILLSLWNIFSFIIVFFIIVIVIRAIGYLHNGDIYSPFWGFIDSISQPLLYRMNRIFFGKKIGNYLAGIFLSLLFLVILLVGGKFIILILSGILYRLPI

SEQ ID NO: 65767 - DNA, 792 bp, Unknown
  Obtained from environmental sample
  misc_feature (1)..(792): n is a, c, g, or t
atggccgttggttgtcgtccaaatatggttctagtgtccattttggttccggctgttttgtggaagcgcagatcgtggaaattggtgccatttattctgattccgtacatcatgatcgcgataccgctatgcgtatataattacgttcgttttgagtctatttttgaattcgggcaaaagtactgtaccagccttactaatggaacaggggtacagttattgaatcctcttggaaaaattcatagaatgtttgtaattattgtattttatctctttaggttatacagatattcgttgcattttccttttgttgaccttgttccgccgccaggctttgttacgtcggtgtcgggttttgtttggacatataacagcggcggcgggttaataaattttccgatactattttgcttattctacctatttaagaatatttttcgtaaagatgaaccgagcgttttccacctatcgtcggtatttatcattattgccgccgccatgctcgtcttgtactcatatatgggtatatttcacggaagatatttattggattgtgcgattttttttatacttccgtcattgttatgcgcgtactattggtgcgatgacaagcgcgacgatgtatatcacggcttgattcgcctaaaggttatatacgtattacttgtagtaagcatatttgtagggggatttctgtttgtggctggggccgaccatattgatatgcattattacgactcggcattgtaccgttaccttgagtactcactcggaatcatcgagcgattttga

SEQ ID NO: 65768 - protein, 263 aa, Unknown
  Obtained from environmental sample
  misc_feature (1)..(263): Xaa is any amino acid
MAVGCRPNMVLVSILVPAVLWKRRSWKLVPFILIPYIMIAIPLCVYNYVRFESIFEFGQKYCTSLTNGTGVQLLNPLGKIHRMFVIIVFYLFRLYRYSLHFPFVDLVPPPGFVTSVSGFVWTYNSGGGLINFPILFCLFYLFKNIFRKDEPSVFHLSSVFIIIAAAMLVLYSYMGIFHGRYLLDCAIFFILPSLLCAYYWCDDKRDDVYHGLIRLKVIYVLLVVSIFVGGFLFVAGADHIDMHYYDSALYRYLEYSLGIIERF

SEQ ID NO: 65769 - DNA, 2850 bp, Unknown
  Obtained from environmental sample
  misc_feature (1)..(2850): n is a, c, g, or t
atgaaagcgtattatgaatatgaagacggaactttttgggcgatacggacggaaggcggcgattgctttacttgcgaaggaagcaaatatgttgatttttggcccgaaagaatgttggaagccggaaacggagaaggctggcgtacgcctaacgccaaaaaaatcacttttgaaacgcctgaagaggcggaacaggaagccgcaaaaatggcggctgaaaaaagcgttaacgcggtaaaacaggacgcggaattctggcgaatcgccattgaaatcaactccatgctgcttttcttcgttcccgatgaattcaagacccgcgaattgtgctcccttgccgccgcgagagacggcaacgcgctccaatatgttccccctcaaatgagaagccccgaaatgaacaaacaggcggtatttaacatttcttacgcgcttgagtatgtcgatgaaaatgaaagaaccgaagaactgtgtcaaatggcgttaaaacagtacggcgcagtccttgaatttgttcctgaaaaatttaaaacagcgaaactctgtttggaagctgtgaaaaatgacaactgggcttttgaatttgtaccggaaagcctgaaaacaccggagttgtgtacggaagctgtaaagaaagaccaccgtatgattaaatttgtgcctgaagctctgaaaaccaaaaagctgtgccgccttgcggtatcccctacaaatgatttatgttttatagcttcaaaagaaggaatcaaatgccccctcgcgtacattcctcaggaatttattacaaaagaactctgccttgacgcggtcgcggatgagtcggaatcggtaaaatatctgccggataaatttaaaacttacgatatataccttgcggcggtaaaaaaatacggatggacgatggaacatgtgcctgaagaatttaaaacttacgaactctgccttgaggcggtaaaaaggagcgggcgcatgttaaaatatgtcccggaagaacataagtcggcggagcttctggatgccgccctgggaaataacacaaacggaagcgcgcttgaattcgtcccggaagaatacaaagatgagaaagtctgccttgacgctgtaaagaacgactggcagggattggcaatcaagcatgttcccgcgtctcttttgaccaaagaattctgcggaaaagcttttgagttaaacgcaaaagcattgaaacacatacccaaagaatttatcacaaagcaaatgtgcgagaagggcgcccgggaagatgactactccctaagatacattcccgccgaattccccgtcgaaaaaagtattgccggtgtaattaaaaacaacgggctttcgctgcgcgaagttgaagaaaaacaaaaaacagaacagctttgcctttcggcggtaaaaagtcacggcggcgctcttaggtatgtgccttacaagttacgcactccggaaatttgctttgcggctgttaagcgttacgaaagcgctttagagtatgtgccagaagcgcttaaaacatacaaaatctgcattgcggcgatccgagggtattcaggcaaatgggcgatacggcatgttcccgagcatataagaaccgctgatttttacgctaaatacatgacagacaccggaggttattcatttaacacaataattccgccggaaactatgtcggaagaaattaacagaaaggcagtcagaaaaaacggcaaagcgcttaacgccgttcccgaggagggaagaacttttgaactatgcgttgaagccatacaaaacgaaagaaccataggttcggcgcttatatacgttccggataaattcaaaactcccgaattctgccttagctgtgtccgcattaacggtataaatcttaaaggcgttcccgaagcgcttaaaacctatgagctttgtcttgaagcggtcatggagaacggcagcgcgctgaaatatgttccgcctcatattttgacaatggaaattattcttgccgccatcagccaaaacagcgacgccattgaatatgttccttccgcgtttcagactgatgaagtttacatagaagccgtcaaagaccataaattagggttaattaataacaatgtcccggagaaatattacacaaaagaaaattgccttaccatgttaagcaagcatccccttctagtctccttaattgtggaaagcttgccgaaatccgtcaaaaccgatgattttttcattgccgcagcccgtttgaacggggaaatgcttgaacatgtgcctgaaagacttcgtacacaggaactttgtttagacgctgttaaagataacggtttcgcgcttaaatttacgcctcctgaattcataacagaaaccctctgtcatgccgctgtggaaagctttcccttagcgctaaagttttttcctccaaaattgaagacaagggaaatctgccgctttgcagtagaaaagaacggaagagccattgaatatgtgccggtaaaatttataacgggcgatttgtgccgcaaggcggtagaatccaacgccgacgcaattaaatacatacccgaaaagcaccgcacagaagaactatggcgcgtagctatctccaaacgcggctattggctgaaagaactgcccgcttcattgatgtctgaagaattttgccgcatggcggttacaaaccgaggcacggctcttgaatatgtgccggacaaattcaaaacaaaggaactgtgttttgaagcggtgcgtcaaaacggacacgctcttaattttgttgatgtcaataaacttaccaaagaggaatatactgaaatatgcagactttcgcttgagttacataaggatgataacgatgttgaataa

SEQ ID NO: 65770 - protein, 949 aa, Unknown
  Obtained from environmental sample
  misc_feature (1)..(949): Xaa is any amino acid
MKAYYEYEDGTFWAIRTEGGDCFTCEGSKYVDFWPERMLEAGNGEGWRTPNAKKITFETPEEAEQEAAKMAAEKSVNAVKQDAEFWRIAIEINSMLLFFVPDEFKTRELCSLAAARDGNALQYVPPQMRSPEMNKQAVFNISYALEYVDENERTEELCQMALKQYGAVLEFVPEKFKTAKLCLEAVKNDNWAFEFVPESLKTPELCTEAVKKDHRMIKFVPEALKTKKLCRLAVSPTNDLCFIASKEGIKCPLAYIPQEFITKELCLDAVADESESVKYLPDKFKTYDIYLAAVKKYGWTMEHVPEEFKTYELCLEAVKRSGRMLKYVPEEHKSAELLDAALGNNTNGSALEFVPEEYKDEKVCLDAVKNDWQGLAIKHVPASLLTKEFCGKAFELNAKALKHIPKEFITKQMCEKGAREDDYSLRYIPAEFPVEKSIAGVIKNNGLSLREVEEKQKTEQLCLSAVKSHGGALRYVPYKLRTPEICFAAVKRYESALEYVPEALKTYKICIAAIRGYSGKWAIRHVPEHIRTADFYAKYMTDTGGYSFNTIIPPETMSEEINRKAVRKNGKALNAVPEEGRTFELCVEAIQNERTIGSALIYVPDKFKTPEFCLSCVRINGINLKGVPEALKTYELCLEAVMENGSALKYVPPHILTMEIILAAISQNSDAIEYVPSAFQTDEVYIEAVKDHKLGLINNNVPEKYYTKENCLTMLSKHPLLVSLIVESLPKSVKTDDFFIAAARLNGEMLEHVPERLRTQELCLDAVKDNGFALKFTPPEFITETLCHAAVESFPLALKFFPPKLKTREICRFAVEKNGRAIEYVPVKFITGDLCRKAVESNADAIKYIPEKHRTEELWRVAISKRGYWLKELPASLMSEEFCRMAVTNRGTALEYVPDKFKTKELCFEAVRQNGHALNFVDVNKLTKEEYTEICRLSLELHKDDNDVE

SEQ ID NO: 65771 - DNA, 2406 bp, Unknown
  Obtained from environmental sample
  misc_feature (1)..(2406): n is a, c, g, or t
gtggaaagcctttccgcgtacgcgcggcagttcctcgggcgcatggacaagcccgatctggattatatagaggggctttccccggcgatttcaatagagcagaagaccacccaccgcaacccccgttccaccgtgggaaccgtcaccgagatttacgattactaccgccttctctacgccaggataggaatcccccattgcccgatctgcggcagggagatacgggaacagccggtagattccattatcgaaagcattttgcaaatgggcgaggggacaagggtgcagcttctggcgcctgtaatccgcggaaaaaagggagagcaccagaaaataatcgaggacgcccgcaaggccggattcgcaagggcgagaattgacggggttccagtggagcttgacgaaagcataaggctggacaagcagaaaaagcacagcgttgacattatcgttgaccgccttgtgatcgggcccgacatacgctcaaggctggctgaatccgtggaaaccgcgctgcaaacctcagacggccttttgctggtactgagccagagccaggaaaattcctcgaaaagcggaagcgacaaaagttccgccaggggcgtaagcgcccaaagggcgaccgaaaatttcttttcccaaaaaaacgcctgcccggactgcggcgtatccattccggaattgcagccgcgccttttttcgtttaacaaccccttcggcgcctgcccaagctgttccggcctgggttccaggctggagtttgatcctgaccttgtcatgcccaatccctcgctttcctttaatgaggggggcattgttccctataaccccgacagcgcctggcaccgcagccgctttgaaagcctcgcgaagcattataaattcagcctggacacgccgcttaagaccctgccaaaaaaaatcatggacgcgatcctgtggggcagcagggatgaaataaaagtacgctacaataaccgcgaaggcaccggccattttgaataccagtccaggttccccggagtgctggaagatttgaaacgccgttaccttgaaacccagtctcccggcgtaaaggaatggcttgagaaattcatgagccagaagcactgcgaggactgcgaaggcaagaggctgaagccggaggtgctgggcgtgaccgtcgccggcaagaacatctgggagctttccagcctttccgtaaccgactcgctgaaattttttgaatcggtcaaattcaacaagaacgagaaaaaaatcgcctaccagatattaaaggaaatcacggcccggctcggctttatgcgcaatgtcgggcttgactacctcagccttgagcgcaaagcctcaacgctttccggcggcgaggcgcagaggataaggctggccacgcagatcggatcaagcctcgtgggggtgctgtacatccttgacgagccctccatcggcctgcaccagagggacaataagcggctcatcgacacgcttttgtacctgcgagaccttggcaataccctcatcgtcgtggaacatgacgagcagaccctccgcgtagcggatcacatcgtagatctcgggcccggcgcgggcgtgcatggcggcaaggtcgtcgcccagggcagacccgaagaaattatgaagataccggaaagcctgaccgggcagtacctcgcgggaaacctcgccattgaaattccccaggaacggagaaagggaaacggtaaattcttaaagatgaggggggtaaacgaacataacctgaaaaatatcaatgtggatattccgctgggcgttttcacctgcattaccggcgtatcaggctccggcaagtccacgcttctgtccgacgtgctgtacccggctctggcaaacaaggtatacggctcgaatcatcccgaaggaagctataaagatattaaaggtgttgaatttattgacaaggttattgacatagaccagagtcccataggcaggacgccgcgttccaacccgatcacttatgtcggcgggtttaccgcgataagggacatcttcgcgaatcttcccgagtcaaaaatgaggggctacaggcccgggcgtttttcgtttaacgtcaggggcggcagatgcgagaactgcgagggcggcgggacaataagaatcgaaatgaactttctgcccgacgtgtatatcacctgcgacgtgtgtcagggacggcgcttcaaccgcgagactcttgaaatacggtataaaggcaggaatatagccgaagtgctggacatgaccattgaggaagcggcggaatttttcgctccccatcccccaggtcgcacgcaagatgcagaccctgctttcggtggggcttggttatatcaagcttggccagtccgcgcttaccctttcgggtggcgaggcgcagcgcgttaa

SEQ ID NO: 65772 - protein, 801 aa, Unknown
  Obtained from environmental sample
  DOMAIN (376)...(528): ABC transporter
  misc_feature (1)..(801): Xaa is any amino acid
MESLSAYARQFLGRMDKPDLDYIEGLSPAISIEQKTTHRNPRSTVGTVTEIYDYYRLLYARIGIPHCPICGREIREQPVDSIIESILQMGEGTRVQLLAPVIRGKKGEHQKIIEDARKAGFARARIDGVPVELDESIRLDKQKKHSVDIIVDRLVIGPDIRSRLAESVETALQTSDGLLLVLSQSQENSSKSGSDKSSARGVSAQRATENFFSQKNACPDCGVSIPELQPRLFSFNNPFGACPSCSGLGSRLEFDPDLVMPNPSLSFNEGGIVPYNPDSAWHRSRFESLAKHYKFSLDTPLKTLPKKIMDAILWGSRDEIKVRYNNREGTGHFEYQSRFPGVLEDLKRRYLETQSPGVKEWLEKFMSQKHCEDCEGKRLKPEVLGVTVAGKNIWELSSLSVTDSLKFFESVKFNKNEKKIAYQILKEITARLGFMRNVGLDYLSLERKASTLSGGEAQRIRLATQIGSSLVGVLYILDEPSIGLHQRDNKRLIDTLLYLRDLGNTLIVVEHDEQTLRVADHIVDLGPGAGVHGGKVVAQGRPEEIMKIPESLTGQYLAGNLAIEIPQERRKGNGKFLKMRGVNEHNLKNINVDIPLGVFTCITGVSGSGKSTLLSDVLYPALANKVYGSNHPEGSYKDIKGVEFIDKVIDIDQSPIGRTPRSNPITYVGGFTAIRDIFANLPESKMRGYRPGRFSFNVRGGRCENCEGGGTIRIEMNFLPDVYITCDVCQGRRFNRETLEIRYKGRNIAEVLDMTIEEAAEFFAPHPPGRTQDADPAFGGAWLYQAWPVRAYPFGWRGAAR

SEQ ID NO: 65773 - DNA, 345 bp, Unknown
  Obtained from environmental sample
  misc_feature (1)..(345): n is a, c, g, or t
gtgctttttctgcttgtccagccttatgctttcgtcaagctccactggaaccccgtcaattctcgcccttgcgaatccggccttgcgggcgtcctcgattattttctggtgctctcccttttttccgcggattacaggcgccagaagctgcacccttgtcccctcgcccatttgcaaaatgctttcgataatggaatctaccggctgttcccgtatctccctgccgcagatcgggcaatgggggattcctatcctggcgtagagaaggcggtagtaatcgtaaatctcggtgacggttcccacggtggaacgggggttgcggtgggtggtcttctgctctattga

SEQ ID NO: 65774 - protein, 114 aa, Unknown
  Obtained from environmental sample
  misc_feature (1)..(114): Xaa is any amino acid
MLFLLVQPYAFVKLHWNPVNSRPCESGLAGVLDYFLVLSLFSADYRRQKLHPCPLAHLQNAFDNGIYRLFPYLPAADRAMGDSYPGVEKAVVIVNLGDGSHGGTGVAVGGLLLY

SEQ ID NO: 65775 - DNA, 489 bp, Unknown
  Obtained from environmental sample
  misc_feature (1)..(489): n is a, c, g, or t
ttgaggaagcggcggaatttttcgctccccatcccccaggtcgcacgcaagatgcagaccctgctttcggtggggcttggttatatcaagcttggccagtccgcgcttaccctttcgggtggcgaggcgcagcgcgttaaactcgccctggagctttccaggcgttcgacaggcagcacgctgtatatacttgacgaaccgaccaccggccttcatttcgcggatgtcaaacaactaatggacgttatacagcggctggctgatcagggtaacacggtgatcatgatcgagcataaccttgacgtgcttttacaggccgattttataattgacctggggcccgaggggggggacaagggcgggcaggtcgtggcgacaggtacgccggaacaggtagcagcctgcgcggcttcctataccggtcagtatatcggggaaatgctggagcgggagcgtcattctggctcttccggaaaacggagaaaataa

SEQ ID NO: 65776 - protein, 162 aa, Unknown
  Obtained from environmental sample
  DOMAIN (4)...(116): ABC transporter
  misc_feature (1)..(162): Xaa is any amino acid
MRKRRNFSLPIPQVARKMQTLLSVGLGYIKLGQSALTLSGGEAQRVKLALELSRRSTGSTLYILDEPTTGLHFADVKQLMDVIQRLADQGNTVIMIEHNLDVLLQADFIIDLGPEGGDKGGQVVATGTPEQVAACAASYTGQYIGEMLERERHSGSSGKRRK

SEQ ID NO: 65777 - DNA, 1317 bp, Unknown
  Obtained from environmental sample
  misc_feature (1)..(1317): n is a, c, g, or t
atgaaattcagagtcataatcactatactgatattttttttcctgattatttcttttctgtctgcccaggagagtgaagctccccctgagcaggaacccgtcgccttaacgcctgagcaaaaccgaatccttatggacatcagaacctcgaccctttccgagcttgcggcctgggccaaaagcctgaagctgtccgaagccggtaccagcgccgatctcgcgaagcgcataagggattattacaagatagccgaacaggggcagacggtaacagatgaaaaacgaaagatcatcacgattgaatccgcccgcactaccgaatacttcaagattgaagttgtggatgaggaatacgcccgcttaagcggagaggtgagggtcagccttaaagacggcgaagcgattcaccagataagggcctggaacattctttttaaccgtaccaggaatatacttaccgcgtcgggcggcgtcgagtatataaagacggaaggcgataagatagaaaccttcaggggcgattccataactgtcgacatcgacaactggtcaagcgtattcctcggcggcgtatcggaacgatccctgcagagcgacaataccacctatctgttcgctggaacagtaatttcacgcgatgaggaagaagtcaccgttctgaacagggccacgatcagcagcgccaacaaccccgaatccctgtggtcgcttaacgcctcgcgcgtatggcttcttccgggatccgatttcgccattcttaacgcggtgcttaaagtcggcgaaataccggtaatgtatatacccttcttttattttccggcggacgaagttatttttcatcccgttatcggttcccgcacaagggaggggcacttcatccagactactacatacattctgggccgtcccaaagcgtcttccgcttcccagagttcgcttacgaaaatactgggcaattcatccgatatggaaaagaagcgggaaggattgtttctacggagtactggaaaaaaaatgaaggatcccgataaagtcagcttaaaggcgatgtttgatcattatgttaatctgggcacttatatcggggcggatcttacattgccggcatacaagattcttggcgcgacaaacatcagcgtgggcatcggcctgacgcggactctcgccctgcagaacgggagttatacgccgtttttccccaattatgacggtgagattgactggaaccactcaaactttttttcaatggatgtcccgttcaggtacaggtttaagggctctaacacaataagcgggacttatggcagtttttcctaa

SEQ ID NO: 65778 - protein, 438 aa, Unknown
  Obtained from environmental sample
  SIGNAL (1)...(22)
  misc_feature (1)..(438): Xaa is any amino acid
MKFRVIITILIFFFLIISFLSAQESEAPPEQEPVALTPEQNRILMDIRTSTLSELAAWAKSLKLSEAGTSADLAKRIRDYYKIAEQGQTVTDEKRKIITIESARTTEYFKIEVVDEEYARLSGEVRVSLKDGEAIHQIRAWNILFNRTRNILTASGGVEYIKTEGDKIETFRGDSITVDIDNWSSVFLGGVSERSLQSDNTTYLFAGTVISRDEEEVTVLNRATISSANNPESLWSLNASRVWLLPGSDFAILNAVLKVGEIPVMYIPFFYFPADEVIFHPVIGSRTREGHFIQTTTYILGRPKASSASQSSLTKILGNSSDMEKKREGLFLRSTGKKMKDPDKVSLKAMFDHYVNLGTYIGADLTLPAYKILGATNISVGIGLTRTLALQNGSYTPFFPNYDGEIDWNHSNFFSMDVPFRYRFKGSNTISGTYGSFS

SEQ ID NO: 65779 - DNA, 597 bp, Unknown
  Obtained from environmental sample
  misc_feature (1)..(597): n is a, c, g, or t
gtggctatactcggtatccactttgcgctcatggataatatccgttacgccctcgtctgccttatgatctccggcgtctgcgatatgttcgacgggcgggtggcctcgctgttcaagaaacgcaatacccgcgagaagcactacgggatacagatagactccttagccgacatcatcagtttcggggtgctgccggcggccatagggtacggggagcgctactacatggcccacaagttaatctccctcggctggttcgacacggcggtcttccccatatacctgatggccgcgctaatacgcttggcctactacaacgtcatagagacggaactccacgggcagaacaagaagcgcacctactacgaagggctgccggttaccagcgtggcctttataataccgctggtctacgctttgtgccacatattcaacaagtctatattcggcatctacaacatactgctcatctttctgtccgtggcgttcgtgctcaagataagggtgcctaaaccgcgcgccggtacgcagatggtgctcgtcgcgctcgggctgcctatcatcatatatatcctcttcctgtgctttagcaaatga

SEQ ID NO: 65780 - protein, 198 aa, Unknown
  Obtained from environmental sample
  DOMAIN (18)...(170): CDP-alcohol phosphatidyltransferase
  misc_feature (1)..(198): Xaa is any amino acid
MAILGIHFALMDNIRYALVCLMISGVCDMFDGRVASLFKKRNTREKHYGIQIDSLADIISFGVLPAAIGYGERYYMAHKLISLGWFDTAVFPIYLMAALIRLAYYNVIETELHGQNKKRTYYEGLPVTSVAFIIPLVYALCHIFNKSIFGIYNILLIFLSVAFVLKIRVPKPRAGTQMVLVALGLPIIIYILFLCFSK

SEQ ID NO: 65781 - DNA, 882 bp, Unknown
  Obtained from environmental sample
  misc_feature (1)..(882): n is a, c, g, or t
atgaatacccgcgacctcaaaacgctcgagatatcgcgacgggacaacctctttatccggttcctctacaacacggcgccgggaagggtcgctctgcgggtgtttgcgacaaggacggtctccaagattttcggcgtctttatgaacagccggatatcaaggcttttgatatggcggttcattcggcggaaccgcattaacatgaacgactacgccgataaaagatacgtctccttcaacgactttttcacgagaaaggtcaaggacgggcggcggagcttctcaaagattctgagcgacctgccggcgccgtgcgacgggaagctgacggcctacaatatagccgctaacagcacgtttctgataaaaggctccatgtacaccataaacagcttgctacaggacagggtcttggccgacgagtttgccggcggggtctgcctcatcttcaggctgacgccggacgactaccatagatacgccttcatcgacgacggggagatcgtatcgcgcaaaagaatcaaaggactcctgcacaccgtgcgccccatcgcctgcaaacgctacaacgtgtacgctaaaaacacccgcgaatacgtggtgatgaacaccaagcgcttcggcaaagttatacagatggaggtgggggcgctcttcgtggggcgcatctcgaatcatccgcttaaggacgccttccggcgcggcgacgagaaagggatgtttgagttcggcggctccaccgtagtcatgctcttccaacgggacgcggtcgtgatagacgacgttatctacgagaacacgcaccgcaatagggagaccgtcgtcaagatgggctgcaagatcggagagaagtcgttgcgggtgaagcggtggttcaaatga

SEQ ID NO: 65782 - protein, 293 aa, Unknown
  Obtained from environmental sample
  DOMAIN (79)...(283): Phosphatidylserine decarboxylase
  misc_feature (1)..(293): Xaa is any amino acid
MNTRDLKTLEISRRDNLFIRFLYNTAPGRVALRVFATRTVSKIFGVFMNSRISRLLIWRFIRRNRINMNDYADKRYVSFNDFFTRKVKDGRRSFSKILSDLPAPCDGKLTAYNIAANSTFLIKGSMYTINSLLQDRVLADEFAGGVCLIFRLTPDDYHRYAFIDDGEIVSRKRIKGLLHTVRPIACKRYNVYAKNTREYVVMNTKRFGKVIQMEVGALFVGRISNHPLKDAFRRGDEKGMFEFGGSTVVMLFQRDAVVIDDVIYENTHRNRETVVKMGCKIGEKSLRVKRWFK

SEQ ID NO: 65783 - DNA, 579 bp, Unknown
  Obtained from environmental sample
  misc_feature (1)..(579): n is a, c, g, or t
atgaaaataaaaatctgcggcttgaaaaattctgttgatgtggattatgtgaacgaagccatgccagattatataggttttgtgtttgccgaaagcaaacggcgcataagcccgcaaaccgctacggaatttaagaataggttaagccccaaaattaccgctgtcggtgtttttgtgaatacggaaatttccttgatattgcaattatatagtgctggcgttataaatatagcgcagttgcacgggagcgaaagcgaagcctacatagatgaacttaaaaaaacttgcgacattccagtaataaaggctatcaatgccgaagtccgcccccctgccaatgcagactatctgctctttgacaatggcaaaggcgggagtggcgaaagttttgactggagtttaatcccaaaatgcagcaaagattattttttggcaggcggaataaatttggacaacatcaagaaagctatgaaattaaaaccctacggtatagacttgagcagcggtactgaaacaaacggcaaaaaagatagggaaaaaataatccagcttgtgaaaattgcaagggaggaaatatga

SEQ ID NO: 65784 - protein, 192 aa, Unknown
  Obtained from environmental sample
  DOMAIN (3)...(187): N-(5'phosphoribosyl)anthranilate (PRA) isomerase
  misc_feature (1)..(192): Xaa is any amino acid
MKIKICGLKNSVDVDYVNEAMPDYIGFVFAESKRRISPQTATEFKNRLSPKITAVGVFVNTEISLILQLYSAGVINIAQLHGSESEAYIDELKKTCDIPVIKAINAEVRPPANADYLLFDNGKGGSGESFDWSLIPKCSKDYFLAGGINLDNIKKAMKLKPYGIDLSSGTETNGKKDREKIIQLVKIAREEI

SEQ ID NO: 65785 - DNA, 1608 bp, Unknown
  Obtained from environmental sample
  misc_feature (1)..(1608): n is a, c, g, or t
ttggcaagcacagccgatggcagattgatttttagccagcacggcatggcggaatacaaagctatagctaggaaaacaggattttcgctgaacaccaagtggaaagatttatctaagaatgctcaggaggcagttttagaagtcatagttcccattctccaggggctttgggaccagtggcatataagtttgcttcaaaaatatatgctcattgagccttgcagcgagtgccacggagagcgaatttgcgcggcggcacgggcggttaagtttcacggaaagggaatttctgaaatttcctctttgtctgtggaggcttcagtgaaatttttcgatgagcttgaattgagtgaaaaagaaaagagaattggggcggaaatattcagggagattaaaggacggcttggatttttgcaggctgttgggcttggatatttaacgctcaatagaggttcagcaacactcagcggcggcgaagcccagcgaattcgccttgctgggcacgtgggtgccggcttgcaaggcgttctctatgttttagacgaacccagcattgggcttcacgcacgcgacaatgaaagacttttggctcttttggaaaaacttaggagccaaggaaatagccttattgtggttgagcacgatgaagaaaccataaaacgcgcagactgcattgcagacatangtcccggtgcggngagcgaaggtggcttgcttgtcgcgcttgggaacatcaaagatttgcaaaaaaatcctagctctttgactggtgcctatttaagcggaaaaaagaaaattgaaatgccaaaaaaacggcgagaggtgaataaagaaacaccgagaattaaaatacttggagcacgtgcaaataatttgaaaaacataaatgttgaaattcctcttactgttttaacggttgtaacaggagttagcggttctggcaaaagtactttgataaaccacattctaaaaaaagcactcgcaaaaaaattccacggtgcttatgaggaacctggtccgcacaaaagcattgaaggattggaacacatagacaaggttatagaaatagaccaaagccccataggtagaacgccacgttccaatcccgcaacatacacaaaggtttttgatgaaataaggaatttatttgcaagcctgcccgaaagcaaggttagaggtttttcaaagagcaggttcagtttcaacgttcacggcggaaggtgcgaaaaatgctgcggagcaggtgtggtggaaatagagatgcaaattttgccaaatgtgcaaataacctgcgatgagtgtggcggcaaacgctttaacgatgcaactcttgaagttttttacaaaggcaaaaacatatacgatattttggaactcagcattagcgaggcttttgaatttttcaaggcttttcccaagatagcaaaaccgttgaatgttctgaaagatattgggcttgggtatgttaaacttgggcaaccaagtacaacactcagcggtggcgaagcccagcgaatgaaaatttccaccgaactccgcagacccggaactggaaaaaccctttacctgctagacgaacccacaccggacttcattttgaggatataa

SEQ ID NO: 65786 - protein, 535 aa, Unknown
  Obtained from environmental sample
  DOMAIN (79)...(231): ABC transporter
  misc_feature (1)..(535): Xaa is any amino acid
MASTADGRLIFSQHGMAEYKAIARKTGFSLNTKWKDLSKNAQEAVLEVIVPILQGLWDQWHISLLQKYMLIEPCSECHGERICAAARAVKFHGKGISEISSLSVEASVKFFDELELSEKEKRIGAEIFREIKGRLGFLQAVGLGYLTLNRGSATLSGGEAQRIRLAGHVGAGLQGVLYVLDEPSIGLHARDNERLLALLEKLRSQGNSLIVVEHDEETIKRADCIADIXPGAXSEGGLLVALGNIKDLQKNPSSLTGAYLSGKKKIEMPKKRREVNKETPRIKILGARANNLKNINVEIPLTVLTVVTGVSGSGKSTLINHILKKALAKKFHGAYEEPGPHKSIEGLEHIDKVIEIDQSPIGRTPRSNPATYTKVFDEIRNLFASLPESKVRGFSKSRFSFNVHGGRCEKCCGAGVVEIEMQILPNVQITCDECGGKRFNDATLEVFYKGKNIYDILELSISEAFEFFKAFPKIAKPLNVLKDIGLGYVKLGQPSTTLSGGEAQRMKISTELRRPGTGKTLYLLDEPTPDFILRI

SEQ ID NO: 65787 - DNA, 831 bp, Unknown
  Obtained from environmental sample
  misc_feature (1)..(831): n is a, c, g, or t
gtggcgttccccccgttagctctccgagcggaaaaaacggggggacgaatggtgatttttgttaaaaaaatctccattcaaggggggattttctatattccccttgtgccatttttactagaaacaaaagaagtatcaaaagcctatagagaaacgggcggaagtcttgagatattgaagaatgtcaattttacgttgagcgaaggtaatattgctgtgctaactggacctagcggttctggcaaatccacttttttgaacatagtgggggctttggacaggccaaccggaggcttggttttctttaacggcagggaaatgtcaaaattttcccgtaaggaaacaaacagttttcaccgcaaaaatttgggttttatgtttcagtttcatcacctgctcgcagaattcaccgcatatgaaaatgtgcttatgccagctagaatagctcatcaaaattataacgaaagccgtgaaagagcattggaacttttgagcatcgttgggctttctgagcgaattggccacttgcctcgcgagctttctggcggtgaacgccaaagggttgcactagcacgtgcccttatgaataggccaagtttgattatagcagacgaacccagcggaaacttagatgaaaaaaatgcagaggtgctaaaatcccttattttggaactcaataaaaaatatgggcaaacatttttaattgcaactcacgatatggatttggcagggatagccaccgataggtggctcgttgcgcacggaacaatcatggtgaatacaattgcctacgaaaggcgcaaatctgttcgaacatctataggcacgtag

SEQ ID NO: 65788 - protein, 276 aa, Unknown
  Obtained from environmental sample
  DOMAIN (69)...(255): ABC transporter
  misc_feature (1)..(276): Xaa is any amino acid
MAFPPLALRAEKTGGRMVIFVKKISIQGGIFYIPLVPFLLETKEVSKAYRETGGSLEILKNVNFTLSEGNIAVLTGPSGSGKSTFLNIVGALDRPTGGLVFFNGREMSKFSRKETNSFHRKNLGFMFQFHHLLAEFTAYENVLMPARIAHQNYNESRERALELLSIVGLSERIGHLPRELSGGERQRVALARALMNRPSLIIADEPSGNLDEKNAEVLKSLILELNKKYGQTFLIATHDMDLAGIATDRWLVAHGTIMVNTIAYERRKSVRTSIGT

SEQ ID NO: 65789 - DNA, 1113 bp, Unknown
  Obtained from environmental sample
  misc_feature (1)..(1113): n is a, c, g, or t
ttgcgctaccgaggctaccccatagaagagcttgccgaaaaaagcacctttatagaaacagcttggacaattatatggggcaggctcccaactcaaaccgagctgcgccacttttccttgcttttaacagagcacgagcttatgcacgagggtttaaggcaccactttgacgggtttcccattgatgcgccgccaatggcaattttaagcgcaatgataaactcaatgagctgctacgataacgctttgctccgcaaccacctgaacgatggtgaatttgaaggagcggctgcaaatctaatttcaaaggttcgcaccattgccgctgctgcatataaaatgagcacaggcagacccattatttatgcggtgccggaatacggctatgtgaataattttttgcacatgatgttcacactgccaaaccgcccatacatagcagacccagacattgtaaaagccataaacctaattttgattttgcacgcagaccacgagcagaattgcagcacaagcacggttcgtatggtagcgagcggcggcgcaaacttgtttgcaagcgcagcggcgggcgtgtgcgccttgtgggggcatttgcacggcggagcaaaccaagctgttgttgaaatgctagaggaaattcgcaaaactcgcacctctgtcaaagattttgttgaaaaagtgaaacgcaaagaaaacggcattaaactaatgggctttgggcacagggtatataagaattttgatcctcgctcaaaaattctgcgtgatattgccaacaaggttttgcaaaaacaggggcaaagcgatgaacttttggacattgctcaagagcttgcagatattgcgctaaaagacgattattttatacagcgcaaactttacccgaatgtggatttctattcaggcataattttaaaagccattggtattccgccaaatatgttcacggttatgttcgccataggtcgcatgccggggtggattgccaactggaaagaagttcacgataatcccaagcaaaaaatttacagaccaaggcaaatttatatgggagaagacacaaggcactacgtgcctatagatgttcgaacagatttgcgcctttcgtag

SEQ ID NO: 65790 - protein, 370 aa, Unknown
  Obtained from environmental sample
  DOMAIN (1)...(346): Citrate synthase
  misc_feature (1)..(370): Xaa is any amino acid
MRYRGYPIEELAEKSTFIETAWTIIWGRLPTQTELRHFSLLLTEHELMHEGLRHHFDGFPIDAPPMAILSAMINSMSCYDNALLRNHLNDGEFEGAAANLISKVRTIAAAAYKMSTGRPIIYAVPEYGYVNNFLHMMFTLPNRPYIADPDIVKAINLILILHADHEQNCSTSTVRMVASGGANLFASAAAGVCALWGHLHGGANQAVVEMLEEIRKTRTSVKDFVEKVKRKENGIKLMGFGHRVYKNFDPRSKILRDIANKVLQKQGQSDELLDIAQELADIALKDDYFIQRKLYPNVDFYSGIILKAIGIPPNMFTVMFAIGRMPGWIANWKEVHDNPKQKIYRPRQIYMGEDTRHYVPIDVRTDLRLS

SEQ ID NO: 65791 - DNA, 1230 bp, Unknown
  Obtained from environmental sample
  misc_feature (1)..(1230): n is a, c, g, or t
atgggtactacggtgctttttaagcctactacgatacaaaaaaaagctcttgcgttattaaagagcggggctaaacatattctgctgtttggcggctctcgttccggcaaaacgaccgtattggttatggcgattatttaccgcgctttgaggtttgccggttcccgacatttgatttgccgttatcgggctaaagacgctcgttcatcagttttgagggaaacgctgttaccgtggcttgataacaccgtcggaaaaagcggttattactacttggcgcatgaaagcatgattacattgttcaacggttctgaaatttggattggcgggcttggggatagagagcaagcggataaaattctaggacatgagtattgcacgatttattttaatgagattagccaattaagttatgccgctgttactaccgcctattcaagattggcaatgagagttaagggctgtaggaacttgttttattatgactgcaatccgggtagccctttgcattgggcttataaggtttttgtgcttaaaaggcagtttcttaatggggatatgctggaaaaaccggagctttatcaatcaatgttattaaatccagaggataaccgagaaaacttaccggaagattatatcaatgacattcttgacactttgccggaaaaacaaaaagcccgctttcgagatggtctttgggtaaaagccgagggcgttatatatgaccgctttgatgaaagcatgattgttaaggctgatgaccttccaaaacaatttgaccgtttcgcggcggggcaggatttcgggcttaacattactttcgtgaaaattgggtgggttggcgatgtggtatatgtcctgtgcgattacggcgcgtttaacatgactacccaaagttttaatgaggagttacaagcgcggggctggtttgagtgtcctgacggtatgggtatgcctgtttactgtgatcctgctggtggggagagaatacaagaaataacaggcgggactaaagctaacaacagcgtggacagcgggattgatttcataaacgcaaaaattgaacgccgtcaattttatgtatgcgaaaagtgtaccggcgtactttcggagatttgggactattgcagggacgaggcggggcagattgtaaaggttaatgaccattatcttgacgctttgcgttatgcgatattcacggacgttcagcaaggggttgtattattgtga

SEQ ID NO: 65792 - protein, 409 aa, Unknown
  Obtained from environmental sample
  DOMAIN (28)...(401): Terminase-like family
  misc_feature (1)..(409): Xaa is any amino acid
MGTTVLFKPTTIQKKALALLKSGAKHILLFGGSRSGKTTVLVMAIIYRALRFAGSRHLICRYRAKDARSSVLRETLLPWLDNTVGKSGYYYLAHESMITLFNGSEIWIGGLGDREQADKILGHEYCTIYFNEISQLSYAAVTTAYSRLAMRVKGCRNLFYYDCNPGSPLHWAYKVFVLKRQFLNGDMLEKPELYQSMLLNPEDNRENLPEDYINDILDTLPEKQKARFRDGLWVKAEGVIYDRFDESMIVKADDLPKQFDRFAAGQDFGLNITFVKIGWVGDVVYVLCDYGAFNMTTQSFNEELQARGWFECPDGMGMPVYCDPAGGERIQEITGGTKANNSVDSGIDFINAKIERRQFYVCEKCTGVLSEIWDYCRDEAGQIVKVNDHYLDALRYAIFTDVQQGVVLL

SEQ ID NO: 65793 - DNA, 1038 bp, Unknown
  Obtained from environmental sample
  misc_feature (1)..(1038): n is a, c, g, or t
gtgaacatctttgagcgacttttaccaaaccgcaagcgacaaaaaagcggcggttcgttaggtgaaaaaggtttaactaattctcatttttccttgacttcggacgaggactttactaatttatatatagaccccttcacagacacttatctttgcagcgcatgggtgaatattgcggttaatatcttaatccgtaatgttgcccgtgcggatttcattctcgaaagagacgggattgagttaaaaaacggtcccctctattctctgttccaccgaccgaatgagcatttaagccgtttcgatttgtggaaggaaaccgccgcatggtggcttttagagggagaggcgttttggtggttcgggcctgactacggcggtgggctgccaaaacaactgtacattctcaatcccaggaaactccaacttgagggagaggggttggacgtgcaggattgtgtcgcaaataaaaaacggcgctggttctatcatgccggaaccgaattagtacctatcttttctgatgagcttatccattttcgggattggaacccgtggaaccctctgcgcggtgttaatcctcttgtctctttatctcttgagcttgagcaggatttttacgctaataaagctaattccacactattaaaaaacaatgctgttcctcaaggattattaaagacagaccaaacactccgaccggaagaagcggacgcattagaaaggcggtgggaaagcaaatacggacaggcaaaggcggggcgaaaaatcgccgtgcttggcaagggaaccagttttgaggcgttaagttttaatcctgacgttgtgaaactgtttgaattaaaacgctggaacttatataccattcttgcaaagtacggcataccgccccgtgtcgcanatatctctgacaggtcaacggctttatccggcaaggataccaaagaacaacattccgcattttggcaatacacgttaattcccttacttagacaatttgaacaaaccttagaaagccaattttttatgcgtttcacctga

SEQ ID NO: 65794 - protein, 345 aa, Unknown
  Obtained from environmental sample
  DOMAIN (37)...(334): Phage portal protein
  misc_feature (1)..(345): Xaa is any amino acid
MNIFERLLPNRKRQKSGGSLGEKGLTNSHFSLTSDEDFTNLYIDPFTDTYLCSAWVNIAVNILIRNVARADFILERDGIELKNGPLYSLFHRPNEHLSRFDLWKETAAWWLLEGEAFWWFGPDYGGGLPKQLYILNPRKLQLEGEGLDVQDCVANKKRRWFYHAGTELVPIFSDELIHFRDWNPWNPLRGVNPLVSLSLELEQDFYANKANSTLLKNNAVPQGLLKTDQTLRPEEADALERRWESKYGQAKAGRKIAVLGKGTSFEALSFNPDVVKLFELKRWNLYTILAKYGIPPRVAXISDRSTALSGKDTKEQHSAFWQYTLIPLLRQFEQTLESQFFMRFT

SEQ ID NO: 65795 - DNA, 609 bp, Unknown
  Obtained from environmental sample
  misc_feature (1)..(609): n is a, c, g, or t
atgcagaggggaactttagtagtcagcagggcggttaataaccactcgtactacaaaaagcgttttgaagctctgggatttcctgacgtaacggttacggctcttgaaaaggacgccctttcctctcttatccgtaaacaaaaaccaaaacaattatttatgggagcgagattttatcaatgctgtacgccttttttaatgggacaattacataaagattttcctaaaataaatatgactgctgtttgtatcggcgaataccctgccgaacttggtatgtattttattgtaaacggaattaaatcatactttacaagttttgagggtcttgaccaattctatatcggaattgacgaggtaagaaaaggcaatggttatatttcccctgcggcaatggctcgtatggatatgaggcaaactttcataatgcctgccggggatataactggcagggaaagggaagtgatacggcttatttgctgcggctataaggatttggaaattggcgacaccctgcacatttcgagaaggactgtagatactcacaaaacaaatatatttaccttgttaaatgtccgtaatgctgtcgaactggttatgccgccctga

SEQ ID NO: 65796 - protein, 202 aa, Unknown
  Obtained from environmental sample
  DOMAIN (145)...(202): Bacterial regulatory proteins, luxR family
  misc_feature (1)..(202): Xaa is any amino acid
MQRGTLVVSRAVNNHSYYKKRFEALGFPDVTVTALEKDALSSLIRKQKPKQLFMGARFYQCCTPFLMGQLHKDFPKINMTAVCIGEYPAELGMYFIVNGIKSYFTSFEGLDQFYIGIDEVRKGNGYISPAAMARMDMRQTFIMPAGDITGREREVIRLICCGYKDLEIGDTLHISRRTVDTHKTNIFTLLNVRNAVELVMPP

SEQ ID NO: 65797 - DNA, 696 bp, Unknown
  Obtained from environmental sample
  misc_feature (1)..(696): n is a, c, g, or t
atgattattagaacgaaaagcggggaatttcacgaggcgaattcatcggttctgttggattttcttggcgtgaaaaagacggcggcggggatacaaaaagtctctgctgatgtggtgctggtttcgggcgtaccttttcacctaacggcagaaaatgaaaatgagaaaggttatccgtggacgttatcaacctatgaccttgaccgtttcggggaaaggatagatccgactggttgggatttttcgcagtatgttaaaaaccctattgtggagtgggcgcataggtttgatattccggcaatcgggaaaattgaggggcttgttgttgatgataacgggcttcatggttctgttgtcttcaatgacaaagaatacgaccaattcggttggagtatcgggcagcgcgtaagggctggcgttatccgcgccggttcggtgggctttcgtgttttggagattgaaattccgtccaaagaggacagtaaggacggtacaacgctcattttccgtaaacaggaattgcttgaattttctatctgcaacgttccggctaatccgtgggctttagtaaagcccaatgctttggcaaaggcaaagagcaatgaacaagcgccaacagagtcggcgataacaatgaacaatgaagacggctctaatgctaccccattttggggcggcttaataaataacttatag

SEQ ID NO: 65798 - protein, 231 aa, Unknown
  Obtained from environmental sample
  DOMAIN (44)...(201): Caudovirus prohead protease
  misc_feature (1)..(231): Xaa is any amino acid
MIIRTKSGEFHEANSSVLLDFLGVKKTAAGIQKVSADVVLVSGVPFHLTAENENEKGYPWTLSTYDLDRFGERIDPTGWDFSQYVKNPIVEWAHRFDIPAIGKIEGLVVDDNGLHGSVVFNDKEYDQFGWSIGQRVRAGVIRAGSVGFRVLEIEIPSKEDSKDGTTLIFRKQELLEFSICNVPANPWALVKPNALAKAKSNEQAPTESAITMNNEDGSNATPFWGGLINNL

SEQ ID NO: 65799 - DNA, 579 bp, Unknown
  Obtained from environmental sample
  misc_feature (1)..(579): n is a, c, g, or t
atgggagcagtacaaacacagccaacatatcccaaaggtattacctttgagcaagtttgggcggttttggacagagttagtaagaagcaagaagaacttgtcgaaatccaaaaagcaaccgaccgtcaaatacagagaactgaaagtgagctaggtagactcagcaaacgaatgggcgaagttgttgaatttatggttgcgcccaatctgtgtgaaaaattcagggagttcggttttaacttctcccaatccaatcaaaataccattgtttctgataaagcaaataagatatcctttgagattgatgttaaacttgaaaactacagcaaggcaatgcttgtcgaggtaaaaaccaaacccaccaccgaagatgtgaaggatcatgttaaacgccttgaaaaaatgcgaaagtttgccgatttgcacaatgacaagcgcgcatttttaggcgctgtcgcgggggcggtaattacggacaatgtaagaaagtacgtattaaaacaaggcttttttgttatagagccctccggcgaaggctttaatattacttcgccaaaaggtcaaccgaaagaatggtaa

SEQ ID NO: 65800 - protein, 192 aa, Unknown
  Obtained from environmental sample
  misc_feature (1)..(192): Xaa is any amino acid
MGAVQTQPTYPKGITFEQVWAVLDRVSKKQEELVEIQKATDRQIQRTESELGRLSKRMGEVVEFMVAPNLCEKFREFGFNFSQSNQNTIVSDKANKISFEIDVKLENYSKAMLVEVKTKPTTEDVKDHVKRLEKMRKFADLHNDKRAFLGAVAGAVITDNVRKYVLKQGFFVIEPSGEGFNITSPKGQPKEW

SEQ ID NO: 65801 - DNA, 621 bp, Unknown
  Obtained from environmental sample
  misc_feature (1)..(621): n is a, c, g, or t
gtgctggtggatgatcttaccaccctgggaacaaaggaaccgtaccggatgttcaccagccgcgccgaacaccgcctcgttttgcgccacgacaccgcagatacaaggctctgtccaaaaggccgcgacatcggcctggttgacgatgaacgctgggatattttccaaaaaaaaaccgaagcgttagatgcaatcggagagcttttatcgcagcggaaattttctccctccgttgacaaaaccggcaatgaagcgcttctttcccacgcgggcgaaagccttgagcgctgccttaccgatacccgccttgagttagccgacattctccccttcgccccggagctttccgcctaccccgccgaatggcttgaacgcgccaggctggacatccgctacgccggttatattgaaaaggaaaaccgcgccgcggcaaaggcggcaaaaatggacgcgataaaactcgacccagccctcaactacgccgcccttaccggcctttcctccgaggcaagggaaaaactaaaaaccgtaaggcccattaccgttggccaggcggcgcgcatccccggcgtaaggcagggagacatcgccctgttgatggtgctggcggcgaaaaaataa

SEQ ID NO: 65802 - protein, 206 aa, Unknown
  Obtained from environmental sample
  misc_feature (1)..(206): Xaa is any amino acid
MLVDDLTTLGTKEPYRMFTSRAEHRLVLRHDTADTRLCPKGRDIGLVDDERWDIFQKKTEALDAIGELLSQRKFSPSVDKTGNEALLSHAGESLERCLTDTRLELADILPFAPELSAYPAEWLERARLDIRYAGYIEKENRAAAKAAKMDAIKLDPALNYAALTGLSSEAREKLKTVRPITVGQAARIPGVRQGDIALLMVLAAKK

SEQ ID NO: 65803 - DNA, 843 bp, Unknown
  Obtained from environmental sample
  misc_feature (1)..(843): n is a, c, g, or t
ttgccgggcgttattacccaacgcggtcatcgcataacaagccgcaccgtaattctctgcgccggaacttttatggaaggtcgaatttttatcggcgagtacgacgcgccggaaggcaggcttggcgaggaagccgcgcttgggctgggcgcttcgctgcgccgcctcggttttccgtcgggaaggctgaagacaggaactcccgcgaggatagcaggtgatacaattaattttgataaaatggaaaaacaggacggcgatgaaatgcgtcctttctcttttatctccgacggtatctttgaccgtccttccctgccctgctggataacttacacaaatcaaaacacgcataaaataattcacgaaaatatcagacgttccccgttattcggcggcaaaattaccggcgtggggcctcgctattgcccatcaatagaggacaaagtggttcgctttccgcagcgcgaaaggcatcacatctttatagagccggaaggactagcgactaacgaaatgtacatgaatggcgcgtcaagttctctccctgaagatgtgcagcgggattttattcacagcatcaacggtcttgaaaatgcccacatcgtgcgccccgcctacgccgtagaatacgactacctagatcctctcggcctgtacccaagctttgagtcaaagctgctttcgggatttttcgccgccggtcagacaaacggcagttcgggatatgaggaagccgcggcacagggactgatggccggcattaacgccgcgatgaaactgctgggccgccccgccgctggtactgacaagagcagaggcctacataggcgtgctggtggatga

SEQ ID NO: 65804 - protein, 280 aa, Unknown
  Obtained from environmental sample
  DOMAIN (1)...(264): Glucose inhibited division protein A
  misc_feature (1)..(280): Xaa is any amino acid
MPGVITQRGHRITSRTVILCAGTFMEGRIFIGEYDAPEGRLGEEAALGLGASLRRLGFPSGRLKTGTPARIAGDTINFDKMEKQDGDEMRPFSFISDGIFDRPSLPCWITYTNQNTHKIIHENIRRSPLFGGKITGVGPRYCPSIEDKVVRFPQRERHHIFIEPEGLATNEMYMNGASSSLPEDVQRDFIHSINGLENAHIVRPAYAVEYDYLDPLGLYPSFESKLLSGFFAAGQTNGSSGYEEAAAQGLMAGINAAMKLLGRPAAGTDKSRGLHRRAGG

SEQ ID NO: 65805 - DNA, 1191 bp, Unknown
  Obtained from environmental sample
  misc_feature (1)..(1191): n is a, c, g, or t
ttgggttgtcgggatgccggagggctggcatggcggcaagaacggaatggacaaatagagattccgttttcccgccttgaattggtgggaagcaagaaaaaagccaaaacgcgggcggaggctttttccaaatacgcgcttatctatgcggaaaatttgcaggacggcctgccgatacgggatgccccggataacaatggccggcggatctaccgtctgaaaacgggcgagattatcaaaattctttccgcagcggagggcagtccggctatcggaacgacgggggatcctctgccgggcgaatggttcaaagtgcttgccgaggacggcagcacgggttactgtttctcataccggctcaaagtgtttgagcatatcggcgggcagtttaccgcttccgtggccgttatcaatgaaaagaccgaggatcccgagttggatacgctgctgtcaaaaacctggtccgccgaagtttatttaacaatgattaactccaaaagaatcaaccttgaagatatgtcgcgtcaatggcgctttgatcccggacaggaaaccggccttgccagaatttttgtgcccgaagttgaccaaagttattcgtataccggcatccgccctgacgggtaccgcacatggcgttttgagggaaccaacctttcaatgcagcttagaggcgagacgaccctggccgtacaatttttggaggggagcggcaatacaagaactttgctctttgtctctctgcccgtcagcgtggacgatcttatcctgcaggaaaccgcccgccgggaaagactgtacaacgagatttacagtcaggggccggtttataccagtaacaactacggaaccattacctttaagggaggcccgccaccggccggaggcggaaccttctcatggcgcaattttgatctcctggtaccccggttcattcccgaaggcattgaggggaatgggacaattttattggatctttttcttgctcccgcgcttgaggatcgttacgacggggcgtttaccctccgctttacaaatacaaagaccgcgctgtactgcatgtattcgcttgacaacgaggggttcaggatagagatagtccccgattcgagcatcgaggatgtcaccgttacccgccggggggcatccccgatggttctgtacttcttccgggacacggagctgtggtag

SEQ ID NO: 65806 - protein, 396 aa, Unknown
  Obtained from environmental sample
  misc_feature (1)..(396): Xaa is any amino acid
MGCRDAGGLAWRQERNGQIEIPFSRLELVGSKKKAKTRAEAFSKYALIYAENLQDGLPIRDAPDNNGRRIYRLKTGEIIKILSAAEGSPAIGTTGDPLPGEWFKVLAEDGSTGYCFSYRLKVFEHIGGQFTASVAVINEKTEDPELDTLLSKTWSAEVYLTMINSKRINLEDMSRQWRFDPGQETGLARIFVPEVDQSYSYTGIRPDGYRTWRFEGTNLSMQLRGETTLAVQFLEGSGNTRTLLFVSLPVSVDDLILQETARRERLYNEIYSQGPVYTSNNYGTITFKGGPPPAGGGTFSWRNFDLLVPRFIPEGIEGNGTILLDLFLAPALEDRYDGAFTLRFTNTKTALYCMYSLDNEGFRIEIVPDSSIEDVTVTRRGASPMVLYFFRDTELW

SEQ ID NO: 65807 - DNA, 597 bp, Unknown
  Obtained from environmental sample
  misc_feature (1)..(597): n is a, c, g, or t
ttgttgacctgtgtttttcggttttcgggatccgccttgcctttgacggcggaaccttactttttcccattgtttatgttttgggagatgtttttaccgaagtttacggctttccgccttgcccgccgggttatctggacaggttttgcggtactggcgttttcagcgctggtgtttttatttctggaggttttaccgtctgaaagtttctgggaagccgaaacaggttctgcggcatataacgcagtcctcggtggaatgagctacggcggtattgtgcttgcaagccttacggcatatcttgcgggagaattatccaatgcggcgattctttcaaaactgaaagttaaaatgaaaggaagaatgctttgggtacggactatcagttccaccttggtaggcgaattccttgatacgttgattttcgtactgatagcgagcgccgcaggagtttttgggtgggaaattttctggagtcttattataacaaattacttattgaaatgcggaattgaagctgtcgtaacacccttcacatactgggcttccggtttcttaaaacgaaaagaaggcattgatgtgtatgatgagaagtaa

SEQ ID NO: 65808 - protein, 198 aa, Unknown
  Obtained from environmental sample
  DOMAIN (21)...(169): Uncharacterized ACR, YhhQ family COG1738
  misc_feature (1)..(198): Xaa is any amino acid
MLTCVFRFSGSALPLTAEPYFFPLFMFWEMFLPKFTAFRLARRVIWTGFAVLAFSALVFLFLEVLPSESFWEAETGSAAYNAVLGGMSYGGIVLASLTAYLAGELSNAAILSKLKVKMKGRMLWVRTISSTLVGEFLDTLIFVLIASAAGVFGWEIFWSLIITNYLLKCGIEAVVTPFTYWASGFLKRKEGIDVYDEK

SEQ ID NO: 65809 - DNA, 1299 bp, Unknown
  Obtained from environmental sample
  misc_feature (1)..(1299): n is a, c, g, or t
atgggaaacttgcgatactatgaccatagtatcgcgttggcgggatttcgctcttccgaattaacattttttcttttagggcttggctggcttattttaacctttaccccgcagcgtctgataatgccgtttctgcgtctgtcggcggttatttccgcaattcttctgcctttcctgattttcatgccgataggttttgtgtggtttaccctgtatatggctttcaagttttttaacggattatgcgccgcctgcgctttctttttattctgctttatgttaaacaacattgagcgcatactcggcatggcgattattcagttttattacggcttttattatgcagcatggagcatattccctgcttttcacactgcaagtgaaacatggggagcggtttccgtaacggcgatttttcttgtcattgtttttctctgcggtaaaaataaacaggaaatcaaaattgacagcgacggcaaaggttcaggcgtttcttttgtcatctgtttgcatattgtgttttacatgattgtttgtatggtaaattacattgagtggggagaaaacagcctgtcagggcttgcgtttggtgtgggcacttttatttctgtcggtctgatcgttattgtccaactgctcattggtcgcagcgcgttatatctatggcttatgtttttggttttttccctgttgggattaggcgcattgttatacgatacgcacataacgcttatttccggttctttcgcctacggcttgggggacggtcttggttacattgttatctngtatatgtgcgcaggggcaatcaagcgaagtaaatctttgagaatgttcagactttactgccttatgttctttgtcgagtattttgttgtttcaggaattttttcactttactttaattattttgacagccccaataaatttctcgctttcggcgttgtactggtacttgtaagcgtcagtcttttgctcatgccgtttatgcaaaaaaaattatttgacgcggactggacggatggtctctaccttcgtgatatggaagaatactccctgccattcgcgcagacggaagcgattaacgcgcaaaataatcttgatctgacgccgcgagaagaagaaatttttactatgctgcttaccggaaaagcgcctaaagaaatcgcctatacactgaaaataagttactatacggttatttttcatcaaaaaaatctttaccgcaagttgggtattcagagcagggcggaactttttgcacggtataatactatcccaactgaaaaaatcacataa

SEQ ID NO: 65810 - protein, 432 aa, Unknown
  Obtained from environmental sample
  DOMAIN (366)...(423): Bacterial regulatory proteins, luxR family
  misc_feature (1)..(432): Xaa is any amino acid
MGNLRYYDHSIALAGFRSSELTFFLLGLGWLILTFTPQRLIMPFLRLSAVISAILLPFLIFMPIGFVWFTLYMAFKFFNGLCAACAFFLFCFMLNNIERILGMAIIQFYYGFYYAAWSIFPAFHTASETWGAVSVTAIFLVIVFLCGKNKQEIKIDSDGKGSGVSFVICLHIVFYMIVCMVNYIEWGENSLSGLAFGVGTFISVGLIVIVQLLIGRSALYLWLMFLVFSLLGLGALLYDTHITLISGSFAYGLGDGLGYIVIXYMCAGAIKRSKSLRMFRLYCLMFFVEYFVVSGIFSLYFNYFDSPNKFLAFGVVLVLVSVSLLLMPFMQKKLFDADWTDGLYLRDMEEYSLPFAQTEAINAQNNLDLTPREEEIFTMLLTGKAPKEIAYTLKISYYTVIFHQKNLYRKLGIQSRAELFARYNTIPTEKIT

SEQ ID NO: 65811 - DNA, 306 bp, Unknown
  Obtained from environmental sample
  misc_feature (1)..(306): n is a, c, g, or t
atgaatccgcaggatgttaaaaacaattatgaactggaaacaggcaatttaattgttaatacttttaaaaacggtaatttggatttttcgcagattacaatgacattggttgccggacacggtccttttacatggggaaacagcgcggctcaatctgtataccacagcgttattctggaagaaatcagcaaaatggcgctgtttaccgtaacgattaactcaaacgcaaaaccgctgcccgaacacatcatcaaaaaacattgggaacgcaaacatggagcaaatgcgtattacgggcagaaataa

SEQ ID NO: 65812 - protein, 101 aa, Unknown
  Obtained from environmental sample
  misc_feature (1)..(101): Xaa is any amino acid
MNPQDVKNNYELETGNLIVNTFKNGNLDFSQITMTLVAGHGPFTWGNSAAQSVYHSVILEEISKMALFTVTINSNAKPLPEHIIKKHWERKHGANAYYGQK

SEQ ID NO: 65813 - DNA, 393 bp, Unknown
  Obtained from environmental sample
  misc_feature (1)..(393): n is a, c, g, or t
ttgagtttgtgcttatcgaccgcgatacaaaaacggagcgtttgcaggacgaattgcgccgtaatgacgcctactggtctcattaattttttatgtgataatggattgactatggatatatacaaaacattacgagaagaatcatttgaggcgaaccttgaaataaagaggcaggaacttgccatttccacatggggcaacgcttccgcttttgatccaagtaaagggatattcgccattaaaccgtcaggcgtggaatatgacgaattaacgccgaaaaagatggtgttagttgatcttgagggaaaggttgtgaaggcaaactcaagccgtcttccgacacaaaaacccatcttgtcctgtaccgtgaattcaaaggaattctcggcgtaa

SEQ ID NO: 65814 - protein, 130 aa, Unknown
  Obtained from environmental sample
  misc_feature (1)..(130): Xaa is any amino acid
MSLCLSTAIQKRSVCRTNCAVMTPTGLINFLCDNGLTMDIYKTLREESFEANLEIKRQELAISTWGNASAFDPSKGIFAIKPSGVEYDELTPKKMVLVDLEGKVVKANSSRLPTQKPILSCTVNSKEFSA

SEQ ID NO: 65815 - DNA, 1491 bp, Unknown
  Obtained from environmental sample
  misc_feature (1)..(1491): n is a, c, g, or t
atggatcttaagaaatacgaattttggtttatcgtaggaagtcaggatctttacggagatgaaacgcttaaacaagtcgccgaacattcccgtattatgacggatgaattcaacaaggatgtgttgatttcaggtacggtagtattgaaacctgttgcaataacacctaacgcgatacgcggtctttttgaggaagcaaacgcatcaaacaactgtgcaggtatcataacatggatgcatacattctcgccttcaaaaatgtggatacagggtttggcgcttaaccgcaaaccgcttctgcatctccatactcaatttaacagggacatcccgtggtcttcaatagatatggattttatgaacttaaaccaatcggcgcacggcgaccgtgaacatggttatattcacacgaggatgcgccttaatcgcaaagtagtggcgggtttctggcaggataaagaactgcgccgccgaatggacgtttggatgagagccgccgccgcgagaaaagacgggatggattctaccgttatgcgatttggagacaatatgcgggaagtagcggtaaccgaaggcgacaaagtcgaagctcaaatcaggtttggctggcaggtgaacacatggggcataggcgaccttgccgcccgttacgcgaaaacaagcgacgcgctggcggaaaagctggcggaagaatacgccgcgaaatacgatcttgcccctgatcttaaacaggcaggcaagacaagaggcgcaatgcttgaacaggcaaaaatagaaatcgcccttaaagaaatgcttgagaccgaacacgcaggggcattcactactaccttccaagaccttcacggtctgccgcaattacccggtcttgcatgccagcggcttatggaacagggctacggtttcggcgcggaaggagactggaaacagtctatgctgacacgagccgccaaagttatggcttcggggctgccgggcggggtttcctttatggaagattacacctaccattttgaaccgggcaaagaagccgcccttggcgctcacatgcttgaaatatgcccctccatagcggacggcaaaccgcgcattgaggttcatccgctgggaatcggcggcaaggcggatcccgcgcgtatggtgtttgacgccgctcccgggagcgcggtactggcgacgctcatcgatcttggcaatcgtttcagaatgatagtaaatgaaattgaaaccgtcaaaattgaaaacgatatgcctaaactgcccgtcgcacgagcgctctggaaaccgtatccgaatttaagcgtcgccgccgaagcatggataatctcaggcggtacgcatcattcggtatacagttcctcgcttacaacggaatatttccgggattgggcggaaatgagcggcattgagtttgtgcttatcgaccgcgatacaaaaacggagcgtttgcaggacgaattgcgccgtaatgacgcctactggtctcattaa

SEQ ID NO: 65816 - protein, 496 aa, Unknown
  Obtained from environmental sample
  DOMAIN (1)...(496): L-arabinose isomerase
  misc_feature (1)..(496): Xaa is any amino acid
MDLKKYEFWFIVGSQDLYGDETLKQVAEHSRIMTDEFNKDVLISGTVVLKPVAITPNAIRGLFEEANASNNCAGIITWMHTFSPSKMWIQGLALNRKPLLHLHTQFNRDIPWSSIDMDFMNLNQSAHGDREHGYIHTRMRLNRKVVAGFWQDKELRRRMDVWMRAAAARKDGMDSTVMRFGDNMREVAVTEGDKVEAQIRFGWQVNTWGIGDLAARYAKTSDALAEKLAEEYAAKYDLAPDLKQAGKTRGAMLEQAKIEIALKEMLETEHAGAFTTTFQDLHGLPQLPGLACQRLMEQGYGFGAEGDWKQSMLTRAAKVMASGLPGGVSFMEDYTYHFEPGKEAALGAHMLEICPSIADGKPRIEVHPLGIGGKADPARMVFDAAPGSAVLATLIDLGNRFRMIVNEIETVKIENDMPKLPVARALWKPYPNLSVAAEAWIISGGTHHSVYSSSLTTEYFRDWAEMSGIEFVLIDRDTKTERLQDELRRNDAYWSH

SEQ ID NO: 65817 - DNA, 858 bp, Unknown
  Obtained from environmental sample
  misc_feature (1)..(858): n is a, c, g, or t
ttgcatgcgggcattccattctgcccgccggaaggcgatgcgggtacgggcatggttgcaactaacagcgttgcggaacggacaggaaatgtttcggcgggtacatcgatcttcgcgatgattgtgctggaaaaggcactgtcaaagctctatccggaaattgacatggtgactacccccgcaggcaagcctgttgccatggttcattgcaatagttgtacaaccgatcttgacgcatgggtaaagctgttcagggaattggcggatgtggctggggcgaaaattgaaaagccggctctttacgacgccctgtacttaaaagcactggaaggggaagaagattgcggaggcttgttgtcttataattattatgccggcgaacctattaccggcttggaacagggtcgccctttgttcgtgcgttcccaggaaagcaattttaccctggcaaattttatgcgtaatcttattttttctacgatggctacgcttaagctaggtatggacatattgactgaaaaagagcaaatacgcattaacaacctgttgggccacggcggccttttcaaaaccaaaggcgttggacagcggctgatggcaggggccctaaatacgcctgtgtccgtgatggaaagcgcaggggagggcggggcctggggcatcgcgcttcttgcggcttatatggctcaggggacaaaaggcctgtctcttgagaaattccttgcggaaaaagtttttaaagaagcaaaaggcgacagggtggagccggattcaaaagatgtgcagggctttaaaaaattcatggaaaggtattcggcgggtcttaaaatagagagggccgctgttgaaaatttgtaa

SEQ ID NO: 65818 - protein, 285 aa, Unknown
  Obtained from environmental sample
  DOMAIN (23)...(253): FGGY family of carbohydrate kinases, C-terminal domain
  misc_feature (1)..(285): Xaa is any amino acid
MHAGIPFCPPEGDAGTGMVATNSVAERTGNVSAGTSIFAMIVLEKALSKLYPEIDMVTTPAGKPVAMVHCNSCTTDLDAWVKLFRELADVAGAKIEKPALYDALYLKALEGEEDCGGLLSYNYYAGEPITGLEQGRPLFVRSQESNFTLANFMRNLIFSTMATLKLGMDILTEKEQIRINNLLGHGGLFKTKGVGQRLMAGALNTPVSVMESAGEGGAWGIALLAAYMAQGTKGLSLEKFLAEKVFKEAKGDRVEPDSKDVQGFKKFMERYSAGLKIERAAVENL

SEQ ID NO: 65819 - DNA, 1674 bp, Unknown
  Obtained from environmental sample
  misc_feature (1)..(1674): n is a, c, g, or t
gtgctcgcgccgggcgccggagaactctcgctaggtccggcaaaactcgccgcggcgctaaaacgaaaaataccggtaatcataaccaacctaaacgacaacgacgtcgcggcgacgggcataagcggcagcgcgttgctaactaacaacggttacaacatatacttcctgaacataataaccgaatccgccgacgaccggaccgacctcgacctctcctacaatccggcggcgataaaagcgcagcttgccaaaggccaggcggccgcagccgatttgcgcgcggccgtagtccacggcacgcttgaagagatgaaacgcctcgccgaagaactcgacggcgagctggacgttataatcgccggaaacctcaacagacgcctagaccacccgataaaagtcggcaagacgctcattgtatcggcgggtccggaaaacaagtttgtgggttgcctattcttgaaattcagcgatgtaaagaaagagatcaaaaaaggcaaagcggacgagaaaaagacttctgcgcaagcaccggcaaggagaacggtaaggagcgcgcgcgccaaggcccgctttaccgctgagaacgcgctttttcctgtaagtcaagagatcacgccggatccggcggtggagaacataaccaaattcgtgcgcgccgccatactcgtagaccgcaccgacgggccggtaatccgtacccgcgtcaggggcgtggtggcgcacctctccgaccgcggctccggtccgcaggccttcctcaaagccgcacagagcaagagcgaactcccgcttggcgacagcctcttcaactgccgcaaaccgctactgtcaagctccggcaaccgcgccgcgttcatcttcggcaaacccgagagaaaaaacgggaaattgcggatggtcgatttggaaatgagcagcggcaaaacggtatcgacgggaaagaacgtcatagacgccatcttcgccccggacgacaatttcctgtactacatagaagccgacagcggcagcgacatgggcgccgtccgcaagacgagaatgtacatgaacgacgccctaaccgtcctcgaacccgccgccgccacgcggcgcggcgacctgcacatatcctcagacggaacgacgctcctcttcgcgtccaagtataaagacggcaagtgggacatctacgcgcttgacacatcgggaaaagtggcgccggtgagattgacggacggcaaggccgaccaccgccgcccgcgcataagcccggacggcaaatacgtcgcgtacatatcaaaccgcaccggcttcggcggcaggatggacttgtgggtatacgatagggccgccatggagcacagacaactgacgttcaacaccgacgttcaggatttcacgtggagcgacgactccgagtccgcatacttctcggcgggcgcgaacctgctggaaatctgccgcgtggatatgaagtacggcctgataaaaaacatgataccgcacccgcagggcggtgtgaaaacatggagcgaaagcgccccgcggttcatgcggtacaacgacgaacctatgattgtctacacgcgggtttatccggacgggaagcgccggatctactggttcgacatcaacaacgcgcgggatgttaagatgtacgcggtcggtgagtttgacgagtgggaggagtag

SEQ ID NO: 65820 - protein, 557 aa, Unknown
  Obtained from environmental sample
  DOMAIN (402)...(440): WD40-like Beta Propeller Repeat
  misc_feature (1)..(557): Xaa is any amino acid
MLAPGAGELSLGPAKLAAALKRKIPVIITNLNDNDVAATGISGSALLTNNGYNIYFLNIITESADDRTDLDLSYNPAAIKAQLAKGQAAAADLRAAVVHGTLEEMKRLAEELDGELDVIIAGNLNRRLDHPIKVGKTLIVSAGPENKFVGCLFLKFSDVKKEIKKGKADEKKTSAQAPARRTVRSARAKARFTAENALFPVSQEITPDPAVENITKFVRAAILVDRTDGPVIRTRVRGVVAHLSDRGSGPQAFLKAAQSKSELPLGDSLFNCRKPLLSSSGNRAAFIFGKPERKNGKLRMVDLEMSSGKTVSTGKNVIDAIFAPDDNFLYYIEADSGSDMGAVRKTRMYMNDALTVLEPAAATRRGDLHISSDGTTLLFASKYKDGKWDIYALDTSGKVAPVRLTDGKADHRRPRISPDGKYVAYISNRTGFGGRMDLWVYDRAAMEHRQLTFNTDVQDFTWSDDSESAYFSAGANLLEICRVDMKYGLIKNMIPHPQGGVKTWSESAPRFMRYNDEPMIVYTRVYPDGKRRIYWFDINNARDVKMYAVGEFDEWEE

SEQ ID NO: 65821 - DNA, 1878 bp, Unknown
  Obtained from environmental sample
  misc_feature (1)..(1878): n is a, c, g, or t
gtgctgacgttcccggagctcgacatatacttcgatcttatagcctacgcgatcttcgccgccaccgccgtgctctcgctacgcggcgcggcggtggtggtcaaggcgcagtacatcgtgctggccatactcgtgctcgccataatagcgttcctcgtcggcgcggtcatccacttcgatttcaagactttcgccgaaaacgcgaagccgctcgagggcagcaaatacaccttttggatgctcttcgccatatacttcccggcggtgaccggcatcctctcaggggtcaatatgtcgggcgacctcaaaaacccggcgcgttcgatcccgagcggcaccctcatcgccataggcgtcgccttcttggtctacgccgccgagataaccctctgcggcggcgcgataaagcgttccgacctcaccgacagaccctacgaaagcctgctccacctttgggatcccgtcacggccttcctcgtggtgcccggcgtgatggccgccacgctgtcgagcgcgctgggcataatcttaggcgcgccgcgcgtgttgcagtcgctcgcccaagacaagatactcaagccggtcaacgtcttcgccaaggtgacgcccgagggcgaaccaagaagggcgctcttcgtcaccatcgccatcagcttcgccgttatatacatcgcctgccgcaacggcagcggcggcggggcgctcaacatggtcgcctccgtggtctccatgtttttcctttggacgtacggaataatcaacctggccgccttcgttgagtcgttcagccgcaacccgtcgttcagaccgcgtttcaagttcttccactggttcggggcgctcgtaggcgcggtggcctgcttcgccgcaacgttgctcataaacccgaccgcggcgctccttgccggcgcgtgtttcgtcggtatcttcttctacgtgcgcaagtacgtgatgtccgtctccttcggcgacgcccgtcggggtttcatatactcgcgcacgagggacaacctgctcaccctctcgtctctcccagcgcactccaagaactggcgccccacggtggtcgctttcgccggcgatccggtcagcgggcttcacatggtaaagtacgccgactggctctcgagcggccgcggcatactcacaatcgcggcgctgctcagaggcgacgtgagcaagatggccgaagtgcgcaacggtatggtggcggctttcgaagcgtttctgagccaaaaccgcataaaagcgtttccggaggtattggtcacgccggactacaacaccggaattagccacttccttcaagcaaattccataggccccataaaacccaatctagccatattcggctggccaagagacctatccggcgccgccccgttcatggatagcattaaaatcgccgctaagctgaacatgagcgtgggtcttatccacggacgcgaactgcccgacccgaacccgagaaaccgccgcaaccgccgcatagacatctggtggcgcggcatgcgcaacggctcgctgatggtcatcctcgcccacctgatgtccctaaactcggagtggacgggcgcgaagatacgtatactgcgcgtagcctacacgccggaggaacaggcaaaagcgagggaggagttggaacggttaatcgatgccgcgagaatggatatagaggtagaacccataatctccgacgacaccttcccgaacctgctacggcgctactccggcctgtcaaccgcggtattcctcggtttcagcgccgacgagaacacagatccggtgaagttccaagaagcgtattcggggttgctacaaagtatgccgaccacgattatgattcagtctacgggcgaggcggacttgctgtcgtga

SEQ ID NO: 65822 - protein, 625 aa, Unknown
  Obtained from environmental sample
  DOMAIN (1)...(357): Amino acid permease
  misc_feature (1)..(625): Xaa is any amino acid
MLTFPELDIYFDLIAYAIFAATAVLSLRGAAVVVKAQYIVLAILVLAIIAFLVGAVIHFDFKTFAENAKPLEGSKYTFWMLFAIYFPAVTGILSGVNMSGDLKNPARSIPSGTLIAIGVAFLVYAAEITLCGGAIKRSDLTDRPYESLLHLWDPVTAFLVVPGVMAATLSSALGIILGAPRVLQSLAQDKILKPVNVFAKVTPEGEPRRALFVTIAISFAVIYIACRNGSGGGALNMVASVVSMFFLWTYGIINLAAFVESFSRNPSFRPRFKFFHWFGALVGAVACFAATLLINPTAALLAGACFVGIFFYVRKYVMSVSFGDARRGFIYSRTRDNLLTLSSLPAHSKNWRPTVVAFAGDPVSGLHMVKYADWLSSGRGILTIAALLRGDVSKMAEVRNGMVAAFEAFLSQNRIKAFPEVLVTPDYNTGISHFLQANSIGPIKPNLAIFGWPRDLSGAAPFMDSIKIAAKLNMSVGLIHGRELPDPNPRNRRNRRIDIWWRGMRNGSLMVILAHLMSLNSEWTGAKIRILRVAYTPEEQAKAREELERLIDAARMDIEVEPIISDDTFPNLLRRYSGLSTAVFLGFSADENTDPVKFQEAYSGLLQSMPTTIMIQSTGEADLLS

SEQ ID NO: 65823 - DNA, 846 bp, Unknown
  Obtained from environmental sample
  misc_feature (1)..(846): n is a, c, g, or t
atggccggntcttatatcgcagtcgctctccatcccattctacctcataggcttcgccgaagccacggtgctgacgttcccggagctcgacatatacttcgatcttatagcctacgcgatcttcgccgccaccgccgtgctctcgctacgcggcgcggcggtggtggtcaaggcgcagtacatcgtgctggccatactcgtgctcgccataatagcgttcctcgtcggcgcggtcatccacttcgatttcaagactttcgccgaaaacgcgaagccgctcgagggcagcaaatacaccttttggatgctcttcgccatatacttcccggcggtgaccggcatcctctcaggggtcaatatgtcgggcgacctcaaaaacccggcgcgttcgatcccgagcggcaccctcatcgccataggcgtcgccttcttggtctacgccgccgagataaccctctgcggcggcgcgataaagcgttccgacctcaccgacagaccctacgaaagcctgctccacctttgggatcccgtcacggccttcctcgtggtgcccggcgtgatggccgccacgctgtcgagcgcgctgggcataatcttaggcgcgccgcgcgtgttgcagtcgctcgcccaagacaagatactcaagccggtcaacgtcttcgccaaggtgacgcccgagggcgaaccaagaagggcgctcttcgtcaccatcgccatcagcttcgccgttatatacatcgcctgccgcaacggcagcggcggcggggcgctcaacatggtcgcctccgtggtctccatgtttttcctttggacgtacggaataatcaacctggccgccttcgttga

SEQ ID NO: 65824 - protein, 281 aa, Unknown
  Obtained from environmental sample
  misc_feature (1)..(281): Xaa is any amino acid
MAGSYIAVALHPILPHRLRRSHGADVPGARHILRSYSLRDLRRHRRALATRRGGGGQGAVHRAGHTRARHNSVPRRRGHPLRFQDFRRKREAARGQQIHLLDALRHILPGGDRHPLRGQYVGRPQKPGAFDPERHPHRHRRRLLGLRRRDNPLRRRDKAFRPHRQTLRKPAPPLGSRHGLPRGARRDGRHAVERAGHNLRRAARVAVARPRQDTQAGQRLRQGDARGRTKKGALRHHRHQLRRYIHRLPQRQRRRGAQHGRLRGLHVFPLDVRNNQPGRLR

SEQ ID NO: 65825 - DNA, 753 bp, Unknown
  Obtained from environmental sample
  misc_feature (1)..(753): n is a, c, g, or t
atggaaaagatgtatcacattgacttcgacgatacccacggtgcttcctacgcgattctccccggcgatcccggcagggtggaaaaaattgcttcgtatctggagaacccccgcttcttccaccagaaccgcgaatacacaacctggcttggagaatattcaggcaggactgtgatggttatatctaccggcatgggcggcccttccacggcaatcgctgtggaagagcttttcaaaacaggagtacgcaatttcatccgggtcggtacctgcgggggcatggcgctgcctgttttgggcggagacattgttatagcgaccggagctatccgcatggaaggcaccaccagggaatacgttcccgttgaatttccggcggtagcaaaccttgacattaccaatgccctggtcgaagccgccaaaaagctcaacgcgcaatggcacgccggaatcgtgcagtgcaaggattctttttacgggcagcacaatcccgaactaatgcccgttggctatgagctaacgaacaagtggggcgcctggataaaagccggctgcctcgcttccgaaatggaaagcgccgctcttttcattgtgagtcagatacttggcgcaagggcgggctgtgtgcttaacgtggtgtggaaccaggaacgggaacgcgccggcatgagcaacccacacagtcacgacacaagcactggcatcaaagccgcggtagaggcaatccgcatcttaatcgggaaagaagattaa

SEQ ID NO: 65826 - protein, 250 aa, Unknown
  Obtained from environmental sample
  DOMAIN (16)...(242): Phosphorylase family
  misc_feature (1)..(250): Xaa is any amino acid
MEKMYHIDFDDTHGASYAILPGDPGRVEKIASYLENPRFFHQNREYTTWLGEYSGRTVMVISTGMGGPSTAIAVEELFKTGVRNFIRVGTCGGMALPVLGGDIVIATGAIRMEGTTREYVPVEFPAVANLDITNALVEAAKKLNAQWHAGIVQCKDSFYGQHNPELMPVGYELTNKWGAWIKAGCLASEMESAALFIVSQILGARAGCVLNVVWNQERERAGMSNPHSHDTSTGIKAAVEAIRILIGKED

SEQ ID NO: 65827 - DNA, 3321 bp, Unknown
  Obtained from environmental sample
  misc_feature (1)..(3321): n is a, c, g, or t
ttgcgtattacggagtggcagggcggccttgaaaagcggctttccgcaatcggcgaaagttccgaaaaagccctgctcaagatggaaaatgaccaagcggaagagatgaagaaaaccttgtccgccatggacacgagccttgtgtcggaacttgatcgccttaaatcggcgacgggcgcttttgaagatggaatactggctcaaatgaaaggcgcctatgattctgttgcttcctttaaggaacagcttaacagcggctttgaagacgccaaaattgagcttcaggctctggttgataaaacccgggaagaatggcatgccgaaagaagcgactgggaaaccaaagacaaggctatcggagaggaacgaaaaaaagatttggaagcctttgccgcaaagcttgacgcctccaaaaagcaaatagaaaatttttccttgctggcaaacaaaattgtaagctcacaggaggccctgcttgttaaagccgccgaggaaatgaagcagaaagccctggaaaccagcgccgccaaactggaggaataccgccgcgcccaggacatcgaattcaaacggcttgaggcccttgccgacgattccagaaaactggacgcggagcttcgccattatatacatgatttaatcggacggcttaaagaggaattttccggctaccagagtgaagccgaagagctgcggaaagccgaaactgaaaaattctcctcaaccgcaacgcgccttgacgagaagatgacggaaattgaaaaagggcttgaggccctgaaatcggccgcacatgaaaatattaagggagaattaaaatcacttgaaaatgaattcctggccgaactaaccaaacgcagtaatgatataggtttgcgcattgaggagtggcagggcggccttgacaagcggctttccgctatcggcgagaattccgaaactgttttgcgcgggctggaacacaaccgagaggaagaaactaagaaaaccttgtccgccatgggtacacacctcgtatcggagcttgaacgactgaaatcgcagacaggcactttagaagagggattactggctcagatgaaagccgccaacgatgctgttacctactttaaggaacagcatgaagaaaaaacaaagaaaaccttgtccgccatgggcgcacgccttgtatcggaacttgaacgcctgaaatcggaaaccgacgcttttgaaaaggggatacagggccagatgaaagccaccgacgatgctgtttcttcttttaaggaacagcttaactctggctttgaggacgcaaaaattgagcttcagactctggttgacaatatccgggaagaatggcgtgtcgaaagaaacgactgggaaaacaaggacaaggctattggcgaggaacgaaagaaagatttggaaacctttaccgcaaggcttaacgcctccaaaaagcagatagatgatttttcaacacggataaatgaaattatcggttcccaggaagccctgcttcttaaagccgccgaggaaatgaagcagaaagcccttgaggtgaacgccgccaagctggaagaataccaccgcgctcaggacatcgaattccggcggcttgaggcccttgccgacgattccagaaaactggacacagagcttcgccattacatacaggagctaatcggtcagcttaaagaggaattctccggctaccaggcggaagccgaagagttgcggaaagccgaaacggaaaatttctccttgactgcggcgcgtcttaacgaggaaatgacgcaaattgaaaaagaccttgcggatctgaaagctactacccatgaaaatatgacgggagaactaaaaacatttgaaaatgaattcttagccgatcttaccaaacgcaacaacgatataggtttgcgcataacggagtggcagggcgaccttgaaaagcggctttccatgatcagcgagaattccgaaacagccctgcgcaagctggaacacgaccaggcggaagagatgaaaaaaaccttggccgccatggacgctcgccttgcatcggagcttgaacgcctaaaatcaaagacaggcgcgtttgaagagggaataatgggccagattaaagccgccgacgattctgtttcctcttttaaggaacagcttgatcgcggccttgaagacaccagaaaggaagcggagatttccattaaagctgaaatcgggaattattccattacagcggcggagacggttaaaaaataccagcgtgaacttgacgacgcgtggaacagactttcggcaaagttcatagaactggatgaaaacgttgatgaagcacatcagcgggtcagggacttggccgccgagacggacacccgcatcgcgtcggtgcgctcctcggtggaggatgcggaacggcatatcaaagaagcgaaggagcaaacaaagattattgacgtggccaaggcgatgaagctggacttggagcgcagtatcgaggatcttaagggagatatcgatcgccttgatcaacgcagggccgaagccgccaagcttgaaaacgaattcatcaaaatcaagcatcacgaggacgatatcaacgccaagtatatcaagatcctttcggaagaacgcagaattgaaaatatggaagcgaactttagccgcttccttcagatttcacgctcggtggaagaaaagctcgcggatgttaccgcgtcgaacgataccctcctgggagtacaggtccagatccgcaaactcgaagaggctctgggcaataccgaggaaagataccagaggcttgaacgaaagaatcaggttctggacaacaccaacgatggcatagacaggaatttcaaggctttgcaggatacagaaaagctgtccgacaaaatagggggagaacttgttcaatatgccgacgagctggaaagaataagaactaccattgaaaagctttcggcggaaagcgaaaaagccgcaaacgctgtggatcgcatcgatgtgcttaaagacgcccttgaggaaattgaggagcggattaaatccatgcagagggcaaggcagtggattgccgatgccgaaacccgacttgaggaactcaacaggcaggcgcagacccaggtcaaggcgatggactcgcttgtaaaaaaaggcaaaaaatccggcaaaacaacggatgtagatgacggaaacctatccgagcagaagaagagagacatcgtcattcttgcggaacagggctggactgtcgaacaaatagccaaagccgagaaagtctcaataggcgttgtacagctcgttctggagatggctccaagggaaagggactaa

SEQ ID NO: 65828 - protein, 1106 aa, Unknown
  Obtained from environmental sample
  misc_feature (1)..(1106): Xaa is any amino acid
MRITEWQGGLEKRLSAIGESSEKALLKMENDQAEEMKKTLSAMDTSLVSELDRLKSATGAFEDGILAQMKGAYDSVASFKEQLNSGFEDAKIELQALVDKTREEWHAERSDWETKDKAIGEERKKDLEAFAAKLDASKKQIENFSLLANKIVSSQEALLVKAAEEMKQKALETSAAKLEEYRRAQDIEFKRLEALADDSRKLDAELRHYIHDLIGRLKEEFSGYQSEAEELRKAETEKFSSTATRLDEKMTEIEKGLEALKSAAHENIKGELKSLENEFLAELTKRSNDIGLRIEEWQGGLDKRLSAIGENSETVLRGLEHNREEETKKTLSAMGTHLVSELERLKSQTGTLEEGLLAQMKAANDAVTYFKEQHEEKTKKTLSAMGARLVSELERLKSETDAFEKGIQGQMKATDDAVSSFKEQLNSGFEDAKIELQTLVDNIREEWRVERNDWENKDKAIGEERKKDLETFTARLNASKKQIDDFSTRINEIIGSQEALLLKAAEEMKQKALEVNAAKLEEYHRAQDIEFRRLEALADDSRKLDTELRHYIQELIGQLKEEFSGYQAEAEELRKAETENFSLTAARLNEEMTQIEKDLADLKATTHENMTGELKTFENEFLADLTKRNNDIGLRITEWQGDLEKRLSMISENSETALRKLEHDQAEEMKKTLAAMDARLASELERLKSKTGAFEEGIMGQIKAADDSVSSFKEQLDRGLEDTRKEAEISIKAEIGNYSITAAETVKKYQRELDDAWNRLSAKFIELDENVDEAHQRVRDLAAETDTRIASVRSSVEDAERHIKEAKEQTKIIDVAKAMKLDLERSIEDLKGDIDRLDQRRAEAAKLENEFIKIKHHEDDINAKYIKILSEERRIENMEANFSRFLQISRSVEEKLADVTASNDTLLGVQVQIRKLEEALGNTEERYQRLERKNQVLDNTNDGIDRNFKALQDTEKLSDKIGGELVQYADELERIRTTIEKLSAESEKAANAVDRIDVLKDALEEIEERIKSMQRARQWIADAETRLEELNRQAQTQVKAMDSLVKKGKKSGKTTDVDDGNLSEQKKRDIVILAEQGWTVEQIAKAEKVSIGVVQLVLEMAPRERD

SEQ ID NO: 65829 - DNA, 762 bp, Unknown
  Obtained from environmental sample
  misc_feature (1)..(762): n is a, c, g, or t
ttgcgcattacggaatggcagggcggccttgaaaagcggctttccgctatcggcgaagattccgaaaaagccctgcgtaagctggaacacgaccatgcggaggagatgaagaaaaccttgtccgcgatggacacgagccttgtgtcggagcttgatcgcctaaaatcggcgacgggcgcttttgaagagggcatactggctcaaatgaaaggtgcctatgattctgtagcttcctttaaggaacagcttaactctggctttgaagatgccaaaatcgagcttcaggccctggttgataaaacccggaacgaatggcgtgccgaaagaagcgattgggaaaccaaagacaaagccataggcgaggaacgcaagaaagacctggaagcctttaccgcaaagctcgatgcctccaaaaagcaaattgaaggtttttctatgcaggctaatgagattataagttcccaggaaaccctgcttgttaaagccgccgaggaaatgaagcagaaagccctggaaaccagcgcagccaagctggaagaataccgccgcgcccaggacgttgaattcaaacggcttgaaagccttgccgacgattccagaaaactggacgcggagcttcgccaatatatgcaggaatcaatcgaacggcttaaagaggaattttccggctaccaggcggaagccgaagaattgcggaaagccgagacggaaaaattctcctcaacccgcaacgcgtcttggcgggaagatgacggaatttga

SEQ ID NO: 65830 - protein, 253 aa, Unknown
  Obtained from environmental sample
  misc_feature (1)..(253): Xaa is any amino acid
MRITEWQGGLEKRLSAIGEDSEKALRKLEHDHAEEMKKTLSAMDTSLVSELDRLKSATGAFEEGILAQMKGAYDSVASFKEQLNSGFEDAKIELQALVDKTRNEWRAERSDWETKDKAIGEERKKDLEAFTAKLDASKKQIEGFSMQANEIISSQETLLVKAAEEMKQKALETSAAKLEEYRRAQDVEFKRLESLADDSRKLDAELRQYMQESIERLKEEFSGYQAEAEELRKAETEKFSSTRNASWREDDGI

SEQ ID NO: 65831 - DNA, 1518 bp, Unknown
  Obtained from environmental sample
  misc_feature (1)..(1518): n is a, c, g, or t
atggactatattatcgagatgaacgggattacaaaagtattcccgggcgtcatcgccaacgacaatattactcttcaattaaagaggggagaaattcacgctttgttaggtgaaaacggcgccggcaaatctacgcttatgagcgtgcttttcggtctttatcaggcggaaaaaggcataattaaaaaaaacggaaaaaaagttaatattacagggccgaacgacgccagaaaactcggaatagggatggttcaccagcattttaaactggtgcataattttaccgttcttgaaaatattattctcggcgaagagtctgtgaaaaacggcgttttaaattttgaaaacccgcgaaatcaagtaatggaattgtccaaacgctataaactcgatatagatcctgacgcgctgatttccgatataaccgtaggaatgcagcaacgggttgaaatccttaaaatgctctaccgcgaaaacgagattttaatttttgacgagccgaccgcggttcttaccccccaggaaattgaggagttaatgaacataatgaaaaatcttgcggcggaaggcaagtcgattctgttcattactcacaaactggacgagatcaaagcggtcgcggggcgctgtaccgttctgcgcaagggcaaatccaccggaacggcggatgtagcgtccgtttccaaagaagaactttctgaaatgatggtaggcagaaaggtaaatcttatggttgaaaaaacagaaaaacagcccggagatgttattctaaaggcggagaatcttaccgttaccggcaatacttcggacatagcccttgttaataacgcgagttttgaagtgcgggagggcgagattgtctgtattgccggaattgacgggaacggacagcaggaacttgtatacgcccttgccggcatggcggaaattgacagcgggcgcattgtttatgacggaagggaaatttcacataacgacataaggtcgagagggttggcgcatattcccgaagacaggcagaaacacgggctagtgctggattacaatatcgcctacaacctgattttgcagaattatttttccgcgcaatttcaggaaaaaggttttcttaaatttgacgaaattcataaatttgcggaaaacttaataaataattttgacattcgctgcggtcatggatcgcgcactgttacgcgcggaatgtccggcggcaaccagcaaaaggtaattgtcgccagggaaatatccagggattcccgcctgttaatagcggttcagccgacaagggggcttgatgtaggcgctatcgagtatatccacaaacagttagtggcccagcgcgacaaaggaaagggagtgcttttggtttccctggaacttgacgaggtgatgaatgtaagcgacaggattcttgttattcataaggggaatcttgtcgccgacgtaaggccgaaggacgtaacatataaagatttgggtctttatatgctgggagccgcaaagcaaaacgcggcgtaa

SEQ ID NO: 65832 - protein, 505 aa, Unknown
  Obtained from environmental sample
  DOMAIN (284)...(476): ABC transporter
  misc_feature (1)..(505): Xaa is any amino acid
MDYIIEMNGITKVFPGVIANDNITLQLKRGEIHALLGENGAGKSTLMSVLFGLYQAEKGIIKKNGKKVNITGPNDARKLGIGMVHQHFKLVHNFTVLENIILGEESVKNGVLNFENPRNQVMELSKRYKLDIDPDALISDITVGMQQRVEILKMLYRENEILIFDEPTAVLTPQEIEELMNIMKNLAAEGKSILFITHKLDEIKAVAGRCTVLRKGKSTGTADVASVSKEELSEMMVGRKVNLMVEKTEKQPGDVILKAENLTVTGNTSDIALVNNASFEVREGEIVCIAGIDGNGQQELVYALAGMAEIDSGRIVYDGREISHNDIRSRGLAHIPEDRQKHGLVLDYNIAYNLILQNYFSAQFQEKGFLKFDEIHKFAENLINNFDIRCGHGSRTVTRGMSGGNQQKVIVAREISRDSRLLIAVQPTRGLDVGAIEYIHKQLVAQRDKGKGVLLVSLELDEVMNVSDRILVIHKGNLVADVRPKDVTYKDLGLYMLGAAKQNAA

SEQ ID NO: 65833 - DNA, 354 bp, Unknown
  Obtained from environmental sample
  misc_feature (1)..(354): n is a, c, g, or t
atgcgcccgctgtcaatttccgccatgccggcaagggcgtatacaagttcctgctgtccgttcccgtcaattccggcaatacagacaatctcgccctcccgcacttcaaaactcgcgttattaacaagggctatgtccgaagtattgccggtaacggtaagattctccgcctttagaataacatctccgggctgtttttctgttttttcaaccataagatttacctttctgcctaccatcatttcagaaagttcttctttggaaacggacgctacatccgccgttccggtggatttgcccttgcgcagaacggtacagcgccccgcgaccgctttgatctcgtccagtttgtga

SEQ ID NO: 65834 - protein, 117 aa, Unknown
  Obtained from environmental sample
  misc_feature (1)..(117): Xaa is any amino acid
MRPLSISAMPARAYTSSCCPFPSIPAIQTISPSRTSKLALLTRAMSEVLPVTVRFSAFRITSPGCFSVFSTIRFTFLPTIISESSSLETDATSAVPVDLPLRRTVQRPATALISSSL

SEQ ID NO: 65835 - DNA, 762 bp, Unknown
  Obtained from environmental sample
  misc_feature (1)..(762): n is a, c, g, or t
ttggagataattatggataaacaataccacattgattttgacggcagccacggcgcgttatacgcaattctccccggcgatccaggcagggtggaaaaaatcgcatcatttcttgaaaaaccgcgtttttatcatcaaaaccgcgaatacacaacatggttaggcgaattgtcggggaagaccgtgatggtaatatcgaccggcatgggaggaccttcaactgcgatagcggtggaggagctttacaaaacaggagtgcgaaattttataagaatcggcacctgcggaggaatggctcttgacgtattgggcggggacattgttatagcgacgggcgcaatccgcatggaagggacgacaaaggaatatgtgccggttgaattccccgccgtcgccaatcttgatgttacaaacgcgcttgtagaagccgcgaaaaacttaaaacaacaatggcacgcgggcattgtgcaatgcaaagattccttttacggccagcacgaccccgcccgcatgccgtccggctacgagttacaggacaagtgggaagcatggaaaaaagccggctgtcttgcctcggaaatggaaagttccacgcttttcatcgtgagccagatacttggcgcgcgcgcgggctgcgtactaaacgtggtctggaaccaggagcgcgaaaaagccggcatggaaaacccccactgccacgacaccgaagccactatcaaaacagccgtagaagcggtgaggcttttgattaaaatagggtaa

SEQ ID NO: 65836 - protein, 253 aa, Unknown
  Obtained from environmental sample
  DOMAIN (20)...(250): Phosphorylase family
  misc_feature (1)..(253): Xaa is any amino acid
MEIIMDKQYHIDFDGSHGALYAILPGDPGRVEKIASFLEKPRFYHQNREYTTWLGELSGKTVMVISTGMGGPSTAIAVEELYKTGVRNFIRIGTCGGMALDVLGGDIVIATGAIRMEGTTKEYVPVEFPAVANLDVTNALVEAAKNLKQQWHAGIVQCKDSFYGQHDPARMPSGYELQDKWEAWKKAGCLASEMESSTLFIVSQILGARAGCVLNVVWNQEREKAGMENPHCHDTEATIKTAVEAVRLLIKIG

SEQ ID NO: 65837 - DNA, 1140 bp, Unknown
  Obtained from environmental sample
  misc_feature (1)..(1140): n is a, c, g, or t
atgcctgaccggtacgagaaccctctatgtaaaagatacgcaagcgcgcaaatgcagtttattttctcggacgatgataaattttcaccatggcgcaaggtgtggattgcgcttgcggagagccagaaagaacttgggcttgatataagtacggatcagattgacgaaatgaaggctcagcaaacgaacatcaactacgaaacggcggcaaaaattgaggcggaaacaaggcacgatgtaatggcgcatattcgagccttcggcgaacaatgcccgaaagcgaaaccgattatccaccttggagccacttcctgctatgtgggcgacaataccgacatcattcaacagcgcgccgctcttttgcaaataaaaaaacttcttgtaaacgcaatagtcaaactttacgagtttgccgataaatacaaatctcttccctgcctcgccttcacgcattttcaggcggcgcagccgactacggcgggaaaacgagccactctctggatacaggatttattgtccgaccttgaacagcttgagtttacgcttaacggcttaaaattgctcggctgtaaaggcacaacgggaacaggggctagctttctttccctttttgaaggcgatcatgaaaaagtaaaatctcttgaaaaaaaaattgccgaaaaaatgggctttgaaaaagtatatgccgttagcggacaaacctattcaagaaaagtcgattattacacgctgtctgttctttcgggtatcgctcaaagcgcgtataaattctctaatgatattcgtttattgtctcatcttaaagaagttgacgagccgtttgaggacactcaagtaggctcttcggcgatggcgtacaaaagaaacccgatgagaagcgagcgcatagcttccctagcccgttatgtgacagttgacgctcttaatcccgcattgaccgccagcgcacaatggcttgagcgcactcttgatgattccgcaaaccgccgcatttcgattcccgaagcgttcctcgccgtagacgccatactttcgctttacatcaacatctcaggcgggcttaatgtttatcccaaagtaatagaaaaacatttaaacgaagaactgccctttatggctactgaaaatattttaatgtag

SEQ ID NO: 65838 - protein, 379 aa, Unknown
  Obtained from environmental sample
  DOMAIN (11)...(305): Lyase
  misc_feature (1)..(379): Xaa is any amino acid
MPDRYENPLCKRYASAQMQFIFSDDDKFSPWRKVWIALAESQKELGLDISTDQIDEMKAQQTNINYETAAKIEAETRHDVMAHIRAFGEQCPKAKPIIHLGATSCYVGDNTDIIQQRAALLQIKKLLVNAIVKLYEFADKYKSLPCLAFTHFQAAQPTTAGKRATLWIQDLLSDLEQLEFTLNGLKLLGCKGTTGTGASFLSLFEGDHEKVKSLEKKIAEKMGFEKVYAVSGQTYSRKVDYYTLSVLSGIAQSAYKFSNDIRLLSHLKEVDEPFEDTQVGSSAMAYKRNPMRSERIASLARYVTVDALNPALTASAQWLERTLDDSANRRISIPEAFLAVDAILSLYINISGGLNVYPKVIEKHLNEELPFMATENILM

SEQ ID NO: 65839 - DNA, 750 bp, Unknown
  Obtained from environmental sample
  misc_feature (1)..(750): n is a, c, g, or t
atgaaaagaataataagtgggaaagtaagggatgtataccagatttcagacgacaggcttgtcatcgttacgacggacaggatttcggcgtttgacgttatcctgtcaaaacccgtacttaataaaggaaaagttttaaacgccgtttctttattttggtttaattatacaaaagacatcattcccaatcattttatttcaagcgacttaaaagatatgcctgaatattttcagaagagcgaatttgaggggaggacgattttagtaaaaaaacttaaaatactgccgtttgaatttgtcgttaggggatatatgttcggtaatatgtgggaagcatattccaagggaaaagaattctgcggtcaaaagatagaacgcgattataaattggctgaaaaacttgatatccccctatttaccccttcaacaaaagcgcacacagggcacgacgaatatatttctattcaatatctcgccgataagattggccaccacctgacaaaaagaatagaaaaaatttcctttgaactttataacacttgttacaattacgcccacagcatagatattatcatcgccgacaccaaatttgaatttggatttgatgaaaacaacgacctcattcttgcggacgaaatatttactcccgattcaagcatgttctggagtctttccgattatcaggtacgaatttcgccaaagagctctgacaagcaatttgtacgcgactggcttcttacaataaaatag

SEQ ID NO: 65840 - protein, 249 aa, Unknown
  Obtained from environmental sample
  DOMAIN (1)...(249): SAICAR synthetase
  misc_feature (1)..(249): Xaa is any amino acid
MKRIISGKVRDVYQISDDRLVIVTTDRISAFDVILSKPVLNKGKVLNAVSLFWFNYTKDIIPNHFISSDLKDMPEYFQKSEFEGRTILVKKLKILPFEFVVRGYMFGNMWEAYSKGKEFCGQKIERDYKLAEKLDIPLFTPSTKAHTGHDEYISIQYLADKIGHHLTKRIEKISFELYNTCYNYAHSIDIIIADTKFEFGFDENNDLILADEIFTPDSSMFWSLSDYQVRISPKSSDKQFVRDWLLTIK

SEQ ID NO: 65841 - DNA, 1668 bp, Unknown
  Obtained from environmental sample
  misc_feature (1)..(1668): n is a, c, g, or t
ttgggcgccgaagggcggtcagcctgttatcgtttgtttaaatggagggcaggcataatggctattaattatttataccccgaatatgaaatgataagaaattacgacagatgtatctgctgccgcgcctgcgagcgccagtgcgccaacgaagctcatgaatatgtcgccgacattgataagatgttatgcgacgatacaaagtgcgtaaactgccaccgctgcgtttcgctctgccctacccgcgcccttaaagtaataaaatgcggcaatacctacaaacataacgcgaactggaactgtaaaaccattgacgaaatttacaagcaggctgactcaggcggcgtattgctttcgagcatgggtaatcctgaaaattatcccgtgtactttgacaaaatacttttaaacgcctcgcaggttacaaacccgtccatagacccgttacgcgaaccgatggagacaagggtatctctcggcgcaaagccaataagtattgaacgcaataaaaaaagcaggattataaacaatctgccgccgcaactgcatttgtctatgcctgtaatgttttccgctatgagttacggttcgataagttacaacgctcatgaaagtttggctcgcgccgcagaggagcttggcattctttacaacaccggcgaaggcggtctgcacgaagatttttataaacacggaaaaaatacaatcgtacaagtagcgtcgggacgtttcggcgttcatcctcaatatttaaacgcgggagcggcggttgaaattaaaatgggtcagggcgcaaagcccggtatcggcggacatctgccggggacaaaaatagtaggcgacatttcccgcactagaatgatccccgaaggcagtgatgcgatttctcccgcgccgcaccacgatatatactctatcgaagatttgcgccagcttgttttttctttaaaagaagcgacaaattatcaaaaacccgtaattgttaaaatcgccgcagtgcataacgttactgcgattgccagcggcatagcaagaagcggcgcggatataatcgctattgacggtttccgcggcggcactggagccgcgccgactcgcatacgcgatcatgtcggtattcccatagaacttgcccttgccggcgttgacaagcggttacgcgacgaaggcattcgtgataacgtatctattgtcatcggcggaagtatccgctcaagtaccgacattgtaaaagccgtcgcgctcggcgcagattgcgtgtacataggaagcgccgcgttaatcgctctcggctgtcatttgtgcagaagctgtcacggaggcaagtgcaactggggtatagcgacacaggttcccgaacttgttaaacgccttaaccccgacatcggatacaaacgactcgtcaatttattaacagcatgggatcacgaaataaaagaaatgatgggcggcatggggattaactcgattgacggattaaaaggaaacagacttatgttgcgcggagtcggattaaatgaaaaagaattagaaattttaggcattaagcacggctgcagaataaggaaggaaaatgaaaagaataataagtgggaaagtaagggatgtataccagatttcagacgacaggcttgtcatcgttacgacggacaggatttcggcgtttga

SEQ ID NO: 65842 - protein, 555 aa, Unknown
  Obtained from environmental sample
  DOMAIN (62)...(85): 4Fe-4S binding domain
  misc_feature (1)..(555): Xaa is any amino acid
MGAEGRSACYRLFKWRAGIMAINYLYPEYEMIRNYDRCICCRACERQCANEAHEYVADIDKMLCDDTKCVNCHRCVSLCPTRALKVIKCGNTYKHNANWNCKTIDEIYKQADSGGVLLSSMGNPENYPVYFDKILLNASQVTNPSIDPLREPMETRVSLGAKPISIERNKKSRIINNLPPQLHLSMPVMFSAMSYGSISYNAHESLARAAEELGILYNTGEGGLHEDFYKHGKNTIVQVASGRFGVHPQYLNAGAAVEIKMGQGAKPGIGGHLPGTKIVGDISRTRMIPEGSDAISPAPHHDIYSIEDLRQLVFSLKEATNYQKPVIVKIAAVHNVTAIASGIARSGADIIAIDGFRGGTGAAPTRIRDHVGIPIELALAGVDKRLRDEGIRDNVSIVIGGSIRSSTDIVKAVALGADCVYIGSAALIALGCHLCRSCHGGKCNWGIATQVPELVKRLNPDIGYKRLVNLLTAWDHEIKEMMGGMGINSIDGLKGNRLMLRGVGLNEKELEILGIKHGCRIRKENEKNNKWESKGCIPDFRRQACHRYDGQDFGV

SEQ ID NO: 65843 - DNA, 549 bp, Unknown
  Obtained from environmental sample
  misc_feature (1)..(549): n is a, c, g, or t
atgaaggaaattaccgacgagccgctgatctggcgttactttgttacgccgctgcctaccagactcgcggacagccagcttgacgagcgggaatttacctccaaatgcgtgttcaacgtcaataccaggattgaaggcgcttatgtgttttccagcggaaaaaacatgggcgtatttaaggcggtcggattccccgaagatgtcgggcgcttttacaagcttgaggaatatgaaggctggtgttttacggcacacgggcgttacccgaccaacacgccgggctggtggggcggcgcccatcccttttcactgcttgattatacggtggtgcataacggcgaaatatcttcctacgataccaaccggcgcgctatcgaaatgtacggctataaatgtacgctccagaccgataccgaagtcattacctatattattgattacctgcacagaaaacagaatctttctttaagcgaaatcgcttcggtcatctccgcttcgttctggcaaaccatcgaaaaagcagccgccggacgaaagggagacgcatga

SEQ ID NO: 65844 - protein, 182 aa, Unknown
  Obtained from environmental sample
  misc_feature (1)..(182): Xaa is any amino acid
MKEITDEPLIWRYFVTPLPTRLADSQLDEREFTSKCVFNVNTRIEGAYVFSSGKNMGVFKAVGFPEDVGRFYKLEEYEGWCFTAHGRYPTNTPGWWGGAHPFSLLDYTVVHNGEISSYDTNRRAIEMYGYKCTLQTDTEVITYIIDYLHRKQNLSLSEIASVISASFWQTIEKAAAGRKGDA

SEQ ID NO: 65845 - DNA, 1155 bp, Unknown
  Obtained from environmental sample
  misc_feature (1)..(1155): n is a, c, g, or t
atgagtgatatacaaattaatcaggaaacccacaattccgccgagtcgcaaaaaatagcggaaatctcaaaacacgggtatcagttattaaaagaaaataacgtaagcgaagctattgattgtttttccaagattcttcttttggatgaaaacaacaactacgcgcttgtgggcatgggagacgcggcgcgcaagaacggctcaatccgcgacgcggttaattattatcaaagatgccttaaccaccatccgggaaataattacgcgcttttcggtcttgcggattgttacaaggcgatgaaccagtatcaaaaggcgattgaaatttgggagcagtaccttgtacatgacgataaaaatataacggtgcttacaagaatagcggacgcttacaggaaggttagggattttaaaaattcaaaaaacaactatttaaaagttttagatatggaaggctccaacgcttacgcgattatcgggcttggtcatctgcattacgattttaaggaatatgatgccgctctttcatactgggaaagaatgttggaagccgcgaatcacgatgttgatatccgcgtccttacctctattggaaactgccatagaaaattaaaaacattcaataagggcatacctttttttgagactgtactgggaagagagccaagtaatttttacgcgcttttcgggcttgccgattgttaccgaggcatgaatcaggtaaataattccctttctttctggcttcgtattcttgaacaagacccaagaaacaaaatgattcttacccgcgccggagacgcgtaccgtaacttaaaagattttgataacgcaaaatcattttacgaaagagcgttaaacattgaatttgacacatacgccgttatggggcttgcccttatcgccaaagaacaggataaatatgacgaggctatcatctcatttaagcggttaattcaacaggacaataaaaattaccgtctttattcggagcttgcggattgttatatcaaaacgggcgataaacgaaacgccgctgaaacgctggaatcgtttcaaaaacttgggataaaaaatcaaaaaattacgganatgcttgaattactgaatgaaacgcataagggtgaaaaatcacacacggcaaatactcaatga

SEQ ID NO: 65846 - protein, 384 aa, Unknown
  Obtained from environmental sample
  DOMAIN (87)...(120): Tetratricopeptide repeat
  misc_feature (1)..(384): Xaa is any amino acid
MSDIQINQETHNSAESQKIAEISKHGYQLLKENNVSEAIDCFSKILLLDENNNYALVGMGDAARKNGSIRDAVNYYQRCLNHHPGNNYALFGLADCYKAMNQYQKAIEIWEQYLVHDDKNITVLTRIADAYRKVRDFKNSKNNYLKVLDMEGSNAYAIIGLGHLHYDFKEYDAALSYWERMLEAANHDVDIRVLTSIGNCHRKLKTFNKGIPFFETVLGREPSNFYALFGLADCYRGMNQVNNSLSFWLRILEQDPRNKMILTRAGDAYRNLKDFDNAKSFYERALNIEFDTYAVMGLALIAKEQDKYDEAIISFKRLIQQDNKNYRLYSELADCYIKTGDKRNAAETLESFQKLGIKNQKITXMLELLNETHKGEKSHTANTQ

SEQ ID NO: 65847 - DNA, 1047 bp, Unknown
  Obtained from environmental sample
  misc_feature (1)..(1047): n is a, c, g, or t
atgatttctctttccgcgcttactattacagaaatagaagaattactccctgccctgccccgtttccgcgccggtcaaatattcaaatggatagccaaaggtgtaaattctcttgaggagatgacaaacatccccgtatcccttcgtaatgaattaagcgccgaattccgtctttattcaagcaagattgacggcgtacatgaggacggagacgcaagaaaatatgtcttttctctggaagacggggcaaaaattgaatcggtactgttaaacgacgggaaaaaccgccttacagcgtgtctttccacccaagccggctgtcccgcaggatgtgtcttttgcaaaacaggctcgctgggctttaaacgaaaccttgactgcgcggaaattatcgagcagtttttactcctgcggcttgcctctaagggcaaggattcagggcacatcatagacaatattgtcataatgggcatgggcgaaccgcttttgaaccttccaaatttaagaaaagccattctgttgttaaacaacaaaaagggaattaacttttctttgcgaagaattacaatttccacctgcggcatttgcgacggtctttatgaccttgcccaaaacggaccgtatgtcaggctcgccctttcgctaacaacagcggacgaagccctgcgccaaaaactgatgcctataacaaaatcaaatcctcttgagaaagtaaaggagaaccttctgctttttcagaaaaaaagcggcggcaggctcactcttgaagtgccgcttctcaaacaggtaaatacccgcgaaatagacgctaaatccatagcggaattcgccaaagggttggatagcatcgtaaatatcataccctggaatcctgtcgcggggtttgagtttgaggggaagccgctttgcgaaccggagaaaagggaaacggaagattttattcgcaaattggaaagttacgggttaaaagttaccatgcggcttcataaggggagatctgtcatgggtgcgtgcgggcagttaggcgttatttcaccgggacaatag

SEQ ID NO: 65848 - protein, 348 aa, Unknown
  Obtained from environmental sample
  DOMAIN (101)...(274): Radical SAM superfamily
  misc_feature (1)..(348): Xaa is any amino acid
MISLSALTITEIEELLPALPRFRAGQIFKWIAKGVNSLEEMTNIPVSLRNELSAEFRLYSSKIDGVHEDGDARKYVFSLEDGAKIESVLLNDGKNRLTACLSTQAGCPAGCVFCKTGSLGFKRNLDCAEIIEQFLLLRLASKGKDSGHIIDNIVIMGMGEPLLNLPNLRKAILLLNNKKGINFSLRRITISTCGICDGLYDLAQNGPYVRLALSLTTADEALRQKLMPITKSNPLEKVKENLLLFQKKSGGRLTLEVPLLKQVNTREIDAKSIAEFAKGLDSIVNIIPWNPVAGFEFEGKPLCEPEKRETEDFIRKLESYGLKVTMRLHKGRSVMGACGQLGVISPGQ

SEQ ID NO: 65849 - DNA, 1176 bp, Unknown
  Obtained from environmental sample
  misc_feature (1)..(1176): n is a, c, g, or t
ttggcgggtgaaagccgctgtataatagctttccgccaccctaacggcggggaacctcaaattctgacaacatattttctttttaagcttaaacattacgccgccaaaatgggcgttcattttaatcgcagaccgcacgcggtattcgcttatggttatgatgtgctccgctggggcggttgggtggcacggtatatcatgcccaatgtcgggggtatgcctgtctatcattcaaaaatggattcaaaaggaatctcaaggcttcgtaagacaatagttgacggaccttatccgctggcaatagcgccggaagggcagatcacctattccgccgataccgtttcacggctggaaccgggtattttccgcattggttttcaggcagtccagcagataaaggataaaaacatgaattgtcccgtggaagttcttcccgtatcaattcatttccgattcggcattatagggaaaagatcaaaagaacggcttttaagaaagattgaaggctattgcggccttccaaaaaaaacaagaaaacttcctttagccgaaagacttattttatgcagagaacatattcttgaagtaaatgaaaaacgctataacattgccaacgacggttctctttcttttaatgaacgtcttgatcgtctggtcaatgccgctcttgaaaccgcggaaagaatgcttggtataaagggggaaagagattcattctcgcgtatgcacagaatacgccagatatgctgggacagaatttatctgcccggcgtggacaaactcaaccatctttcatatattcagcgcaacgcggccgacattggagcgggagaagcgtggtatatcgcgcgtcatcaggaacttgctgatttctgcctgtccttccgaaacgaacctcctacggaagaatcttcccttcacagtaaagttgagtacattcaaaatctttggaattttgcaagccgtactatgggcggcgcggtggaagataaaaataatatttttatccggaaagtgataattcaaccgggacctgccatcaatttaagcgaatatctttctgattataataaagacaaaaaagccacggtcgccgctgtaatgtcaaagctggaaaaagcgttcttggattgcattgatgtggcggacaagacggaaaaagacagatatcaataa

SEQ ID NO: 65850 - protein, 391 aa, Unknown
  Obtained from environmental sample
  misc_feature (1)..(391): Xaa is any amino acid
MAGESRCIIAFRHPNGGEPQILTTYFLFKLKHYAAKMGVHFNRRPHAVFAYGYDVLRWGGWVARYIMPNVGGMPVYHSKMDSKGISRLRKTIVDGPYPLAIAPEGQITYSADTVSRLEPGIFRIGFQAVQQIKDKNMNCPVEVLPVSIHFRFGIIGKRSKERLLRKIEGYCGLPKKTRKLPLAERLILCREHILEVNEKRYNIANDGSLSFNERLDRLVNAALETAERMLGIKGERDSFSRMHRIRQICWDRIYLPGVDKLNHLSYIQRNAADIGAGEAWYIARHQELADFCLSFRNEPPTEESSLHSKVEYIQNLWNFASRTMGGAVEDKNNIFIRKVIIQPGPAINLSEYLSDYNKDKKATVAAVMSKLEKAFLDCIDVADKTEKDRYQ

SEQ ID NO: 65851 - DNA, 492 bp, Unknown
  Obtained from environmental sample
  misc_feature (1)..(492): n is a, c, g, or t
atggttgtggatacctttataaggagagatattatgaataaaattacaagatttttgattgcgagcgtactggttacggcgttgatttttaccgcctgcacaaaaaaaacgggaacaactgtttctgtaggagctacgcctgttccccatgcggatttgctcaacctgattaaagacgatctggcggagaatggaatcacgcttaaagttgtggaattcagcgattatttacgccccaatgcggcggtaattgcgggtgatttggatgccaatttttttcagcatattccttatctggaatccaataaggaatggtcgaaaaaactggtttccgctttcggcgtacatatagaaccgttcggactatactcggcaaagttcaaaaatattgatgacttgcccgacggcgctgctattgctattcccaacgatccgtccaacggcggacgagctttgcttctgcttcaggcaaaagggcttatcactctttaa

SEQ ID NO: 65852 - protein, 163 aa, Unknown
  Obtained from environmental sample
  DOMAIN (41)...(163): NLPA lipoprotein
  misc_feature (1)..(163): Xaa is any amino acid
MVVDTFIRRDIMNKITRFLIASVLVTALIFTACTKKTGTTVSVGATPVPHADLLNLIKDDLAENGITLKVVEFSDYLRPNAAVIAGDLDANFFQHIPYLESNKEWSKKLVSAFGVHIEPFGLYSAKFKNIDDLPDGAAIAIPNDPSNGGRALLLLQAKGLITL

SEQ ID NO: 65853 - DNA, 1938 bp, Unknown
  Obtained from environmental sample
  misc_feature (1)..(1938): n is a, c, g, or t
atggaccacatggaacttgaaagggaacgcggcattacaattcagtccgccgcgactcaggtaacatggaaagaccatacaatcaacataatcgatacgccgggacacgttgactttacaatcgaagttgaaagatcactgcgcgttttggacggagcgattcttgttctttgcgcggtcggcggagtgcagtcacagtctatcactgttgatcgccagcttaaacgctaccatgttccgcgtatcgcgtttgtaaacaagtgtgaccgtaccggagcaaatcctttcaaggtgcaaaaacagttaggtgaaaagttagggcttaatgcggtgatgattcaaatccccatcgggcttgaagataaaatggaaggcgttgtcgatcttatttccatgaaagccgtctactttgacggagatcagggcgagacaatccgccaagcggaaattccctctcacttaaaagaggaagcggacaaataccgcgaggaacttcttgaagcgctttcaatgttctccgatgaacttgcggaaaaatttcttgagggcggagcgattcccgaagatatgattcacgcggcaattcgcaaaggcactcttgcggagcaatttgttcccgttatgtgcggttccgcttacaagtttaaaggcattcagccgctgatggacggaataacaaattatcttcccaatcctacggaagtaaaaaactacgccctcaatcttgataaaaacgaagaaagcgtcgagcttaacgccgatgaaaaaagtccgactgtcgctctcggttttaaattggaagacggtcaatatggtcagctaacgtatgtcagaatttatcagggtaaactgaagaaaggcgatgaactgcaaaacacccgcgccggcaggaaatttaaagtaggtcggcttgtgcgtatgcacgcggacagtatggaagatattaacgaaggatcgcccggcgacattgttgctctgttcgggattgactgcgcctccggcgatacattctgcggcggcggacttaactacgcaatgacgtcgatgtttgttcctaatcccgttatctctctcgctatttcgccgaaagacaaaaagagcgccgatcaaatggcaaaggctcttaatcgttttacaaaagaagaccccactttccaaacgtatgtcgatcctgaatcgaaccagacaattattaagggaatgggcgagcttcaccttgaagtttacattgagcgtatgcgccgcgagtacaagtgcgaacttgataccggtatgccgcaggtagcttaccgcgaaacaattacgcaaaaagcggaatttaactatacccacaaaaagcagacgggcggcgcgggacaattcggacgcgttgcgggttacatggagccgtatacagagggcgattacgagtttgtcgatatgatcaagggcggctcgattcccaccgagtatgtgcctagctgcgataaaggattcaaagaggcgattaaaaaaggcagtcttatcggcttcccaatcgtcaatatccgctgtgttatcaacgacggtcagagccacccggtagactcctcggatatcgcgttccaatctgcggcaatcggcgctttccgcgaggcgtataacaaggcaaaaccctgtattcttgaacctatcatgaaagtatcagtggaaggaccgactgaattccagggaaatattttcggctcaattaaccaaagacgaggtataattatatcttccgttgaggaaggacatttttcgcgcgtggaagccgaagttccgttaagcgagatgtttggttattcaacggttttgcgttcgctcactcagggaaaagccgagtttacgatggagtttgaaaaatactcaaaagttccgcagggcgtttccgaagagttaattaaaattgcggaaaaaaagaagaaagaaggtaagtaa

SEQ ID NO: 65854 - protein, 645 aa, Unknown
  Obtained from environmental sample
  DOMAIN (272)...(338): Elongation factor Tu domain 2
  misc_feature (1)..(645): Xaa is any amino acid
MDHMELERERGITIQSAATQVTWKDHTINIIDTPGHVDFTIEVERSLRVLDGAILVLCAVGGVQSQSITVDRQLKRYHVPRIAFVNKCDRTGANPFKVQKQLGEKLGLNAVMIQIPIGLEDKMEGVVDLISMKAVYFDGDQGETIRQAEIPSHLKEEADKYREELLEALSMFSDELAEKFLEGGAIPEDMIHAAIRKGTLAEQFVPVMCGSAYKFKGIQPLMDGITNYLPNPTEVKNYALNLDKNEESVELNADEKSPTVALGFKLEDGQYGQLTYVRIYQGKLKKGDELQNTRAGRKFKVGRLVRMHADSMEDINEGSPGDIVALFGIDCASGDTFCGGGLNYAMTSMFVPNPVISLAISPKDKKSADQMAKALNRFTKEDPTFQTYVDPESNQTIIKGMGELHLEVYIERMRREYKCELDTGMPQVAYRETITQKAEFNYTHKKQTGGAGQFGRVAGYMEPYTEGDYEFVDMIKGGSIPTEYVPSCDKGFKEAIKKGSLIGFPIVNIRCVINDGQSHPVDSSDIAFQSAAIGAFREAYNKAKPCILEPIMKVSVEGPTEFQGNIFGSINQRRGIIISSVEEGHFSRVEAEVPLSEMFGYSTVLRSLTQGKAEFTMEFEKYSKVPQGVSEELIKIAEKKKKEGK

SEQ ID NO: 65855 - DNA, 768 bp, Unknown
  Obtained from environmental sample
  misc_feature (1)..(768): n is a, c, g, or t
ttggaacgcgatatccgaggagtctaccgggtggctctgaccgtcgttgataacacagcggatattgacgattgggaagccgataagactgccttttttaatcgcctctttgaatcctttatcgcagctaggcacatactcggtgggaatcgagccgcccttgatcatatcgacaaactcgtaatcgccctctgtatacggctccatgtaacccgcaacgcgtccgaattgtcccgcgccgcccgtctgctttttgtgggtatagttaaattccgctttttgcgtaattgtttcgcggtaagctacctgcggcataccggtatcaagttcgcacttgtactcgcggcgcatacgctcaatgtaaacttcaaggtgaagctcgcccattcccttaataattgtctggttcgattcaggatcgacatacgtttggaaagtggggtcttcttttgtaaaacgattaagagcctttgccatttgatcggcgctctttttgtctttcggcgaaatagcgagagagataacgggattaggaacaaacatcgacgtcattgcgtagttaagtccgccgccgcagaatgtatcgccggaggcgcagtcaatcccgaacagagcaacaatgtcgccgggcgatccttcgttaatatcttccatactgtccgcgtgcatacgcacaagccgacctactttaaatttcctgccggcgcgggtgttttgcagttcatcgcctttcttcagtttaccctgataaattctgacatacgttag

SEQ ID NO: 65856 - protein, 255 aa, Unknown
  Obtained from environmental sample
  misc_feature (1)..(255): Xaa is any amino acid
MERDIRGVYRVALTVVDNTADIDDWEADKTAFFNRLFESFIAARHILGGNRAALDHIDKLVIALCIRLHVTRNASELSRAARLLFVGIVKFRFLRNCFAVSYLRHTGIKFALVLAAHTLNVNFKVKLAHSLNNCLVRFRIDIRLESGVFFCKTIKSLCHLIGALFVFRRNSERDNGIRNKHRRHCVVKSAAAECIAGGAVNPEQSNNVAGRSFVNIFHTVRVHTHKPTYFKFPAGAGVLQFIAFLQFTLINSDIR

SEQ ID NO: 65857 - DNA, 723 bp, Unknown
  Obtained from environmental sample
  misc_feature (1)..(723): n is a, c, g, or t
atggtattaagtgaacttatacaacgcagtccaatccgcatttttgaacaaacaattaagggcggattaaaagccggagaaatcggagttatcgcttcacctaacggagttggaaaaacgtcggttcttgtacagcttgcccttgataaacttcttcagggtaaaaaagtaattcatgtttctttttcaagccacaattcattgggacagcttattcatcatgttcctgtttggtataacgatatttttgatgaatttatcaacaaaaaaaatcttgagaacgcggtggaaataaaagacaaccttgttaaaaaccgcgtattaatgaactttaatcaggaaggaatcacgaaggatcaacttcttaaaagtttaagggcaatgataatagaagggggctttaaagccgattcaattattattgacgggtttgatttttctcaaacagaaaaagaaattattgccgctgtaaaaacattcgcgacagaattgggagtgagcgtttggtacagttgttccgtaaaagacgaaacgtctcagtacgataaggaaaacattcccgtaatgctgaatacttttatcgacagtattgatattgtaattattttacagccgaaacatgatcacgtagagctttcaatttccaaggacagggattcaattatttcaaaggcaatggctatgaaacttgacccgaaaaccctgttgatactggaatcgtaa

SEQ ID NO: 65858 - protein, 240 aa, Unknown
  Obtained from environmental sample
  misc_feature (1)..(240): Xaa is any amino acid
MVLSELIQRSPIRIFEQTIKGGLKAGEIGVIASPNGVGKTSVLVQLALDKLLQGKKVIHVSFSSHNSLGQLIHHVPVWYNDIFDEFINKKNLENAVEIKDNLVKNRVLMNFNQEGITKDQLLKSLRAMIIEGGFKADSIIIDGFDFSQTEKEIIAAVKTFATELGVSVWYSCSVKDETSQYDKENIPVMLNTFIDSIDIVIILQPKHDHVELSISKDRDSIISKAMAMKLDPKTLLILES

SEQ ID NO: 65859 - DNA, 651 bp, Unknown
  Obtained from environmental sample
  misc_feature (1)..(651): n is a, c, g, or t
atggcagattcaagcggtcatagggggcgcttgctcgaaaagtacgctgaaagcggactctccgcgtttagcgactacgaagtccttgagtttcttctgaccttcgcgcttccacgcatagacacgaaacctctcgccaaggatctgctggcgcgttacggcacggtgaacgccgtcataaacgccccgctcgacgagctctgcgagattaaggggttggggcggcgctccgcggttctgcttaccctcgtcaaggatatgatagcgtacagtttgagagagggcatcgtagataaacccgtaatcacccaacgcagcgacgtggagaattatttacgttcaacactcagggaacgcagggatgagcgcgtcatcgcgctgtatctggacaacggcaaccgcgttttgggggatgagacagtggctgagggaacggtaaaccgttgcgtgatcttcccgcgcaaggtcatggagggcgctatgaagcactcagccgcctcgttcatacttgtccacaaccacccgggcggaacggcggcggcctcggaagaggactggaagacgacggagcgcctctacaacgcggggaagcaaatcgacatcccgatgctcgaccacatcatcatatcgaaagacaaggcggtcagttga

SEQ ID NO: 65860 - protein, 216 aa, Unknown
  Obtained from environmental sample
  DOMAIN (99)...(216): RadC, DNA repair protein
  misc_feature (1)..(216): Xaa is any amino acid
MADSSGHRGRLLEKYAESGLSAFSDYEVLEFLLTFALPRIDTKPLAKDLLARYGTVNAVINAPLDELCEIKGLGRRSAVLLTLVKDMIAYSLREGIVDKPVITQRSDVENYLRSTLRERRDERVIALYLDNGNRVLGDETVAEGTVNRCVIFPRKVMEGAMKHSAASFILVHNHPGGTAAASEEDWKTTERLYNAGKQIDIPMLDHIIISKDKAVS

SEQ ID NO: 65861 - DNA, 1326 bp, Unknown
  Obtained from environmental sample
  misc_feature (1)..(1326): n is a, c, g, or t
gtgagcgcaaacgttttcagtaccggactcttcctccccgcccaagcggcggcggaaacggaggccatcatcacgaagtggttcgtggccgagggcggcgagataaaaaaaggccaggtcatagccgaggtggagagcgcaaagtccactttcgatttcgaggcgccctgcgacgggcgtatagagaagctgctctacgccgacggcgccacggcgccttttgacaaaccggtggccgtagtggccacggccgacgagtcaatgcgcacttgggagcgccctgcgtccgtccccgccgccgcaacggttgaagacatccccaagatggcgatagtggcagacaaactcgagccttcggtgcggacgataagtctgctgggcatcggggcgtacctgccggacagaatcgttaaaaacgaggagctgctagcggagttccccgatattacggccgactacatcttcaaggtaaccggaataaaggagcggcgctgggcggcggcggacgtcaaaccctccgacatggcctacgaggcgtcgaaaaaagcgatagagaacagcggactcaaaccctccgatatcaacgccataatcgtatcgaccacaacgccggacgtggtgatgccgtccaccgcctgcatcctgcaaggtaaacttggaatacgcggcgctccggccttcgacctgaacgcggcgtgttccgggtggctctacggcatatcggtggctcgagggcttatcctatccggcattgcgaaaaacgttttggtgaccagcgttgacatgcagtcccgagtgatggacaaaagcgacaaggacacctacttcctgttcggcgacggcgcgggggctacggtgctcagcggcgttgaaaaaggccacgtcatcaaagacgagatcctaagcgccgactcgctgggcctaaacatggcgagacgcgggtacccgggctacgaagtgccggtgaactcgtccaccttcgacccgtggctgcgcttggacggcaaggcgctcttccggttcgcgacagaaagtttctcggcaatggtgcgggagcttataataaagagcaagtggacgccggaggaggttcgctgggtggtcccccatcaagccaacgggcggatcatcagagcggcggcgcagaagagcggagtgccttttgagcgtttctatctgaacatagatcgggttggcaacacgtcgagcgcaagtattcctgtggcgctgtcggagatacagaacgggttgcagaagaaagacaaaatcatattctgcacggtaggcgccggaatcacggcggcggggttatcgttggagtggtag

SEQ ID NO: 65862 - protein, 441 aa, Unknown
  Obtained from environmental sample
  SIGNAL (1)...(18)
  DOMAIN (8)...(81): Biotin-requiring enzyme
  misc_feature (1)..(441): Xaa is any amino acid
MSANVFSTGLFLPAQAAAETEAIITKWFVAEGGEIKKGQVIAEVESAKSTFDFEAPCDGRIEKLLYADGATAPFDKPVAVVATADESMRTWERPASVPAAATVEDIPKMAIVADKLEPSVRTISLLGIGAYLPDRIVKNEELLAEFPDITADYIFKVTGIKERRWAAADVKPSDMAYEASKKAIENSGLKPSDINAIIVSTTTPDVVMPSTACILQGKLGIRGAPAFDLNAACSGWLYGISVARGLILSGIAKNVLVTSVDMQSRVMDKSDKDTYFLFGDGAGATVLSGVEKGHVIKDEILSADSLGLNMARRGYPGYEVPVNSSTFDPWLRLDGKALFRFATESFSAMVRELIIKSKWTPEEVRWVVPHQANGRIIRAAAQKSGVPFERFYLNIDRVGNTSSASIPVALSEIQNGLQKKDKIIFCTVGAGITAAGLSLEW

SEQ ID NO: 65863 - DNA, 897 bp, Unknown
  Obtained from environmental sample
  misc_feature (1)..(897): n is a, c, g, or t
ttgttcgggcaggacgtgggcaggtacggttcgccgttcaagacctgcaaggggcttatagacaagttcggggaggggcgggttatcgacgtgcctatatgcgaggcggggacggtggggttctgcctgggggcgtcgcaggccggggcgcggccgatcatggagttccagttcgccgacttctccacggaggcggtctcccagctcggcctcaacgccgggacgtggtacttccgctccgacaaggcggcgccgctgctcttccgcctgcccaatggggcgggggtgacgctcggggcctttcactccggggagttcgaggggctgtggtcgcgctttccggggctgaaattattttacccggccaccccccaggaaacctacgaagcgctcatgattggattttatgacgataatccgtgcgtcgtctttgagcataaattactttattggggtaggcccgccgatattgagttcgacggagacctgtcgaaagtctgccgcccacgccaatatacggaggggtcggacattaccgtcatcgcgacgggggcgatggtcgaccaaacgctccgcgccgcggaagagggcaaatattccgccgaggtgtggaatccgttcgtattgaacccgctgaatttcgggcctatagcggagtccatacgcaaaaccgggaggctcttggtcgttcaggagtcgggcgctacggcggggctcggggatcatttcatctcccttgccgtgcgggagtgtttcgggaaactgcggcgcgccccggaacttgtcgccgcgccggacacgccggtgcccttcgccaaggagcttgagacggccttcttgccggattccggcaggatagccgctgttatcgaaaaaatgatcggagatatatcgtga

SEQ ID NO: 65864 - protein, 298 aa, Unknown
  Obtained from environmental sample
  DOMAIN (1)...(152): Transketolase, pyridine binding domain
  misc_feature (1)..(298): Xaa is any amino acid
MFGQDVGRYGSPFKTCKGLIDKFGEGRVIDVPICEAGTVGFCLGASQAGARPIMEFQFADFSTEAVSQLGLNAGTWYFRSDKAAPLLFRLPNGAGVTLGAFHSGEFEGLWSRFPGLKLFYPATPQETYEALMIGFYDDNPCVVFEHKLLYWGRPADIEFDGDLSKVCRPRQYTEGSDITVIATGAMVDQTLRAAEEGKYSAEVWNPFVLNPLNFGPIAESIRKTGRLLVVQESGATAGLGDHFISLAVRECFGKLRRAPELVAAPDTPVPFAKELETAFLPDSGRIAAVIEKMIGDIS

SEQ ID NO: 65865 - DNA, 1782 bp, Unknown
  Obtained from environmental sample
  misc_feature (1)..(1782): n is a, c, g, or t
ttgacaagatcggccgagattcgcggttacggaaacgatgaatctctggcccactggcaggtcttcgacagaacaaacaacattgagctccccagggataaatggacatactcaagcgacaagggcgcggtagccctcaagggaataactccgtggcataaatatactgtcaactttttggcctatagaatctgggaagaaatttccatgtacaaccatgttacaaacaactgggacaaggaacacctgatgcagcttgaccccatgcattgcggcgccaggaaatatcttctggcctggatggataaatggtgcgccgcacatccgcgtaccaatgtggtaaggtttacctcactgttctataactttgtctggatatggggagccagcgaacaaaaccgtcatctctttatagactgggcatcctacgattttacagtcagcccgcgcgcgttaaacgagttcgaaaaagcttacgggtataaaatatgttcagaggattttattaataagggtattttgaattccacgcacctgccgcccggtaaaacgaaaatcgactggatggattttatcagcgcgtttgtcgcacagctaggcagggaatttgttgacatagtacaccgttacggcaagaaggcctatgtgttttacgatgacagctgggttggcatggagccttacggcaagcgcttccagagtattggttttgacggcattatcaaatgcgttttttcaggatttgaagtaaggctctgcgcgggagtcaaagcagagacccacgagattcgccttcacccttatctgtttccggtgggtttaggcggtcttccgacttttaaggaaggcggaaaccccgcggcggacgcggtgaaatactggaatagcgtacggcgcgcgttattgcgggaaccggtacaaagaatcggccttgggggctatcttcatctgacagaaggctttccggatttttgcgactgcatcgaaaccataaaagacgaattcgacgagatactttcgttacacgcgaagggcaaaccttttacgttaaaaccaaaggtagccatactccatgcctgggggagccttcgatcctggacattgtcgggacacatgcacgaaaccagcgagcatgacctgatacacatcaatgaagccctttcaggtctgccttttgaaacgagttttatctcttttgaagatatagaaaacggagtaccagacggaatagacctgataataaatgccggagcgaagggtactgcctggagcggcggtgaaaaatggataaacgaaaaagttgttgaaagccttacggaatgggtacataagggcggcgtctttatcgggctgaacgaaccttcggccattgacggttttgacacaactttcagaatggcccatgtgctggggctggacatggaaaacgccaggacttattgtcacggcaaatggcagtacactgttgatgaagtaagcggccttattccaagcggagccgtgttaggaagcaaaaaagtgcggcttactgacggcagggcaaaggtactcgtggaaagaggcggctgtcctgcaattacggtaaacagtttcggcgccggcaagggcatttacatttcttcgatgttaccattaccaacagaggagagcaggctcgccaatatcaggcttttgttaaatatcattctttatgcctctggaaaagcccttcaatcggactgcgttacagataatttaatacagaatgtgcatggttcgctgaagccgaatacatggttttga

SEQ ID NO: 65866 - protein, 593 aa, Unknown
  Obtained from environmental sample
  misc_feature (1)..(593): Xaa is any amino acid
MTRSAEIRGYGNDESLAHWQVFDRTNNIELPRDKWTYSSDKGAVALKGITPWHKYTVNFLAYRIWEEISMYNHVTNNWDKEHLMQLDPMHCGARKYLLAWMDKWCAAHPRTNVVRFTSLFYNFVWIWGASEQNRHLFIDWASYDFTVSPRALNEFEKAYGYKICSEDFINKGILNSTHLPPGKTKIDWMDFISAFVAQLGREFVDIVHRYGKKAYVFYDDSWVGMEPYGKRFQSIGFDGIIKCVFSGFEVRLCAGVKAETHEIRLHPYLFPVGLGGLPTFKEGGNPAADAVKYWNSVRRALLREPVQRIGLGGYLHLTEGFPDFCDCIETIKDEFDEILSLHAKGKPFTLKPKVAILHAWGSLRSWTLSGHMHETSEHDLIHINEALSGLPFETSFISFEDIENGVPDGIDLIINAGAKGTAWSGGEKWINEKVVESLTEWVHKGGVFIGLNEPSAIDGFDTTFRMAHVLGLDMENARTYCHGKWQYTVDEVSGLIPSGAVLGSKKVRLTDGRAKVLVERGGCPAITVNSFGAGKGIYISSMLPLPTEESRLANIRLLLNIILYASGKALQSDCVTDNLIQNVHGSLKPNTWF

SEQ ID NO: 65867 - DNA, 1167 bp, Unknown
  Obtained from environmental sample
  misc_feature (1)..(1167): n is a, c, g, or t
ttgcgtggatggcggctccgctttataagaaatattgatgatgcccgaagaagcgccgccgcttatagatcaggaaatttatctaatgatgaaaattttaagcctaatccggcttccatacctgtggcgctcaatcttggacttattgacgataaaacggcaatagaagaagtgttttcttctgttacggtaagtaatgatactcctataatttttgataaagaacttccggtaatatttgataaagcgcctccgacattagataaagaagttccgttgattaaaaaagaaataataatcgatacttacaaattacttcgcagtgaagaaggacgcgaggtatttacgcgcaaacttcttacattttccggttttataattgtcgatgacgataacgacggctacatagaaaacgtagtgcattacaacgcgggatttatagattatttaattgacgctctgagtaataatgtttttagatttggagtaaaattcggcttggacaatgatcctgaaaaagtttccgcttttatttcaaaaaatgattcttcgcgcgaacggaatttatcgcggcgtattagtttgcaatgggagcgttatccttccgtaaaacaagcggaattggaaaatgaaatgtttaattttggtcccgtctttttcagttatgcgccaatcaagtttatagagcttggcgggagcgataaacttacgggtcttctgtatcctgaattggactatcaatatatcacccttacttataaagctctcctttcattttgttcaagctattcgcgtcccagcttggaaattgacggcgcgacggaaacaatttatatggataggggagttatactgcgggtaattgaaacgttaaaaggacggcaggtttccgttacggaatttgaaaaaggactgcctgtagttcagcatattgacatcgatcttgacggcagaatggaaacaatacgccgtttccgacgtccgcctccgggttatgagatggaaaatgtccttgactatcgccgtttaatcgcttcttcggaaagcgattggtcgggagacggggtttttaaaacaaaagaagtgtatctacaggacggttcggttgtttattcttttgatatagacggcggcggagaaatgaattactcggaaaccaggaaataa

SEQ ID NO: 65868 - protein, 388 aa, Unknown
  Obtained from environmental sample
  misc_feature (1)..(388): Xaa is any amino acid
MRGWRLRFIRNIDDARRSAAAYRSGNLSNDENFKPNPASIPVALNLGLIDDKTAIEEVFSSVTVSNDTPIIFDKELPVIFDKAPPTLDKEVPLIKKEIIIDTYKLLRSEEGREVFTRKLLTFSGFIIVDDDNDGYIENVVHYNAGFIDYLIDALSNNVFRFGVKFGLDNDPEKVSAFISKNDSSRERNLSRRISLQWERYPSVKQAELENEMFNFGPVFFSYAPIKFIELGGSDKLTGLLYPELDYQYITLTYKALLSFCSSYSRPSLEIDGATETIYMDRGVILRVIETLKGRQVSVTEFEKGLPVVQHIDIDLDGRMETIRRFRRPPPGYEMENVLDYRRLIASSESDWSGDGVFKTKEVYLQDGSVVYSFDIDGGGEMNYSETRK

SEQ ID NO: 65869 - DNA, 582 bp, Unknown
  Obtained from environmental sample
  misc_feature (1)..(582): n is a, c, g, or t
ttgattctcccgatacgttgtaatatgagtatttatacaggaaaaggcgacaaaggaaaaacctccgatctaagcggacgcgaggtctcaaaaaacagcgcggcaattcattttatcggagcggctgacgaacttaactgccacttgggactgattaaagccatgattgccaacgaagacgcctggcaattctccggcaagtctacaattattttcttggaaagagtccaaaaaaatatcgggttaatcatgtcccatgtttccgatataaaaaacagtaacttttttttgccgccccatgaagtcgtcgatctggaaaaagaaatagacagattgcatacctatcttccaaaacaggaaaaactggttataccgggcagaaatatcatagaagcgcaaatacaaataggacggacaatagcaagaaaggcggaaagattatttttcgccgtcagggaagaacagtctctccgcccggaagcgggggcgtatttaaacaggctgtcggattatttatttgttttgtctcagcaggaatcattgataaacgtcaatttcatagatcaagtcgccggtgtttaa

SEQ ID NO: 65870 - protein, 193 aa, Unknown
  Obtained from environmental sample
  DOMAIN (11)...(181): Cobalamin adenosyltransferase
  misc_feature (1)..(193): Xaa is any amino acid
MILPIRCNMSIYTGKGDKGKTSDLSGREVSKNSAAIHFIGAADELNCHLGLIKAMIANEDAWQFSGKSTIIFLERVQKNIGLIMSHVSDIKNSNFFLPPHEVVDLEKEIDRLHTYLPKQEKLVIPGRNIIEAQIQIGRTIARKAERLFFAVREEQSLRPEAGAYLNRLSDYLFVLSQQESLINVNFIDQVAGV

SEQ ID NO: 65871 - DNA, 1344 bp, Unknown
  Obtained from environmental sample
  misc_feature (1)..(1344): n is a, c, g, or t
ttgctctttctcaaaaaggcggtggatgtcaggcagaggcggactgcggcttttttcctttccgtcattgaggatatagggggaggggcgcaaataccgcaggagctaaaggcctacgcgcagggaagggacaccccaacggacatgatcaagggcgtggctactgttttggtagaaaggggcgtaaggattcaacagggcagaggtgttcccgacaacgtgctgggctccgcgttttttgttgacgcgactggactccttatcacaaattaccatgttatttccagcgaggtagatccatcctataaaggctattcccgtatgtatatacgcatgggggattcgacaagcgcccgtataccggccaaagtcatcggctgggacaaggccatggatttagccatcataaagacagagattgttcctgaatatgtctattctgtggtggactggataatacccaatatcggcgaaaccatttacgccattggctcgccggtagggcttgaaaagacagttacgcagggtattgtatccgctcttggaagacgttttctgcagattggagacgttattcaaatagacgccgccgtcaatcacggcaactcaggcggtcccgtagtggataatgaagggcggcttgtgggaatagtttttgcgggtatagatcagcatcaagggttgaattttgccgttcccgccgaaacgctcacctccgctttaccggcgatgataaaaggagggagatcccagcgtccatggcttggaatgacgttaagcgaattaaattcggaagcggaaataatttataccgctccgaatactcccgcttatttgcataaagtcgacgaaggttttattatcaaaacaattaacggaaagactgtaaccgcggacgaaggaggacttattcccactttgcaaaaaacggtttttatgtgcggtcccggggaacttgtagcgttggaaatccttgataaagaaaacaaagaagtaaaaaagaaagttataatgacagtcccgcgccctgatctgccgctccttgacgcggcaaaaattgataagaaggatcgaattgctgctgccttgttcggtatgattcttagtccgatacaaactactgttttttcttcttccagtttcagagtcaaccgcgtagttcgaggttccattgccgatgaagcgggaatttcagaagacgatcccgtcactctttcgcgtttacgcttgttggaagatgaaggtgttgcggtaatggaaattaccgtaaagaaacgccgaatgggttatctggaaacgtcgatgcagcttcccgtttggcttgattctcccgatacgttgtaa

SEQ ID NO: 65872 - protein, 447 aa, Unknown
  Obtained from environmental sample
  DOMAIN (64)...(241): Trypsin
  misc_feature (1)..(447): Xaa is any amino acid
MLFLKKAVDVRQRRTAAFFLSVIEDIGGGAQIPQELKAYAQGRDTPTDMIKGVATVLVERGVRIQQGRGVPDNVLGSAFFVDATGLLITNYHVISSEVDPSYKGYSRMYIRMGDSTSARIPAKVIGWDKAMDLAIIKTEIVPEYVYSVVDWIIPNIGETIYAIGSPVGLEKTVTQGIVSALGRRFLQIGDVIQIDAAVNHGNSGGPVVDNEGRLVGIVFAGIDQHQGLNFAVPAETLTSALPAMIKGGRSQRPWLGMTLSELNSEAEIIYTAPNTPAYLHKVDEGFIIKTINGKTVTADEGGLIPTLQKTVFMCGPGELVALEILDKENKEVKKKVIMTVPRPDLPLLDAAKIDKKDRIAAALFGMILSPIQTTVFSSSSFRVNRVVRGSIADEAGISEDDPVTLSRLRLLEDEGVAVMEITVKKRRMGYLETSMQLPVWLDSPDTL

SEQ ID NO: 65873 - DNA, 1869 bp, Unknown
  Obtained from environmental sample
  misc_feature (1)..(1869): n is a, c, g, or t
ttggaacaggcctttatcgacataatgaaacaactcgtaaaagagcatggcagcgccgcgctgacggacacgaaaaaatgcaaggctcttttggcggattacaccagaaaccagtacaggaaacaaagccgccttctaatgctgactgtcgaggaaggattgccgaaagttattgaaggcgcgcaagaccttgccgcttgcaagaaagggataatcaaagaactggaagaagagcatggaattagttccgtgtttgcggctgacatagtgaacgccctcgcgctggtactgcgcggagacactaccgtaacggtatcccccacattattcgtggagttttgcgacagcaaaactccaagccatccggcgcagccggatggcacgccgccgccgccagcggagcctgtaaaaccagccgccataacagacccccaggcgcagtttgaacttggcaatcgttacgcgaacggcgatggagtaaaaaaagatgaaaccaaagcccttgaatggtggacaaaggcggcggaacagggattaatggaagcgcagtataaagtcgggctttgcaattataacggctattataacggcactactatgtatgaggacgtacccacagccgaaaaatggtggaaaaaggccgcggcacagggagacgtcagggctcagtatatgctcggcgtttgttatacaagcggttatataatcggaaaagacacgcgccttgcccgcgaatactttcgtaaagccgccgcgcagggtaatgcccaggcgaagaaagaattaagcaagcgtatcctcctgtttgacttgctggcggagcgtatcggcagcaggccttacacttctcccatgccgtatatcgcggcaattataatcggattgtgtttcgcccccggcgcgtgggcgttattcgcaagggcgcttttactcaataatgttcctgccattgcgctgtccgtactgacaatgggcgccggcggcttcatcacctacaaagcggtaaacgactggtattatacttccggcggctttgtgctgattacgcccctcatcgccctcatcggcatagtgttctttttcatcgtcccccaaccggtcaaagcggatcagccgcttccgctcaaaataagcgctgacgtagaaacagccactaaaacaaccgaaaccgcggaaattaccggcaacgcgaatttccgcaaaggcccttccacaaacgacgcggtcatcaagcaattaaagaaaggcgaccttgttatattgacgggcgaagtttcaggcggctggacgcaaatttcgctcgacggcgaagtcggctgggtcagttcggaatttttaaacaaatgggggggagaaaaacccgcaacggcacagcaaacagtagcgccaacggcaacgcaaccgtcatcacagacacaaacaaagccgcaaccacagccacagacgcagaaactaaacgcagaacctcaagctgtaaaacaagaagaaacgcctcaagcagcggcgcctcaagcagcgccccccgcagaagaaattgttgattgggcgagaggcaattatccggcaagtattaaagtcagcgcgaattccataacaggccataacatcaacataacaggggcgcggacagttgttcaaaaaccgttagccggacaccacaacttaaaatgggcttacgtttatgtaggcgataaaaaatacggcgtcgtatgggacagaacaacgtatacccgttcaatgcacgacggaattgaactcggcataggaagcgaggcgcgatccgcatttgacttttacggcggttctgacaaagacagtatttttgcggatattagccgtgaagctccggctataaaggttgtgaagtaa

SEQ ID NO: 65874 - protein, 622 aa, Unknown
  Obtained from environmental sample
  DOMAIN (393)...(450): Bacterial SH3 domain
  misc_feature (1)..(622): Xaa is any amino acid
MEQAFIDIMKQLVKEHGSAALTDTKKCKALLADYTRNQYRKQSRLLMLTVEEGLPKVIEGAQDLAACKKGIIKELEEEHGISSVFAADIVNALALVLRGDTTVTVSPTLFVEFCDSKTPSHPAQPDGTPPPPAEPVKPAAITDPQAQFELGNRYANGDGVKKDETKALEWWTKAAEQGLMEAQYKVGLCNYNGYYNGTTMYEDVPTAEKWWKKAAAQGDVRAQYMLGVCYTSGYIIGKDTRLAREYFRKAAAQGNAQAKKELSKRILLFDLLAERIGSRPYTSPMPYIAAIIIGLCFAPGAWALFARALLLNNVPAIALSVLTMGAGGFITYKAVNDWYYTSGGFVLITPLIALIGIVFFFIVPQPVKADQPLPLKISADVETATKTTETAEITGNANFRKGPSTNDAVIKQLKKGDLVILTGEVSGGWTQISLDGEVGWVSSEFLNKWGGEKPATAQQTVAPTATQPSSQTQTKPQPQPQTQKLNAEPQAVKQEETPQAAAPQAAPPAEEIVDWARGNYPASIKVSANSITGHNINITGARTVVQKPLAGHHNLKWAYVYVGDKKYGVVWDRTTYTRSMHDGIELGIGSEARSAFDFYGGSDKDSIFADISREAPAIKVVK

SEQ ID NO: 65875 - DNA, 516 bp, Unknown
  Obtained from environmental sample
  misc_feature (1)..(516): n is a, c, g, or t
ttgctaaggggagacgaaacaccggagttcctggccaaacaagcctcacaggggaatgaagaatgttttgtcgcgctttgcgatctttttaaggaaaaactttttcgtactgcgaaaggcattttgggtaatgaaactctctcccttgacgccgtcagtgaagctgtttttcgcgcctttaagggcataaaacggcttcgggaattcaggtatgcggagacctggtttatccgcatacaaataaatgtcgcaaatgacttctataggaggcaaaaacatgaaatagtcatggaaaaagtgccggaaggcatatatcatgatgatcacagcgaattggaattcacccaaatgattcaatctttacagcctgaactgcgtgaaatcatcagccttaaatactattccggctatactttgcgtgaaatatccgaaatactgaatgtgccggaaggtacggtaaaaagccgtttgaacagagcgcttactataatgcgcttggaggttttgcatgaataa

SEQ ID NO: 65876 - protein, 171 aa, Unknown
  Obtained from environmental sample
  DOMAIN (29)...(94): Sigma-70 region 2
  misc_feature (1)..(171): Xaa is any amino acid
MLRGDETPEFLAKQASQGNEECFVALCDLFKEKLFRTAKGILGNETLSLDAVSEAVFRAFKGIKRLREFRYAETWFIRIQINVANDFYRRQKHEIVMEKVPEGIYHDDHSELEFTQMIQSLQPELREIISLKYYSGYTLREISEILNVPEGTVKSRLNRALTIMRLEVLHE

SEQ ID NO: 65877 - DNA, 1536 bp, Unknown
  Obtained from environmental sample
  misc_feature (1)..(1536): n is a, c, g, or t
atggcagacaaggaaaaacggcaaattaaaattttcgacaccacattgagagacggcgagcaggctcccggatgcagtatgaacctgacggaaaaactagaggtcgcgaagcggctggaaaaactcggggtagatattatcgaagcgggcttcccgatttcaagcccgggcgatcttgaatcggtaaaggctatagcgggcatcatcaccaactgctccgtggcggggctttgccgcagccgcgaaggcgacattgacgcggcgaaagaagcgcttgcaaaagcggcaaatccgcgcgttcacattttcctcgctacttcgcccgtgcacatggagttcaaactcaagatgacgccggagcaggttttggaacaggccgtctccgccgtgaagtacgcgaaaaaattctgcaatgacattgagttttccgccgaagacgctttccgaagcgatcccgattttgtctgcaaagttttcggcgcggtaattgaagctggcgctcttaccgtgaatttccccgataccgttggctacgcaatgcccgccgaattcggcgaacgtgtccgctacataaaagaacatactccgcacatggaaaaagcggctttgtctgtgcattgccacaacgatttaggattggcggttgcgaacagtatcgccgccatcgcaaacggcgcggatcaagttgagtgtacggttaacggaataggcgaacgggctggaaacgcgtctttggaagaagtggtaatgggcttacgcgtccgcagcgactttttttccgccgacacaagaatagacagtacgcaaatatactcggcaagccgccttgtgtctcaggtgaccggcgttaaggtacagccgaataaagctatcgtgggcgataacgctttcgcgcatgaggcgggaatacatcagcacggagtattggcgaaaagagaaacctacgaaataatgactccgcaatcaatcggtattccgcagaaccgcatggttctaggcaaacattcgggacgccacgcgtttgaagaccgtcttaaagacttaggtttgagcgtaagcgctgaagcgttagaaaaaatatttgccgactttaaagaccttgccgacaaaaagaaagttgtcagcgaccgcgacattgaagctcttgtaatggacagggcagtctccgttcccgaaacatggaaactggatcattgggctgtgaacacaggctcggctttgggcgcggcgggcgttatccgcttacagcacaaagacggcaggtttgaaaaattagtatgtcttggcgacggtcccatcgactcgatttttaaagcgattaatcaaattataggcaaagagcctgagcttgagctttatgaaatcggcgctattacgggcggttcttcttcgcagggcgagacaatggtaaaaatagcgatggatggacggcgttggaacggacgcggcgtctccaccgatataattgaatcttcgataatggcttacctttcggcgattaacgccatggaatgggatttggcaaatagtaaatag

SEQ ID NO: 65878 - protein, 511 aa, Unknown
  Obtained from environmental sample
  DOMAIN (373)...(504): LeuA allosteric (dimerisation) domain
  misc_feature (1)..(511): Xaa is any amino acid
MADKEKRQIKIFDTTLRDGEQAPGCSMNLTEKLEVAKRLEKLGVDIIEAGFPISSPGDLESVKAIAGIITNCSVAGLCRSREGDIDAAKEALAKAANPRVHIFLATSPVHMEFKLKMTPEQVLEQAVSAVKYAKKFCNDIEFSAEDAFRSDPDFVCKVFGAVIEAGALTVNFPDTVGYAMPAEFGERVRYIKEHTPHMEKAALSVHCHNDLGLAVANSIAAIANGADQVECTVNGIGERAGNASLEEVVMGLRVRSDFFSADTRIDSTQIYSASRLVSQVTGVKVQPNKAIVGDNAFAHEAGIHQHGVLAKRETYEIMTPQSIGIPQNRMVLGKHSGRHAFEDRLKDLGLSVSAEALEKIFADFKDLADKKKVVSDRDIEALVMDRAVSVPETWKLDHWAVNTGSALGAAGVIRLQHKDGRFEKLVCLGDGPIDSIFKAINQIIGKEPELELYEIGAITGGSSSQGETMVKIAMDGRRWNGRGVSTDIIESSIMAYLSAINAMEWDLANSK

SEQ ID NO: 65879 - DNA, 525 bp, Unknown
  Obtained from environmental sample
  misc_feature (1)..(525): n is a, c, g, or t
atgaaaatgttcggcggagaagttttatttcttgatcgcggcgatattaacaccgatgaaattattccagcgaaatatttaacagaggacacaagaatagcgttaaagcctcatcttttggaagacttaaaaataaaggtctttgatcccgctaaagacattgcgggaaagggcgcggtgctggcacgcgcgaacttcggctgcggctcgtctcgcgaacacgctccctgggcgtttgaggcgaacggcatcaacatcgttgtcgcgaaaagttttgcccgtattttcaggcagaatatgtacaactgcggcatgatcgcctgcgaactttccgcagacgagttggaagcagtgttcaaggaatttgccggcgtcaaaacaacattgacggtggacacaggcaagggttatttaagtttcaaggcggacggcaaagagaaaacggtttctttcactttgaaaaattttgaaaaggcgctggttgaagccggcggctgggttgaatacgcggcaaaacattattga

SEQ ID NO: 65880 - protein, 174 aa, Unknown
  Obtained from environmental sample
  DOMAIN (1)...(113): Aconitase C-terminal domain
  misc_feature (1)..(174): Xaa is any amino acid
MKMFGGEVLFLDRGDINTDEIIPAKYLTEDTRIALKPHLLEDLKIKVFDPAKDIAGKGAVLARANFGCGSSREHAPWAFEANGINIVVAKSFARIFRQNMYNCGMIACELSADELEAVFKEFAGVKTTLTVDTGKGYLSFKADGKEKTVSFTLKNFEKALVEAGGWVEYAAKHY

SEQ ID NO: 65881 - DNA, 693 bp, Unknown
  Obtained from environmental sample
  misc_feature (1)..(693): n is a, c, g, or t
atgacaatctgcaacatggcggtcgaggcgggagcaacctgcggcgtatgtatgcccgacatgacaactgtaaattatttgtggccgtttatcggtccctgtgcttgcaccgaagacggcgataaaacttattcaagtaaagaagaagcgttaaaagatttttcaaagtggatcagcgatgacgacgctgaatattcgggcgttgtcgatattgactgctcaaaactggaaccgcttgctactgtcggctataagcccgatgaagtaaaaccagtgcgggaactcgccggaacaaaaatcgatcaagtatatatcggttcctgcaccaacggcagaatagaagaccttcgcaccgccgccgatgtgctgagagacaagaaaattgccgactctgtgcgtacaatcatcgctcccgccactacggacatttacgctcaagctcttaaagaggggcttattcaaattttccttgacgcaggctgttgtgtaacaaacgccacttgcggcgcgtgtcttggaatgtccaacggtgtacttgccgaaggggaggtttgcgcttccaccacgaaccgcaatttttacggacgcatgggcaaaggcggcatggttcaccttgtcagtcccgctgttgcggcggcttcctctgttgcgggcgcgattgccgcaccgggtaatatcggggggcaggcatga

SEQ ID NO: 65882 - protein, 230 aa, Unknown
  Obtained from environmental sample
  DOMAIN (1)...(218): Aconitase family (aconitate hydratase)
  misc_feature (1)..(230): Xaa is any amino acid
MTICNMAVEAGATCGVCMPDMTTVNYLWPFIGPCACTEDGDKTYSSKEEALKDFSKWISDDDAEYSGVVDIDCSKLEPLATVGYKPDEVKPVRELAGTKIDQVYIGSCTNGRIEDLRTAADVLRDKKIADSVRTIIAPATTDIYAQALKEGLIQIFLDAGCCVTNATCGACLGMSNGVLAEGEVCASTTNRNFYGRMGKGGMVHLVSPAVAAASSVAGAIAAPGNIGGQA

SEQ ID NO: 65883 - DNA, 795 bp, Unknown
  Obtained from environmental sample
  misc_feature (1)..(795): n is a, c, g, or t
atgtacctgaggaaaagattactctggaggcatccttccgtcaggatcttggcgcggatagcctggatacctacgaactggtttatgccattgaagaggaaatgggtgtttccattcccgatgaaaaagcaaacgaattcaatacggttaaggacgcctacgactttattaaagaacagcagaaataaccgagacaggcttccgacactggggcctgaaaggaaaaagaagttggcggcttttttaaaagccgccggaatcaggttcaagagcctcgcgcttttgaacctgtcttttatccaccgctccgtatccaatgaaacaaccagtgtaccaagggtacaacattgcgccgcgggcgcgttgaacaacgaacggcttgagtttctgggcgattccattttgggggccgcctgcgccaccctgttatacgaaaagtaccccggaaaaaacgaaggcgagcttgcgaagataaagtccgtggttgtctgcgaggatgtgctgtccgttgtcgcaaggtttttacagatcgataccatgctgttgctgggcaagggcgaggagcttaccggcgggcgggaaaaaaaagccattctggccgacaccctggaagcccttatcggggcaatataccttgactccggctacgcggcggcttttgattttgtcagccgttattttgcgccggagatcgaccgcgtcacggaaaaagattaccaccgtgattacaaatcgctgatacaggaaatatgccagcacaattacggcgcttacccccaatacagctcttattaa

SEQ ID NO: 65884 - protein, 264 aa, Unknown
  Obtained from environmental sample
  DOMAIN (125)...(215): RNase3 domain
  misc_feature (1)..(264): Xaa is any amino acid
MYLRKRLLWRHPSVRILARIAWIPTNWFMPLKRKWVFPFPMKKQTNSIRLRTPTTLLKNSRNNRDRLPTLGPERKKKLAAFLKAAGIRFKSLALLNLSFIHRSVSNETTSVPRVQHCAAGALNNERLEFLGDSILGAACATLLYEKYPGKNEGELAKIKSVVVCEDVLSVVARFLQIDTMLLLGKGEELTGGREKKAILADTLEALIGAIYLDSGYAAAFDFVSRYFAPEIDRVTEKDYHRDYKSLIQEICQHNYGAYPQYSSY

SEQ ID NO: 65885 - DNA, 594 bp, Unknown
  Obtained from environmental sample
  misc_feature (1)..(594): n is a, c, g, or t
atgacaacagatgaaatggtgcgtttaagagaaatccggcttgccccttatattcagttggcaacttaccttatcggaaaagccaggtccggcggcggtaatatgttcaggcaccagcttgacactatggcgattctcattgactacagctatgtcgatcccgttctgctcaaggcttcccttgtgcatgatattcttgaagatataccggattttaaccataatcagcttttatccatcgactttgaaagccacgcggtctatgagcttgttcaggaagtcacccgcaagcatgaagagagcaaggtcgagtttcttacgcgtattttacaaacaggatcacaaaatgcgaaaatcctcaaggttgcggatcgaatctccaatatgatttcactcggatttgtaaacgatctggaatttgtcaaccgttacaccaatgaaaccgaaaaacatatttatcctatggcggaacaggtaaacggatatatgctaatggagctgcggtacctggttgaatcacggcgaaggtatcttgaaatctattcaacgatcaattcgaaagaggcttccgccgaaaaaccagatactttgtaa

SEQ ID NO: 65886 - protein, 197 aa, Unknown
  Obtained from environmental sample
  DOMAIN (35)...(129): HD domain
  misc_feature (1)..(197): Xaa is any amino acid
MTTDEMVRLREIRLAPYIQLATYLIGKARSGGGNMFRHQLDTMAILIDYSYVDPVLLKASLVHDILEDIPDFNHNQLLSIDFESHAVYELVQEVTRKHEESKVEFLTRILQTGSQNAKILKVADRISNMISLGFVNDLEFVNRYTNETEKHIYPMAEQVNGYMLMELRYLVESRRRYLEIYSTINSKEASAEKPDTL

SEQ ID NO: 65887 - DNA, 801 bp, Unknown
  Obtained from environmental sample
  misc_feature (1)..(801): n is a, c, g, or t
atgagggaagcgtttctctcttaccgctacaacgatgccgcccagacagcctatgaatatttctggaatgatttttgcgactggtatgtcgaggcgaccaagctgtcaatgaagacgggggacggcgctgacggcgctaacgcagccgagaaagatcgggcagctacggtattgcttgacgttctcgcggaatcattgcggctcctgcacccgcttctgtcctttgtcaccgaggaaatctacggcaagctgcccaatattgacggccttttgattacagccccatatccgcggtacagagaagaacgctgttatccagcggaggaaaaagatttttccttcctccaggaatttgtacgcatgatccgcacgatgagaagcgaatgtacgattacacaggaaaagaaactccgcgtaatggcaagactgggaagcgaacaggaacaaactctgcggcaaaacgaaggactggtaaaactccttgcgggaatcggggaactggaaatcaaaactcccgaaaaggaatcgggcgagcgtccagcgggttccattggcatggcgggcgcgggttttgaaatttttgtttttatcggcgaggcggttgacattgcggcgcttaaaaagaaatttgagaaagaccttgcccgcgacaacgctttcgtccagggcttgcggacaaaactcgccaatgagcagtttgtgaagaacgccccgccggaactggtcgtcgccgaaaaagtaaagctggaagaagggcttgcccgtacaggcaagattgaatcttatctctgcggactgtaa

SEQ ID NO: 65888 - protein, 266 aa, Unknown
  Obtained from environmental sample
  DOMAIN (1)...(142): Anticodon-binding domain
  misc_feature (1)..(266): Xaa is any amino acid
MREAFLSYRYNDAAQTAYEYFWNDFCDWYVEATKLSMKTGDGADGANAAEKDRAATVLLDVLAESLRLLHPLLSFVTEEIYGKLPNIDGLLITAPYPRYREERCYPAEEKDFSFLQEFVRMIRTMRSECTITQEKKLRVMARLGSEQEQTLRQNEGLVKLLAGIGELEIKTPEKESGERPAGSIGMAGAGFEIFVFIGEAVDIAALKKKFEKDLARDNAFVQGLRTKLANEQFVKNAPPELVVAEKVKLEEGLARTGKIESYLCGL

SEQ ID NO: 65889 - DNA, 894 bp, Unknown
  Obtained from environmental sample
  misc_feature (1)..(894): n is a, c, g, or t
atgacagatcggcacgaggctgtcaacggtaatagagccgtttctttccgaaagtggtttgtccgcatgaagccgttagctgaaaaggcgttggcttcatggcagaaaggcgaaattattttttacccgaaaaaatgggaaaacacatataaacactggatggaaaacataagggactggtgcgtcagccgccaactttggtgggggcatagaattccggcgtggacttgcgcagactgcggaaaaatgacagtttcacgtaacgatatcgacgcttgtccgcattgcaagagcaaaaaaatcgaacaagaccccgacgtgcttgacacttggttttcaagctggctttggccgttcagcactcttggctgggaaaacgccgattgcaacaccgacgacttcaaaaaatattatccgactacggcgcttataaccgcctatgacatcatctttttctgggtatcaagaatgatcatggcggggcttgaattcacgggcaaagcgccgttccgcgacatttacattcacgggcttgtgcgcgacaaacagggacgcaaaatgagcaagtctctgggcaacggacttgatcctttagaacttgtggacgagttcggagcggacgcaatgaaatttacgctcgcctttatgtgcgcccaaggacaggatattcttgtagacaaagaatcttttaagatggggacaaaattcgctaacaaggtgtggaacgcaagcagatatattttgatgaaccttgacgggcgcaatttgcaggaaaatccaaccctaacccccgctgacgaatggatatactcacggttaaacgacgcccgcaaaatcaatgagggaagcgtttctctcttaccgctacaacgatgccgcccagacagcctatga

SEQ ID NO: 65890 - protein, 297 aa, Unknown
  Obtained from environmental sample
  DOMAIN (1)...(226): tRNA synthetases class I (I, L, M and V)
  misc_feature (1)..(297): Xaa is any amino acid
MTDRHEAVNGNRAVSFRKWFVRMKPLAEKALASWQKGEIIFYPKKWENTYKHWMENIRDWCVSRQLWWGHRIPAWTCADCGKMTVSRNDIDACPHCKSKKIEQDPDVLDTWFSSWLWPFSTLGWENADCNTDDFKKYYPTTALITAYDIIFFWVSRMIMAGLEFTGKAPFRDIYIHGLVRDKQGRKMSKSLGNGLDPLELVDEFGADAMKFTLAFMCAQGQDILVDKESFKMGTKFANKVWNASRYILMNLDGRNLQENPTLTPADEWIYSRLNDARKINEGSVSLLPLQRCRPDSL

SEQ ID NO: 65891 - DNA, 2496 bp, Unknown
  Obtained from environmental sample
  misc_feature (1)..(2496): n is a, c, g, or t
atgatactaaaaaattatcagcgtagcgcactagacatcttgcaaagattctttgaggcttgccgtatttccggcgcgaaaagcgcgtatgaggctattacaggtgaacctgagatcgcagtacggcttgatcgcttactgagtggaaaatacgagtgttgggagtctataccgaatacgccgcgagtttgtttgaaagttccgaccggcggcggcaaaactattattgcggcacatacggtgaaagttgtttccgatacttggttggagcgtgaaaatccggccgttctttggtttacgccgtccgataccatccgtaagcaaaccagcgaggccttgaagaatccgcgtcatccgtaccgtatggcgttggacgagcaattcgacggttgcgtccgtatttttgacattgacgaaaaattcaacattcgtccgacggatattgatggcggtgtttgtatcatcgtttcgacaatgcagtcttttgtaaaagaagataccagcaaatacaatgtttacaaggataatgaaaatcttgaaagccattttgttaaaatgccgcacgccaaatatgcgggtatggaaaagctggacgacggtagccgtccaaagtattcattcgcaaacttattgtattgtcacagaccgattatgatagtggacgaagctcacaaagtagttaccaacttatcacaggaaactcagcggaggctcaaccctgccgccattattgaattcacggcgacaccgcgtccgaacaacaacacgctctataatgtccgcgcttctgaactcaaagaggaagagatgataaagttgcctatcgaattgcgcgagcattccgggtgggaagcggcggttgacgaggcgattgcgaagcgtgaggaattggaaaaagcggcggaaaacgagagcgagtatatccgcccgatcttgttatttcaggcgcaaagcaaagataaagaggtaacggtggaagtccttaagagttaccttcttgaaacgagcaatttgccggaaagtcaaataaaaatagccaccggcgatcaaaaagagcttgacgatatagacctctttaatcccgatgagccgacacgctatattatcacagtcgaggccttaaaagaggggtgggactgttcgttcgcgtacgttctatgttcgctgacaaacgtcaaaagcgatacatcggtggagcagttattggggcgcgttatgcgtatgccatacgctaagtcacgtaagattacatcgctcaacaaagcatacgcctacgttctttcaaaaacgttcggtgaagcggccggcgcgttggtcaagaaattagttgaaaagggttttgacgacaccgaggcgcaggttgcggtagagcttaaaccgagcgttcttgacggtgggttatttggccgttatgagcttaacaagatagatttggatgagccgttgttattggctgaaccgcccgatacggttaattttgaaaacggcggtcaaaccatcgtattcacgccggaaacgacggaggcggatatcaaacggattgtccagtatctcccaactgataaacaggacgaagtcaaatggaaatattcatgttacaaacaagtgcaaccggattcggttccgtctccggcgcggttgggcgaaaagtttcttgtccctcgtttgatggtggagttgcagggcgaacttgtttttgctgaaccggagaaaatttttgaggctttcgactgggacataatgaaatttgccgatcctaagatgagcgccggagagttcaacatagagccgcagggcaacggtttcagcatcgacatagacggtcataaactaacgtattcgccgaccggcatcgaacaatgttccttgccgttggtagaggtagaaacctggacatcggcaaaccttatacgttggcttgataaatctttgcatcaggaggatatacctcaaccaaatatggttgaatggctacgtcgtatgattgaacacttgaccgatacgcgaggtatgaaattatcagcgttaatgttggccaagtatgctttggcgaataaaatagaggcaaaaatcaaaaaagcgcgaagcgaggctcgtacgagagcctttcaaaccacactatttgaacgcgaaagccgcgttatgcttgactttgacaacgggtttgatttttttgagtctatgtatgacggcgaaacatattatagtggaagctataagttccaaaaacactatctcggctcactcaaagttccgacatttgacggtaaagaagacggggaagaatttcagtgcgccaaaacaatagacgcgctaccgcaggtcaagtattggcttcgcaatatcgcaaaacacaaaaactcgttttggctaccgacaagcacagacaagttttatcccgactttacggctatgctggaagatgggcggattttgattgcggaatacaagggtgcgcaccttatgataacacagaaacgaaactcggccatctga

SEQ ID NO: 65892 - protein, 831 aa, Unknown
  Obtained from environmental sample
  DOMAIN (1)...(252): Type III restriction enzyme, res subunit
  misc_feature (1)..(831): Xaa is any amino acid
MILKNYQRSALDILQRFFEACRISGAKSAYEAITGEPEIAVRLDRLLSGKYECWESIPNTPRVCLKVPTGGGKTIIAAHTVKVVSDTWLERENPAVLWFTPSDTIRKQTSEALKNPRHPYRMALDEQFDGCVRIFDIDEKFNIRPTDIDGGVCIIVSTMQSFVKEDTSKYNVYKDNENLESHFVKMPHAKYAGMEKLDDGSRPKYSFANLLYCHRPIMIVDEAHKVVTNLSQETQRRLNPAAIIEFTATPRPNNNTLYNVRASELKEEEMIKLPIELREHSGWEAAVDEAIAKREELEKAAENESEYIRPILLFQAQSKDKEVTVEVLKSYLLETSNLPESQIKIATGDQKELDDIDLFNPDEPTRYIITVEALKEGWDCSFAYVLCSLTNVKSDTSVEQLLGRVMRMPYAKSRKITSLNKAYAYVLSKTFGEAAGALVKKLVEKGFDDTEAQVAVELKPSVLDGGLFGRYELNKIDLDEPLLLAEPPDTVNFENGGQTIVFTPETTEADIKRIVQYLPTDKQDEVKWKYSCYKQVQPDSVPSPARLGEKFLVPRLMVELQGELVFAEPEKIFEAFDWDIMKFADPKMSAGEFNIEPQGNGFSIDIDGHKLTYSPTGIEQCSLPLVEVETWTSANLIRWLDKSLHQEDIPQPNMVEWLRRMIEHLTDTRGMKLSALMLAKYALANKIEAKIKKARSEARTRAFQTTLFERESRVMLDFDNGFDFFESMYDGETYYSGSYKFQKHYLGSLKVPTFDGKEDGEEFQCAKTIDALPQVKYWLRNIAKHKNSFWLPTSTDKFYPDFTAMLEDGRILIAEYKGAHLMITQKRNSAI

SEQ ID NO: 65893 - DNA, 1314 bp, Unknown
  Obtained from environmental sample
  misc_feature (1)..(1314): n is a, c, g, or t
gtggaataccggcactataggtttgtttaccgaaacttaagtgaaactttagtgaaagacatcctgcttacaactatcaacgcaaagtggatacatccttcccttgccctgcgtcttttaaaagccaatcttggcgcgcttgaagaccgctgtgaaatacttgagtttgccctgcgccagccgttatgcgaaaaagtacagcctatccttgccgcagcgcagcatgttgctaacctgcgaattctgggagtctctgtctcaatctggaatcatacagcgacattggaacttcttcgtgaacttgaaaagttttgggcgggacaaaaacccgtaattgtgcttggcggtcccgaggtttctcacctgccgcaggaagcggaaattttccgttacgcgaattttgttatccgcggcgagggagaagacgctttcaggatgttatgtgaaaagataatcgcggacgggcatgaacatggtaaagcaacacaattcattaacgctgaaaatgttgacgtttgcggaataaagagcggttatcatctttacacggacgaggatgtaacaaaaaaactgatttatgttgaagcaagccgcggctgtccttttaactgcgaattttgtttaagcgccgttaaaaaaggcttagacagcaaagtacgagaattccctcttgagccgtttcttgcgcaaatggacgagcttgtcaggcgcggagtgaaaacttttaagttcctggacaggactttcaatatcaatattaaacgcgcccgcgaaataatggagttctttcttgaaaaactcgaacaaaaaaatgagatagtggttcactttgaaatgattccttccctcttcccgcccgtcctgcgcgaaactctttcccgctttccgcccggcagccttcggcttgaagtcggtattcagacgctaaatccggaagttgccgcccgtattaaccgcgccggctgtcaaaatcaagctgagcaggaattggacactatccgtttccttcgtgaaaaaaccaacgctatcattcacgcggacttaatcgcggggcttcccggcgaagaccttgcgtccttcggcaacggtttcgaccgcctgcttgagtgtctcgcttcgtctaaaacagacaacatggagattcaggtcggaatattaaaactgctcccgggaacgcctgtctcccgccacaacgatacttttggaatgatttacgattctttgccaccttatgaggtcagggaaacatccgctataagcgccggtgattttttacgtgtaaaaaactttgcccgtttctgggaaataatgtaa

SEQ ID NO: 65894 - protein, 437 aa, Unknown
  Obtained from environmental sample
  DOMAIN (194)...(367): Radical SAM superfamily
  misc_feature (1)..(437): Xaa is any amino acid
MEYRHYRFVYRNLSETLVKDILLTTINAKWIHPSLALRLLKANLGALEDRCEILEFALRQPLCEKVQPILAAAQHVANLRILGVSVSIWNHTATLELLRELEKFWAGQKPVIVLGGPEVSHLPQEAEIFRYANFVIRGEGEDAFRMLCEKIIADGHEHGKATQFINAENVDVCGIKSGYHLYTDEDVTKKLIYVEASRGCPFNCEFCLSAVKKGLDSKVREFPLEPFLAQMDELVRRGVKTFKFLDRTFNINIKRAREIMEFFLEKLEQKNEIVVHFEMIPSLFPPVLRETLSRFPPGSLRLEVGIQTLNPEVAARINRAGCQNQAEQELDTIRFLREKTNAIIHADLIAGLPGEDLASFGNGFDRLLECLASSKTDNMEIQVGILKLLPGTPVSRHNDTFGMIYDSLPPYEVRETSAISAGDFLRVKNFARFWEIM

SEQ ID NO: 65895 - DNA, 615 bp, Unknown
  Obtained from environmental sample
  misc_feature (1)..(615): n is a, c, g, or t
atggataacagcagatttataattggcgtcgatcttgacggcgtggtaggcgacttttacggcgcgatacgaaaaatcgccgccgagtggcttaacaaaccaatggaatcccttacgcccgaagtttcctacggtctgcaggaatggggaattgacgaattcggcggctacgacagactgcaccgttttgcggtaacgcagcggaacattttccgcgacatggttccgatagaaaacgcgcctgttattctgcgaaaactttcaaggcagaacattcgcatccgtatcatcacgcaccggctcttccttaaatattctcaccgcacttcaatccggcaaaccgtagactggctggacaactacgacattccctactgggacatctgtttcatgaacgataaaggcgctgtcggcgctcatatctacattgacgacgctcccgaaaatataatcagccttcgcaaacagggatgtaaaacaatcgtattcaataattccactaatcaagacatgcccggtccccgcgccaataactggctggaagtcgagcgcatggtaatggaagcccttgaggagtggaataccggcactataggtttgtttaccgaaacttaa

SEQ ID NO: 65896 - protein, 204 aa, Unknown
  Obtained from environmental sample
  misc_feature (1)..(204): Xaa is any amino acid
MDNSRFIIGVDLDGVVGDFYGAIRKIAAEWLNKPMESLTPEVSYGLQEWGIDEFGGYDRLHRFAVTQRNIFRDMVPIENAPVILRKLSRQNIRIRIITHRLFLKYSHRTSIRQTVDWLDNYDIPYWDICFMNDKGAVGAHIYIDDAPENIISLRKQGCKTIVFNNSTNQDMPGPRANNWLEVERMVMEALEEWNTGTIGLFTET

SEQ ID NO: 65897 - DNA, 1377 bp, Unknown
  Obtained from environmental sample
  misc_feature (1)..(1377): n is a, c, g, or t
gtgaatgaatttaaagaaatggtaagagaacttcacaaggcgggaattgaggtaatacttgatattgtttttaaccacaccgcggaaggcaacgagatggggccgactttatcgttccgaggtttggacaattcaatttattacatacttaacgaaaaccgccgttattatcaaaattattccggatgcggcaatacgatgaactgcaatcatcccgtagtgcgaacctttattatggactgcctgcgctattgggtaatggaaatgcacatagacggattccgttttgatcttggttccattttagggcgcgatcaacagggaaggataatggaaaaccctcccatgctggaacgaattgcggaagaccccattttaaactcaacaaaaattatcgccgaagcctgggacgcgggcggcgcatatcaggttggatggttccccggcggccggtgggcggaatggaatgataaataccgcgacaacgtgcgcaggtactggcgcagcgatccgatggaaacccgctattttgccacgcgtctttccggcagttcagatctttatctgcgcgacggacgaaaaccttttcactctattaattttgttacaagccacgacggctttacaatgagcgacatagtgtcgtataacgaaaagcacaacaatgccaacggcgaaaataacaacgatggcggcaattatgacaacagttataacaacggcgtggaaggcagcaccctggaccccatcattctttcgatgcgcgaaagacagatgaaaaacttttttgccaccctgctgacttctctgggcactcctatgcttttgggcggcgatgagattggcaggactcaaaaaggaaataacaacgcgtattgtcaggataatgaaatatcctggtatgactggactttacttgaaaaaaacaaaaccctgcaccgctttgtaaaagaaatgatagccttccgcaagaggcatcccggctttatgcgccctgaattttttacgggccgcggcggggattacaaaggcattcccgatataagctggtttaccgaaaaaggcgaaagcccggcctgggacaagatcggctattatcttgccttgcacttgtacggcagtaaagcggaaatattcggcgaccgcgatgaaaatgatttttacctcatgtttaacgcaagccttgaaacacaggggtttaaactggcggaaccgccgcccaaaaaagaatggatgcgcgttatagatacggggcttcactcgccgaatgatattctgcctccgggaagcgaaaaaatacttccgtcccagcatgtgtatccggttaaagcccgcagtatggcaatattaatttcaaaggatataaatcatggataa

SEQ ID NO: 65898 - protein, 458 aa, Unknown
  Obtained from environmental sample
  DOMAIN (1)...(323): Alpha amylase, catalytic domain
  misc_feature (1)..(458): Xaa is any amino acid
MNEFKEMVRELHKAGIEVILDIVFNHTAEGNEMGPTLSFRGLDNSIYYILNENRRYYQNYSGCGNTMNCNHPVVRTFIMDCLRYWVMEMHIDGFRFDLGSILGRDQQGRIMENPPMLERIAEDPILNSTKIIAEAWDAGGAYQVGWFPGGRWAEWNDKYRDNVRRYWRSDPMETRYFATRLSGSSDLYLRDGRKPFHSINFVTSHDGFTMSDIVSYNEKHNNANGENNNDGGNYDNSYNNGVEGSTLDPIILSMRERQMKNFFATLLTSLGTPMLLGGDEIGRTQKGNNNAYCQDNEISWYDWTLLEKNKTLHRFVKEMIAFRKRHPGFMRPEFFTGRGGDYKGIPDISWFTEKGESPAWDKIGYYLALHLYGSKAEIFGDRDENDFYLMFNASLETQGFKLAEPPPKKEWMRVIDTGLHSPNDILPPGSEKILPSQHVYPVKARSMAILISKDINHG

SEQ ID NO: 65899 - DNA, 354 bp, Unknown
  Obtained from environmental sample
  misc_feature (1)..(354): n is a, c, g, or t
atgccgcctgtcccatcatttacgctaactttcacgacaacaggttttttcaaacatagtaataaagaactatggtggatagggacggatcataacgatactcatcttgatattttaaaaacaatcagggggcggattacagaggctctactttcaaaaggcatacattttgacaacaggccatttaacccgcacattacccttggcagggagataaagcatgaatcgcctattattattccaaaacaagagattatatatccgataaaccgaattagtttaatgaggtctgaacgtatcagcggaaaattaacttatacggaaatatttggaaaggatttaaagggggagtaa

SEQ ID NO: 65900 - protein, 117 aa, Unknown
  Obtained from environmental sample
  misc_feature (1)..(117): Xaa is any amino acid
MPPVPSFTLTFTTTGFFKHSNKELWWIGTDHNDTHLDILKTIRGRITEALLSKGIHFDNRPFNPHITLGREIKHESPIIIPKQEIIYPINRISLMRSERISGKLTYTEIFGKDLKGE

SEQ ID NO: 65901 - DNA, 657 bp, Unknown
  Obtained from environmental sample
  misc_feature (1)..(657): n is a, c, g, or t
ttggttatattaatgacatacatgaatagttattcagagaaagcaagaaaagaaggtttacaacttataatagcatcggaaaaagatgatattaaagccgtagaattattgcttaagaaaggtgtttatatccacgcacaggacagggagggcaggtgtgcccttgttgctgccgcatataagaactgtctcgaaattgtcgatttattgattgccgcaggcgcggatgtcaacatgaaagacaatactctgcaaagcgcgtatttaatttcaacttctgaaggatatacggaactgctgaagaaaacactcaaagccggagcggatgtccattgtacggacagttataatggaaccgggttgatccgcgccgccgaccgtgggcatgttgaaataataagggaacttttaaaaacggatatccgtgtaaatcatattaacaggcttgggtggactgccttacttgagacaatcattttaggcgacggagggagacggcatactgaggttgtgcgtcttttggttgattccggagctgacgttaatttgccggataaagacggagttaccccgttggcgcatgcaaagagcaagggttatactgacattatcaagatattggagaaatcggaggcaatggaattactccccctttaa

SEQ ID NO: 65902 - protein, 218 aa, Unknown
  Obtained from environmental sample
  DOMAIN (149)...(186): Ankyrin repeat
  misc_feature (1)..(218): Xaa is any amino acid
MVILMTYMNSYSEKARKEGLQLIIASEKDDIKAVELLLKKGVYIHAQDREGRCALVAAAYKNCLEIVDLLIAAGADVNMKDNTLQSAYLISTSEGYTELLKKTLKAGADVHCTDSYNGTGLIRAADRGHVEIIRELLKTDIRVNHINRLGWTALLETIILGDGGRRHTEVVRLLVDSGADVNLPDKDGVTPLAHAKSKGYTDIIKILEKSEAMELLPL

SEQ ID NO: 65903 - DNA, 1128 bp, Unknown
  Obtained from environmental sample
  misc_feature (1)..(1128): n is a, c, g, or t
atgatgagcgacggcgcactttcccaggatgaaatagatgcattgttagccggtgttgattcaggcggcggaggcagttctcacgcagctacaatgacagctccgcctgccgcaagcggcggcgcggcttttgacgtaaactctcttgaatcggttttcgcttcaactacaggcgcgctttcagctaacctcgcggctctgacaggcacaaaagtaacgcttgtcggtcctgaagtctccgctacaaatcgcgacggtattttaggtctgcttcccggtatggtaaccgtagtaaattccaattttacttccggcttccccggagagcattgttttattttctccgaagaatcagctaaagctatcgcgagtcttatgactcatgaaaccgacatacagcttgatgaaatggcaatgtccgtaatcggggaagttgtttctcagattgcgggaactcagataacggttcttaccgataaaaccggaaataaatcaattgcggcgtcgtctccgacggcggcaaatatagcgaaagccgcggcggcgcttcccgccggcgattttgccgttatgacctatggtcttgatatgggcgacggactttcacaccagatatgggaagttttaggttcggctccggcggttgatatctccaacagtttaggcggcggcgctccggcgcaggcggcaggtatggcaatgcccggtatgcagaatgccggaatgaatatggggggcatgaatatgagcggaatgaatatgggaggaatgggtatgggtcaaggtggtaatattggatctgccaatgtgcagcctgtacaattccccaatttgaaccaaccgcgtcttggtcctcatgaggcgggcaacatcggtctaatcatggacgtatccatggaaatgaccgtagaactcggacgtacgcgcaaattgatcaaagaaatcttagggatgggcgaaggcacgattatcgagcttgataaactcgcgggcgaacctgtagacattcttgtaaaccataaattgatagccaaaggcgaagtagtagtcatcgatgaaaacttcggcgtgcgtgtaactgaaattgtgtcgccgatggaacgcattaacgatatgggatataattag

SEQ ID NO: 65904 - protein, 375 aa, Unknown
  Obtained from environmental sample
  DOMAIN (290)...(366): Surface presentation of antigens (SPOA) protein
  misc_feature (1)..(375): Xaa is any amino acid
MMSDGALSQDEIDALLAGVDSGGGGSSHAATMTAPPAASGGAAFDVNSLESVFASTTGALSANLAALTGTKVTLVGPEVSATNRDGILGLLPGMVTVVNSNFTSGFPGEHCFIFSEESAKAIASLMTHETDIQLDEMAMSVIGEVVSQIAGTQITVLTDKTGNKSIAASSPTAANIAKAAAALPAGDFAVMTYGLDMGDGLSHQIWEVLGSAPAVDISNSLGGGAPAQAAGMAMPGMQNAGMNMGGMNMSGMNMGGMGMGQGGNIGSANVQPVQFPNLNQPRLGPHEAGNIGLIMDVSMEMTVELGRTRKLIKEILGMGEGTIIELDKLAGEPVDILVNHKLIAKGEVVVIDENFGVRVTEIVSPMERINDMGYN

SEQ ID NO: 65905 - DNA, 345 bp, Unknown
  Obtained from environmental sample
  misc_feature (1)..(345): n is a, c, g, or t
ttgtcggcgcagttctggtattcttcggtacgccgaaacgctactacagaaaaccttaatgttctaaaggataagcttgcaacggtcgatgttaatgtaacagccgaaattggaaagataaatgtgcctgtaagggacgttctttcattacagattggggatgtaataaggctttataacacacgcattggcgatccctattcattgaacatcggctccagaaagaagtttctgtgccgccccggtatcatcgggaagaaaatcgcggttcagataacacaaaaaatagacgagcttggacatgaagaatttgaagagctcgcgtctgaaggagatgaattatga

SEQ ID NO: 65906 - protein, 114 aa, Unknown
  Obtained from environmental sample
  DOMAIN (22)...(99): Surface presentation of antigens (SPOA) protein
  misc_feature (1)..(114): Xaa is any amino acid
MSAQFWYSSVRRNATTENLNVLKDKLATVDVNVTAEIGKINVPVRDVLSLQIGDVIRLYNTRIGDPYSLNIGSRKKFLCRPGIIGKKIAVQITQKIDELGHEEFEELASEGDEL

SEQ ID NO: 65907 - DNA, 666 bp, Unknown
  Obtained from environmental sample
  misc_feature (1)..(666): n is a, c, g, or t
atgacagaagttctgtcccaggatgagatagaccagttattaaccgcgataaacgcaggcgataccgagcctgaagattttagacccgcggcggatagccggaaaatcaaaatatatgactttaaacgccccgacaagttctctaaggaacagattcgtactgtttccataatgcatgaaacttttgcccgcttaacaacgacaagcctttcagctcagcttcgcagtatggttcatgtccatgtcgcttcggtagatcagctgacatacgaagaatttatccgttcaattcctacgccgacaactttggctattatcaatatggaccccctcaaagggaatgctattttggaaatcgaccccgctattacattttccgtaattgaccgtcttttcggcggaacgggcgaaggtacgaaatcccagcatgaattgacggatatcgaacaatcagtaatggaaggtattatcgtccgtattttgggaaatatgcgcgaagcgtggactacggttatcgacctgcgcccccgtctcgggcagattgataccaatccgcagtttgcgcagattgtaccgcctacggaaatggtcgttcttgtaacgcttgaaaccaaagtaggagatgtagaaggcatgatgaacttctgtatcccttaccttacatag

SEQ ID NO: 65908 - protein, 221 aa, Unknown
  Obtained from environmental sample
  DOMAIN (39)...(220): Flagellar motor switch protein FliM
  misc_feature (1)..(221): Xaa is any amino acid
MTEVLSQDEIDQLLTAINAGDTEPEDFRPAADSRKIKIYDFKRPDKFSKEQIRTVSIMHETFARLTTTSLSAQLRSMVHVHVASVDQLTYEEFIRSIPTPTTLAIINMDPLKGNAILEIDPAITFSVIDRLFGGTGEGTKSQHELTDIEQSVMEGIIVRILGNMREAWTTVIDLRPRLGQIDTNPQFAQIVPPTEMVVLVTLETKVGDVEGMMNFCIPYLT

SEQ ID NO: 65909 - DNA, 2469 bp, Unknown
  Obtained from environmental sample
  misc_feature (1)..(2469): n is a, c, g, or t
atgggcacgttgggcaggatggcggaggttttcctatcgcacagcgacggtatcgcctttgaggatatgatgaccaagggcattaagctgattgtcgacatgatcgacgtggacagggtttcggtcttccgcaactttgacgcgcccgacgggcggcacgcgtcgcagatataccggtggtatatagccgccggcggcaccacaaagccgaacgccgcctttaccgacgttcgctacgcggaaattatgccgaattgggagcgctttttcatggaaaacgcggtggcgaacggcccggtcacgctgttgtctccgcccgaagccgccacgctgaacgcggtcggcacggcgtcgctcttcgccacccctgtgcagataaacgggacgttttgggggtttgtgctctttgaggacctccgcaacgcgcgtacgtttggcaacgacaccgtggagatgctgcgttcggcggcgtatttgtgcgccaacatggtcatgcgctccgagatggagagcgctatcgagatcacgcagtcgatgatcgacgccacgccgctgagctgcgtgctggtcgacaaggatttcaagttattcgcctgcaacaacgaggcggtgtcgcttttcggggtgtcggggaaggaggagctgctcaataactttcacaatctatcccccgagcgtcagccgaacggcatgctttccaaagatatgggccttgttatgataaaacagacccttgacggtaacgacagcgcctttgagtgggttcacctgaccaaaagcggcgaaccgataccctgcgacgtaaggttggtgcgcgtcacgtataggggcggttacgccgcggccggattcataagcgaccagcggaagctgcgggaggcggttatgaaggcgcgcgaggcggacgaacacatgcagatcgtcttcaacgccatgccgcttgcctgctgtatgtttgatagggacataaacatcttcacctgcaacgacgcgacgctgtggctcttcgggataccgaataagcgcttcttctacgaacgattccacgatttgtccccaaaataccagccttgcggaacgctgtcgtcaaagaaggtggtcgacgtatgcactgtcgcgtttgagacgggctacaaccgcgtcgagtggctgcaccaaaagttgagcggcgagcccataccggtcgaggttacgcttgtgcgggtggaatataggggcgataaggtcatagcctcttacatgagggacctgcgcgagcagaaggccgttgagcttttggccaagcagcaggcggaggcggaagcggccaaccgcgccaagtcctcgttcctcgccaccatgagccacgagatgaggacgccgatgaacgccatcatcggcatgaccgtcatcggcaaaaacgccgacgacctagagcgcaaggattacgctctggacaagatcgagggggcggcgcagcaccttcttagcgtcatcaacaatgtgcttgatatatcgaaaatagaggcgaacaagatggagctctcgccagtcgagtttgactttgagaaaatgctgcaaaaggttatcagcataataaacttccgcgttgaagagaagcatcagaagcttaccgtgaatatcgacggcagaattccgcgttttttggtgggcgacgattaccgtttgacgcaggttacgttgaacctattggcgaacgcggtaaagttttcgccggagggcggcgagataggcctggacgcctcctttgcgggcggggctggcggcgtgtgcgaattgcgggttacggtctccgacaacgggatcggaatatccgcggagcaacaggcgaggctcttcaatgcctttgagcaggcggacggcggcacgagccgcgagtacggcggcaccggcttggggctcgtcatatcgaagcgcatcgtggagctgatgggcgggaggatttggattgagtcggagctgggaaagggctccaagttcatttttaccgtaaaggcggagcgtggaaaaacggttgacggcgggtccgaatgttcgggtacggagagcggcgacggcggatcttcggccgacgcgggcgaggcgctggccggcaagaaccttcttgtggccgaggacgtggagatcaaccgtgagattttgaacatgttgctggacggcgcggggattaatatcgtatttgcggaaaacggagcggaggcgctgcggatggtaaccgacgcgccgcaaaaatacgacgcggtatttatggatgtgcacatgcccaagatggacggcttagaggccacgcggcgcatacgcgccctgccggcgctaggcgatagaaaaaaagcgctgcccatcattgcgatgacggccaatgtctttaagagcgacattgacaaatgcctcgcggcagggatggacgaccatatagggaagcccattgacattgatgtggtcatggagaaactgaggaagtatctataa

SEQ ID NO: 65910 - protein, 822 aa, Unknown
  Obtained from environmental sample
  DOMAIN (439)...(504): His Kinase A (phosphoacceptor) domain
  misc_feature (1)..(822): Xaa is any amino acid
MGTLGRMAEVFLSHSDGIAFEDMMTKGIKLIVDMIDVDRVSVFRNFDAPDGRHASQIYRWYIAAGGTTKPNAAFTDVRYAEIMPNWERFFMENAVANGPVTLLSPPEAATLNAVGTASLFATPVQINGTFWGFVLFEDLRNARTFGNDTVEMLRSAAYLCANMVMRSEMESAIEITQSMIDATPLSCVLVDKDFKLFACNNEAVSLFGVSGKEELLNNFHNLSPERQPNGMLSKDMGLVMIKQTLDGNDSAFEWVHLTKSGEPIPCDVRLVRVTYRGGYAAAGFISDQRKLREAVMKAREADEHMQIVFNAMPLACCMFDRDINIFTCNDATLWLFGIPNKRFFYERFHDLSPKYQPCGTLSSKKVVDVCTVAFETGYNRVEWLHQKLSGEPIPVEVTLVRVEYRGDKVIASYMRDLREQKAVELLAKQQAEAEAANRAKSSFLATMSHEMRTPMNAIIGMTVIGKNADDLERKDYALDKIEGAAQHLLSVINNVLDISKIEANKMELSPVEFDFEKMLQKVISIINFRVEEKHQKLTVNIDGRIPRFLVGDDYRLTQVTLNLLANAVKFSPEGGEIGLDASFAGGAGGVCELRVTVSDNGIGISAEQQARLFNAFEQADGGTSREYGGTGLGLVISKRIVELMGGRIWIESELGKGSKFIFTVKAERGKTVDGGSECSGTESGDGGSSADAGEALAGKNLLVAEDVEINREILNMLLDGAGINIVFAENGAEALRMVTDAPQKYDAVFMDVHMPKMDGLEATRRIRALPALGDRKKALPIIAMTANVFKSDIDKCLAAGMDDHIGKPIDIDVVMEKLRKYL

SEQ ID NO: 65911 - DNA, 954 bp, Unknown
  Obtained from environmental sample
  misc_feature (1)..(954): n is a, c, g, or t
ttgggcggcttaaaacggattagcccgcaaattcattttgcaaatctattttgcgtttacggcataatgtattttcttgtaatgattaaaacgacaaaaagaattgtatccgccgcagccttgttactgtccctaataatagtaacggcggcggcaacggcggacgccgcgcccatagccgcaaacgaaatacgcgtccactatatcgacgtcggccagggcgacgccgtcctcatacaatccgcccgaaacgccgtcctaatcgacggcggcgacgcgaaggcgcagcagacgcttcttgactatctgcgctccgccggggtaacggatatagactacgtaatcgcgacccatccccacgccgaccacataagcggcctcccgaaggtgataaggcagttcggggttaaaggcgtcatcatgccggatgtcgtgcacacctccggcatgtttgaaaagctcctcgccgccatagagaagaaaggcctcaggatcacaacgccgaaagtaggcgacgcgttcgccgccggaataatcaagttcaccgtcctagcgcccacgaggaagttcaaggatctcaacaacatgtcgatagtggtacgtatggtccacggcgagaccgcgtttttgttcacgggcgacgcggagggcaaatcggagcgggagatgctgaagaaccggcagaccctccgcgccgacgtgctcaaggtcggccaccacgggagccgcacttccacgacgaacgattttctggacgccgtgaagccgtcggtggcggtcatctcctgcgccggcggtaactcgtacgaccacccccacaaagaaacgatggagaagctccgcaagccggagcgtaatattgcgatatttcaaacggacaaggacggaacggtaatcataaccacggacggacgtaagataacgcttctaaccgagaaaaagagaaaggggtag

SEQ ID NO: 65912 - protein, 317 aa, Unknown
  Obtained from environmental sample
  DOMAIN (73)...(266): Metallo-beta-lactamase superfamily
  misc_feature (1)..(317): Xaa is any amino acid
MGGLKRISPQIHFANLFCVYGIMYFLVMIKTTKRIVSAAALLLSLIIVTAAATADAAPIAANEIRVHYIDVGQGDAVLIQSARNAVLIDGGDAKAQQTLLDYLRSAGVTDIDYVIATHPHADHISGLPKVIRQFGVKGVIMPDVVHTSGMFEKLLAAIEKKGLRITTPKVGDAFAAGIIKFTVLAPTRKFKDLNNMSIVVRMVHGETAFLFTGDAEGKSEREMLKNRQTLRADVLKVGHHGSRTSTTNDFLDAVKPSVAVISCAGGNSYDHPHKETMEKLRKPERNIAIFQTDKDGTVIITTDGRKITLLTEKKRKG

SEQ ID NO: 65913 - DNA, 1281 bp, Unknown
  Obtained from environmental sample
  misc_feature (1)..(1281): n is a, c, g, or t
ttggcagtggtattgcgaaaagacaaaaaaaacgctcttcatgttgtaatatcgggattgtccattgttgcgttattcggtttatattaccattggtggatgttgccagtgaagggaggcatggacgcggattggaataaatctttggacaaatcacaaatcaacgccttttttattgttcttgtgatgttgctgtatttattatatatgtcgtacgagcggagaaagttgtcccttataatactaaatctgttttatgaggtgatctcgtatatttgtcctccggctgtcttttttgtaggcggagtattgtcgggtgagttcttagcggcggcatttgcgagaaacaagaaacaaatcgtttcgattttaatatcaatgttatcaattgccacggcattcggtttgtattatctagcgcgaaaaacgtttgtatcggaagcgctaaaggacttttggaacaacccaaaaggtaaaaccgaattaataacgaacgttgagaatatattcgtggtattcgggatgagttctaaattggtttgggcgttggttccgtttgcgctgttcggtatttattcattgattcaacaaaaaagtaaaatcgcctattctgccgtattgtccatgctttttgtgagttttgcatcgtcaataggtatgtggcctttaaccggacggttgtggttgtttttgccggcggttatactgcctttttcttcagtcgggttcgatttaatctcaaaaagccgtaatatcataatacaaagaacagtcttttgcttgttttcggccataaccgtgttctacgcggtattgtgtttgaaagattgttttggcaaatccgacggtatgcgcgtgtacgcgggaaatgaggaagtaatattaaatccagctcttaagttcacgaatacgcatgtttacacgcaagaagtaaacccgttaatccaatatgtcaaagaacatattaaggacgatgaaatgctgtatgtctatccgatggcagcgttcacggtaaagttcaaaaacggctatacgaacaagagaatagggcaaaccggcaaggataatattattttcggagctaatcgcgatgaatggaacgaaaataaattgggagcggaattggacacaattattaaatcacgaaaagcgtacctattatttcaacactattatcgcggaataaatcctgggcttgtcatcttacaaaaatacgggactattaatattgtttcgaataactatgataccccgttgctttattttagggtaaatgagtaa

SEQ ID NO: 65914 - protein, 426 aa, Unknown
  Obtained from environmental sample
  misc_feature (1)..(426): Xaa is any amino acid
MAVVLRKDKKNALHVVISGLSIVALFGLYYHWWMLPVKGGMDADWNKSLDKSQINAFFIVLVMLLYLLYMSYERRKLSLIILNLFYEVISYICPPAVFFVGGVLSGEFLAAAFARNKKQIVSILISMLSIATAFGLYYLARKTFVSEALKDFWNNPKGKTELITNVENIFVVFGMSSKLVWALVPFALFGIYSLIQQKSKIAYSAVLSMLFVSFASSIGMWPLTGRLWLFLPAVILPFSSVGFDLISKSRNIIIQRTVFCLFSAITVFYAVLCLKDCFGKSDGMRVYAGNEEVILNPALKFTNTHVYTQEVNPLIQYVKEHIKDDEMLYVYPMAAFTVKFKNGYTNKRIGQTGKDNIIFGANRDEWNENKLGAELDTIIKSRKAYLLFQHYYRGINPGLVILQKYGTINIVSNNYDTPLLYFRVNE

SEQ ID NO: 65915 - DNA, 1386 bp, Unknown
  Obtained from environmental sample
  misc_feature (1)..(1386): n is a, c, g, or t
ttgcgggacggacatgcatacaatgacgacaatcctatcgccgctttcgccaccattcccggaagcagcgccctaacattaatccgctgttcgggcaggggagcgatagaggcggcatcttccgtctttgccccggacaaattaaaaggcgcacccggcaactcgatcgttcacggctggatagttaaagacggcgaanaaatcgacgaggcgcttgtttcggtcttccgcgccccgaaaagttacacgggcgaagacagccttgacatctcctgccacggcggcgcaagcgcgggaaaagccgtaatggccgcgttaagctcccgcggttatcgggacgcgcttcccggcgaatttactttccgcgcttttataaacggcaagctcgatcttacaaaagccgaatccgtcatggaactggtttccgcaaagaccgacataagccgccgtcacgccgtgtcgcgcctttccggctccctgcaaacggaaatcgaggaaataaaaaaatcgctggtgcaggttctttccggcgcggagatttacctggactattcggaagacgaagtgggcgcggacattgatgaggacgaaggaaaactcccctacctgaacattgcccttgaggcgttatcacgtcttaaaaaactgtccgcctcatggcggatggagcgcatttatcaggagggggtaacggtagtaatagcgggatgcccgaacgcgggcaagtccagtctttttaacgccctgttgaaagaggaccgttctatagtgacggaaattcccggcactacccgcgactggatagaagcgtgggtttccgttgacggaatccccgtccgccttgttgataccgcggggcttagggaatccgccgaagctgtagaaaaaatcggagttgaccgcagccgaaaacttttacaggaggcggatcttgttttgtatttgatagacggcgctcggggcgttacgaacgaagacagggattttattgacggtaatgacaggcggcttctcgtttggaacaaagctgatattgctatgccgccgccggagccgccgcaaaactttatcagcgtcagcgcgaaaacaggcgaagggcttgcgcagatttacgccgcgatttcgtcggcaattaaagagcagacgacagcacatcaagacgcgcctatcaccgccgccgtcggaacggagaggcagaaaaaacttgcggacgccgcagtctgcgcgttggaagaggcgcttgctcttgcgcggcgggaagagccgttggatttaatcgcgccgctgttgagggaagcggtcaattcgctgggagaaattacgggagaggtatccactgccgatatactggaagaaatgttcagccgtttctgcgtggggaagtaa

SEQ ID NO: 65916 - protein, 461 aa, Unknown
  Obtained from environmental sample
  DOMAIN (230)...(344): Miro-like protein
  misc_feature (1)..(461): Xaa is any amino acid
MRDGHAYNDDNPIAAFATIPGSSALTLIRCSGRGAIEAASSVFAPDKLKGAPGNSIVHGWIVKDGEXIDEALVSVFRAPKSYTGEDSLDISCHGGASAGKAVMAALSSRGYRDALPGEFTFRAFINGKLDLTKAESVMELVSAKTDISRRHAVSRLSGSLQTEIEEIKKSLVQVLSGAEIYLDYSEDEVGADIDEDEGKLPYLNIALEALSRLKKLSASWRMERIYQEGVTVVIAGCPNAGKSSLFNALLKEDRSIVTEIPGTTRDWIEAWVSVDGIPVRLVDTAGLRESAEAVEKIGVDRSRKLLQEADLVLYLIDGARGVTNEDRDFIDGNDRRLLVWNKADIAMPPPEPPQNFISVSAKTGEGLAQIYAAISSAIKEQTTAHQDAPITAAVGTERQKKLADAAVCALEEALALARREEPLDLIAPLLREAVNSLGEITGEVSTADILEEMFSRFCVGK

SEQ ID NO: 65917 - DNA, 1887 bp, Unknown
  Obtained from environmental sample
  misc_feature (1)..(1887): n is a, c, g, or t
atggattacgatacaattgtcataggcggcgggcacgcgggaatcgaagcgtccctcgctgtcagccgcctcggattttcgaccctcctcatcacgcaaaaccccgacaggatagggacgctctcctgcaaccccgcgattggcggcctttcaaaaggcaaccttgtaagggaagtggacgctctcggcggcgagatgggcaagctgacggacgcgacaatgatccagtaccgcgtgcttaaccgctcgcgcgggcccgcggtacaggctccgagagcgcaggcggacaagcacgcgtatcccgcggcggcgcggttaattcttgagaagcagaaaaatctgacgatttttatggacacggttacgggcttaattattgagggcgcgggcgcggacggagttgttaaggacgcttccatttcgaaaattacaggagtaattacaaagcgcggacaccgcatcactgcgcgtaccgtgatactttccgccggaactttcatggaaggaaaaatatttatcggcgaatatgacgctccccatggacggcttggagaagaagcggcggctggacttggcgtgtcgctccgccgtttggggttccccgtaggacgtttgaaaacaggcacgccggcgcgaatagcggaatcttctatagacttttcaaaaatggaaaaacaggacggcgacgagatgcgccccttttctttttgcgctcaaaccggagcggacggcattattaaagaccgcccttccttgccgtgctggataacttataccaactcaaaaacccatgaaattataaaagcgaatatacaccgttccccattgttcggcggaaaaatagtcggagtcggggcgcggtattgtccgtctatcgaggataaagttacgcgtttccctcagcgggaaaggcatcatatttttattgagccggaagggctttcaactaacgaaatgtacatgaacggcgcatccagttctttgcccgaagatgttcaacgcgattttattcacagcattcccggtcttgaggacgcgcaaattgtccgtccggcctacgctgtcgaatatgactacatcgatcctctggatctgtacccgtctcttgagtcaaaacgcctctcgggtttttttacggcggggcagactaacggttcatcgggttacgaggaagctgcggcgcaaggactgatggcgggaataaacgccgctatgaaaatgttgggaaggccgccgcttgtactgagccgcgcggaggcgtacatcggcgtgctggtggacgatcttaccaccctgggaaccagggaaccgtaccgaatgttcaccagccgcgccgaacaccgccttgttctgcgccatgacaccgccgatacaaggctctgccccaaaggccgcgatgccggcctggttgacgatgaacgctgggagcttttccaaaaaaaagccgaggcgttagacgaaatcagggaacttctggcacaaaaaaaaatttccccctccaatataaccgaaaacgaagctcttatctcccacgccggcgagagccttgagcgctgccttaccgatacccgtgttgaattagccgacattcttcccttcgccccggagctttccgcctaccccgccgaatggcttgaacgggccaggctggacatacgctacgcgggttatattgaaaaggaaaaccgcgccgcggtaaaggcggcaaaaatggacgcgataaagctggaccccgggttagactacgccgcccttaccggtctttcctcggaagccagggaaaaactaaaaaccgtaaggcccgtcaccgtcggacaggcggcgcgcatacccggcgtaaggcagggagacatcgccctgctgatggtgctgactgcgaagaaatga

SEQ ID NO: 65918 - protein, 628 aa, Unknown
  Obtained from environmental sample
  DOMAIN (4)...(411): Glucose inhibited division protein A
  misc_feature (1)..(628): Xaa is any amino acid
MDYDTIVIGGGHAGIEASLAVSRLGFSTLLITQNPDRIGTLSCNPAIGGLSKGNLVREVDALGGEMGKLTDATMIQYRVLNRSRGPAVQAPRAQADKHAYPAAARLILEKQKNLTIFMDTVTGLIIEGAGADGVVKDASISKITGVITKRGHRITARTVILSAGTFMEGKIFIGEYDAPHGRLGEEAAAGLGVSLRRLGFPVGRLKTGTPARIAESSIDFSKMEKQDGDEMRPFSFCAQTGADGIIKDRPSLPCWITYTNSKTHEIIKANIHRSPLFGGKIVGVGARYCPSIEDKVTRFPQRERHHIFIEPEGLSTNEMYMNGASSSLPEDVQRDFIHSIPGLEDAQIVRPAYAVEYDYIDPLDLYPSLESKRLSGFFTAGQTNGSSGYEEAAAQGLMAGINAAMKMLGRPPLVLSRAEAYIGVLVDDLTTLGTREPYRMFTSRAEHRLVLRHDTADTRLCPKGRDAGLVDDERWELFQKKAEALDEIRELLAQKKISPSNITENEALISHAGESLERCLTDTRVELADILPFAPELSAYPAEWLERARLDIRYAGYIEKENRAAVKAAKMDAIKLDPGLDYAALTGLSSEAREKLKTVRPVTVGQAARIPGVRQGDIALLMVLTAKK

SEQ ID NO: 65919 - DNA, 621 bp, Unknown
  Obtained from environmental sample
  misc_feature (1)..(621): n is a, c, g, or t
gtgcctgttttcaaacgtcctacggggaaccccaaacggcggagcgacacgccaagtccagccgccgcttcttctccaagccgtccatggggagcgtcatattcgccgataaatatttttccttccatgaaagttccggcggaaagtatcacggtacgcgcagtgatgcggtgtccgcgctttgtaattactcctgtaattttcgaaatggaagcgtccttaacaactccgtccgcgcccgcgccctcaataattaagcccgtaaccgtgtccataaaaatcgtcagatttttctgcttctcaagaattaaccgcgccgccgcgggatacgcgtgcttgtccgcctgcgctctcggagcctgtaccgcgggcccgcgcgagcggttaagcacgcggtactggatcattgtcgcgtccgtcagcttgcccatctcgccgccgagagcgtccacttcccttacaaggttgccttttgaaaggccgccaatcgcggggttgcaggagagcgtccctatcctgtcggggttttgcgtgatgaggagggtcgaaaatccgaggcggctgacagcgagggacgcttcgattcccgcgtgcccgccgcctatgacaattgtatcgtaa

SEQ ID NO: 65920 - protein, 206 aa, Unknown
  Obtained from environmental sample
  misc_feature (1)..(206): Xaa is any amino acid
MPVFKRPTGNPKRRSDTPSPAAASSPSRPWGASYSPINIFPSMKVPAESITVRAVMRCPRFVITPVIFEMEASLTTPSAPAPSIIKPVTVSIKIVRFFCFSRINRAAAGYACLSACALGACTAGPRERLSTRYWIIVASVSLPISPPRASTSLTRLPFERPPIAGLQESVPILSGFCVMRRVENPRRLTARDASIPACPPPMTIVS

SEQ ID NO: 65921 - DNA, 1563 bp, Unknown
  Obtained from environmental sample
  misc_feature (1)..(1563): n is a, c, g, or t
ttgacgaacctgttggaaaaggccgaccgcttggtaaaggacggcggctacggtcacaccacaagcgtattccttaacccgcaaacatgcgcggataaactcgccgcttttagcgcccgcatgaaaacctgccgcatcttgcttaacacaccctcggcgcacggcggcatcggcgacctgtacaacttccgcctgaagccttcgctcacgcttggctgcggcagttggggcggcaattcagtttcagagaacgtcggcgtcaaacacctgttaaatatcaaaacactggcggcaaggagggaaaatatgctgtggttccgcgctcccgaaaaagtatatattaaacggggctgcctccccgtggctctggacgagcttaaaactgtaatggggaaaaagcgggcgtttatcgttaccgacacattcctctaccaaaacggttacaccaaaaccattaccgacaagctggacagcatgggcattatccatgaaacgttttttgacgttgctcccgacccgaccttaggctgcgccaagagaggcgcggcgctggtaaccgcttttaagcccgatgttatcattgcgctgggcggcggctcggcaatggacgccggcaaaatcatgtgggtgctctacgaacatccggaagcggattttgaggatatggccatgcgctttgccgacatacggaagcgggtctacaccttccccaaaatgggagagaaagcctactttatcgcgatacccacgtccgccggaacgggcagcgaggtaacaccctttgccgtcatcaccgacgaaacaaagggcatgaagtacccgcttgcggattacgaactgatgcccaaaatggcgattgttgacgcggacatgcagatgaacgcgcccaagggacttaccagcgcgtccggcattgacgcgttgacccacgccctggaggcctacgcttcggtcatggcaacggacttcaccgacggcctcgcgatacaggccatcaagatggtatttgaatggctgcccaaggcttacaacgaaggcgcagcgaatcctgtcgcacgggaaagaatggccaacgccgccaccatagcgggcatggccttcgccaacgctttcctcggcgtctgccactcgatggcgcacaaactcggcgcattccaccacatacctcacggcgtggccaacgcgctgatgataaacgaggtgttgcgctacaacgccgtcgaagtcccgcccaagatggggactttcccgcagtacgaccaccccaagaccctcgcccgctacgcggaagtcgcggacgccctcggtttgggcggcaaaagcgacgaggataaacttgagcacctgatcgccgcaatagataagttgaaagaccagataggcatcaagaagaccatcaaagactacaacgtcgatgagaaggacttccttgcccgccttgacgagatgagcgaaaaagccttcgacgatcagtgcaccggagcgaatccccggtacccgctgatcgaggagataaaaaagatgttcctaaacgcgtactacggtaaaaaggagcgtgtataa

SEQ ID NO: 65922 - protein, 520 aa, Unknown
  Obtained from environmental sample
  DOMAIN (109)...(505): Iron-containing alcohol dehydrogenase
  misc_feature (1)..(520): Xaa is any amino acid
MTNLLEKADRLVKDGGYGHTTSVFLNPQTCADKLAAFSARMKTCRILLNTPSAHGGIGDLYNFRLKPSLTLGCGSWGGNSVSENVGVKHLLNIKTLAARRENMLWFRAPEKVYIKRGCLPVALDELKTVMGKKRAFIVTDTFLYQNGYTKTITDKLDSMGIIHETFFDVAPDPTLGCAKRGAALVTAFKPDVIIALGGGSAMDAGKIMWVLYEHPEADFEDMAMRFADIRKRVYTFPKMGEKAYFIAIPTSAGTGSEVTPFAVITDETKGMKYPLADYELMPKMAIVDADMQMNAPKGLTSASGIDALTHALEAYASVMATDFTDGLAIQAIKMVFEWLPKAYNEGAANPVARERMANAATIAGMAFANAFLGVCHSMAHKLGAFHHIPHGVANALMINEVLRYNAVEVPPKMGTFPQYDHPKTLARYAEVADALGLGGKSDEDKLEHLIAAIDKLKDQIGIKKTIKDYNVDEKDFLARLDEMSEKAFDDQCTGANPRYPLIEEIKKMFLNAYYGKKERV

SEQ ID NO: 65923 - DNA, 1161 bp, Unknown
  Obtained from environmental sample
  misc_feature (1)..(1161): n is a, c, g, or t
atggggggagacgttatggcggagaacaagcaagaaccggcgctggagccggtaaccgggcctgaaagcctggaaagggcccttagccgaatacgcgaagcccaaaagactttcgcgacgttcagccaggagcaggttgacaagatcttcttcgcggcggccaaagccgcggctatggagcgcatccccttggccaaaatggctgtggcggagaccggcatgggcgtcgtcgaggacaaggtcatcaaaaaccactacgcgtcggagtacatatacaatcagtataggtacgaaaagacctgcggcgttattgaggaagatccggttggcggcatcacccgcatcgccgagcctataggcctcgtggcggcggtcatcccgaccaccaaccccacttccacggcgattttcaagtcgctcatctgcctcaagacccgcaacggcatcataatctcgccgcacccgcgcgccaagggcagcacctgcgcggcggccaaggtcgtgctggacgcggcggtcgccgccggagcgccggcggggattatcggctggatagacgagccgagcctcgaaatgaccaacacggtgatgaaagaggccgacatcatcctcgccaccggcggaccggccatggtcaagtcggcatactcctccggcaaacccgcggtcggcgtggggtcgggcaacgtccccgccatcatcgacgacagcgcggacatcatcctcgcggtgaactcgattatccactccaaaactttcgacaacggaatgatatgcgcctccgagcagtcggtaatcgcgctgcagggcgtctatgataaggtgaaagccgaattcaaacgtcgcggctgctacttccttaacgcggaagagaccgaaaaggtgcgaaaggcgattatcgtcaaaggagcgctgaacgcgaagatcgtagggcagaaagcggcgaagatcgcggagatcgccggcgtgaccgttccggaagagacgaaaatacttatcggcgaagtggaaagcgtggagctttcggaagagttcgcccacgaaaagctctcgcctgtgctgggcatgtacaaagcgaaggattttgacgaacctgttggaaaaggccgaccgcttggtaaaggacggcggctacggtcacaccacaagcgtattccttaa

SEQ ID NO: 65924 - protein, 386 aa, Unknown
  Obtained from environmental sample
  DOMAIN (5)...(383): Aldehyde dehydrogenase family
  misc_feature (1)..(386): Xaa is any amino acid
MGGDVMAENKQEPALEPVTGPESLERALSRIREAQKTFATFSQEQVDKIFFAAAKAAAMERIPLAKMAVAETGMGVVEDKVIKNHYASEYIYNQYRYEKTCGVIEEDPVGGITRIAEPIGLVAAVIPTTNPTSTAIFKSLICLKTRNGIIISPHPRAKGSTCAAAKVVLDAAVAAGAPAGIIGWIDEPSLEMTNTVMKEADIILATGGPAMVKSAYSSGKPAVGVGSGNVPAIIDDSADIILAVNSIIHSKTFDNGMICASEQSVIALQGVYDKVKAEFKRRGCYFLNAEETEKVRKAIIVKGALNAKIVGQKAAKIAEIAGVTVPEETKILIGEVESVELSEEFAHEKLSPVLGMYKAKDFDEPVGKGRPLGKGRRLRSHHKRIP

SEQ ID NO: 65925 - DNA, 312 bp, Unknown
  Obtained from environmental sample
  misc_feature (1)..(312): n is a, c, g, or t
ttgagttctatgacagaacttgccaaacagaggcttgcgaaattcaggcataacaaacttgcctggttttcctttgttattttggctgtagcatacttgctctctttaacaagcccttggctggtgaacgataaacccctattgctaaaatataatggcaaattttactctccagctcttttcattacgggcaaagtgagttttatgggggttacgcaaccgagccaaactacaaggaactggttttgtatgccaaagaaaattccattccattttttgccctattccctcccataccctggagcccaataa

SEQ ID NO: 65926 - protein, 103 aa, Unknown
  Obtained from environmental sample
  misc_feature (1)..(103): Xaa is any amino acid
MSSMTELAKQRLAKFRHNKLAWFSFVILAVAYLLSLTSPWLVNDKPLLLKYNGKFYSPALFITGKVSFMGVTQPSQTTRNWFCMPKKIPFHFLPYSLPYPGAQ

SEQ ID NO: 65927 - DNA, 705 bp, Unknown
  Obtained from environmental sample
  misc_feature (1)..(705): n is a, c, g, or t
atgtccgtttttcctaatggatcagaactgcttgcggttttggaaaaggaatccaaattaccaggcacggctataaatttaagcctactcaaacaattcattaaagaggctacaccagaacaggtttcgctttgcctaacagtccttgataccaagtcagatgcaaactcacccgctacctttgttgcgatgtgtggggtggccgcttctgccaacttggaagtttttagaaaagccgcaaatagcagcaactggcgaataagggaagccgcagtttttggcttgcaaaatttgggtttaaaagattcagaaaaactttattccgtttttgattcttgggaaaatgcaaatttgctggaaaaaaggtgcatagcggcaacgctctgcgagccagctttaataaaaacaaaagaaaaagcagaaaaaattctaggtattctgaaagaatatatggaaattatagaactggaaaaaaatgtgaaaagcgaggagtatagggtattcaaaaaagctatgggatattgcataagcgtagttatagaagccaatccagaaaagggaaaagaatgctttgaagagtggatgcgttctccaagcctagaaattcgctgggttttaagcgaaaacctaaaacacgaccggctccgcaaaatggactccgaatgggttgatgcccaaatagaattcttaagcgacgtggaatag

SEQ ID NO: 65928 - protein, 234 aa, Unknown
  Obtained from environmental sample
  misc_feature (1)..(234): Xaa is any amino acid
MSVFPNGSELLAVLEKESKLPGTAINLSLLKQFIKEATPEQVSLCLTVLDTKSDANSPATFVAMCGVAASANLEVFRKAANSSNWRIREAAVFGLQNLGLKDSEKLYSVFDSWENANLLEKRCIAATLCEPALIKTKEKAEKILGILKEYMEIIELEKNVKSEEYRVFKKAMGYCISVVIEANPEKGKECFEEWMRSPSLEIRWVLSENLKHDRLRKMDSEWVDAQIEFLSDVE

SEQ ID NO: 65929 - DNA, 612 bp, Unknown
  Obtained from environmental sample
  misc_feature (1)..(612): n is a, c, g, or t
ttggaaaaaaacgggcaggttcctttgccaccatatataaacagaagtgcttgcgcaagcgataaaatcgactaccaaacaatttttgcaaaatgcgctggagctgtggctgccccaactgcgagcttgcattttagtgaagatatggcagctgaacttaaagcaaaaggcgtgttttttgcagaaacaaccttgcacgttggccccggcacttttgaaaacataaaagaaacttcggattttcggcagcacaaaatgcacagcgaggaatacgaattaaacgagcagaatgcaaacataataaacgagtgcaaaaaaaatggcgggagaataatttgcataggcacaacaagcaccagagttttagaaacagttgcaaacgaagatggttctgtgaaagccgctagtggcttaacggatatttttatctacccaggttttaaattcaaagcgacagatgccttactcacaaatttccattggccaaaatcctctttaattctgctggtatctgctttttatggcagggaaaatactttgaatgcttacaaatacgctgttgaaaattccctaaagctctttagctatggagatgggatgttagttatataa

SEQ ID NO: 65930 - protein, 203 aa, Unknown
  Obtained from environmental sample
  DOMAIN (1)...(77): Queuosine biosynthesis protein
  misc_feature (1)..(203): Xaa is any amino acid
MEKNGQVPLPPYINRSACASDKIDYQTIFAKCAGAVAAPTASLHFSEDMAAELKAKGVFFAETTLHVGPGTFENIKETSDFRQHKMHSEEYELNEQNANIINECKKNGGRIICIGTTSTRVLETVANEDGSVKAASGLTDIFIYPGFKFKATDALLTNFHWPKSSLILLVSAFYGRENTLNAYKYAVENSLKLFSYGDGMLVI

SEQ ID NO: 65931 - DNA, 1035 bp, Unknown
  Obtained from environmental sample
  misc_feature (1)..(1035): n is a, c, g, or t
atgtcttccacaaacattgcccaaaacggtccgctagccggtcctcaggagggtttaagctttgtcgcggttgactacggcacagatgaaaaattcagtttgaaagaagcgattgaaattctcggcgcggcaataatcggcaaagaacttattgaaaaatacaaaggctttcctgttttttctaaattttatgatcttaaaaccccgcttttccatcatcttcatcttgatatggaagccgccgcccgcgtaggcaaactcggcaaaccggagtgctattattttccgcgtcagttcgctagccacacaggagaaattaacgcgacatatttcggctacgaccccgacacaaaacccgaagaagtaaaacagcgtctgcgcgattacaacaagggcgacaaccgcataacggaactttcacgcgcatggcgcattgagttaggttcgggctggtactcccccgccggcgtgattcacgcgccaggctcggtaatgacttatgagcttaactggaacggcgatgtcaactctgtgcacgagaatgtagtttcaggcgttacatacccccgcgaatttatgaacggcgaatgtccgccggacaaaaaagacgacatcgactatattttcagtttattggattgggagaagaacacagacccccactacaaaaaacgctttggccgcccgcctgtcaccattgttaaaaacacggactgcgaagaaaaatggatctcctacgccaacgaaggttatttcagcgcgaaagagctttcagttaatccgggcaagagcgttactatcaaagagcctgccgctcacggcgttatctttattcagggacacggcaagttcggtccctattcttgcgaagcgccgggtatgcttcgtttcggtcagcagagcgcagatgaatactttgtaagcgaagacgcggcaaaaaaaggaatagtgattactaacacaagcccggttgagccgctggtactgttaaagagcttcggaccgaatcaccccgacgctccgcagtctgtgtaa

SEQ ID NO: 65932 - protein, 344 aa, Unknown
  Obtained from environmental sample
  misc_feature (1)..(344): Xaa is any amino acid
MSSTNIAQNGPLAGPQEGLSFVAVDYGTDEKFSLKEAIEILGAAIIGKELIEKYKGFPVFSKFYDLKTPLFHHLHLDMEAAARVGKLGKPECYYFPRQFASHTGEINATYFGYDPDTKPEEVKQRLRDYNKGDNRITELSRAWRIELGSGWYSPAGVIHAPGSVMTYELNWNGDVNSVHENVVSGVTYPREFMNGECPPDKKDDIDYIFSLLDWEKNTDPHYKKRFGRPPVTIVKNTDCEEKWISYANEGYFSAKELSVNPGKSVTIKEPAAHGVIFIQGHGKFGPYSCEAPGMLRFGQQSADEYFVSEDAAKKGIVITNTSPVEPLVLLKSFGPNHPDAPQSV

SEQ ID NO: 65933 - DNA, 1086 bp, Unknown
  Obtained from environmental sample
  misc_feature (1)..(1086): n is a, c, g, or t
atggggttattgtttttttggattaaaattgcaataaaaagattattagatttatctaaaccatatcttgttgttattctttgcgcgttaatgtttattggagcttttatatatgcctttataaacggacatattgttataaattttgatataaaaacaatatatattattttatctttaataatatttttgtcattaattaattcatttaaaaaatatcatttaatgcaaattttaattaaatattcaaaatgtaaatatcaaaatagagttatttacaggagataccttttaaagcaggctttaattaataattcgttgctcatcatatttaatattatcgcgtattattcaataataaattactcaactattaagattgttcatatcttcattttattcgggataacagtattttcaatatttttatcgtttataataatgtgcgtaagaaataattatttgaatgagaaatattcaaaaataaataataaaatattaaagattaatccgcttgtaaaaagcgcgttatatgattatctgtcgtctgattttttaataacatttacattaagcgttgttatttttatcgcctttataattaatattgcaaagggtataaataatattgacgaattaaaaaataattcaacttttttcatgataataacctttatattttccgttggatttacgggtattgtcagctcaataccgaatattaattggaaatttcaggctattatttctccaaacagcattaactaccatttaaaaagaacgtttctatttcttgccgtatttttcggttggctgattttactttttattattttcggcggttacgttaatataacactttcaataaaatatttgtattgtatttttgtgttatcatgcataactgtcaatctttccttttcaattaccaatgttatgataaaaatgtttatcataacaattattactatattaactgtgtgggttactacgttgccgtcaggttttctgccgactttaataattccggtaataattacatttattaaggcgaagaatgaatacagggagtggtctttattatga

SEQ ID NO: 65934 - protein, 361 aa, Unknown
  Obtained from environmental sample
  misc_feature (1)..(361): Xaa is any amino acid
MGLLFFWIKIAIKRLLDLSKPYLVVILCALMFIGAFIYAFINGHIVINFDIKTIYIILSLIIFLSLINSFKKYHLMQILIKYSKCKYQNRVIYRRYLLKQALINNSLLIIFNIIAYYSIINYSTIKIVHIFILFGITVFSIFLSFIIMCVRNNYLNEKYSKINNKILKINPLVKSALYDYLSSDFLITFTLSVVIFIAFIINIAKGINNIDELKNNSTFFMIITFIFSVGFTGIVSSIPNINWKFQAIISPNSINYHLKRTFLFLAVFFGWLILLFIIFGGYVNITLSIKYLYCIFVLSCITVNLSFSITNVMIKMFIITIITILTVWVTTLPSGFLPTLIIPVIITFIKAKNEYREWSLL

SEQ ID NO: 65935 - DNA, 2220 bp, Unknown
  Obtained from environmental sample
  misc_feature (1)..(2220): n is a, c, g, or t
atggcaaaaacaacagtaactctcaacattgccggtcaggacatggttcttgaaaccggcagaatcgcaagacaggctaacggcgctgtttttgcgcagtatgcgggatcagccgtgattgcgactgtctgttcatcttcggaaccggtggaggggctggattacgttccccttacggttgattataatgaaaaatactatgccgcgggaaagatccccgggggcttcatcaagcgggaaagccggccaaaggacaaggaaatcctcgtcagccgccttatcgaccgcccgatgcgcccgcttttcgagaaagctttcggcagggagatacagcttgtccccacaacgctctcgaccgatcaggtaaacccgccggatatgctggcgataatcgcctcgtccgccgcggtgcatatttcggacattccctttaacggccccattgccggagtgcgtgtctgccaggtggacggcgagctggtggtcaatcctacctacgagcagattgaaaaatccacaatggaaattgtcgtcgccggtacaagagacggcattacaatggtcgaaggcggggcaaaagaggtcagcgaagatctgatgatagaggctctggataaagcccataacatgatcgtggagttatgcgcttttcaggaaaagctccgcgagcttgccggtaagcctaaacttccccttgttgtccctacccatgttctggaaaacaaagacgctatccacgcctctgcgtacccgaaacttgaaaaagcttgtttccttgcgaccaagcaggaacgccacgagggcattaaagccatacaagcggaattagcggcgcagtacgcggcccagcttgaggatgaaaaacagaaaaagctcttcaacgccctgttcgaggatatgcagtataacatcctccgctcttcgatacttaacaacggccgtcgcgttgacgggcgcggcaccgaggatatacgcaatatcacctgcgaggtggacatactcgccagaacccatggatcggcgctctttacccgcggcgagactcagtcccttgtggtgacaaccctgggcacggtgtttgacgagcaggtgtatgacgacatcgaaggcgacaagcgggagcattttatgctccattacaacttccctccatattcggtgggtgaagtaggcaggcttggaacaggccgccgcgagataggccacggcaacctggcgcgacgttcgctggaagcagttgttccgtcaaaagaggaattcccctacacggtacgggtggtctcggagataatggagtcaaatggctcttcgtcaatggcgtctgtttgcggcggaactctttcaatgctccacgccggagtgcctttgaaaaaacccgtggcgggtatcgcgatggggcttatcaccgaaggcgccggaaaagccggcgatcgttacgcggtgttatctgacatcctgggcgaagaagaccacctgggcgacatggactttaaagtagccggcaccgaggacggtataaccggtttccagatggatataaaaatcgccggtgtcagcccggagattatgcgcaaggcgctggatcaggcaaagcgcggcaggatgcacatcctttcgattatgaacaagacaatcagccgcccggctgaagagatcagcgaatacgcgcccaaaatcgtcaccctgcgtattgacatcgacaagataggcacgcttataggccccggcggaaagaacatcaaggccctgtgcgaacagtacagcgtaaagatcaacaccgaggacgacggcaccgttacgattttcggcaagaacaccaaagacgcggaggaagccaaaaccgccgttatgggcgttacctcagacccggaaattgacagggtgtacaacggcactgtaaaacggattatggatttcggcgcttttgtggaaattctgcccggcagggaagggctggtgcatatcagcaaactttcacgccagcgtattgccaatgtcaccgacgtactgaaagaagggcaggaaattcccgtcaagctcaccgaaattgacaaaatgggcaggcttaacctttcgtatattgacgctatcgatccggatggcgccgatcccagtccgaagagccacagcggcaatggcggcagcggtcataccggcggccattcgggccacgacaacaggggttttaacaagcccggcagggacagacccaggcattaa

SEQ ID NO: 65936 - protein, 739 aa, Unknown
  Obtained from environmental sample
  DOMAIN (559)...(616): KH domain
  misc_feature (1)..(739): Xaa is any amino acid
MAKTTVTLNIAGQDMVLETGRIARQANGAVFAQYAGSAVIATVCSSSEPVEGLDYVPLTVDYNEKYYAAGKIPGGFIKRESRPKDKEILVSRLIDRPMRPLFEKAFGREIQLVPTTLSTDQVNPPDMLAIIASSAAVHISDIPFNGPIAGVRVCQVDGELVVNPTYEQIEKSTMEIVVAGTRDGITMVEGGAKEVSEDLMIEALDKAHNMIVELCAFQEKLRELAGKPKLPLVVPTHVLENKDAIHASAYPKLEKACFLATKQERHEGIKAIQAELAAQYAAQLEDEKQKKLFNALFEDMQYNILRSSILNNGRRVDGRGTEDIRNITCEVDILARTHGSALFTRGETQSLVVTTLGTVFDEQVYDDIEGDKREHFMLHYNFPPYSVGEVGRLGTGRREIGHGNLARRSLEAVVPSKEEFPYTVRVVSEIMESNGSSSMASVCGGTLSMLHAGVPLKKPVAGIAMGLITEGAGKAGDRYAVLSDILGEEDHLGDMDFKVAGTEDGITGFQMDIKIAGVSPEIMRKALDQAKRGRMHILSIMNKTISRPAEEISEYAPKIVTLRIDIDKIGTLIGPGGKNIKALCEQYSVKINTEDDGTVTIFGKNTKDAEEAKTAVMGVTSDPEIDRVYNGTVKRIMDFGAFVEILPGREGLVHISKLSRQRIANVTDVLKEGQEIPVKLTEIDKMGRLNLSYIDAIDPDGADPSPKSHSGNGGSGHTGGHSGHDNRGFNKPGRDRPRH

SEQ ID NO: 65937 - DNA, 492 bp, Unknown
  Obtained from environmental sample
  misc_feature (1)..(492): n is a, c, g, or t
atgggctttatccagagcctctatcatcagatcttcgctgacctcttttgccccgccttcgaccattgtaatgccgtctcttgtaccggcgacgacaatttccattgtggatttttcaatctgctcgtaggtaggattgaccaccagctcgccgtccacctggcagacacgcactccggcaatggggccgttaaagggaatgtccgaaatatgcaccgcggcggacgaggcgattatcgccagcatatccggcgggtttacctgatcggtcgagagcgttgtggggacaagctgtatctccctgccgaaagctttctcgaaaagcgggcgcatcgggcggtcgataaggcggctgacgaggatttccttgtcctttggccggctttcccgcttgatgaagcccccggggatctttcccgcggcatagtatttttcattataatcaaccgtaaggggaacgtaatccagcccctccaccggttccgaagatga

SEQ ID NO: 65938 - protein, 163 aa, Unknown
  Obtained from environmental sample
  misc_feature (1)..(163): Xaa is any amino acid
MGFIQSLYHQIFADLFCPAFDHCNAVSCTGDDNFHCGFFNLLVGRIDHQLAVHLADTHSGNGAVKGNVRNMHRGGRGDYRQHIRRVYLIGRERCGDKLYLPAESFLEKRAHRAVDKAADEDFLVLWPAFPLDEAPGDLSRGIVFFIIINRKGNVIQPLHRFRR

SEQ ID NO: 65939 - DNA, 381 bp, Unknown
  Obtained from environmental sample
  misc_feature (1)..(381): n is a, c, g, or t
gtggcctatctcgcggcggcctgttccaagcctgcctacttcacccaccgaatatggagggaagttgtaatggagcataaaatgctcccgcttgtcgccttcgatgtcgtcatacacctgctcgtcaaacaccgtgcccagggttgtcaccacaagggactgagtctcgccgcgggtaaagagcgccgatccatgggttctggcgagtatgtccacctcgcaggtgatattgcgtatatcctcggtgccgcgcccgtcaacgcgacggccgttgttaagtatcgaagagcggaggatgttatactgcatatcctcgaacagggcgttgaagagctttttctgtttttcatcctcaagctgggccgcgtactgcgccgctaa

SEQ ID NO: 65940 - protein, 126 aa, Unknown
  Obtained from environmental sample
  misc_feature (1)..(126): Xaa is any amino acid
MAYLAAACSKPAYFTHRIWREVVMEHKMLPLVAFDVVIHLLVKHRAQGCHHKGLSLAAGKERRSMGSGEYVHLAGDIAYILGAAPVNATAVVKYRRAEDVILHILEQGVEELFLFFILKLGRVLRR

SEQ ID NO: 65941 - DNA, 1305 bp, Unknown
  Obtained from environmental sample
  misc_feature (1)..(1305): n is a, c, g, or t
atggtaatgggcatgaagcgtttttcaagtcgtgagggtgaaagtccgcgctccatgtcccttaccattttcatgtatatcctcagtgaagcgtttttttctttttttatttcatttctttttttcttttttattttttttgtgaaccagctcctgttaatggcccaggacattctgtccaagcaggttccattggggcaggttgcccttttggttctgttctctttgccttccgttgtagcattgtcagccccttttgcttcccttgtcggcactttgatgaccgtagggcggctttcaagcgacaacgaaattctggtgtttctgtcatccgggctttcattcaggaatgtgtttgtgccggcaataaccgtaggcattgttatttccattttttcatttatcgccaatgacatattgcttcccggaggctatgtgcaattcgccaaattgtacatgcgcatacttgtttctaccccggcgttggaactggaggcaaacacggtaaaaaaattcaagaacacggtgattgtcaccggtaacgtgacaggcaacgctatcgacaacgtgctgatactggacaggaccagcgacggcgagcgccgtgttatcatagccgccaacgccgaattaaaagactcgggcaaaaacggtctgactcttgaacttgacagggcttttgtactatcctcaaaggaatttgcccgtgaagattatgactatgcgtccgccgggtatcttcgctactgggtgccgaaggaggatcttatccaggccatgcccgccgttagcccccgtgagatgagttctatagatgtgtacaaagagataaaaagaaggaccctcgatcttaatattcgcatgaatgaaagacggaacaggatttcctctctggcctttgcctttgagaacagcctgcgcgccgggcccgcttcactggaatggaaccgcagaacaaatcaatttgacgctttccagcgggaagcgcagacacttcgggatatgagtaaagacagggggctttcactgtattggctggaattctacaagaaattttccatgccattcggggctttttcattcatcttcctttcggttgcgctgggactgatggcaaaaagaagcggccagaccgtcggctttatttttggcctgattatttcggtaatctattgggcgctgcttctgggcgggcagaccatgggaataaggctgggcacctctccgttttggtcaatgtggctgccgaatattctcgcgctgtcgatcgggcttgttctgaccgttatcaaggtgacaagatga

SEQ ID NO: 65942 - protein, 434 aa, Unknown
  Obtained from environmental sample
  DOMAIN (25)...(430): Predicted permease YjgP/YjgQ family
  misc_feature (1)..(434): Xaa is any amino acid
MVMGMKRFSSREGESPRSMSLTIFMYILSEAFFSFFISFLFFFFIFFVNQLLLMAQDILSKQVPLGQVALLVLFSLPSVVALSAPFASLVGTLMTVGRLSSDNEILVFLSSGLSFRNVFVPAITVGIVISIFSFIANDILLPGGYVQFAKLYMRILVSTPALELEANTVKKFKNTVIVTGNVTGNAIDNVLILDRTSDGERRVIIAANAELKDSGKNGLTLELDRAFVLSSKEFAREDYDYASAGYLRYWVPKEDLIQAMPAVSPREMSSIDVYKEIKRRTLDLNIRMNERRNRISSLAFAFENSLRAGPASLEWNRRTNQFDAFQREAQTLRDMSKDRGLSLYWLEFYKKFSMPFGAFSFIFLSVALGLMAKRSGQTVGFIFGLIISVIYWALLLGGQTMGIRLGTSPFWSMWLPNILALSIGLVLTVIKVTR

SEQ ID NO: 65943 - DNA, 1479 bp, Unknown
  Obtained from environmental sample
  misc_feature (1)..(1479): n is a, c, g, or t
atgaagtggacttttgtaaacaaagcggttgaacgctttctgtatgtaaagcgggagaatataataggccgaaaatgcagccagtggggagccaatatctgtaatacacgaaactgcggcatcataagacttagaaacggctttaaggaaacatactttcagcagtttggcggtgattaccatgtgcttgtttcatatttatatgatgaaaatggcgaagtggacgggcatatcgaggttatatatgaagatactgcagtaatagccagagaaaaaaagaaatttgaagctttggttcattggtatgaatccattcttgacgccatgccgttctttatttcagttaccgacaagaacatgaactggacattcgttaacgcggcgcttgagaatcacctgggtaaaaaaagaaaagatgttatcggcaaacattgcagttattggaacttcggccattgcaataccgatgattgtaccattgcgcgggccaagcgcggtttgaagcaaacctgtttttcaatgggagatatctcctatcaggctgatgttgagatactcaaggatttaaagggcgcggtaattggttatctttctgttgttaaggatataacaaatttggaacagatgacaaaacagcaggcggaggcggaagccgcagatcgcgcgaaatccgcctttttggctaccatgagccatgaaatgcgaacgcccatgaacgcaataaccggcatgacggcaatcggcaagaacgcgaaggacattgaacaaaaagactacgcgctggacaagatagaagacgcatcaatgcatctgctcggtgttataaacgacatacttgatatgtcaaaaatcgagacgaataagctggaactgtcgcctgttgaatttaattttgaaaatatgctgcaaaaagcagtcatggtgatcaatttccgcgtggacgaaaaacaacaaaaactaacggtacacattgacaggaaaattccgcaaaccatcatcgccgatgagcagcggctggctcaggtcgttaccaatcttttgaataatgccgttaaatttacgccggaaaaaggtttaatcagccttaacgcaaactttatgggagaaaaaaacggcctttgtaccatacaaatttcggtaagcgacacaggaatcggaataagcgccgaagaacaaaaacgcctgttcagttcctttcagcaggcggaatccagcacaacacgcaaatacggcggtacgggtctgggccttgcgatttccaaaagcattgtagaaatgatgggcggaacgatatgggttcaatcagaacccgaaaaaggatctgtttttacttttaacattcaggtgcggcgcggtaatgaacatctcggcgttgacaaacagcaggctaaaaaagtgcgggttacggaaattgaaggtatctttgccgggaagcgcatactactggttgaagatgtggaaattactcgcaaattgtag

SEQ ID NO: 65944 - protein, 492 aa, Unknown
  Obtained from environmental sample
  DOMAIN (222)...(287): His Kinase A (phosphoacceptor) domain
  misc_feature (1)..(492): Xaa is any amino acid
MKWTFVNKAVERFLYVKRENIIGRKCSQWGANICNTRNCGIIRLRNGFKETYFQQFGGDYHVLVSYLYDENGEVDGHIEVIYEDTAVIAREKKKFEALVHWYESILDAMPFFISVTDKNMNWTFVNAALENHLGKKRKDVIGKHCSYWNFGHCNTDDCTIARAKRGLKQTCFSMGDISYQADVEILKDLKGAVIGYLSVVKDITNLEQMTKQQAEAEAADRAKSAFLATMSHEMRTPMNAITGMTAIGKNAKDIEQKDYALDKIEDASMHLLGVINDILDMSKIETNKLELSPVEFNFENMLQKAVMVINFRVDEKQQKLTVHIDRKIPQTIIADEQRLAQVVTNLLNNAVKFTPEKGLISLNANFMGEKNGLCTIQISVSDTGIGISAEEQKRLFSSFQQAESSTTRKYGGTGLGLAISKSIVEMMGGTIWVQSEPEKGSVFTFNIQVRRGNEHLGVDKQQAKKVRVTEIEGIFAGKRILLVEDVEITRKL

SEQ ID NO: 65945 - DNA, 321 bp, Unknown
  Obtained from environmental sample
  misc_feature (1)..(321): n is a, c, g, or t
ttgcttgaacctacacatttggaaattaactgcgcggtaaacggcgaagaggcggttaaaatgtttaaggccgctcctaacaagtacgatatgatttttatggatatacaaatgcctgaaatggacggttatgaagcgacacggcgtattcgcgccatgaatgattcacgggcaaaaacaatcccgataattgccatgacagctaacgttttccgcgaagatgtagaaaaatgccttatgacaggcatgaacgatcatatcggcaagccgattaatttcgacgaaatcctgaactgtctgaattcatatatggcggcataa

SEQ ID NO: 65946 - protein, 106 aa, Unknown
  Obtained from environmental sample
  DOMAIN (1)...(101): Response regulator receiver domain
  misc_feature (1)..(106): Xaa is any amino acid
MLEPTHLEINCAVNGEEAVKMFKAAPNKYDMIFMDIQMPEMDGYEATRRIRAMNDSRAKTIPIIAMTANVFREDVEKCLMTGMNDHIGKPINFDEILNCLNSYMAA

SEQ ID NO: 65947 - DNA, 345 bp, Unknown
  Obtained from environmental sample
  misc_feature (1)..(345): n is a, c, g, or t
atggatattagcacaatttgcgtacatggctgtgaaaaaaaattcgatgaaacaggatcggtagccgttccgatattcgcctcggctaccttcgctcatcctaaagtggggaaaagcacaggctttgattattcacgctcgcttaaccctaccaacgtgcaccttgaagaaactgtagcggcattggaaggcggcaattacgcagtggcgttttcttccggcatggcggcggtttcggctttaatggaactgttttcaccaggcgatcatatcattgcgtccgacgacctttacggcggcacattccgcttattcaggcacatatccgaaaaaaacnggcgttaa

SEQ ID NO: 65948 - protein, 114 aa, Unknown
  Obtained from environmental sample
  DOMAIN (4)...(114): Cys/Met metabolism PLP-dependent enzyme
  misc_feature (1)..(114): Xaa is any amino acid
MDISTICVHGCEKKFDETGSVAVPIFASATFAHPKVGKSTGFDYSRSLNPTNVHLEETVAALEGGNYAVAFSSGMAAVSALMELFSPGDHIIASDDLYGGTFRLFRHISEKNXR

SEQ ID NO: 65949 - DNA, 855 bp, Unknown
  Obtained from environmental sample
  misc_feature (1)..(855): n is a, c, g, or t
ttgcgtccgacgacctttacggcggcacattccgcttattcaggcacatatccgaaaaaaacnggcgttaaagtctcttatgccgctactcctgaagatataaaaaaagaaataacctcggctacaaaagccgtatttatagaaactccttccaacccgatgatgcgcgtaacggacatggcggcggttgcggctatcgcgcaaaaacataaattgctttttattgttgataacacttttcttacaccatattttcaaaaaccgttttctcatggggccgatattgttttgcacagcggaacaaaatatttaggcggacacaacgatactctgtcaggactattggtagtaaaagattcagttcttgcggaaaaactgaggttcatcgtaaaaaccacaggcgcatgtctttcgccctttgacagttttctgattattcggggcattaaaacgcttgccgttcgcatggagcgtcagcaggaaaccgccatgaaaatagttcactggcttttggaacaaaccgctgtaaaaaaagtttattaccccggattaaaaggacatcatgattatgacatatcccgcaggcagacaagtggttttggaggaatgctctcgttttcaatgtggaatgggcaaacggcggaaaaagtactggagagcgtaaaagtaataaagtacgccgaaagtttaggcggcgttgaaagcctcattacatacccaatgcttcaaacccatgccgatcttcccgaaagcgaacggaacgcgcgtggaataaatgaatgtctactgcgcctgtccgttggactggaagccgcggaggacttgatagcggatttaaaacaggcaattgtataa

SEQ ID NO: 65950 - protein, 284 aa, Unknown
  Obtained from environmental sample
  DOMAIN (1)...(284): Cys/Met metabolism PLP-dependent enzyme
  misc_feature (1)..(284): Xaa is any amino acid
MRPTTFTAAHSAYSGTYPKKTGVKVSYAATPEDIKKEITSATKAVFIETPSNPMMRVTDMAAVAAIAQKHKLLFIVDNTFLTPYFQKPFSHGADIVLHSGTKYLGGHNDTLSGLLVVKDSVLAEKLRFIVKTTGACLSPFDSFLIIRGIKTLAVRMERQQETAMKIVHWLLEQTAVKKVYYPGLKGHHDYDISRRQTSGFGGMLSFSMWNGQTAEKVLESVKVIKYAESLGGVESLITYPMLQTHADLPESERNARGINECLLRLSVGLEAAEDLIADLKQAIV

SEQ ID NO: 65951 - DNA, 1185 bp, Unknown
  Obtained from environmental sample
  misc_feature (1)..(1185): n is a, c, g, or t
ttgtatatgaaatacaactttgacagaataatagacagaagtaattcctacagtatcaaatacgaacctacttggcgcggaaaacctgcggacgtgcttcctttgtgggttgccgatatggattttgccgctccgccctgcgtgcagaaggcgattatccaccgtgcaaaacatggaatctacgggtactcagaacctgacacggagtattttgatgttatgcgcaaatggtttgagaaccgctttaattggtcaccccagcgcgattggctgactattactcccggagtggtaaacgccctgtatatcgccgtccattcgctgacggagcggggagacggaattgttatacaacagcctgtttattatccatttgaatcaagtataaggaaaaccggacggcagttgcttgtgaatgaacttgtttatagcgacggtcattacagtatagattttcaggattttgaagaaaaaattaaacaggcgaaaatgttcattctgtgcaatcctcataaccctgtagggcgcgtttggaaacgtaatgaactggagcgtatgggcgaaatatgcctgcgtcacggcgttactgttatcgccgatgaaatccacgaagattttattttttccggacacaagcatcttgtattttcagccttaaataaagacttcgcggatataaccgtcacctgcacatcgccgtcaaaaacttttaatctcgcgggattgctttgcgccaatatttttatttccaacaaagaactgcgtgaaaaatttaaaggagagtacgagagctgtggattaagccagcctggcgtaatgggacttatagcctgtaaagcggcgtatgaaaacggggccgaatggctggatcaacttcttgactatcttgcggaaaatatgttatttctcaagacatatctttcaaagaacattccaaaaatcaggtttattgaaccggagggaacatatcttgcgtggctggattgcaatgaaaccggaatttccgcccaaaagctggatgaaacgcttacacacaagggtaaattatggcttagctccggtttatcattcgggaaaggcggtaaaggcttcgagcgcgttaacgctgcctgccctcatctggttttacaaaacgcgctggaacggttaaaaaatgtggattggcaaaacgcagaaagggaataa

SEQ ID NO: 65952 - protein, 394 aa, Unknown
  Obtained from environmental sample
  DOMAIN (30)...(383): Aminotransferase class I and II
  misc_feature (1)..(394): Xaa is any amino acid
MYMKYNFDRIIDRSNSYSIKYEPTWRGKPADVLPLWVADMDFAAPPCVQKAIIHRAKHGIYGYSEPDTEYFDVMRKWFENRFNWSPQRDWLTITPGVVNALYIAVHSLTERGDGIVIQQPVYYPFESSIRKTGRQLLVNELVYSDGHYSIDFQDFEEKIKQAKMFILCNPHNPVGRVWKRNELERMGEICLRHGVTVIADEIHEDFIFSGHKHLVFSALNKDFADITVTCTSPSKTFNLAGLLCANIFISNKELREKFKGEYESCGLSQPGVMGLIACKAAYENGAEWLDQLLDYLAENMLFLKTYLSKNIPKIRFIEPEGTYLAWLDCNETGISAQKLDETLTHKGKLWLSSGLSFGKGGKGFERVNAACPHLVLQNALERLKNVDWQNAERE

SEQ ID NO: 65953 - DNA, 927 bp, Unknown
  Obtained from environmental sample
  misc_feature (1)..(927): n is a, c, g, or t
atgtggattggcaaaacgcagaaagggaataatatgagtattctggaacttgttggaaacactcctgtaattgaattaaaaaaaatattcaattccgcaaacggcgtttccctgtttgccaaagcggaatattttaatccaagcggttccgttaaagaccgcgccgcaaaagcaatgatgctgcaaggcattaaatcaggacagcttaccaaagataaaattctattggactccacaagtggcaatacgggcatcgcttatgccatgttcggcgcggcgcttggttatcgtgtaaaattattaatgccgtcaaacgccagcgaagaaaggaaaaaacttatgcgcgtttacggtgccgaaattgtagaaacagacccgctcgaaggctctgacggcgcgtatcgcatagtgatggagttagcaaaaaaagagccggatctgtatttcttcccaaaccagtacgacaattttgaaaatccgaatatgcattatgaaacgactggagttgaactgtacaaccaatgcaagccgacgcattttgtcgcaggaacaggtacatcgggaacttttatgggaatttccaagcggttaaaagaatttgacgcatccattaaaatagttcttatgcagccggattcgccgtttcacggactagaaggaatgaagcacatggaatcgacaataacgccgaaaatatttgacaaaaacattgccgatttgcatgtaacggtgaaaacagaagacgcttacaaaacatcaagacggcttgccgcagaagaaggaatatttgttggaataagttcaggcgcaaatgtgttcgccgccatggaattggcaaaaacactgcccataggctcacgggtcgccacaatattatgcgataacggcaatcgctatatgtcgcagcctttatggaaagatatttaa

SEQ ID NO: 65954 - protein, 308 aa, Unknown
  Obtained from environmental sample
  DOMAIN (14)...(295): Pyridoxal-phosphate dependent enzyme
  misc_feature (1)..(308): Xaa is any amino acid
MWIGKTQKGNNMSILELVGNTPVIELKKIFNSANGVSLFAKAEYFNPSGSVKDRAAKAMMLQGIKSGQLTKDKILLDSTSGNTGIAYAMFGAALGYRVKLLMPSNASEERKKLMRVYGAEIVETDPLEGSDGAYRIVMELAKKEPDLYFFPNQYDNFENPNMHYETTGVELYNQCKPTHFVAGTGTSGTFMGISKRLKEFDASIKIVLMQPDSPFHGLEGMKHMESTITPKIFDKNIADLHVTVKTEDAYKTSRRLAAEEGIFVGISSGANVFAAMELAKTLPIGSRVATILCDNGNRYMSQPLWKDI

SEQ ID NO: 65955 - DNA, 345 bp, Unknown
  Obtained from environmental sample
  misc_feature (1)..(345): n is a, c, g, or t
gtgttctccgggttggtcacagcctgccgcttggcgatagccccgacaaggcgctcccccgccttggtaaagcccacgatggagggcgtggtgcgcccgccctcggaatttgggataaccacaggctttccggcctccataaccgacacgcacgaattggtcgtccccaggtcaataccgatgatcttgcccataaagcctcctaatgtatggtgtttcttttttgttttttgtcattgccggtacaaatatatatatatctatatcaaatatcgtgccattatgagaaacggcgaaatttggggtttaaaggggggtgggttggattatgatatgttatattag

SEQ ID NO: 65956 - protein, 114 aa, Unknown
  Obtained from environmental sample
  misc_feature (1)..(114): Xaa is any amino acid
MFSGLVTACRLAIAPTRRSPALVKPTMEGVVRPPSEFGITTGFPASITDTHELVVPRSIPMILPIKPPNVWCFFFVFCHCRYKYIYIYIKYRAIMRNGEIWGLKGGGLDYDMLY

SEQ ID NO: 65957 - DNA, 330 bp, Unknown
  Obtained from environmental sample
  misc_feature (1)..(330): n is a, c, g, or t
gtggtcgagtatcttgaccttgaccggatcctcggcgccgccgacaacgctatagggcacgcgcttctcctcagactgcacctcgctgtgccgccgccccatgaagcgctttatggagtagacggtgttctccgggttggtcacagcctgccgcttggcgatagccccgacaaggcgctcccccgccttggtaaagcccacgatggagggcgtggtgcgcccgccctcggaatttgggataaccacaggctttccggcctccataaccgacacgcacgaattggtcgtccccaggtcaataccgatgatcttgcccataaagcctcctaa

SEQ ID NO: 65958 - protein, 109 aa, Unknown
  Obtained from environmental sample
  misc_feature (1)..(109): Xaa is any amino acid
MVEYLDLDRILGAADNAIGHALLLRLHLAVPPPHEALYGVDGVLRVGHSLPLGDSPDKALPRLGKAHDGGRGAPALGIWDNHRLSGLHNRHARIGRPQVNTDDLAHKAS

SEQ ID NO: 65959 - DNA, 483 bp, Unknown
  Obtained from environmental sample
  misc_feature (1)..(483): n is a, c, g, or t
atgggcaagatcatcggtattgacctggggacgaccaattcgtgcgtgtcggttatggaggccggaaagcctgtggttatcccaaattccgagggcgggcgcaccacgccctccatcgtgggctttaccaaggcgggggagcgccttgtcggggctatcgccaagcggcaggctgtgaccaacccggagaacaccgtctactccataaagcgcttcatggggcggcggcacagcgaggtgcagtctgaggagaagcgcgtgccctatagcgttgtcggcggcgccgaggatccggtcaaggtcaagatactcgaccacgactactcgcccccggagatatccgcgatggtgctgcagtacctaaagaaggccgccgaggactatctgggcgagtcggtcaccgaagcggttatcactgtgccggcctacttcaacgacgcgcagcgtcaggcgaccaagacgcaggcaaatcgcggggcttga

SEQ ID NO: 65960 - protein, 160 aa, Unknown
  Obtained from environmental sample
  DOMAIN (4)...(160): Hsp70 protein
  misc_feature (1)..(160): Xaa is any amino acid
MGKIIGIDLGTTNSCVSVMEAGKPVVIPNSEGGRTTPSIVGFTKAGERLVGAIAKRQAVTNPENTVYSIKRFMGRRHSEVQSEEKRVPYSVVGGAEDPVKVKILDHDYSPPEISAMVLQYLKKAAEDYLGESVTEAVITVPAYFNDAQRQATKTQANRGA

SEQ ID NO: 65961 - DNA, 300 bp, Unknown
  Obtained from environmental sample
  misc_feature (1)..(300): n is a, c, g, or t
gtgataaagggcaggttaatctcggtcgtttgcatggcggaaagctcgatcttcgccttttccgaggcttccctcaaccgttgcagcgccatcctgtctttgctcaggtctatgcccgtgtcgtttttgaattcgccgataagccattcaagtatcttgaggtcaaaatcgtcgccgcccaggtgggtgtcgccgttagttgattttacctcgaaaacgccgtcgccgagttccagaatggatatgtcgaaagtgccgccgcccaaatcgtacacggcgatggttttgtcttttttctga

SEQ ID NO: 65962 - protein, 99 aa, Unknown
  Obtained from environmental sample
  SIGNAL (1)...(21)
  misc_feature (1)..(99): Xaa is any amino acid
MIKGRLISVVCMAESSIFAFSEASLNRCSAILSLLRSMPVSFLNSPISHSSILRSKSSPPRWVSPLVDFTSKTPSPSSRMDMSKVPPPKSYTAMVLSFF

SEQ ID NO: 65963 - DNA, 1392 bp, Unknown
  Obtained from environmental sample
  misc_feature (1)..(1392): n is a, c, g, or t
gtgtacgatttgggcggcggcactttcgacatatccattctggaactcggcgacggcgttttcgaggtaaaatcaactaacggcgacacccacctgggcggcgacgattttgacctcaagatacttgaatggcttatcggcgaattcaaaaacgacacgggcatagacctgagcaaagacaggatggcgctgcaacggttgagggaagcctcggaaaaggcgaagatcgagctttccgccatgcaaacgaccgagattaacctgccctttatcacagcggatcagagcggccccaagcatttgcaaaaatcccttaccagggcgaaattcgagcagatggtttccgacctgcttgagcgatccaaggaaccctgtatcaaggcgttgagggacgcgggcttaaccgccgagcagatcgacgaagtaatccttgtcggcggttctacccgcatccccgcagtacagcaaattgttaaagaccttttcaaaaaagaacccaacaagggcgtaaaccccgacgaggcggttgcggtcggcgcggcaatccagggcggtattcttggcggcgacgtcaaagacgtgctgctgctggatgtcactcccctttcgctgggcattgaaaccctgggcggcgttatgacaaaactcataccgcgcaacacgactattcccacccgcaagagccagattttctcaacggccaccgacagccagcctgcggtttcaattaacgtattacagggtgaaagggaaatggcaagccagaaccgcgtactgggtcgttttgatcttgtaggcatacctcccgctccgcgcggagttccgcagatcgaagtaactttcgatattgacgcaaacggcattgttcacgtcagcgcaaaagatttgggaacaggcaaagagcaaaaaatccgcattgaaagttccagcggtttaagcgactcggacattgaccgcatggtaaaagaagcggaactccacgccgaggaagataaaaaagagcgtgaaaaagccgaagtgcgcaatgaagccgactcgatgatttacgccacggagaaaaacataaaagacttgggcgacaaagtaagcgccgccgataaatccaaaacagaggaagccattgccgatttgcgcaaagctcttgaaagcggcgatattccgtcaatcaaagacaagaccgaagccttaaagcaagcgtcttacaaaatagccgaagaaatttacaaacagcaagccgcaagcggacagcagggcggcggtcaaggcgcaggacccgacatggggggcggatttaatcccaacatgggcggcggcgaaagccacggcggcggtatgggcggcgacacaaagagcgccgaagacgctgattacgaagtggtagacgataagtaa

SEQ ID NO: 65964 - protein, 463 aa, Unknown
  Obtained from environmental sample
  DOMAIN (2)...(409): Hsp70 protein
  misc_feature (1)..(463): Xaa is any amino acid
MYDLGGGTFDISILELGDGVFEVKSTNGDTHLGGDDFDLKILEWLIGEFKNDTGIDLSKDRMALQRLREASEKAKIELSAMQTTEINLPFITADQSGPKHLQKSLTRAKFEQMVSDLLERSKEPCIKALRDAGLTAEQIDEVILVGGSTRIPAVQQIVKDLFKKEPNKGVNPDEAVAVGAAIQGGILGGDVKDVLLLDVTPLSLGIETLGGVMTKLIPRNTTIPTRKSQIFSTATDSQPAVSINVLQGEREMASQNRVLGRFDLVGIPPAPRGVPQIEVTFDIDANGIVHVSAKDLGTGKEQKIRIESSSGLSDSDIDRMVKEAELHAEEDKKEREKAEVRNEADSMIYATEKNIKDLGDKVSAADKSKTEEAIADLRKALESGDIPSIKDKTEALKQASYKIAEEIYKQQAASGQQGGGQGAGPDMGGGFNPNMGGGESHGGGMGGDTKSAEDADYEVVDDK

SEQ ID NO: 65965 - DNA, 582 bp, Unknown
  Obtained from environmental sample
  misc_feature (1)..(582): n is a, c, g, or t
atgccgtttgcgtcaatatcgaaagttacttcgatctgcggaactccgcgcggagcgggaggtatgcctacaagatcaaaacgacccagtacgcggttctggcttgccatttccctttcaccctgtaatacgttaattgaaaccgcaggctggctgtcggtggccgttgagaaaatctggctcttgcgggtgggaatagtcgtgttgcgcggtatgagttttgtcataacgccgcccagggtttcaatgcccagcgaaaggggagtgacatccagcagcagcacgtctttgacgtcgccgccaagaataccgccctggattgccgcgccgaccgcaaccgcctcgtcggggtttacgcccttgttgggttcttttttgaaaaggtctttaacaatttgctgtactgcggggatgcgggtagaaccgccgacaaggattacttcgtcgatctgctcggcggttaagcccgcgtccctcaacgccttgatacagggttccttggatcgctcaagcaggtcggaaaccatctgctcgaatttcgccctggtaagggatttttgcaaatgcttggggccgctctga

SEQ ID NO: 65966 - protein, 193 aa, Unknown
  Obtained from environmental sample
  misc_feature (1)..(193): Xaa is any amino acid
MPFASISKVTSICGTPRGAGGMPTRSKRPSTRFWLAISLSPCNTLIETAGWLSVAVEKIWLLRVGIVVLRGMSFVITPPRVSMPSERGVTSSSSTSLTSPPRIPPWIAAPTATASSGFTPLLGSFLKRSLTICCTAGMRVEPPTRITSSICSAVKPASLNALIQGSLDRSSRSETICSNFALVRDFCKCLGPL

SEQ ID NO: 65967 - DNA, 1137 bp, Unknown
  Obtained from environmental sample
  misc_feature (1)..(1137): n is a, c, g, or t
atggcaaagcgggattactacgaagttcttggcatacaaaaaaacgcctcaaaagacgatataaagaaagcgtatcgtaaactcgctattcaatatcaccctgataaaaatcccggcgataaacaagccgaggaaaaatttaaagaagccaccgaagcctatgaagttctcggcgacgaccagaaaaaatccgcctatgaccagttcggctttgccggagttgagggcatgggcggcggtcagagtcacgactggagtaatttccggggctttgaagacatcttcggagaaggcggctttggcagtatttttgaaagtttttttggcggcggcgggggcttccgcagaaactcaggcggcgtaaggcagggagcaaacctccgctacgatatcgagattccgtttaaagacgccgtattcggcacaaaggtagaaattcagtattcgcacaatgaaccatgcccgacttgcaaaggttccggttccgcggaaggcggcggcaaaaagacttgccccacttgccgcggatcgggacaagtgcgtcatagccagggatttttctcggtcgccacaacctgccacaactgcggcggcgaaggctacataattgacaaaccctgtaacgattgcggcggagcgggaactcaaaagaagcggcaaaaaattatggttaccattcccgccggcgtagaaaacggcaagcgcgtggtaattcccaaacagggcgacgctggtcccaacggcggaccgccgggagacttatacgttttcatcagagtgaaaccgcacgaatattttgaacgccaagccgctgacctttactgcgccgttcctatttcgataactcaagcggcgctcggcgcggacattcacgttacaacgcttgataacaagacaataaaagtaaaagtaccggcgggtattcaaaacggaaaaatgctccgtatccacaacgagggcgtgccgatgggtaatcaaagaggcaatctctacattaaactttttgtgcaaatccccgaaagactttcccgcaaaggcaaagaactccttgaagaacttgccaaaatcgagggacaggacgacagccctaaacctattccgttatcgcacctgggggatgcgccggaatatcattga

SEQ ID NO: 65968 - protein, 378 aa, Unknown
  Obtained from environmental sample
  DOMAIN (141)...(221): DnaJ central domain (4 repeats)
  misc_feature (1)..(378): Xaa is any amino acid
MAKRDYYEVLGIQKNASKDDIKKAYRKLAIQYHPDKNPGDKQAEEKFKEATEAYEVLGDDQKKSAYDQFGFAGVEGMGGGQSHDWSNFRGFEDIFGEGGFGSIFESFFGGGGGFRRNSGGVRQGANLRYDIEIPFKDAVFGTKVEIQYSHNEPCPTCKGSGSAEGGGKKTCPTCRGSGQVRHSQGFFSVATTCHNCGGEGYIIDKPCNDCGGAGTQKKRQKIMVTIPAGVENGKRVVIPKQGDAGPNGGPPGDLYVFIRVKPHEYFERQAADLYCAVPISITQAALGADIHVTTLDNKTIKVKVPAGIQNGKMLRIHNEGVPMGNQRGNLYIKLFVQIPERLSRKGKELLEELAKIEGQDDSPKPIPLSHLGDAPEYH

SEQ ID NO: 65969 - DNA, 360 bp, Unknown
  Obtained from environmental sample
  misc_feature (1)..(360): n is a, c, g, or t
atgcgaaacttgacatgtattgtctgtccaataggctgctcgctaactgtaaatgaggactcaagcggaaatttatccgtaacaggcaaccgctgtctccgcggggaactgtacgcgaaagaggaaatccgcgcgcccaaacgcactgtaaccgccacctgtcggattgataaagactcaggctttgttaaaaggattccggtaaagacggcttctccttgtccgcgagagaaaattcaggatttgttagttgacatttataaattgaaagtcgccttgcctgttaaagccggagatgttttgattaaggactggaagggcgaagggattaatgtagtcgcgaccaggacgattggctaa

SEQ ID NO: 65970 - protein, 119 aa, Unknown
  Obtained from environmental sample
  SIGNAL (1)...(19)
  DOMAIN (2)...(116): Protein of unknown function (DUF1667)
  misc_feature (1)..(119): Xaa is any amino acid
MRNLTCIVCPIGCSLTVNEDSSGNLSVTGNRCLRGELYAKEEIRAPKRTVTATCRIDKDSGFVKRIPVKTASPCPREKIQDLLVDIYKLKVALPVKAGDVLIKDWKGEGINVVATRTIG

SEQ ID NO: 65971 - DNA, 1359 bp, Unknown
  Obtained from environmental sample
  misc_feature (1)..(1359): n is a, c, g, or t
ttgcacatacaagatcataaaaatcataatgagggaaaccggcctttcatgggacgagataacaaagcacggcggaaaaagccgcctgttggaggccgcgctgtgaaagaactgcaatacgacgcggtcgttatcggcggaggcgccgcaggaatggcggcagccctggaacttgaaacgcaaggattttcctgcgcgattatcgagagggaagatcaccttggcgggatactcatgcagtgcattcacaacggtttcggccttcacgaattttccgaagaactgacaggtcccgaattcgccgaacgctttattgagcgcgtaacaaaatcaaagatagcggtctatcttgacaccaccgttacgcgcttttcttccgcggtaaactttgtcaaggaactttactgcgtctccccttcaggcgcgatgaggctccaaagccgcgcggtggttcttgcgatgggctgccgcgagcgcaacagaggcaacgtgcgcatacccggctcgcgcccggcgggcatttataccgcgggtctcgcacagcggctggtaaacatagagggctacattcccggcaaggaaattgtggttatcggctccggcgacataggtcttatcatggcgcggcgcatgagctgggtcggctgtaaggtaaaagccgtggttgaaatcatgccgtatccggcaggtcttacacgcaacattgtccagtgcttaaaggattttgacattcccctctacctttcctcgcagacaacaagcattttcggcaatgaccgcgttcaggggattgaggtaagccctatggaaaacggtgttatcgtacccggaaaaagtttccgtatcgactgcgacacagttttgctgtctgtcggccttgtccccgaaaatgagctttccaagactgcaggaattgagttaaacggcgttacaaacgggcctatcgtagattcggatttgatgacgaacatggaaggagttttcgcctgcggcaatgtgcttcatgtccacgatcttgtagactgggtctgcgaagaaagcaggcgcgccgggagctacgccgccggatggctgaggggagaacgccccaacttgcagatacgcgccaaagcggggccgtccgtacgttatgtgaatcccgcgcgtattgcgccggagcgcgaaaaccacatttacctgcgctccatgattgtaaagagcgacgcagtgcttgaaatcagccttgacaaccgcgtaatccgcagtaaaaaagagcgccatgtccagccttcggagatgatcacggtaaatcttgggcctaaagattttgagaaattcgaaataaattcagattccgttttggaattcagcattaagtag

SEQ ID NO: 65972 - protein, 452 aa, Unknown
  Obtained from environmental sample
  DOMAIN (194)...(292): Pyridine nucleotide-disulphide oxidoreductase
  misc_feature (1)..(452): Xaa is any amino acid
MHIQDHKNHNEGNRPFMGRDNKARRKKPPVGGRAVKELQYDAVVIGGGAAGMAAALELETQGFSCAIIEREDHLGGILMQCIHNGFGLHEFSEELTGPEFAERFIERVTKSKIAVYLDTTVTRFSSAVNFVKELYCVSPSGAMRLQSRAVVLAMGCRERNRGNVRIPGSRPAGIYTAGLAQRLVNIEGYIPGKEIVVIGSGDIGLIMARRMSWVGCKVKAVVEIMPYPAGLTRNIVQCLKDFDIPLYLSSQTTSIFGNDRVQGIEVSPMENGVIVPGKSFRIDCDTVLLSVGLVPENELSKTAGIELNGVTNGPIVDSDLMTNMEGVFACGNVLHVHDLVDWVCEESRRAGSYAAGWLRGERPNLQIRAKAGPSVRYVNPARIAPERENHIYLRSMIVKSDAVLEISLDNRVIRSKKERHVQPSEMITVNLGPKDFEKFEINSDSVLEFSIK

SEQ ID NO: 65973 - DNA, 1425 bp, Unknown
  Obtained from environmental sample
  misc_feature (1)..(1425): n is a, c, g, or t
atggaatttgacgccgcaataataggctgcggagtttcgggggcaaatatagcccgccgcctttcggcatataacataaaaaccgctattttggaaaaagccgtggacgtatcctttgggacttccaaagccaattccggtattatccacggcggttttcaccacaataaaaaatacctgaaagcgtgccttgaaatgcagggcagcctgatgttcgaccagttaaggcgcgagttgaatttccccttccgcaggtgcgggataatcgtcgccgcccttcacgaagaagaaatgaaggtagtcgaacacctgtatttacagggagtcgaaaacggcgttatagggatagagctttgttcacgccacaggattcttgagcttgagccaaaactttcaacggacgccgtcggcggcctttacgcgcccggaggcggtataatcgagccgtaccgctttgtctttgcccttgtagaatccgcgctgaaaaacggcgtacaactcttaacaaacttcaaagtaaacgaagcggggcgagacggagatttttggacaatccgcgcggaagacggcagggaaataaaaagccgttatgtgataaactcagccggtctctttgccgacgaagtttcaaaaatattcggcgcagaagagtttacgattagcgccagaaaaggcgaatattttcttttggacaggctgacaaaagcctgcccgtcaaaagtggtctttcccgttcccacaagcgtatcaaaaggaatgcttgtaatacctacggttgaaggaaccgcgcttgtcggccccaccgccgacgccgtagaagacaaggacgatttttccaccacctccgcgcaccttgaaagaatactcatttcgggaaagacaatgataccttcattaagccagaacgacgttataacatctttcgccggccttcgcccgtatttaggcgaagatttttatattgaggcttcggcgaaagttcccgcctttgttcaggtagccgggatccaaagcccggggcttaccgcctcccccgccatcggcgaatatgtaaaaaatattttactagaaatcgggctagtactgacggaaaagccgcattgggacccctatgttgaagaccgtccatgcgcgcgcgagcttaactttaaccaattggacagcctaatcgcgaaaaatcctaaatgggggaacattgtctgcagatgtgaaaatgtcagcgaggcggaaatagtcgaagccgtaaaactagggcatacaactttagacggagtaaaatactttacgcgcgcgcagatgggacgctgtcagggcggcttttgcacatacaagatcataaaaatcataatgagggaaaccggcctttcatgggacgagataacaaagcacggcggaaaaagccgcctgttggaggccgcgctgtga

SEQ ID NO: 65974 - protein, 474 aa, Unknown
  Obtained from environmental sample
  DOMAIN (398)...(453): BFD-like [2Fe-2S] binding domain
  misc_feature (1)..(474): Xaa is any amino acid
MEFDAAIIGCGVSGANIARRLSAYNIKTAILEKAVDVSFGTSKANSGIIHGGFHHNKKYLKACLEMQGSLMFDQLRRELNFPFRRCGIIVAALHEEEMKVVEHLYLQGVENGVIGIELCSRHRILELEPKLSTDAVGGLYAPGGGIIEPYRFVFALVESALKNGVQLLTNFKVNEAGRDGDFWTIRAEDGREIKSRYVINSAGLFADEVSKIFGAEEFTISARKGEYFLLDRLTKACPSKVVFPVPTSVSKGMLVIPTVEGTALVGPTADAVEDKDDFSTTSAHLERILISGKTMIPSLSQNDVITSFAGLRPYLGEDFYIEASAKVPAFVQVAGIQSPGLTASPAIGEYVKNILLEIGLVLTEKPHWDPYVEDRPCARELNFNQLDSLIAKNPKWGNIVCRCENVSEAEIVEAVKLGHTTLDGVKYFTRAQMGRCQGGFCTYKIIKIIMRETGLSWDEITKHGGKSRLLEAAL

SEQ ID NO: 65975 - DNA, 636 bp, Unknown
  Obtained from environmental sample
  misc_feature (1)..(636): n is a, c, g, or t
atggtaattaatcgcattagactatatgatgatattatgggagaaagaaaaaggctttttgtgaacgtaaaatccggcagaaaggatcggattgaaaccatcaaatgggcggcgactaatgattacgatactcttgtttttccgctgattgaatgttttaaagggctgcgcagtgaatacgtcaaacttattaaaagatattctcttaacattgaagcgggagggtgcgaattatccatgatgctgccaagaaatttgtttatgtttcacaaagacctttttcgcatggagcatggcaagcggaaaaaaaagcatcatttttgtccgaccaatcctgcgtcaacaactgttattatggaacaggcgcagaaaatatttgcccgttctttacaggtagtaacgcagcggcgtgtttttcacctgtggcctgaagaggggcatgagaacacatggtgcgcgtgtccggcctgccgcgcattcagtcccgcagagcagtaccttatcgcggcaaatactgcggcagacgcgcttgcgaaacttgatcccaacgcgctactttcgttttttgattacggcgaagagatgggaaagacgggaattgttcccagaaaaaatatgtttaagtttaagaagtag

SEQ ID NO: 65976 - protein, 211 aa, Unknown
  Obtained from environmental sample
  misc_feature (1)..(211): Xaa is any amino acid
MVINRIRLYDDIMGERKRLFVNVKSGRKDRIETIKWAATNDYDTLVFPLIECFKGLRSEYVKLIKRYSLNIEAGGCELSMMLPRNLFMFHKDLFRMEHGKRKKKHHFCPTNPASTTVIMEQAQKIFARSLQVVTQRRVFHLWPEEGHENTWCACPACRAFSPAEQYLIAANTAADALAKLDPNALLSFFDYGEEMGKTGIVPRKNMFKFKK

SEQ ID NO: 65977 - DNA, 504 bp, Unknown
  Obtained from environmental sample
  misc_feature (1)..(504): n is a, c, g, or t
atggcggagaatttgaattacaatgcaagcgattcaggctcaaaatgctatgataacaaaacagaaaactgcggcaaatacggcatattgtataatttggcaacggctatagtagcttgtccctctggctggcatttgcctaccgatgatgattggaatgttttaatgaaatctgttaatccgagttgttctgactggtactctagttgtgctggtgctggaaccaaattgaaggctaccagcgattggaatactggcagtggctataaagccggcacgaacgattacggcttttctgccctgccgggtggctatggctctgccggtgggggtgggagtttctacttcaacaatgtcggtaactacggcaaatggtggagttccacttatgtagctggcatcggctaccaacctagaggcatgagttacgacagtgaaaatgtttccaaggacagcggcggcggtaattctgccttgtacagcgttcgttgcataaaggattaa

SEQ ID NO: 65978 - protein, 167 aa, Unknown
  Obtained from environmental sample
  misc_feature (1)..(167): Xaa is any amino acid
MAENLNYNASDSGSKCYDNKTENCGKYGILYNLATAIVACPSGWHLPTDDDWNVLMKSVNPSCSDWYSSCAGAGTKLKATSDWNTGSGYKAGTNDYGFSALPGGYGSAGGGGSFYFNNVGNYGKWWSSTYVAGIGYQPRGMSYDSENVSKDSGGGNSALYSVRCIKD

SEQ ID NO: 65979 - DNA, 768 bp, Unknown
  Obtained from environmental sample
  misc_feature (1)..(768): n is a, c, g, or t
atgaaaaagcgattaactaaactcgcacaggtggcaggcattatgcttgctttggcattcacattttcttgctcatcggacaaagacgatgataattctggcggtggtggcggtcttactggcacgagtggcacattcaaagatgaccgtgataatgtatcttacaaatgggtaaagataggcaagcaggtttggatggcggagaaccttaactacaatgttagtgatagtaagtgttatggtgaaggcggtaaagtaagaaccccaaatgataactacgttacaatatcaaacgctgaaatacaagctaactgcgaaaaatacggcaggttataccattgggcaatggcgatgaatatagatgccaaatatctttaccaaaaatggaatggaagtggtggaaaacatagaggtatatgtccagaaggttggcatattccaagtgatgcagaatggactacattaacgaactatgttggaggagcttcaactgctggtactaaattaaagtcaagagaaggctggaactcatatagcggtgctcccttgggtacagatgttcacggattttcggctctgcctggcggcaacggctattccgatggcagtttccacgatgtcggcgacgccggctactggtggagtgctagcgagtactatagctacctcgcctacggcaggggcatgagctacaacggcgagggtgtgtacaacaacatcagcttcactaaggacaacctgtacagtgttcgttgtctgcaagactag

SEQ ID NO: 65980 - protein, 255 aa, Unknown
  Obtained from environmental sample
  SIGNAL (1)...(26)
  misc_feature (1)..(255): Xaa is any amino acid
MKKRLTKLAQVAGIMLALAFTFSCSSDKDDDNSGGGGGLTGTSGTFKDDRDNVSYKWVKIGKQVWMAENLNYNVSDSKCYGEGGKVRTPNDNYVTISNAEIQANCEKYGRLYHWAMAMNIDAKYLYQKWNGSGGKHRGICPEGWHIPSDAEWTTLTNYVGGASTAGTKLKSREGWNSYSGAPLGTDVHGFSALPGGNGYSDGSFHDVGDAGYWWSASEYYSYLAYGRGMSYNGEGVYNNISFTKDNLYSVRCLQD

SEQ ID NO: 65981 - DNA, 462 bp, Unknown
  Obtained from environmental sample
  misc_feature (1)..(462): n is a, c, g, or t
atggacgtgcttttaattgacgatcacccgataacaaatgacggtcttgctgcttgccttgaagaaacaggacgtttcacaatttcagggactgtaaacagcataagcgaagcctttatttttattgaaaattcggaaagtcttccatctctgataatactggatataatactgggcgaagaaaacggccttgacttccttccctttctaaagaaattctgccgtggaaaaaacattcccgcgccgcccgtactggtatgttcggtactggaagactccttccgtatacagaccgcgctaaaatcgggcgcttgcggctacatatcaaaaaccaaaaataaaaccgaattgcttacggccattgatgccgtccttcgcggtgaagtgtatatcaatgacgagaacgccgtcaaattaagcaagacgttaggcgcatacggacaatttccaaaaaggaaatag

SEQ ID NO: 65982 - protein, 153 aa, Unknown
  Obtained from environmental sample
  DOMAIN (1)...(122): Response regulator receiver domain
  misc_feature (1)..(153): Xaa is any amino acid
MDVLLIDDHPITNDGLAACLEETGRFTISGTVNSISEAFIFIENSESLPSLIILDIILGEENGLDFLPFLKKFCRGKNIPAPPVLVCSVLEDSFRIQTALKSGACGYISKTKNKTELLTAIDAVLRGEVYINDENAVKLSKTLGAYGQFPKRK

SEQ ID NO: 65983 - DNA, 822 bp, Unknown
  Obtained from environmental sample
  misc_feature (1)..(822): n is a, c, g, or t
atggcgttggcgcggagtactgaggcggagcgatacgcttataccgcttactttcgtctgcttttggtgttcatcgctttcattatttttacggctttactgtccctgtttttatacagatcgttgacaaaatcattaaaaagagaagcatacggatcatggttttcgcaatcagttattctggcgcaggaaaaagaacgctcccgcttaagccgcgaactgcatgacactgtggcgcaagaccttcgctgtcttctgcttggcatggataaaatcggaaactgttcagacagggaagaacgcgtaaaactctgtaccgaagccgccgcctctcattcctcgctgatacgcaaggttcggaatatttgcgattatcttgtcccgcccgacttccgctttcagggcatagaaaacgctttaagacagctctgccttgattacggaaaacgcacaggtattgactgccgtgtcgagatagcggaagacgtaaaccttgaacgcctgggcgaagaaaaacagcttcaaattttccgcataattcaggaagcccttaccaatgtggaaaaacattcaggggctacggaggcgattgtaataatacgccgtggtctggataataatatccgtgtcggcatttcagacgacggtaaggggtttatacctgttatcgcttatgatttgcggacgccctacgaagacgctcatttgggcatacggggcatgaacgaaagggcggcattgctcggcggcagccttttgattaaaagtgagccgggcgaagggacgcttgtctgtctggaaattccaattaccgccgaataa

SEQ ID NO: 65984 - protein, 273 aa, Unknown
  Obtained from environmental sample
  DOMAIN (66)...(131): Histidine kinase
  misc_feature (1)..(273): Xaa is any amino acid
MALARSTEAERYAYTAYFRLLLVFIAFIIFTALLSLFLYRSLTKSLKREAYGSWFSQSVILAQEKERSRLSRELHDTVAQDLRCLLLGMDKIGNCSDREERVKLCTEAAASHSSLIRKVRNICDYLVPPDFRFQGIENALRQLCLDYGKRTGIDCRVEIAEDVNLERLGEEKQLQIFRIIQEALTNVEKHSGATEAIVIIRRGLDNNIRVGISDDGKGFIPVIAYDLRTPYEDAHLGIRGMNERAALLGGSLLIKSEPGEGTLVCLEIPITAE

SEQ ID NO: 65985 - DNA, 1266 bp, Unknown
  Obtained from environmental sample
  misc_feature (1)..(1266): n is a, c, g, or t
atgaaaaagatttttaaaatttttgcaattatcgcgcttgtagcggtaatcggattttcattcgccgcttgcagtaattcattccacctccaccaattcggtacagaatggaaaaaagacgcaacacagcattggcacgagtgcagttgcggagaaaagacggatatagcagcccaccaatttggtaactggacagaaaccaaagccccaagtgtagaagaggaaggcgaacaagaaaggacttgtaccgtctgcggagaaaaagaaacacacccaatagccaaacacgtccaccaattcggtacagactgggaaaaagatacaacacagcattggcgcgagtgcagttgcggagaaaagacggatatagccgaccaccaatggggcgactgggtacaaaccaaagccccgtccataattgcggaaggcgaagaagaaagaacttgcgccacctgcggagaaaaagaaacacaagctattgcaaagaaacaatcgctaatagaaatggtacaggtagccggaggaactttccagatggggcacacggtaacgctgaccgactttaaaataggcaagtatgaggtaacgcaggaacagtatcaggcggtaatgggaagtaatccgagtcgttttaatagtagtacaggcgaagaacctgcaaccggagaaacacaggaaaaacgaccggtggagcgtgtaagctggtatgacgctattgtattctgcaacaagttgagcgtaaaggaaggattaactcccgcgtacagtataagcggaagtaccgattttgcagcatggggaacagttccggaatacaacgatcctaacataactaaatggaatgcagtaataatcgttgccggttctaccggatatcgtttaccgacagaagcgcagtgggaatatgcgtgccgagcgggaacaacaacagcgtataacacaggggatacgattagcgaaaatacagggtggtatagcagtaacagtgggagtaagacacatgaggttggaaaaaaatccgcaaacgcatggggattgtacgacatgcatgggaacgtgtgggaatggtgttgggactggtatgactcaagttattattcgagtagtctgactaatgatcctatgggcgcgtcctcggggtctaaccgcgtgcatcgcggcgggggctggggcaattcggccgggaacctgcgttccgcgagccgggacaacctcaacccgagcgcccggtacagcggtatcggtttccggcttgtccgcccctag

SEQ ID NO: 65986 - protein, 421 aa, Unknown
  Obtained from environmental sample
  SIGNAL (1)...(25)
  DOMAIN (165)...(420): Domain of unknown function (DUF323)
  misc_feature (1)..(421): Xaa is any amino acid
MKKIFKIFAIIALVAVIGFSFAACSNSFHLHQFGTEWKKDATQHWHECSCGEKTDIAAHQFGNWTETKAPSVEEEGEQERTCTVCGEKETHPIAKHVHQFGTDWEKDTTQHWRECSCGEKTDIADHQWGDWVQTKAPSIIAEGEEERTCATCGEKETQAIAKKQSLIEMVQVAGGTFQMGHTVTLTDFKIGKYEVTQEQYQAVMGSNPSRFNSSTGEEPATGETQEKRPVERVSWYDAIVFCNKLSVKEGLTPAYSISGSTDFAAWGTVPEYNDPNITKWNAVIIVAGSTGYRLPTEAQWEYACRAGTTTAYNTGDTISENTGWYSSNSGSKTHEVGKKSANAWGLYDMHGNVWEWCWDWYDSSYYSSSLTNDPMGASSGSNRVHRGGGWGNSAGNLRSASRDNLNPSARYSGIGFRLVRP

SEQ ID NO: 65987 - DNA, 3249 bp, Unknown
  Obtained from environmental sample
  misc_feature (1)..(3249): n is a, c, g, or t
atggaaatcgcggataccggtacaatattcgaatattactccagccttgaaggcacccgttatgccggcgtcaacgcaatcgcttggggtaaagacaagtttgtcgccgtgagcagcaacagcaaagtagcgacctcgcctgacggcataacatggacagccataccagaaacaaacgcattcacatacaccaaccaatctggcactgaaaacatcagactcagcatcggttcaatcgcttatggtaaagacaagtttgtcgcaggttgcactaacggccatattgcgtattcgtctgacggtataacatggacagccataaatccaaaaagcctattcaacagtccttacagctttgatgtgtctattaacgtcaatggaatcacctatgacggcgtaggcaagtttgtcgcggtgggcaatcacggctgtattgcgtattcgtctgacggagtaacatggacaacattagatacggacagtgaagacaatgaaatattcggcggcacttcangaatttttggaatcgcttatggcggtggaaagtttgtcgcaggcggccgttggtgcgcggcgtattcatctgacggcattaactggacagacatagattcgcaattcagattcacccccagatcatttgcctttggcaacggtaagtttgtcgcagtaggcggtggtggccttagtggtgaaaaaattgataacgtggcgacttcgtctgacggcgtaacatggacaaacatacatatcggaggactcaccttactcacaggattattatacggatcaacttcttacgaaacgctcaacacaatcacctatggaaacggcaagtttgtcgcaggaggcgataaaggtcatatagtgtatatatctgacggcaccggtacagacgtcggagacggaggcggtacagctcccacaatcaccaccacaacattggctaatggaacagtgggaaaagcatataaccgaacattatcggtgacaggagaagtgcctattacatgggcaggctcgtctttaccgaacggcttaacgctttcccctacgggcgaaatttcaggaacgccaacatcaaaaggaacatttacttttactgttaatgctactaatgccaaaggaagcgcaacaaagcagttatcaataaccatcaccagcggcgacgatttgtcatggacagccgtatcaaccaacccatttgtaagcgacagaatctattcaatcacttatggcaacaacatgtttgtagcaggaagttattacggaaaaatggcatattcgaacgacggtgtatcatggacagccgtatcgaacagccaattcggcgataacgccatcaatgcaatcacctatgataancgcaagtttgtcgctgtaggcggagacgagtacggcagagtggcatattcgtctgatggcctaacatggacagccataaatagcaccaacaacaaattcggcaataatgcaatcaatgcaatcgcttatggaaacggcaagtttgtcgctgtaggcgcgaatggtaaaatagcacattcgcctgatggcgtaacatggacagccgcatcaagcaacacattcggcatatacgaaaacatttatgcaatcgcttatggaaacggcaagtttgtcgctgtaggcagttccggtagaatggcatattcgtctgatggtgtgtcatggacagccataacgaacaaagaattcggagacggcatctatgcaatcgtttatgacggtatcggtaagtttgtcgctgcaggcgattacggaaaaatggcatattcgtatgatggcatatcatggacaaccgtaccggacagcacattctcaagagtaggaatcaatacaattgcttatggcaacggtatgtatgtcgcagggggcaattacggtggaatggcattttcatctgacggtgtatattggacagccgtatcggacagcaaattcagtatcgccagcatctgcgcaattgcctttggcaatggcaagtttatcgcaggaggcagtggcagcattatgacatattctatgaacatctcagcccccgtcggcactgccccaacaatcaccacaacgtcattgtcgggtggaacagtgggaatggcatacagtcagacattaacggcatcaggagacacgcccattacatggaccagagacaacggaacattaccgggcggcttaacactttcctccgctggcgtaatttcgggaacgccgacaacggcaggaacatctacttttacggtaaaagcaactaatgccaaaggaagtgtcacaaagtcattgaccataacaatcgttgccggcggtacagccccaacaatcaccacaacgtcattgccgaatggaacagtaggaacggcatacagtcagacattaacggcatcaggagacacgcccattacatggaccagagacaacggaacattaccgggcggcttaacactttcctccgctggcgtaatttcgggaacgccgacaacagcaggaacatctacttttactgtaaaagcagctaatgccacaggaagcgtcacaaagtcattgaccataacaatcgttgccggcggcactgccccaacaatcaccacaacgtcattgccgaatggaacagtaggaacggcatacagtcagacattaacggcatcaggagacacgcccattacatggaccagagacaacggaacattaccgggcggcttaacactttcctccgctggcgtaatttcgggaacgccgacaacggcaggaacatctacttttactgtaaaagcagctaatgccacaggaaacgtcacaaagtcattgaccataacaatcgttgccgctagcagcggtggcaacccaacccccagcggcgggacattcacgctgactggtattccatcggattataatggattgtatgcgtatctttttggaggaacggagaacaaagaggtgcttgttttgggcgttcaaagcatagatttgaataatgaaattattacattgcctaaaatttcaaatgaaagagttagtatacctatgtggaaaattgaccaagacattggtagttttaccggttattcaggtaatgacactcttgtaattgctgtttacatttcatccgatgatatgtattctgatgatgactccgaagacgacgcagaagttcttatttactatttttcagtacctttttctaagggcagcgcaacaaaagcatggagtcaagcggatttaattcaatag

SEQ ID NO: 65988 - protein, 1082 aa, Unknown
  Obtained from environmental sample
  DOMAIN (884)...(935): Putative Ig domain
  misc_feature (1)..(1082): Xaa is any amino acid
MEIADTGTIFEYYSSLEGTRYAGVNAIAWGKDKFVAVSSNSKVATSPDGITWTAIPETNAFTYTNQSGTENIRLSIGSIAYGKDKFVAGCTNGHIAYSSDGITWTAINPKSLFNSPYSFDVSINVNGITYDGVGKFVAVGNHGCIAYSSDGVTWTTLDTDSEDNEIFGGTSXIFGIAYGGGKFVAGGRWCAAYSSDGINWTDIDSQFRFTPRSFAFGNGKFVAVGGGGLSGEKIDNVATSSDGVTWTNIHIGGLTLLTGLLYGSTSYETLNTITYGNGKFVAGGDKGHIVYISDGTGTDVGDGGGTAPTITTTTLANGTVGKAYNRTLSVTGEVPITWAGSSLPNGLTLSPTGEISGTPTSKGTFTFTVNATNAKGSATKQLSITITSGDDLSWTAVSTNPFVSDRIYSITYGNNMFVAGSYYGKMAYSNDGVSWTAVSNSQFGDNAINAITYDXRKFVAVGGDEYGRVAYSSDGLTWTAINSTNNKFGNNAINAIAYGNGKFVAVGANGKIAHSPDGVTWTAASSNTFGIYENIYAIAYGNGKFVAVGSSGRMAYSSDGVSWTAITNKEFGDGIYAIVYDGIGKFVAAGDYGKMAYSYDGISWTTVPDSTFSRVGINTIAYGNGMYVAGGNYGGMAFSSDGVYWTAVSDSKFSIASICAIAFGNGKFIAGGSGSIMTYSMNISAPVGTAPTITTTSLSGGTVGMAYSQTLTASGDTPITWTRDNGTLPGGLTLSSAGVISGTPTTAGTSTFTVKATNAKGSVTKSLTITIVAGGTAPTITTTSLPNGTVGTAYSQTLTASGDTPITWTRDNGTLPGGLTLSSAGVISGTPTTAGTSTFTVKAANATGSVTKSLTITIVAGGTAPTITTTSLPNGTVGTAYSQTLTASGDTPITWTRDNGTLPGGLTLSSAGVISGTPTTAGTSTFTVKAANATGNVTKSLTITIVAASSGGNPTPSGGTFTLTGIPSDYNGLYAYLFGGTENKEVLVLGVQSIDLNNEIITLPKISNERVSIPMWKIDQDIGSFTGYSGNDTLVIAVYISSDDMYSDDDSEDDAEVLIYYFSVPFSKGSATKAWSQADLIQ

SEQ ID NO: 65989 - DNA, 810 bp, Unknown
  Obtained from environmental sample
  misc_feature (1)..(810): n is a, c, g, or t
atgtcgccatacaacgcatggatcatcactgatattctttcggacagggcaagccgctttaccggctttggcgccgccccaacgctgacaacggaatttccgtcaatattcaaaaccggcacagccaatcagtttcagcacatctgggcgttaggcgctactgcccgttacaccgtcggcgtgtggatgggaaatttctccggtgagaccgtcattggcagaaccggcagttctgttccggcccgtattgcgggggatattctgaaagcgctggagcaggcgggcggttctttgggggaagaacattttccgccgcttcctgacaatgtccgcgaaatttcaatatgcgccctttcgggaatggcggccggttccgcctgcacgggcatgacgcgggaatggttccccaacgagcgcctgcccgccgcgtgtacatggcatcgccaatcgggtaacgcgcaggcggcggtcgaatatccgccggaatatcaggcatggctggcggaacgtttccggcagggacggacggcgcacagttcaaccaacggcggcgcccagagcggcgctcgtatccggcttcctgttgccggttcggtgttttaccttgatcccgccctgccccccgaagcccaggccatccgtatcgagaccgttggttttagccccggcgcgctggtttatgccaacgatgttttgcagggcagcgttaatcacgcggggatattcgccctgccgctgcgccgaggctttcagcgcattgtggtagaagatgaaaacgggtcaggcatgacggagattcaggttcgctga

SEQ ID NO: 65990 - protein, 269 aa, Unknown
  Obtained from environmental sample
  misc_feature (1)..(269): Xaa is any amino acid
MSPYNAWIITDILSDRASRFTGFGAAPTLTTEFPSIFKTGTANQFQHIWALGATARYTVGVWMGNFSGETVIGRTGSSVPARIAGDILKALEQAGGSLGEEHFPPLPDNVREISICALSGMAAGSACTGMTREWFPNERLPAACTWHRQSGNAQAAVEYPPEYQAWLAERFRQGRTAHSSTNGGAQSGARIRLPVAGSVFYLDPALPPEAQAIRIETVGFSPGALVYANDVLQGSVNHAGIFALPLRRGFQRIVVEDENGSGMTEIQVR

SEQ ID NO: 65991 - DNA, 852 bp, Unknown
  Obtained from environmental sample
  misc_feature (1)..(852): n is a, c, g, or t
atggaagccgccgccgatgccgcaccggaaaaattaaccgatgaaaaagctcccttttatgcgccgcattttaccgaccgcgtaataaaaatgttgcccatcgaaaaaaaacatctacgtaccagtcttgatctggacttacaaaaatatgcccaaaagcggcttgcctcggaacttgccttgctggaaaataaccgcgtaagtaacggcgcaattctggcggtagataatgccagcggcgcggtgctgatttatgcgggttcagcttcgtggtttgatgatacaagcggcggtaaaattgacggtgtgcagattcggaaccagcccggttcctgcctgaaaccgtttttgtacgcgcttgcactggaaaaaggttttttgcccggcgacatactgcccgacattcccaccatttttggcggcagcgaggcgtacagtccgtcaaatttcaaccgccgctttaacgggccggtgcgccttcgccttgcccttgcctcctcgctgaatattccggcggtgtatatgcttgagcggctgggcgtccgcacttttgaggactggcttgcggaactcggctttgaatcagttgcggcggcaaaaggcagtaacggcgtggggcttgccctgggcaatgccgaagtcagcctggaagaactgacgcgggccttttacgtgtttcctcggggcgggcggacgctgggactgcactttactgaaagtcagccgttgccttctcggaaggcgcgtcccaaacgcggcaacttatgtcgccatacaacgcatggatcatcactgatattctttcggacagggcaagccgctttaccggctttggcgccgccccaacgctga

SEQ ID NO: 65992 - protein, 283 aa, Unknown
  Obtained from environmental sample
  DOMAIN (70)...(279): Penicillin binding protein transpeptidase domain
  misc_feature (1)..(283): Xaa is any amino acid
MEAAADAAPEKLTDEKAPFYAPHFTDRVIKMLPIEKKHLRTSLDLDLQKYAQKRLASELALLENNRVSNGAILAVDNASGAVLIYAGSASWFDDTSGGKIDGVQIRNQPGSCLKPFLYALALEKGFLPGDILPDIPTIFGGSEAYSPSNFNRRFNGPVRLRLALASSLNIPAVYMLERLGVRTFEDWLAELGFESVAAAKGSNGVGLALGNAEVSLEELTRAFYVFPRGGRTLGLHFTESQPLPSRKARPKRGNLCRHTTHGSSLIFFRTGQAALPALAPPQR

SEQ ID NO: 65993 - DNA, 1233 bp, Unknown
  Obtained from environmental sample
  misc_feature (1)..(1233): n is a, c, g, or t
atgccagatctgttaaatcaccgaaaaaccaccataatattgcggattatgagcggaggaaggccggcggcgaaccggcgagtaaaaatacggcaaaccgggcacgaattcctgtttggggtgggcggttttgacgcggtagcgctgatgagcgatatgcctgatccggcgccacgggcggcgcgaaaaaccttcctggaagaccgtttgaaccggcttttttcggtaatgaactacgccaccctgccgttttacctggggcgttatgaaccctccgaaggcagtccggacgaggcgcgtactttaaaagcagccgagtatttttgctcaaggggcgtaaaagtaaagggccatcccctggtatggcatacggtaggcgcggaatggcttatgaaatactccaacaaggaaatccttgaaaaactccgccgccgcatagagcgtgaaatgacccattttaagggtctaatcgacatttgggatgtgatcaatgaagtggtaattatgccggtctttgacaaatacgacaatgccgttacacgagtgtgcaaggaactcgggcgggtatccatggtcagggaagtttttacggcggcccgcgccgccaacccctccgcgatgctcctgttgaatgattttgacctttctgacaagtatgtaattcttattgacggatgccttcaggccggcatacccattgacgtgatcgggatacagtcccaccagcaccagggctactggggcgcggaatatacgcgggaaattcttgagcgttattcgcaattcggcctgcccatacattttaccgagaacacgatcatatcgggcgacattatgcctcctcatatcgttgaccttaacgactggcaggtggacgcctggcctagcacgcccgaaggcgaggaacgccaggcgcgtgaaatgctggaaatgtactcgatactttttgcccatcccctggttgaggcgattaccgcgtggagtgcagtggacggaggctggctgaaagcccccgccggcctcctccatgaagacaacagcgtcaagcctgtttttaccgagctggaaaagaagataaagggcgaatggatgacaaaagccgagctgtcaaccaacgcctccggagagcttaatattgaaggtttccggggcagctacgagctggaatgtgacggtaaaaaggcggcctttaccctggacaggaagggcgggactattacggtggagttgtga

SEQ ID NO: 65994 - protein, 410 aa, Unknown
  Obtained from environmental sample
  DOMAIN (65)...(359): Glycosyl hydrolase family 10
  misc_feature (1)..(410): Xaa is any amino acid
MPDLLNHRKTTIILRIMSGGRPAANRRVKIRQTGHEFLFGVGGFDAVALMSDMPDPAPRAARKTFLEDRLNRLFSVMNYATLPFYLGRYEPSEGSPDEARTLKAAEYFCSRGVKVKGHPLVWHTVGAEWLMKYSNKEILEKLRRRIEREMTHFKGLIDIWDVINEVVIMPVFDKYDNAVTRVCKELGRVSMVREVFTAARAANPSAMLLLNDFDLSDKYVILIDGCLQAGIPIDVIGIQSHQHQGYWGAEYTREILERYSQFGLPIHFTENTIISGDIMPPHIVDLNDWQVDAWPSTPEGEERQAREMLEMYSILFAHPLVEAITAWSAVDGGWLKAPAGLLHEDNSVKPVFTELEKKIKGEWMTKAELSTNASGELNIEGFRGSYELECDGKKAAFTLDRKGGTITVEL

SEQ ID NO: 65995 - DNA, 2409 bp, Unknown
  Obtained from environmental sample
  misc_feature (1)..(2409): n is a, c, g, or t
atgagtgactatcttgatcctaataatgaggaactgctcaaggactttttcagcgaggcacaaatgcaagtggacacgctggaacagaacattctggtccttgaaagcgaaggcgccaataaagacgctgtggacgaaattttccgggcggctcataccttaaagggtggatccgcgactgtggaaatgatggaactgtcccactttacacatcttgtagaggacgtgcttgacgctattcgttcggatcaacttgcgattagcgagaaagtgacggacaccctgctttccgcgattgacattatcaaggcaatgcttgagcagcggatgaatggcgcggtatacgaggaggatatctcccaaatcgaagccagtctttccagcctgttgcctgaaggttcaacacggaaaaaaggaggcgcaaaagcgccggccaagcccgcggcgccagccccggctgccgctccgccaccgcctccgccgcctgccgcggctgcggcccctgctgcttccgtagggcttaccgaggctgaaatcaaggagcttaaagaggctgttgacggcggcttgcctatctactgtgtaaatgtgaagtttgacgaaaacagcctgatgaatacagtcggcggcatccagatatacgccgtattgaaagctaaaggttccatactcaaaacagtgcctgattttgatcagttgtacgaagacaatttcttcccgattgttaattattatctggccaccaacgagaaacccgaagagcttaaaaaatccgtaatactgccggacgtatcgcttgacgcgactgtcaccaatattgcgaatatgaccccgggcgccgcccctgccgctccggcaaaacctgccgcggcgccggcgccggcaaaagccgccgcccctgccgctccgtcagcgccagcggcagccccggcgcaagccacccctgcccccgcagccaaagccgaacccacccaagccagggccagtggatccgaagacgccaaaaaagcgggaaaagaagccggttccattcttcgtgtggattccaaacgtattgacgaccttctcaacctggtctctgaaacggttatcaccaaggcgacttttaaccagatcagcggacagttcaactctatggccatacaactgcgcgagattgaaaaccagtaccgggaaagaattaagacgctttttgacagccttcccgattatcttggaaacattcaggatggtaaatccgtcaaggatgtccgcaaggaaattaacgaacactatggggacattttctcgctctttgacggctttgaggtttcttttaaaaacaatatgggaaaattccgttccacagcgcagaaccttggacggattaccggggaattacaggaaggagtcatgcgtatccgcatggtgccgatcagccagatcttcagccgtttcccccggcttgtgcgcgatctttccaaacagcttaataaaaagatcaacttggttattgaaggtgaagacaccgaactggacaagtcggtcattgaggaccttctggatccgatcatgcactcggtgcggaattcaattgaccacggcatcgagtcgctggaggagcgccgcgccgccggcaagcccgaagaaggcagggtgcttctgaaggccaccaacgaaggcaacatgatcgtcattgatatagccgatgacggcgggggtattgacgtagaggcggtcaagaccaaagccatagaaaggggcattatcagccccaacaaactgcttaccgagccggaaagcttcaacctgattttcgagcccgggttctctaccgccaagtcgattaccgccatttcgggccgcggcgtcgggctggacgttgtacgcaagtcgatcgacaagctcaacggtaccgtcaccgtcacttccgaactgggcaagggcacaaaattcaccattaaactgccccttaccctcgcgattatccagggactactggtacgcgtcggtccggagatttattcaatccccatcaccagcgttatcgaaagcctcagggtaaaaccgtcggagatcaaaaagatcgacaattacgaggttttcaacctccgcagcgacgttatttccctgctccgcctcaaccggcttttcggcatcagaaccgatgaaaagcaggattacaacttcattgtcattgtcggcacggccgaaaagaaaatgggctttatggtggacagcctgataggtgaagaagacgtagttatcaagcccttgagggatcaatttaccaattcaccggggattgccggagcttccatattgggagacggttcggtttcactcataatagatgtcagccagcttcttgaattggggctgaagaaagaaatggagcagcgtcaaatccgcgaagcttcaatacggtag

SEQ ID NO: 65996 - protein, 802 aa, Unknown
  Obtained from environmental sample
  DOMAIN (342)...(467): Signal transducing histidine kinase, homodimeric domain
  misc_feature (1)..(802): Xaa is any amino acid
MSDYLDPNNEELLKDFFSEAQMQVDTLEQNILVLESEGANKDAVDEIFRAAHTLKGGSATVEMMELSHFTHLVEDVLDAIRSDQLAISEKVTDTLLSAIDIIKAMLEQRMNGAVYEEDISQIEASLSSLLPEGSTRKKGGAKAPAKPAAPAPAAAPPPPPPPAAAAAPAASVGLTEAEIKELKEAVDGGLPIYCVNVKFDENSLMNTVGGIQIYAVLKAKGSILKTVPDFDQLYEDNFFPIVNYYLATNEKPEELKKSVILPDVSLDATVTNIANMTPGAAPAAPAKPAAAPAPAKAAAPAAPSAPAAAPAQATPAPAAKAEPTQARASGSEDAKKAGKEAGSILRVDSKRIDDLLNLVSETVITKATFNQISGQFNSMAIQLREIENQYRERIKTLFDSLPDYLGNIQDGKSVKDVRKEINEHYGDIFSLFDGFEVSFKNNMGKFRSTAQNLGRITGELQEGVMRIRMVPISQIFSRFPRLVRDLSKQLNKKINLVIEGEDTELDKSVIEDLLDPIMHSVRNSIDHGIESLEERRAAGKPEEGRVLLKATNEGNMIVIDIADDGGGIDVEAVKTKAIERGIISPNKLLTEPESFNLIFEPGFSTAKSITAISGRGVGLDVVRKSIDKLNGTVTVTSELGKGTKFTIKLPLTLAIIQGLLVRVGPEIYSIPITSVIESLRVKPSEIKKIDNYEVFNLRSDVISLLRLNRLFGIRTDEKQDYNFIVIVGTAEKKMGFMVDSLIGEEDVVIKPLRDQFTNSPGIAGASILGDGSVSLIIDVSQLLELGLKKEMEQRQIREASIR

SEQ ID NO: 65997 - DNA, 411 bp, Unknown
  Obtained from environmental sample
  misc_feature (1)..(411): n is a, c, g, or t
atggccatagagttgaactgtccgctgatctggttaaaagtcgccttggtgataaccgtttcagagaccaggttgagaaggtcgtcaatacgtttggaatccacacgaagaatggaaccggcttcttttcccgcttttttggcgtcttcggatccactggccctggcttgggtgggttcggctttggctgcgggggcaggggtggcttgcgccggggctgccgctggcgctgacggagcggcaggggcggcggcttttgccggcgccggcgccgcggcaggttttgccggagcggcaggggcggcgcccggggtcatattcgcaatattggtgacagtcgcgtcaagcgatacgtccggcagtattacggattttttaagctcttcgggtttctcgttggtggccagataa

SEQ ID NO: 65998 - protein, 136 aa, Unknown
  Obtained from environmental sample
  misc_feature (1)..(136): Xaa is any amino acid
MAIELNCPLIWLKVALVITVSETRLRRSSIRLESTRRMEPASFPAFLASSDPLALAWVGSALAAGAGVACAGAAAGADGAAGAAAFAGAGAAAGFAGAAGAAPGVIFAILVTVASSDTSGSITDFLSSSGFSLVAR

SEQ ID NO: 65999 - DNA, 669 bp, Unknown
  Obtained from environmental sample
  misc_feature (1)..(669): n is a, c, g, or t
atggtgaattttgtgcccttgcccagttcggaagtgacggtgacggtaccgttgagcttgtcgatcgacttgcgtacaacgtccagcccgacgccgcggcccgaaatggcggtaatcgacttggcggtagagaacccgggctcgaaaatcaggttgaagctttccggctcggtaagcagtttgttggggctgataatgcccctttctatggctttggtcttgaccgcctctacgtcaatacccccgccgtcatcggctatatcaatgacgatcatgttgccttcgttggtggccttcagaagcaccctgccttcttcgggcttgccggcggcgcggcgctcctccagcgactcgatgccgtggtcaattgaattccgcaccgagtgcatgatcggatccagaaggtcctcaatgaccgacttgtccagttcggtgtcttcaccttcaataaccaagttgatctttttattaagctgtttggaaagatcgcgcacaagccgggggaaacggctgaagatctggctgatcggcaccatgcggatacgcatgactccttcctgtaattccccggtaatccgtccaaggttctgcgctgtggaacggaattttcccatattgtttttaaaagaaacctcaaagccgtcaaagagcgagaaaatgtccccatag

SEQ ID NO: 66000 - protein, 222 aa, Unknown
  Obtained from environmental sample
  misc_feature (1)..(222): Xaa is any amino acid
MVNFVPLPSSEVTVTVPLSLSIDLRTTSSPTPRPEMAVIDLAVENPGSKIRLKLSGSVSSLLGLIMPLSMALVLTASTSIPPPSSAISMTIMLPSLVAFRSTLPSSGLPAARRSSSDSMPWSIEFRTECMIGSRRSSMTDLSSSVSSPSITKLIFLLSCLERSRTSRGKRLKIWLIGTMRIRMTPSCNSPVIRPRFCAVERNFPILFLKETSKPSKSEKMSP

SEQ ID NO: 66001 - DNA, 750 bp, Unknown
  Obtained from environmental sample
  misc_feature (1)..(750): n is a, c, g, or t
gtgctggcgcgttttagcgctattgattcaagcgttaaaacagtttccgaacatgaacagaatatccgcaatgccatggaagagcaggaaatcggcgaaaagcaaatattggactccataggccgtttaagggacataacctattcggttaaaaaaggctctgacgacatggaactatcaggcaaaactttggttaaggaaacagatgaatttataaaaataagcaaagaaacggtagaaggtatgaacgatatactggcgggtattaatcagataaatgtttcgataaaccatgtcaacgaaatgagcgcagaaaacaaccgtaactttgagtctttaaaacatgaaacggataaatttaaacatacgtccggcgacgaaaagaaaaaaatacttatagtagacgacgaagaaattgatcttgaaatggtgggttcggtattgcagaaagactatgatatgtttaccgccaaatcgggcaaagaagcgcttggcttattctatcaaggacttgttcccgatttgatattattggatttgataatgcctgacatggacggctgggatacttacggcagaataaaagtgataggcggtttacacgatattccgatagcgtttttcacggtttccaacgacccgaaagacatacagcacgcgcacgaaataggagcggttgattacattaaaaaaccttatgacaaagacgatctgctaaacagaataaaaaagattcttatgaaaacctaa

SEQ ID NO: 66002 - protein, 249 aa, Unknown
  Obtained from environmental sample
  DOMAIN (129)...(243): Response regulator receiver domain
  misc_feature (1)..(249): Xaa is any amino acid
MLARFSAIDSSVKTVSEHEQNIRNAMEEQEIGEKQILDSIGRLRDITYSVKKGSDDMELSGKTLVKETDEFIKISKETVEGMNDILAGINQINVSINHVNEMSAENNRNFESLKHETDKFKHTSGDEKKKILIVDDEEIDLEMVGSVLQKDYDMFTAKSGKEALGLFYQGLVPDLILLDLIMPDMDGWDTYGRIKVIGGLHDIPIAFFTVSNDPKDIQHAHEIGAVDYIKKPYDKDDLLNRIKKILMKT

SEQ ID NO: 66003 - DNA, 981 bp, Unknown
  Obtained from environmental sample
  misc_feature (1)..(981): n is a, c, g, or t
gtgcaaaactttaatatattggacgatgataaaattcaactgccgagcggcatattcgcgggggtggaaagttatgtttgctaccccggcggcgaattggaaggaatacggctgtcagaaaaaaatatgctcgtaacgcacgcaggagagcttattcccgcttatactgaaacacatcggcgaaaaataaaatattcggttgaattttacaaagatggtatgataaaagcggtcgctcttgacgaacagcaggaaatacaaacgcccatcggtgaatttcccgccgaacttgtaactttttttgagacaggagaacttaaacgctttttcccgctggacggaaaaataagcggtttgtggacggaagaagaagaaaaaacgctggcaattccgttcacctttgatttgttttttacaaaattcacggcaataataaacggtattggcttttataaaagcggcgacattcgcagtattaccctgttccccggcgaagcgataacgatacaaaccgcattcggcgatattcaggcgcgtaacggtttttcactttatgaatcgggcgaacttgaatcgctggaaccgttaaatcccgccctgctaaaaacaccaatcggagcaatcgccgcctttgatccaaacgctatcggcgttaacgctgacagcaattcgctcgtctttgatgtatcgggaaagattgtttcgcttgttaccgtaagcaatcgtgttgccgtaacggaaggcgagcgttttaagacattttccccccgtgaggttgtaaatccgttagacgatgaaacaatgataacggaagggcttaaaatatctttcgattacaatgagaataccgtaacctttgaggaaaacgccgaaaaatcaaccttctcgcttaacgaaggatttacggttatccccttcaacggcaatgcatttacatgcagtccgtcagactgcgcaagctgttcaatggggtgcaaataa

SEQ ID NO: 66004 - protein, 326 aa, Unknown
  Obtained from environmental sample
  misc_feature (1)..(326): Xaa is any amino acid
MQNFNILDDDKIQLPSGIFAGVESYVCYPGGELEGIRLSEKNMLVTHAGELIPAYTETHRRKIKYSVEFYKDGMIKAVALDEQQEIQTPIGEFPAELVTFFETGELKRFFPLDGKISGLWTEEEEKTLAIPFTFDLFFTKFTAIINGIGFYKSGDIRSITLFPGEAITIQTAFGDIQARNGFSLYESGELESLEPLNPALLKTPIGAIAAFDPNAIGVNADSNSLVFDVSGKIVSLVTVSNRVAVTEGERFKTFSPREVVNPLDDETMITEGLKISFDYNENTVTFEENAEKSTFSLNEGFTVIPFNGNAFTCSPSDCASCSMGCK

SEQ ID NO: 66005 - DNA, 1146 bp, Unknown
  Obtained from environmental sample
  misc_feature (1)..(1146): n is a, c, g, or t
atgcggattattccagtagcaagcggaaaggggggcgtaggcaagtcccttgtctcggcaaatcttggcgtagctttttcgcaggcggggcagcgggtaatattggctgatctcgatctgggggcttcgaaccttcacctggttcttgggcatcaatcgcctaaaacaggaataggcgtctttttaaatgacatcagatcggaattcagggatgtcattgtcgatacggatgtgcgggggttaaggttcattccgggggatacggaaatacccggtacggcaaatctaaagccctttcaattaaaagcccttgtaagccgtcttctgtcattaaaagacgatgctgatattctgatccttgacctgggcgcagggacgcatcagtctatcctggactttttccttctttccggtcagggtatcgtagtctcagcgccgatagttaccgctatacttaacgcttatgtgtttctcaagaatacagtgttccgcttgatgtttacggttttcgggaaaggcagcccggctgcgatttatctggaaaaagcccgcaaggatggttctggccatcaaaaactttacattcccaaaatgctgcctgaaataaaaagaatagatcccgagtcttataataagtttatgaaacgcattgagcattttcatccccgccttataatgaacatgatcgacgatccgaaagacgcggacgtggccatgaagatccgccgttcctgcgaggaataccttgacttaaaaatcgagcatctcggaataatttatcgggattcattccaggatactgctctatcctcaaggctgccgattgtgctttataaaccacaatcagttttatcccaggctatttaccggattgctgataaaatactacagagcgaagaagacagcttcggccttagcgataaagaaatagaggatagtttccaggaagcagggatggaagctgaagttgactttgaaacaaagatggattatgtggaagatcttttgcattcaggggccctttcccagggcgatctggttgagaccatcaaatcccagcagtttgaaatttctaaactgaaaaaagaaaacaactttttaaagtataagctttcaaaggcttttgaaaaggggtttgagtcttaa

SEQ ID NO: 66006 - protein, 381 aa, Unknown
  Obtained from environmental sample
  DOMAIN (4)...(207): CobQ/CobB/MinD/ParA nucleotide binding domain
  misc_feature (1)..(381): Xaa is any amino acid
MRIIPVASGKGGVGKSLVSANLGVAFSQAGQRVILADLDLGASNLHLVLGHQSPKTGIGVFLNDIRSEFRDVIVDTDVRGLRFIPGDTEIPGTANLKPFQLKALVSRLLSLKDDADILILDLGAGTHQSILDFFLLSGQGIVVSAPIVTAILNAYVFLKNTVFRLMFTVFGKGSPAAIYLEKARKDGSGHQKLYIPKMLPEIKRIDPESYNKFMKRIEHFHPRLIMNMIDDPKDADVAMKIRRSCEEYLDLKIEHLGIIYRDSFQDTALSSRLPIVLYKPQSVLSQAIYRIADKILQSEEDSFGLSDKEIEDSFQEAGMEAEVDFETKMDYVEDLLHSGALSQGDLVETIKSQQFEISKLKKENNFLKYKLSKAFEKGFES

SEQ ID NO: 66007 - DNA, 1671 bp, Unknown
  Obtained from environmental sample
  misc_feature (1)..(1671): n is a, c, g, or t
ttggcgccaccccgatcaaaagcgattgaagcgtttctgtcaaaagccagcaaagctaaaaactcaaatacgatggaaatggtttacgcccagggaattccgcctgaagatcctgtcgtagaaaaagtaaactgggctaatttgcccgtacctgctgatatagccacttaccaggaagaaatgctgaaaaaagcgggcgtaccccatgtttatcgcattgttgtagaaaagataaagcacgagagcaaggtaaaaaaacaacattcccttattcccggaaaagaagaagtctccgtcacatgggaaaaaaaagaaaaccgcgaagaagtagatgtagacgccaaagtccttgaagttaagtacgctgaaaaggggacggtgcttggtacccttgttccgccggttcccggcaagaacggaaaaagtattttcgggcggcctattcctcccgggacaatggaaaacgccggcttcctgacgggaaatggcatcgccagggaaaaaaacgagcttgtcgcacaggcatccggctttgtaaggattggcgacagatgggcggatattatcccgctggcaaaacattctttcaggatcgctacaggcgcggacggcctgacgcttttttttagctttgaaccgggcgacaaaaggtttgcccccccctcaggcgagcaggtcatctccgaagcggttgccaggggagccgcttcggaaagccttgtcagcgccggtgaactggacaacgtaatcagtgaagcaataaatacaggcgaggcggttgaagcgttttctctttttaacatgcaagaggcggaagccagggtggatattaacccggataaaaccagagctacgctttaccttcgcaaaggcgtggctggggcgcagcctctggagatgaaagccatcagcctggcaataaaagaatcaaacatccatggctttgattccgagaagctaaaaaccgtcattcacgaattcatggaaagcaatgaaattgtactttccgattatgttcttgttgagggggtttcttcgacaaggggggaagatcggtatgtcaaggtatctgttaaggctttccctgaggaaggaaaaaaaccggtaatcatgaggcttcaggactggtttagccgggatgtttccaaagcgccgaaactgaatattaatgaatcgcttaattttgcttttgtggagaatggccagataattgcaaagatcagcgaaggaaaagaagggaaggacgggaaggatgtttttggcaatgtaatccccggccttcccggcaatgatcctgaattaaagcttcttgccggtctggaactgcacggatcggaaatcaaggccgcccaggacgggatgcttctttttaaggcttcggaaaaaagtttcattggcgaggtgattgtctaccaggacgcgagaatcggaattcacatttccgaagacgcgatggaagtaaagggggattttttcctagaagcggggcccgggattcccatcacaatcgagaatgtaaaaaaagtgattgcttcttacgggataaataaaggcatcgactggctaggcctggaaaaagccctgcgcccatacccgcgagcatggaagcattctgggccatattgtcgcgcgcggcgaaaatcccatagcccagggaggttccgccgttaa

SEQ ID NO: 66008 - protein, 556 aa, Unknown
  Obtained from environmental sample
  misc_feature (1)..(556): Xaa is any amino acid
MAPPRSKAIEAFLSKASKAKNSNTMEMVYAQGIPPEDPVVEKVNWANLPVPADIATYQEEMLKKAGVPHVYRIVVEKIKHESKVKKQHSLIPGKEEVSVTWEKKENREEVDVDAKVLEVKYAEKGTVLGTLVPPVPGKNGKSIFGRPIPPGTMENAGFLTGNGIAREKNELVAQASGFVRIGDRWADIIPLAKHSFRIATGADGLTLFFSFEPGDKRFAPPSGEQVISEAVARGAASESLVSAGELDNVISEAINTGEAVEAFSLFNMQEAEARVDINPDKTRATLYLRKGVAGAQPLEMKAISLAIKESNIHGFDSEKLKTVIHEFMESNEIVLSDYVLVEGVSSTRGEDRYVKVSVKAFPEEGKKPVIMRLQDWFSRDVSKAPKLNINESLNFAFVENGQIIAKISEGKEGKDGKDVFGNVIPGLPGNDPELKLLAGLELHGSEIKAAQDGMLLFKASEKSFIGEVIVYQDARIGIHISEDAMEVKGDFFLEAGPGIPITIENVKKVIASYGINKGIDWLGLEKALRPYPRAWKHSGPYCRARRKSHSPGRFRR

SEQ ID NO: 66009 - DNA, 756 bp, Unknown
  Obtained from environmental sample
  misc_feature (1)..(756): n is a, c, g, or t
gtgccttccggcaagcctggttatgacgtgaccggaaaggaaatccctgttgaaaaggcgggcgccctttccattgaacatgacaaatcaataagggaagtgccgtttgggaaggggaagcgcctcctcgccgccagatcgggagaactaagctttgacgggaaaacgctgaaaatacttcccaccaaaaccatacagggggacgtgaatcaggaaactggaaaaattaacttttccggcgaggtaaagataggcgggaatgtgctttccggcagcgtggtagttgccggttcccatattacggtgagcgggtatgccgaagaggcgctgatctcttcaggcggcaaggctacaattgcaatggggtttaagggcggcggcaagggtatactcaaagccagggccggtatttcagccgcgtttattgaacggactctggcatcggcgttaggggatgtacagcttaacaaaggttcaattctttcaaacataaagacaaacgggaaactttctattgcctccgaaaatggaaagctttcaggcggtatctgtcaggcgaggttgggaatagacgccgccgatattggctcggaaaaaggccttcgtaccgaaatttcctttgggcaggattacatcgtcaaggagcagatagattattgcgaggaagaaattgtaaaaattgatggtgcccttgcggagctggaagaaaagataactgaactacgaaatgaaaaacaaagccttcctgaagattaa

SEQ ID NO: 66010 - protein, 251 aa, Unknown
  Obtained from environmental sample
  misc_feature (1)..(251): Xaa is any amino acid
MPSGKPGYDVTGKEIPVEKAGALSIEHDKSIREVPFGKGKRLLAARSGELSFDGKTLKILPTKTIQGDVNQETGKINFSGEVKIGGNVLSGSVVVAGSHITVSGYAEEALISSGGKATIAMGFKGGGKGILKARAGISAAFIERTLASALGDVQLNKGSILSNIKTNGKLSIASENGKLSGGICQARLGIDAADIGSEKGLRTEISFGQDYIVKEQIDYCEEEIVKIDGALAELEEKITELRNEKQSLPED

SEQ ID NO: 66011 - DNA, 2607 bp, Unknown
  Obtained from environmental sample
  misc_feature (1)..(2607): n is a, c, g, or t
gtgtcagttatgattactgaacctgatagcctaaaacaagcgcttgactgtatacgaaaagcgcaagcagtctatgcaaactttactcaggaacaagtagataaaattttcttcgccgccgcgcgagccgccgcgaaagagcgaatccccctcgcgaaaatggcggtagccgaaaccggaatgggcgtagtcgaggacaaagtgattaaaaaccactacgcctcggagtacatctacaatacctacaaagacgaaaaaacctgcggcgtaatcgaggacgaccccgtttcaggtcttacccgcatagccgaaccaataggccttattgcggcggtcattcccaccaccaatcccacttccacggcgattttcaaagcgctcatttgcctgaaaacccgcaacgggattatcatatcgccgcacccccgcgcaaaagcaagcacctgcgccgccgcgaaaatcgtgctggacgccgcggtcgccgccggagcgcccgatggaatcataggctggatagacgagcccagccttgaaatgaccaacatggtgatgaaagaggcggacactattcttgccacgggcgggccgggcatggtcaagtccgcctactcatccggcaagccggcaatcggcgtagggtcgggcaatgtgcccgcgatcatcgacgacagcgcggatatactcctcgccgtcaactcaatcatacactcaaaaacttttgacaacggaatgatatgcgcgtccgagcaatcggtcatcgccctgacaggcgtttacgataaagtgaaagccgagttcaaacgccggggctgttacttccttacgtccgcagaaaccgagaaggtacggaaaacaattatcgtcaacggatcattgaacgcgaaaatcgtcggacagaaggcggcgaaaatcgcggagcttgcgggcgtaaaagtagacgaggcgactaagatcctcatcggcgaagttgagagcgtggagctttcggaagaattcgcccacgaaaaactttccccggtgctggcgatgtacagggcgaaagattttgacgatgcgctggacaaggccgaccatttgataaaagacggcggctacggacacaccgccagcgttttccttaattcgcaaatatccgcagacaaactcgacgctttcggcaagcgcatgaagacctgccgcattttgctgaacacgccgtcggcgcaaggcggcataggcgacttgtacaacttccgcctgcggccttcgctcactttgggctgcggcagttggggcggcaattcggtttcggaaaatgtcggcgttaaacacctgttaaatataaagacattggcggcaaggagggaaaatatgctgtggttccgtactcccgaaaaagtatatatcaagaggggatgcctccccgtggctctggacgaacttaaaaccgttatggggaaaaaacgcgcgttcatcgtaaccgacacattcctataccaaaacggttacaccaaatgtatcacagacaaactggacagcttgggcattgtccacgaaactttttttgatgtcgcccccgacccgacacttgcctgcgcgaaaaaaggcacttcgattatgagcgcgttcaaacccgatgtgatcatcgccattggcggcggctcggcaatggatgcgggcaagatcatgtgggtgctctacgaacatcccgaagttgattttgaggatatggctatgcgcttcgccgacatacgcaagcgcgtctacaccttccccaaaatgggagagaaggcgtactttatcgccatacccacctccgccggaacaggcagtgaggtaacgccctttgccgtcattaccgatgaaaccaagggcatgaagtacccgcttgcggattacgaacttttacccgacatggcaatagtagacgccgatgtgcagatgaacgcgcccaagggactgacaagcgcaagcggaatcgacgcggtgacgcacgcactggaagcatacgcctcggtcatggcgacggactacaccgacggccttgcgatacaggcgctcaaggtgattttcgagtggctgcccatcgcgtacaacgaaggcgcggcgaatcctgttgcgcgcgaaaagatggcgaacgccgccacgattgcgggcatggctttcgccaacgcgttcctgggcgtgtgccactcgatggcgcacaaactcggcgcgttccaccatctgccccacggcgtcgccaatgccttgatgatcaacgaagtgcttcgctacaactcctgcgaagttccgccgaagatggggacattccctcaatatgatcatcccaagaccttatcccggtacgcgcagattgctgacgcgctggctctgggcggcaagaccgatgaggaaaaacttgaaaaactaatcgccgccgtagaaaaactgaaagagcagatcggtatcaagaagactatcaaagattacggcatagatgaaaaagattttcttgcccgccttgacgacatgagcgaacaggcttttgacgatcaatgcaccggggcgaatccgcggtatccgttaatcgaggaaatcaaaaagatgtaccttaatgtttactacggaaagaaggagaaggtgtaa

SEQ ID NO: 66012 - protein, 868 aa, Unknown
  Obtained from environmental sample
  DOMAIN (5)...(444): Aldehyde dehydrogenase family
  misc_feature (1)..(868): Xaa is any amino acid
MSVMITEPDSLKQALDCIRKAQAVYANFTQEQVDKIFFAAARAAAKERIPLAKMAVAETGMGVVEDKVIKNHYASEYIYNTYKDEKTCGVIEDDPVSGLTRIAEPIGLIAAVIPTTNPTSTAIFKALICLKTRNGIIISPHPRAKASTCAAAKIVLDAAVAAGAPDGIIGWIDEPSLEMTNMVMKEADTILATGGPGMVKSAYSSGKPAIGVGSGNVPAIIDDSADILLAVNSIIHSKTFDNGMICASEQSVIALTGVYDKVKAEFKRRGCYFLTSAETEKVRKTIIVNGSLNAKIVGQKAAKIAELAGVKVDEATKILIGEVESVELSEEFAHEKLSPVLAMYRAKDFDDALDKADHLIKDGGYGHTASVFLNSQISADKLDAFGKRMKTCRILLNTPSAQGGIGDLYNFRLRPSLTLGCGSWGGNSVSENVGVKHLLNIKTLAARRENMLWFRTPEKVYIKRGCLPVALDELKTVMGKKRAFIVTDTFLYQNGYTKCITDKLDSLGIVHETFFDVAPDPTLACAKKGTSIMSAFKPDVIIAIGGGSAMDAGKIMWVLYEHPEVDFEDMAMRFADIRKRVYTFPKMGEKAYFIAIPTSAGTGSEVTPFAVITDETKGMKYPLADYELLPDMAIVDADVQMNAPKGLTSASGIDAVTHALEAYASVMATDYTDGLAIQALKVIFEWLPIAYNEGAANPVAREKMANAATIAGMAFANAFLGVCHSMAHKLGAFHHLPHGVANALMINEVLRYNSCEVPPKMGTFPQYDHPKTLSRYAQIADALALGGKTDEEKLEKLIAAVEKLKEQIGIKKTIKDYGIDEKDFLARLDDMSEQAFDDQCTGANPRYPLIEEIKKMYLNVYYGKKEKV

SEQ ID NO: 66013 - DNA, 759 bp, Unknown
  Obtained from environmental sample
  misc_feature (1)..(759): n is a, c, g, or t
atgggcagttacaaacttgataatttacttgccgaccgcgggtcgaagaaaatataccgcgacggggacaaggtgataaagctcagggacgaaggtttccccgcgcctgacgttctttccgaagcgcacaaccttgccgtagttggggagaccgcactgaaggttccgcgtttggtagaggtgacgaaaatcgacggcaagtgggctgttgtttgggaatatgttgagggaacttcccttgacaagctgatggaaaaaaacaaggacaaagaagatcagtacatcgaacgctttgttgacattcagcttgatatgcaccgccacagcgcgacaaggcttcccctgcttatcgaaaaaatggagcgcaagataaaagcctcagaacttgactctaccgcccgctacgaaattttgggaaggctggcgagcatgccaaagcacaccaaactctgccacggcgattttaatcccggcaacattgtcataaccgataaggacgaagcttacatcatagactggtgccacgcttctcagggcaacgcctcggcggacgcggcgcacacttacctgctgttccgtcttgccggaaacgacactcttgcagacaagtactttgcgctgttctgcaaaaaaagcggcacagagaagcggtatgtggaaaagtggctgtccattgtggcggcttcccagcttccgaaagcgaaacccggagagcgggagcttttactgcattgggcgaatgttgttgagtatgcgtaa

SEQ ID NO: 66014 - protein, 252 aa, Unknown
  Obtained from environmental sample
  DOMAIN (5)...(242): Phosphotransferase enzyme family
  misc_feature (1)..(252): Xaa is any amino acid
MGSYKLDNLLADRGSKKIYRDGDKVIKLRDEGFPAPDVLSEAHNLAVVGETALKVPRLVEVTKIDGKWAVVWEYVEGTSLDKLMEKNKDKEDQYIERFVDIQLDMHRHSATRLPLLIEKMERKIKASELDSTARYEILGRLASMPKHTKLCHGDFNPGNIVITDKDEAYIIDWCHASQGNASADAAHTYLLFRLAGNDTLADKYFALFCKKSGTEKRYVEKWLSIVAASQLPKAKPGERELLLHWANVVEYA

SEQ ID NO: 66015 - DNA, 447 bp, Unknown
  Obtained from environmental sample
  misc_feature (1)..(447): n is a, c, g, or t
atgaaaagaattgaaataatcgtattggttatcggcattctttttgtcacttgtggcaaagaaaatggtaatggagataaagatgaaaatttaatcttctctgatgattttaatggaaactcaattgatacaaaaaaatggaatcttgtttatgaggcggataggcagggaggcagtacatggaaagatgatatggtttctgtcagcgatggttatttacgaataaagtttaagcgagataccgctcttggggctgctaaatcatcagatcctacaattgctaataactgggttcgcgctggaggtataaggacatataaaaaagattggtcttctatattatttgaaaatggttatggttattatgaagcaagaataaaattccctgttgtagccggaacatggggtgcattctggttgatgtcgccaacacgggaactactatga

SEQ ID NO: 66016 - protein, 148 aa, Unknown
  Obtained from environmental sample
  misc_feature (1)..(148): Xaa is any amino acid
MKRIEIIVLVIGILFVTCGKENGNGDKDENLIFSDDFNGNSIDTKKWNLVYEADRQGGSTWKDDMVSVSDGYLRIKFKRDTALGAAKSSDPTIANNWVRAGGIRTYKKDWSSILFENGYGYYEARIKFPVVAGTWGAFWLMSPTRELL

SEQ ID NO: 66017 - DNA, 2406 bp, Unknown
  Obtained from environmental sample
  misc_feature (1)..(2406): n is a, c, g, or t
gtggttgtcgcaagccatcctaaagacgaaacaacggatacggcggaaaaacagcctgtggcaaaggattcacatcatgcggaaacacccccgcaggctgatgtaaaaccgcatgacgcggcagcggacggaaaccggggtccaacaggcgcagtttcgacgccattcccctttacccagcgtccggctgtcgcggtaggcagggtaggcggcaaacaggttggcagaaaattccatgaagataaccgcggcggaacttcagggggcggcggctccggaggccaggcccagcgtcccgccaacaagggagcgggcggccagcagcagaggcatccgtcatcggccccgccaagacagggccagggtggcggctttagacaaaattttggcgccccccagcaccagcagcgtcccggaggacagcagggcggcaggccgggcttcgcgccgcgtcccggaggacccggccgcggcggacagtcagggtcccagcccccaagcgctttaccggaaggaaagagcggggcaaaacgtacttttagggcaaagaaacccacgtacaaccgcaaagaaaaagaacttgagatggaggagaaactccgccagaccaggaagaaaataacttatgttgccaaccctgtacccaaatcgatcgatattatggaaagtatttcggtgtcggaattggcgaaaaaaatgaacctcaaggcgtcggatttaattcaaaagctaatgaagcttggcatgatggttaccattaaccagcagatagacgccgataccgcgacgatactggccgctgaattcggcgcggacgtaaaaattatcagcctgtatgacgaaaccataattgacaccgggacggacgaaggcgccgatatgctgccccggccgccggttgttaccgttatgggacacgttgaccacggcaaaaccaaactgctggacgctatccgaaaagcggacgtggtgtcgggcgagtttggcgggataacccagcacatcggcgcgtacatggtggaaaccccgcacggcagaataaccttccttgacacgccgggccacgaggcgtttacgcgcatgagggcgcgtggtgcgcaggttacggatattgtggtgcttgttgtcgccgcggatgacggggtcatgccccagaccatcgaggcgatcaaccacgcgaaggaagccggggttccaatcattgtcgcggtaaataaaatcgacaagccggaggcaaaccctgaccgcgtaaagagccaactttccgaacttggccttatgccggaggaatggggcggccagacgatgtttgtcgagctttcggccttgcaaaaaatcggaatagacaaacttattgatactatacttcttgaggcggagcttcttgatctcaaggcaaatttccaccggggcgccgaggggaagatacttgaatcgaggatcgatcacgggcgcggcattgtggcaaccgtcattgtggaaagagggactatctccgtgggcgattcttttgtcgctggtatatggcccggaaaagtgcgcgcgatcttcaatgaccggggcgataaactcaagcacgcgtctccctccatgcccgttgaaatcctcggctttgagggaatccccaacgccggcgatcccttgcaggctgttgatgacgagaaaatcgcccgcgaatattcgtccaaacgccaggaactgaaacgctttgaggacgccaagaacttcaagcaggtaacggccgagactttgcgcgacaggataagtgacggcaccatacaggaactcaaagttatcatcaaggcggacgttcagggttcggcggaggcgctcaagagcagcctggaaaaactttctaccaaggaaatccgtctgcatgtcatacaggcgctgcccgggccgattaacgaaggcgacgtcgatctcgcaatcgcttcaaaggccatcatcatcggttttaacgtgcggccccttcccaaggcgaaggttttggcggagcaggaaaaagttgatatacgtaaatacaacatcatctacaaggcagttgaggaaatccatcaggcaatggaaggcatgctcaagcccgataccaaagaggaagttatcgcctcggtagaggtgaggaataccttcaaggtgcccaaggtcggaaccatcgccggatgctttgtgcagagcggcactgtaaagcgcagcgccagcgtcaatgtaatccgcgcggagatagtgatccactccggcaaaatcgcttcgcttaggcgtttcaaggacgacgtccgcgaagttgcggccggttacgagtgcggcatagggctggagggttttgacgacgtacagatcggcgatcaatttgaggtgatcgagattgtagaggtcgcaaggaagttaagcagcagccagggttaa

SEQ ID NO: 66018 - protein, 801 aa, Unknown
  Obtained from environmental sample
  DOMAIN (299)...(408): GTPase of unknown function
  misc_feature (1)..(801): Xaa is any amino acid
MVVASHPKDETTDTAEKQPVAKDSHHAETPPQADVKPHDAAADGNRGPTGAVSTPFPFTQRPAVAVGRVGGKQVGRKFHEDNRGGTSGGGGSGGQAQRPANKGAGGQQQRHPSSAPPRQGQGGGFRQNFGAPQHQQRPGGQQGGRPGFAPRPGGPGRGGQSGSQPPSALPEGKSGAKRTFRAKKPTYNRKEKELEMEEKLRQTRKKITYVANPVPKSIDIMESISVSELAKKMNLKASDLIQKLMKLGMMVTINQQIDADTATILAAEFGADVKIISLYDETIIDTGTDEGADMLPRPPVVTVMGHVDHGKTKLLDAIRKADVVSGEFGGITQHIGAYMVETPHGRITFLDTPGHEAFTRMRARGAQVTDIVVLVVAADDGVMPQTIEAINHAKEAGVPIIVAVNKIDKPEANPDRVKSQLSELGLMPEEWGGQTMFVELSALQKIGIDKLIDTILLEAELLDLKANFHRGAEGKILESRIDHGRGIVATVIVERGTISVGDSFVAGIWPGKVRAIFNDRGDKLKHASPSMPVEILGFEGIPNAGDPLQAVDDEKIAREYSSKRQELKRFEDAKNFKQVTAETLRDRISDGTIQELKVIIKADVQGSAEALKSSLEKLSTKEIRLHVIQALPGPINEGDVDLAIASKAIIIGFNVRPLPKAKVLAEQEKVDIRKYNIIYKAVEEIHQAMEGMLKPDTKEEVIASVEVRNTFKVPKVGTIAGCFVQSGTVKRSASVNVIRAEIVIHSGKIASLRRFKDDVREVAAGYECGIGLEGFDDVQIGDQFEVIEIVEVARKLSSSQG

SEQ ID NO: 66019 - DNA, 414 bp, Unknown
  Obtained from environmental sample
  misc_feature (1)..(414): n is a, c, g, or t
ttgatcgccgatctgtacgtcgtcaaaaccctccagccctatgccgcactcgtaaccggccgcaacttcgcggacgtcgtccttgaaacgcctaagcgaagcgattttgccggagtggatcactatctccgcgcggattacattgacgctggcgctgcgctttacagtgccgctctgcacaaagcatccggcgatggttccgaccttgggcaccttgaaggtattcctcacctctaccgaggcgataacttcctctttggtatcgggcttgagcatgccttccattgcctgatggatttcctcaactgccttgtagatgatgttgtatttacgtatatcaactttttcctgctccgccaaaaccttcgccttgggaaggggccgcacgttaaaaccgatgatgatggcctttga

SEQ ID NO: 66020 - protein, 137 aa, Unknown
  Obtained from environmental sample
  misc_feature (1)..(137): Xaa is any amino acid
MIADLYVVKTLQPYAALVTGRNFADVVLETPKRSDFAGVDHYLRADYIDAGAALYSAALHKASGDGSDLGHLEGIPHLYRGDNFLFGIGLEHAFHCLMDFLNCLVDDVVFTYINFFLLRQNLRLGKGPHVKTDDDGL

SEQ ID NO: 66021 - DNA, 1149 bp, Unknown
  Obtained from environmental sample
  misc_feature (1)..(1149): n is a, c, g, or t
atgcagacggatttccttggtagaaagtttttccaggctgctcttgagcgcctccgccgaaccctgaacgtccgccttgatgataactttgagttcctgtatggtgccgtcacttatcctgtcgcgcaaagtctcggccgttacctgcttgaagttcttggcgtcctcaaagcgtttcagttcctggcgtttggacgaatattcgcgggcgattttctcgtcatcaacagcctgcaagggatcgccggcgttggggattccctcaaagccgaggatttcaacgggcatggagggagacgcgtgcttgagtttatcgccccggtcattgaagatcgcgcgcacttttccgggccatataccagcgacaaaagaatcgcccacggagatagtccctctttccacaatgacggttgccacaatgccgcgcccgtgatcgatcctcgattcaagtatcttcccctcggcgccccggtggaaatttgccttgagatcaagaagctccgcctcaagaagtatagtatcaataagtttgtctattccgattttttgcaaggccgaaagctcgacaaacatcgtctggccgccccattcctccggcataaggccaagttcggaaagttggctctttacgcggtcagggtttgcctccggcttgtcgattttatttaccgcgacaatgattggaaccccggcttccttcgcgtggttgatcgcctcgatggtctggggcatgaccccgtcatccgcggcgacaacaagcaccacaatatccgtaacctgcgcaccacgcgccctcatgcgcgtaaacgcctcgtggcccggcgtgtcaaggaaggttattctgccgtgcggggtttccaccatgtacgcgccgatgtgctgggttatcccgccaaactcgcccgacaccacgtccgcttttcggatagcgtccagcagtttggttttgccgtggtcaacgtgtcccataacggtaacaaccggcggccggggcagcatatcggcgccttcgtccgtcccggtgtcaattatggtttcgtcatacaggctgataatttttacgtccgcgccgaattcagcggccagtatcgtcgcggtatcggcgtctatctgctggttaatggtaaccatcatgccaagcttcattag

SEQ ID NO: 66022 - protein, 382 aa, Unknown
  Obtained from environmental sample
  misc_feature (1)..(382): Xaa is any amino acid
MQTDFLGRKFFQAALERLRRTLNVRLDDNFEFLYGAVTYPVAQSLGRYLLEVLGVLKAFQFLAFGRIFAGDFLVINSLQGIAGVGDSLKAEDFNGHGGRRVLEFIAPVIEDRAHFSGPYTSDKRIAHGDSPSFHNDGCHNAAPVIDPRFKYLPLGAPVEICLEIKKLRLKKYSINKFVYSDFLQGRKLDKHRLAAPFLRHKAKFGKLALYAVRVCLRLVDFIYRDNDWNPGFLRVVDRLDGLGHDPVIRGDNKHHNIRNLRTTRPHARKRLVARRVKEGYSAVRGFHHVRADVLGYPAKLARHHVRFSDSVQQFGFAVVNVSHNGNNRRPGQHIGAFVRPGVNYGFVIQADNFYVRAEFSGQYRRGIGVYLLVNGNHHAKLH

SEQ ID NO: 66023 - DNA, 672 bp, Unknown
  Obtained from environmental sample
  misc_feature (1)..(672): n is a, c, g, or t
ttgagatcaagaagctccgcctcaagaagtatagtatcaataagtttgtctattccgattttttgcaaggccgaaagctcgacaaacatcgtctggccgccccattcctccggcataaggccaagttcggaaagttggctctttacgcggtcagggtttgcctccggcttgtcgattttatttaccgcgacaatgattggaaccccggcttccttcgcgtggttgatcgcctcgatggtctggggcatgaccccgtcatccgcggcgacaacaagcaccacaatatccgtaacctgcgcaccacgcgccctcatgcgcgtaaacgcctcgtggcccggcgtgtcaaggaaggttattctgccgtgcggggtttccaccatgtacgcgccgatgtgctgggttatcccgccaaactcgcccgacaccacgtccgcttttcggatagcgtccagcagtttggttttgccgtggtcaacgtgtcccataacggtaacaaccggcggccggggcagcatatcggcgccttcgtccgtcccggtgtcaattatggtttcgtcatacaggctgataatttttacgtccgcgccgaattcagcggccagtatcgtcgcggtatcggcgtctatctgctggttaatggtaaccatcatgccaagcttcattagcttttga

SEQ ID NO: 66024 - protein, 223 aa, Unknown
  Obtained from environmental sample
  SIGNAL (1)...(24)
  misc_feature (1)..(223): Xaa is any amino acid
MRSRSSASRSIVSISLSIPIFCKAESSTNIVWPPHSSGIRPSSESWLFTRSGFASGLSILFTATMIGTPASFAWLIASMVWGMTPSSAATTSTTISVTCAPRALMRVNASWPGVSRKVILPCGVSTMYAPMCWVIPPNSPDTTSAFRIASSSLVLPWSTCPITVTTGGRGSISAPSSVPVSIMVSSYRLIIFTSAPNSAASIVAVSASICWLMVTIMPSFISF

SEQ ID NO: 66025 - DNA, 495 bp, Unknown
  Obtained from environmental sample
  misc_feature (1)..(495): n is a, c, g, or t
ttgcggttgtacgtgggtttctttgccctaaaagtacgttttgccccgctctttccttccggtaaagcgcttgggggctgggaccctgactgtccgccgcggccgggtcctccgggacgcggcgcgaagcccggcctgccgccctgctgtcctccgggacgctgctggtgctggggggcgccaaaattttgtctaaagccgccaccctggccctgtcttggcggggccgatgacggatgcctctgctgctggccgcccgctcccttgttggcgggacgctgggcctggcctccggagccgccgccccctgaagttccgccgcggttatcttcatggaattttctgccaacctgtttgccgcctaccctgcctaccgcgacagccggacgctgggtaaaggggaatggcgtcgaaactgcgcctgttggaccccggtttccgtccgctgccgcgtcatgcggttttacatcagcctgcgggggtgtttccgcatga

SEQ ID NO: 66026 - protein, 164 aa, Unknown
  Obtained from environmental sample
  misc_feature (1)..(164): Xaa is any amino acid
MRLYVGFFALKVRFAPLFPSGKALGGWDPDCPPRPGPPGRGAKPGLPPCCPPGRCWCWGAPKFCLKPPPWPCLGGADDGCLCCWPPAPLLAGRWAWPPEPPPPEVPPRLSSWNFLPTCLPPTLPTATAGRWVKGNGVETAPVGPRFPSAAASCGFTSACGGVSA

SEQ ID NO: 66027 - DNA, 714 bp, Unknown
  Obtained from environmental sample
  misc_feature (1)..(714): n is a, c, g, or t
ttgaataaggcatttatgaattggtttcactctcttttaatgaacgatggcattgcccacaccattttcatctttgcatttgtaattgcgctgggtatgagtctgggtaaaatcaaaatattcgggatttcgctcggcattgcctttgtgttgttcgtaggtcttgcctgtgggcatttcggatcgtctgtgaatgagactgtgctgggtttcataaaggattttgggcttgtgctgttcgtgtttactgttggctcgcaagtgggaccatcgtttttctcttcatttaaaaaagatggattgcagttgaacatagtggctgtttcctttatatgtttagacataatagttacaatagttctatactatattttttcttctcacgtttcaatagcgatgatggttggcattttaacgggagcaaccttgaacattccatcgcttggtgcggcacaagaggcaatgcaccaactggcaatgactgaaaacatagccttaggctctgcggtagcttatcctattggaattgttgcggctataccagctttggctcttttgagggttcttctaaaaataaatccggcagacgaagcgaagaaaatagaaagtgctagcgatacaagtgaacaaccaatacactattccgttttactctccaagcgatgccatagcaaacagaagcttggaagatgtaaaaaaacttgtggggcgtga

SEQ ID NO: 66028 - protein, 237 aa, Unknown
  Obtained from environmental sample
  DOMAIN (24)...(188): Predicted Permease Membrane Region
  misc_feature (1)..(237): Xaa is any amino acid
MNKAFMNWFHSLLMNDGIAHTIFIFAFVIALGMSLGKIKIFGISLGIAFVLFVGLACGHFGSSVNETVLGFIKDFGLVLFVFTVGSQVGPSFFSSFKKDGLQLNIVAVSFICLDIIVTIVLYYIFSSHVSIAMMVGILTGATLNIPSLGAAQEAMHQLAMTENIALGSAVAYPIGIVAAIPALALLRVLLKINPADEAKKIESASDTSEQPIHYSVLLSKRCHSKQKLGRCKKTCGA

SEQ ID NO: 66029 - DNA, 1380 bp, Unknown
  Obtained from environmental sample
  misc_feature (1)..(1380): n is a, c, g, or t
atgaatttaagcgatgttaaaaaaaaaattgaagctagttcggtagtggctgttgtagaagaggtttttgaaaaaattgaagaaacgcacgaccttaacgcttatatatccacctgcaaagaccgagctttgaaagcggcggcggcaaccgatgaacggcacagaaaaggcaaaagcctctctgttttagatggaattcccattgccattaaagataatatgtgcttagagggcataaaaacaacctgtgcctctaaaattttggaaaattttgtttctccatacactgctacggccgtggcaaaattggaggctgccggagccattgttgttggcaaaaccaatttggacgaatttgcaatgggctcttccaacgaaacatcttattttggaaaagttttgaatcccttggcaaaagaccgcgttcccggaggctcttctggtggcagtgcggttgcggttgcaagcgaaactgtggctttggcactaggttccgatactggcggctccattcgccagccagcagcctgcacgggcaccgttggcataaaacccacttatggcagggtttctcgctatggcttggttgcttatgccagcagcttggatcagataggtgctttttcaagcagcgttaaagatttagcccctgttttggattttatgtgcggccaagatgcaagagacaacacaacctctgctcgttccgcaggcaattttggcaagcatataggcgaaggcattaaaggcaaggttatagggctccctcgcgaatattacgcagaaggcttagacaaaaaatgcaaaggagcaatagaagctgcacttggaaaacttgaaaaagagggcgcagttttaaaagaagtttcgctcccttccattcgctatgcaattgaaagctattatataatagcaacagcagaggcttctagcaacctttctcgctttgacggcattcgctatacgcataggagcaaagaggcaaaaaatttaatggaaacttatgcgatgtccagaggcgaaggttttggcagcgaagttaagctacgcattctgctagggaattatgttttgagttcgggcttttacgatgcctattatgtgcaggctcaaaaagttcgccgcataataacagaagattttgaaaaagcctttttagagtgcgatgttattgcaagcccagcaatgccgggacttccacagcctcttggcaaatgcgaagaagaccatttgagcatggtgctatctgacctttataccgttagcgttaatttggcgggcttgcccggcttggttcaaccctgcaacaaattggaaggctgttccattggttgcagtggattggcaaatcttttgacgaagcaacactgcttgtcatag

SEQ ID NO: 66030 - protein, 459 aa, Unknown
  Obtained from environmental sample
  DOMAIN (17)...(458): Amidase
  misc_feature (1)..(459): Xaa is any amino acid
MNLSDVKKKIEASSVVAVVEEVFEKIEETHDLNAYISTCKDRALKAAAATDERHRKGKSLSVLDGIPIAIKDNMCLEGIKTTCASKILENFVSPYTATAVAKLEAAGAIVVGKTNLDEFAMGSSNETSYFGKVLNPLAKDRVPGGSSGGSAVAVASETVALALGSDTGGSIRQPAACTGTVGIKPTYGRVSRYGLVAYASSLDQIGAFSSSVKDLAPVLDFMCGQDARDNTTSARSAGNFGKHIGEGIKGKVIGLPREYYAEGLDKKCKGAIEAALGKLEKEGAVLKEVSLPSIRYAIESYYIIATAEASSNLSRFDGIRYTHRSKEAKNLMETYAMSRGEGFGSEVKLRILLGNYVLSSGFYDAYYVQAQKVRRIITEDFEKAFLECDVIASPAMPGLPQPLGKCEEDHLSMVLSDLYTVSVNLAGLPGLVQPCNKLEGCSIGCSGLANLLTKQHCLS

SEQ ID NO: 66031 - DNA, 1518 bp, Unknown
  Obtained from environmental sample
  misc_feature (1)..(1518): n is a, c, g, or t
atgcaaaattctgccacagaaaacaacaagcgcatagctaagaacacactgttcctgtatttccgtagcattttaacccttgttgtggggctttacacaagccgcgaggtgctggcgcagctgggtgttagtgattttggcatttacaatgtggtgggcggggttattgtgctgttcagcttcattcaaggtgctatgaacagcgcaacaagccgtttttttacttttgacctcggaaagggccattttgagcaattgaaaaaaactttcagtatgagtgtggttatccacattttcactgccattcttatttttatattgggcgaaactgctggcttgtggtttttgaattcgcagttggttattccagaagagagaatggaggcagcgaattttgtatatcagtttacaattttcaccgcttgcgttgggattttgcaggtaccatatatggttgccattactgcacacgaaaggatgaaggtttttgcttatgccggaattgcagatgccgtgtttaagcttgccgttgtgcttgctctcagttttgcgacttttgataagctgaaattttattcggctttgctgtttggagtttttgttgcgatgaatggtttttattatgtttattgccgcaagagtttcaaagaaacaaagtttgaatggttttgggataaaaaaatgtttttggagagaatgggatttggggggtttgaatttttaggcgtagggtctggggttttggcgatacaaggcggaatttttttgataaatcgtttctatggtgttttgttgaatgcggcaaatggagtttcccagcaagtgatgaatgcggctcaacaattcacaaccaattttttcacagcagtaactccgcaaataacaaaatctttggcaagtggtgatatggactatttttacaatttagtgattcgttcaagcaaattctgctttttgctttcttttatgtttatggcaccattagcgttacaaatagattttgttttgaatatttggttaaaaatagtccccgattatactggaattttctgtcaattgaatattacaaatacattattgtggattaccttttggcctgttacacatggagtaatatccactggaaaaaataagaaatttcgcataatagacagttctatggttatgctaatttttccttttacatacatcggtttgcatttttcccctattggctatatgtgttcgcatatattagtaaatattctcagaatgatttacgtcacgttttgtctcaataggctaactggattttccattcgccaactgatcggtcagtctttgataaaatgttttgcaattggagctttttccattcctttacctttttacatcaccttaaacataagtggttggcaaggatttttgatatgccttgttgtttttttcgccatatttgcacctagcactttgttcattgggctaaacagaaacgaacgaagaaatatggtagaatgggtaaggcataaactaggataa

SEQ ID NO: 66032 - protein, 505 aa, Unknown
  Obtained from environmental sample
  DOMAIN (12)...(298): Polysaccharide biosynthesis protein
  misc_feature (1)..(505): Xaa is any amino acid
MQNSATENNKRIAKNTLFLYFRSILTLVVGLYTSREVLAQLGVSDFGIYNVVGGVIVLFSFIQGAMNSATSRFFTFDLGKGHFEQLKKTFSMSVVIHIFTAILIFILGETAGLWFLNSQLVIPEERMEAANFVYQFTIFTACVGILQVPYMVAITAHERMKVFAYAGIADAVFKLAVVLALSFATFDKLKFYSALLFGVFVAMNGFYYVYCRKSFKETKFEWFWDKKMFLERMGFGGFEFLGVGSGVLAIQGGIFLINRFYGVLLNAANGVSQQVMNAAQQFTTNFFTAVTPQITKSLASGDMDYFYNLVIRSSKFCFLLSFMFMAPLALQIDFVLNIWLKIVPDYTGIFCQLNITNTLLWITFWPVTHGVISTGKNKKFRIIDSSMVMLIFPFTYIGLHFSPIGYMCSHILVNILRMIYVTFCLNRLTGFSIRQLIGQSLIKCFAIGAFSIPLPFYITLNISGWQGFLICLVVFFAIFAPSTLFIGLNRNERRNMVEWVRHKLG

SEQ ID NO: 66033 - DNA, 1692 bp, Unknown
  Obtained from environmental sample
  misc_feature (1)..(1692): n is a, c, g, or t
ttgaattggtacttcttcgctctttgcgcgataattgccgtttccacattcaataacggcgttttgttctacaaagcctttgcggagggggtgtgtttaagcgaatcaacttatatttttacaaaattaaacatgattctttcaataataaaagttatgatagttccgtttcttttctcgtttatacttattctttcaaaaataaaatcccaaaaaatcaggttattgcagcgtgtcttgctttgtgttaatacgttggtcgtctccgcgatatttattattattgccgcgtccattgacgcaatcggatttttatcttcctatttgtttaatacatcggttcttttgatagttcttttttctttcggttgcacggtttttcttcagtataaatggataaagtgcgcgtctctaaaacgagatcgctcacaggcaaaaataatattaataggttctataatagcgcttgtttttcttgccggcgatttgtttgtttctaattctcattatttatataattggttggaacttataccttttatatggttgttggcgcttgtctttgtttttaaccattacgccaaccaatacaacaatttcagttttaatatcaccaaccttgccgcttatgtttatacggcggttaaattgccggtgcttattcttgatgataccggcgatataatgctatgcaatacggcttcggagagcttttttaagaaaaataccgaacaacttactaaacttaaattgtttgacctatttgattttgctgagaactcgttatcggatgtttcactggctctgcaccgtcacaaaaaggacgcgtccgtcttcaactgcgacgccgtctgccgtgttgagggacagaaatgccaagtttcgctaaactatgtctatgataaattcgatgaaatgatctgcaccgtcgcgatagtaaccgacatcacggaaaaagaggatttgatacggcaactcaacgagtctcacgcccaaattgagcgttataataaagaactacagtctgaggttgaccggcaaaccgagagtatccgcaatcttcaaaaggctattgtatactcgatgagcgatttgatagaaaagaaagacggctataccggcgctcataccagacgggtaagcgaatatgtcactattttactgcatgagttggtccggcgcggctaccaaatgaccgaatctgagattaaaagcgtcacggagtcttcgttgctgcacgatatgggaaaaatcgcgatacccgacagcatcctcctcaaaaacggtatcttgaccaaagaggagttcgaggtaatgaagaaccacagcacaacgggcgcggattctctgcaaaagtcaatgcagttcgccaaggacgacgatttcttgaagaacgcgttcataatggccaaacatcaccacgaaaaatggaacggcaatggctatcccgacggtaaaaaggagaccgaaatacccctcctcgcccgcgtgatagccattgccgacgtctacgacgcgctgcgctcggaacgcccgtataaattgccgttcagccgtgaaaaagcgaaatcgatcattatagaggaaaacggacgccagttcgaccccgaactggttgacgtctttttggcggtagagccggagtttgacgctttctgcgaatccactaaaacgaattcagatgctgtttaa

SEQ ID NO: 66034 - protein, 563 aa, Unknown
  Obtained from environmental sample
  SIGNAL (1)...(18)
  DOMAIN (373)...(507): HD domain
  misc_feature (1)..(563): Xaa is any amino acid
MNWYFFALCAIIAVSTFNNGVLFYKAFAEGVCLSESTYIFTKLNMILSIIKVMIVPFLFSFILILSKIKSQKIRLLQRVLLCVNTLVVSAIFIIIAASIDAIGFLSSYLFNTSVLLIVLFSFGCTVFLQYKWIKCASLKRDRSQAKIILIGSIIALVFLAGDLFVSNSHYLYNWLELIPFIWLLALVFVFNHYANQYNNFSFNITNLAAYVYTAVKLPVLILDDTGDIMLCNTASESFFKKNTEQLTKLKLFDLFDFAENSLSDVSLALHRHKKDASVFNCDAVCRVEGQKCQVSLNYVYDKFDEMICTVAIVTDITEKEDLIRQLNESHAQIERYNKELQSEVDRQTESIRNLQKAIVYSMSDLIEKKDGYTGAHTRRVSEYVTILLHELVRRGYQMTESEIKSVTESSLLHDMGKIAIPDSILLKNGILTKEEFEVMKNHSTTGADSLQKSMQFAKDDDFLKNAFIMAKHHHEKWNGNGYPDGKKETEIPLLARVIAIADVYDALRSERPYKLPFSREKAKSIIIEENGRQFDPELVDVFLAVEPEFDAFCESTKTNSDAV

SEQ ID NO: 66035 - DNA, 687 bp, Unknown
  Obtained from environmental sample
  misc_feature (1)..(687): n is a, c, g, or t
atggacagaatcgaacatatcaaaaatcattttgatgaggaagccgaaggatttgataaaaccatcttaaagctaataccgtactataccgaaatgatagacgcattggtcctgtcaattccattcaatcaaaatgagccgataagcgttattgatttaggctgtggaacaggaacggtcgcacgaaaaataaaagacgcttttcccaaatccaaaatctcttgcttggacatcgcggaaaatatgattaatttagctcgggaaaaattaggagaaaacgttaactgttacatcagcgatttttataaatttgaatttgataaaaagtatgatgtgatagtatcttcgctggcgttgcaccatttagaaaacgatgaagataaaaaaatgttctgccggaagatatataacgcgttaagtgataacggtgttttttataatgccgatgtggtattaggttcaaacgaccggttgcaagaattatatttggccaaatggaaagcatttatgaataaaacggtttccttagatgaaattgaaagcaggtggatggtaaattataggacggaagaccgaccgacgtgtttaatgaatcatattaattggttgaaggatattggttttgaggatgtggatgttgtgtggaaatattataattttgccgtttacgggggatgcaagaaataa

SEQ ID NO: 66036 - protein, 228 aa, Unknown
  Obtained from environmental sample
  DOMAIN (51)...(147): Methyltransferase domain
  misc_feature (1)..(228): Xaa is any amino acid
MDRIEHIKNHFDEEAEGFDKTILKLIPYYTEMIDALVLSIPFNQNEPISVIDLGCGTGTVARKIKDAFPKSKISCLDIAENMINLAREKLGENVNCYISDFYKFEFDKKYDVIVSSLALHHLENDEDKKMFCRKIYNALSDNGVFYNADVVLGSNDRLQELYLAKWKAFMNKTVSLDEIESRWMVNYRTEDRPTCLMNHINWLKDIGFEDVDVVWKYYNFAVYGGCKK

SEQ ID NO: 66037 - DNA, 354 bp, Unknown
  Obtained from environmental sample
  misc_feature (1)..(354): n is a, c, g, or t
ttggcatataaaattgtccaagataatttaaacgttggaaacagtgttgtggcagatcaatgtaatcctataaacctaactcgtaaagagtggaacgaggtcgcaataaaaaatgactgtgactatgtaaatatagaaattatatgttcagataaattgaaacacagaaatcggatcgaaaataaagagaacgagattgaaaatttaacgttgcctacatgggaagaagtgactgaaagaaaatatgatgattgggaagaagaacatataatagtagacacggcaaataaaacgattgaagagtgcacaaaagaattaatagaaaagataaacatgttatcccaagaaaactaa

SEQ ID NO: 66038 - protein, 117 aa, Unknown
  Obtained from environmental sample
  misc_feature (1)..(117): Xaa is any amino acid
MAYKIVQDNLNVGNSVVADQCNPINLTRKEWNEVAIKNDCDYVNIEIICSDKLKHRNRIENKENEIENLTLPTWEEVTERKYDDWEEEHIIVDTANKTIEECTKELIEKINMLSQEN

SEQ ID NO: 66039 - DNA, 315 bp, Unknown
  Obtained from environmental sample
  misc_feature (1)..(315): n is a, c, g, or t
ttgaaaaacgttaagggagatactatgaaagtcatctataagatcatctatcctaatgggaaaatttacgttggcaaagattctaccggagatattctgcgatacttcggcagtcctgaccgtgaataccttgaaaaagattttgttctggaagaaatgaaagatataatcatacgaaaagaaattctcttttccagtaaagatatatccgattctgaattgggaaaaaaggaaaccgaatttattataaaatgcggttccaataatccaacgaaggggtataatattttgccaaaatttgagggtagcgcatag

SEQ ID NO: 66040 - protein, 104 aa, Unknown
  Obtained from environmental sample
  misc_feature (1)..(104): Xaa is any amino acid
MKNVKGDTMKVIYKIIYPNGKIYVGKDSTGDILRYFGSPDREYLEKDFVLEEMKDIIIRKEILFSSKDISDSELGKKETEFIIKCGSNNPTKGYNILPKFEGSA

SEQ ID NO: 66041 - DNA, 921 bp, Unknown
  Obtained from environmental sample
  misc_feature (1)..(921): n is a, c, g, or t
atggctgatgaacagctggatgtcatcaggcttgatgtcgcgcaaaatatcaaagaactctttccgtataatatgttcagcgtccttaccggcgagggcgtgtacctgttccctgtatacgtgttcgcttttttctttggcatggggctttcttacgataaaagctacagcaagccgattatttccattaccgactccctttcgcggattttcctgcatatctcgtcgtttattattgagattctcggttttataatgattgtgctttcagcttattggatgattcgttttaagggcgttttgcaggcgggcattttctttgatttgatatgtttgctgtggattatcgctattgtactgggttttggaatccttccgctgtttctctattttataaggccgaaggtaaatccctgggcggttctgtacggctcgctggggccggcaatagcggccttcttttccggcgatattaattttacgctgccggtactgatacagcataccaaagagaatttcggcgtcaggcggagaagcaatgtcgtcagcatggcgctgttcagttctttttgccgggccggaagcgcgatggtggccgccgtcgcctttatttttattttcaaatcctactccagactggggataagcttttccgagatcatgtcgataggcgtccgcgcgtttctcatttcgttcctgcttgcccgccatcccggcgacggggcatatatggcccttaccgtgctttgtatcggctatggccagggatttgaggccggatgcctaatcctgaagccgatggccttcttccttatcgccgtgggcactttccttgacgtgatgatcgcctcattttccgcctatgccatagcgcggcttaacggctatatagaagaaaagaaaatgaagcattttgtataa

SEQ ID NO: 66042 - protein, 306 aa, Unknown
  Obtained from environmental sample
  misc_feature (1)..(306): Xaa is any amino acid
MADEQLDVIRLDVAQNIKELFPYNMFSVLTGEGVYLFPVYVFAFFFGMGLSYDKSYSKPIISITDSLSRIFLHISSFIIEILGFIMIVLSAYWMIRFKGVLQAGIFFDLICLLWIIAIVLGFGILPLFLYFIRPKVNPWAVLYGSLGPAIAAFFSGDINFTLPVLIQHTKENFGVRRRSNVVSMALFSSFCRAGSAMVAAVAFIFIFKSYSRLGISFSEIMSIGVRAFLISFLLARHPGDGAYMALTVLCIGYGQGFEAGCLILKPMAFFLIAVGTFLDVMIASFSAYAIARLNGYIEEKKMKHFV

SEQ ID NO: 66043 - DNA, 2724 bp, Unknown
  Obtained from environmental sample
  misc_feature (1)..(2724): n is a, c, g, or t
atgactccgaaaaatcaagtgccagaatcgttccatcctgtcatacggtcatggtttaatgagacctacgggaagccgacggcggtacaggcagaggcatggcccctcattgagaaaggcgggcatgtgctggcattggctcctaccggcagcgggaaaacccttacggcgtttctgtcggcaatttcccgtttctgctcgaacagtaaacagtacccggctgataagcttactgtgttatatgtttccccgctcaaggctctgaacgaggatatacggaggaacctgcttaaaccgttggaagcaattcgtttacgctttgagcaggcggggcttcaattccctgatataagggtggagacccgctccggagacacaccacaatcgcagcgccgccgtttctatttgcatccgccctcaattctggcgcttaccccggaaagcctggctattcttctgttgaatccgcaaggaagacaggcgctttctaatgtgaagtatctcattctcgatgaaatccacgccgtgctggggaacaagcggggcgcgtttctctcctgtcagatcgacaggctttcgcttattgctggagagtttcagcgtataagtctttccgccacaatccgttcgccggaaatcgccgcaggtttcgtcgctggtattgacgggaatggtctggggcgtaaaattaatattgtcgcgccggcggctgaaaagaaaatagaacttactctatcatttaatgatagagaggataatatcgggctggttgataaatacggaagacgctatacaagcattattaactatattttgaatcgaatctccgaatgttctaccattcttgtgtttacagaatcccgacgccgcgcggaacggctctgttatttcatcaaccaggaagcggcgcttcatgaagcggcgcttcaaaaagcgggcgtcagcggcgctgtcgcctttactcatcacggctcgctttcaaaagaactgcggcaaagcgtggagaagcggcttgcggcgggaaacctgccctgcgtggttgccaccgcatcgctggaactgggcatagacataggcagcgttgacgaggtgatactggcgggaagcccgggctccgtgtcccaggctttgcagcgcatcgggagatcgggccatggcgtgggaatgattagccggggctttctttttccctttcacggaatggacctgctgcttgccacagcccttaaaggcgccgttgaggatcgggacatcgaagaaatacgccccatcgaaaatccactggatattctcgcccagatgatccttgccctttgcatcgaaaaaaaacggaacattgacgagctttataaactgttaaaaggattctacatattcagaaacctcaaccgagaggcgtatttgcggacagtgcgcatgctcgccggattatcgactaacggggatggaaaaatcaggctgagggatgtaaagccccgtatatggctggacaatatcgcgggcgaaatcggcgctcttgacgggagcctgctcctgctgtattcatccggcggggttattgccaaccgggggctttattcactgaggcttgccgacggaacaaaaatcggggaactggacgaggaatttgtctgggaacgccgccttggggatcgcttccattttggcgggcgtggctggaggatcaccgccatagaggcggagtccgtgcaggccgcgcctctggaaacttcgtcagattttatgccgttctggaaagcggacactgtttttcgcagtccccggcttacggaacgggtgctggcaatccttgacaactataacggggtttcaacccctaccccgccggcgccggaggccgaggctcttgccgcttttctcgattcccaacgaaacgcgcagggcggcctacctttaagcggcagcaatcgcataacgatagagatcatcaataaccctgaaaatcgtggggatttgtacgcggtggtgatgcacagcttcaggggcggcgcggtaaattatccgcttgtgctggccctggcccaggaactggaagaaacgctgaaactcagggtggaatcgttttccaatgacgattcgcttctcctgttaataccccggctgggcatcgaaggaaatataaaacagattgaaaatatttttcgcaatgctgttacagaacttaacaaaagcggcgggggcggcctttgccggggagagaggctgttcagaaaccggatggaagcctccggcgttttcggggcgagcttccgcgaggctgcggaaaggagcctccttctgcctaaagcgggttttgggaaacgcaccccgctgtggatcacaaggcagcgttccaggcggctttttgacgcggtacgcggcgaaaccggttttccggttaccgccgaagcgtggcgcagctgcctggtcgatttattcgacatggaaggtttccgcgaactgttaggctcaattaatgacaatagtgttgtcatatctttcttttacagcagtatccccagccccttttcgcgtgacatggtacgccaggaaaccaataccctgatgtatgaatacgacgagcgaaaagatatacagggtattggctcaactctttccgacaaggttattcaagaagccctgggtgacgcttcccttcgtcctgttataaaacctgaattgtccgatgctttagcgcaaggcctcggccgatctgatcattga

SEQ ID NO: 66044 - protein, 907 aa, Unknown
  Obtained from environmental sample
  DOMAIN (23)...(210): Type III restriction enzyme, res subunit
  misc_feature (1)..(907): Xaa is any amino acid
MTPKNQVPESFHPVIRSWFNETYGKPTAVQAEAWPLIEKGGHVLALAPTGSGKTLTAFLSAISRFCSNSKQYPADKLTVLYVSPLKALNEDIRRNLLKPLEAIRLRFEQAGLQFPDIRVETRSGDTPQSQRRRFYLHPPSILALTPESLAILLLNPQGRQALSNVKYLILDEIHAVLGNKRGAFLSCQIDRLSLIAGEFQRISLSATIRSPEIAAGFVAGIDGNGLGRKINIVAPAAEKKIELTLSFNDREDNIGLVDKYGRRYTSIINYILNRISECSTILVFTESRRRAERLCYFINQEAALHEAALQKAGVSGAVAFTHHGSLSKELRQSVEKRLAAGNLPCVVATASLELGIDIGSVDEVILAGSPGSVSQALQRIGRSGHGVGMISRGFLFPFHGMDLLLATALKGAVEDRDIEEIRPIENPLDILAQMILALCIEKKRNIDELYKLLKGFYIFRNLNREAYLRTVRMLAGLSTNGDGKIRLRDVKPRIWLDNIAGEIGALDGSLLLLYSSGGVIANRGLYSLRLADGTKIGELDEEFVWERRLGDRFHFGGRGWRITAIEAESVQAAPLETSSDFMPFWKADTVFRSPRLTERVLAILDNYNGVSTPTPPAPEAEALAAFLDSQRNAQGGLPLSGSNRITIEIINNPENRGDLYAVVMHSFRGGAVNYPLVLALAQELEETLKLRVESFSNDDSLLLLIPRLGIEGNIKQIENIFRNAVTELNKSGGGGLCRGERLFRNRMEASGVFGASFREAAERSLLLPKAGFGKRTPLWITRQRSRRLFDAVRGETGFPVTAEAWRSCLVDLFDMEGFRELLGSINDNSVVISFFYSSIPSPFSRDMVRQETNTLMYEYDERKDIQGIGSTLSDKVIQEALGDASLRPVIKPELSDALAQGLGRSDH

SEQ ID NO: 66045 - DNA, 1068 bp, Unknown
  Obtained from environmental sample
  misc_feature (1)..(1068): n is a, c, g, or t
ttgcgggactgggtaaggcggcacaatatcagggacttttttgacattggacgcaacggtgtctgtcacgcgattttccccgaaaagggatttgtacgccccggctttactattatcatgggtgacagtcacacctgtacccacggggcattcggcgcttttgccgccggtgtcggaaccaccgatcttgaggtagggatactgaaaggcgtctgcgccttcgggaagccggaaaccttgcggatcaatttgcttggtgaactgccgtcaggcgtttttccaaaagacgtaatcctcgccatcatcgccaaaataagcgtttcaggcgcttcgggaaaagttatggaactgcgcgggcctgtaatttcctctatgagcatggaaggcagaatgacgatctgcaacatggcggtagaggcaggggcaaccagcggcgtatgtatgccggacataaccaccgtaaattatctgtggccgtttattgggccggacggtgataaaacttattcaagcaaagaagaagctcttaaagatttttccaggtggacaagcgatgacgacgccgagtattccgccgttgtcgatattgactgttcaaaactggagcctcttgccactgtcggctacaagccggatgaagtaaaaactgtgcgggaacttgcgggaacaaaagttgaccaagtgtacatcggctcctgtaccaacggcagaatcgaagacctgcgcgccgccgccgatgtgttgcgaggcaaaaaaatcgccgatactgtccgcgcaatcatagcgccggctaccacggacatttacgcgcaggcgctcaaggaagggctgatacagaccttccttgactctggctgctgtgtaacaaacgccacttgcggcgcgtgccttgggatgtccaacggcgtgcttgccgagggagaggtttgcgcttccaccactaaccgcaatttttacggacgcatgggaaaaggcggcatggttcacctcatgagtcccgcgtcggctgcggcagcggctgtcgccggcgcaattgccgtgccaggcagtaccgggaggcagtcatga

SEQ ID NO: 66046 - protein, 355 aa, Unknown
  Obtained from environmental sample
  DOMAIN (1)...(343): Aconitase family (aconitate hydratase)
  misc_feature (1)..(355): Xaa is any amino acid
MRDWVRRHNIRDFFDIGRNGVCHAIFPEKGFVRPGFTIIMGDSHTCTHGAFGAFAAGVGTTDLEVGILKGVCAFGKPETLRINLLGELPSGVFPKDVILAIIAKISVSGASGKVMELRGPVISSMSMEGRMTICNMAVEAGATSGVCMPDITTVNYLWPFIGPDGDKTYSSKEEALKDFSRWTSDDDAEYSAVVDIDCSKLEPLATVGYKPDEVKTVRELAGTKVDQVYIGSCTNGRIEDLRAAADVLRGKKIADTVRAIIAPATTDIYAQALKEGLIQTFLDSGCCVTNATCGACLGMSNGVLAEGEVCASTTNRNFYGRMGKGGMVHLMSPASAAAAAVAGAIAVPGSTGRQS

SEQ ID NO: 66047 - DNA, 525 bp, Unknown
  Obtained from environmental sample
  misc_feature (1)..(525): n is a, c, g, or t
atgaaaatatttggcggagaagttttatttcttgatcgaaacgatattaatactgatgaaattataccggcgaaatatttaaccgaggacacaagaatagcgttaaaaccccatcttcttgaagacttaaaattaaaagactttagtccaacaaaagatattgccggaaagggagcggtgctggcgcgggcaaactttggctgcggttcatcgcgtgaacacgctccgtgggcgcttgaagtgaacggcatcaacattgtcatcgcggaaagttttgcccgtatcttcaggcaaaatatgtacaactgcggcatgatcgcctgcgaacttcccgccgccgctctggaagaactgttcaaggaattcgccaatgtcaaaacaacattgacggttgataaagacaagggcaatttgatttttaggacgaacggaaaagaaaaaacattttctttcacccttaaaaattttgaaaaagctttagtggacgcgggcggctgggtcgagtacgctgcaaaacattattag

SEQ ID NO: 66048 - protein, 174 aa, Unknown
  Obtained from environmental sample
  DOMAIN (1)...(113): Aconitase C-terminal domain
  misc_feature (1)..(174): Xaa is any amino acid
MKIFGGEVLFLDRNDINTDEIIPAKYLTEDTRIALKPHLLEDLKLKDFSPTKDIAGKGAVLARANFGCGSSREHAPWALEVNGINIVIAESFARIFRQNMYNCGMIACELPAAALEELFKEFANVKTTLTVDKDKGNLIFRTNGKEKTFSFTLKNFEKALVDAGGWVEYAAKHY

SEQ ID NO: 66049 - DNA, 1536 bp, Unknown
  Obtained from environmental sample
  misc_feature (1)..(1536): n is a, c, g, or t
atggcagataaaggaaaacggcaaataaaagttttcgacactacgctcagggacggcgagcaggctcccggctgcagtatgaatctgaccgaaaagcttgaagtcgcaaggcgtcttgaaaaacttggagtggatattattgaagccggctttccaatctcaagccccggcgatcttgaatccgtaaaagcaatcgccggtatcattaccaactgctctgtggcgggactttgccgcagccgcgatatcgatattgacgcggcgaaagaagcgctggaaaaagcggcaagcccgcggattcatgtgttcctcgcgacctcgcccgtacacatggagttcaaactcaagatgacgcctgagcaggtgctggaacaggcggtttcctccgtaaagtacgcaaaaaaattctgcagcgacgttgagttttccgcggaggacgctttccggagcgatccggattttgtctgcaaagttttcggcgcggtaattgaagccggagcgcttacggtgaatttccccgacacggtcggctacgcaatgccagccgaattcggcgagcgcgtccgctatataaaagaacatactccgcgcatggaaaaggcggttctgtctgtgcattgccacaacgacttgggcctggcagtggcgaacagtatcgcggccatcgtaaacggcgcagatcaggttgaatgtacgattaacggaatcggcgagagggcgggaaacgcgtctttggaagaagtggtcatgggtctgcgcgttcgcggcgactttttttccgccgacacaaaaatcgacagtacgcagatatatgcggcaagccgccttgtgtctcaggtgaccggggtgaaggttcagccgaataaggccatcgtcggcgacaacgctttcgcgcatgaagcgggaatccaccagcacggagtattggcgaaaagggaaacttacgagatcatgactccgcagtcaatcggcattccgcaaaaccgcatggtactaggcaaacattcgggccgccacgcttttgaagagcgtcttaaagatttgggcttgagtgttgatccgtcgggcctggaaaaagtatttgccgactttaaggaacttgccgacaagaaaaaaatagtcagcgaccgtgacattgaagcccttgtaatggacaggacggtctcggttcccgaaacatggaagctggatcattgggcggtaaacacaggctccgctttgggcgcggcgggcgtaatccgtttaaagcacaaagacggcaaagataaaaaattggtctgcatgggcgacggccccatcgactcgatattcaaagcgatcaacgagattgtaggtaaagagccggagttggagctttatgaaatcggcgccgttacgggcggctcttcttcgcagggcgaagcgatggtaaaaatcgtgatggacgggcggcgctggaacggacgcggtgtttccaccgatgtaattgaagcttcgataatggcttacctttcggcgattaacgcgatggaatgggatttaacaaataacaaatag

SEQ ID NO: 66050 - protein, 511 aa, Unknown
  Obtained from environmental sample
  DOMAIN (373)...(504): LeuA allosteric (dimerisation) domain
  misc_feature (1)..(511): Xaa is any amino acid
MADKGKRQIKVFDTTLRDGEQAPGCSMNLTEKLEVARRLEKLGVDIIEAGFPISSPGDLESVKAIAGIITNCSVAGLCRSRDIDIDAAKEALEKAASPRIHVFLATSPVHMEFKLKMTPEQVLEQAVSSVKYAKKFCSDVEFSAEDAFRSDPDFVCKVFGAVIEAGALTVNFPDTVGYAMPAEFGERVRYIKEHTPRMEKAVLSVHCHNDLGLAVANSIAAIVNGADQVECTINGIGERAGNASLEEVVMGLRVRGDFFSADTKIDSTQIYAASRLVSQVTGVKVQPNKAIVGDNAFAHEAGIHQHGVLAKRETYEIMTPQSIGIPQNRMVLGKHSGRHAFEERLKDLGLSVDPSGLEKVFADFKELADKKKIVSDRDIEALVMDRTVSVPETWKLDHWAVNTGSALGAAGVIRLKHKDGKDKKLVCMGDGPIDSIFKAINEIVGKEPELELYEIGAVTGGSSSQGEAMVKIVMDGRRWNGRGVSTDVIEASIMAYLSAINAMEWDLTNNK

SEQ ID NO: 66051 - DNA, 441 bp, Unknown
  Obtained from environmental sample
  misc_feature (1)..(441): n is a, c, g, or t
atgttagacgcaataaaatccataggcggctctgatatgttcggcgacggcacggattcccttctgcttgcggcgggcttaaacgaaattcagttgcttggaaaggcccttggcgcgactcatccggaaacattcacatccatcgcgggaatcggcgatttggacgtaacatgccgctcaatttacggcagaaacaggcgtttcggcagggaaataatcgaaaaaaatattttggaaccgtacaaagatttagacgatcttttggcgcgcataggggaaataagctatcttccggaaggcgtagcggcggcaaaatatgtcagggttctcgcggaaaagcataaacttaaaatgcctgtttccataggattaagccggatattaaaccgcgaacttgatccttatgaatttgtaaaagatttctttgaagacttgaggtaa

SEQ ID NO: 66052 - protein, 146 aa, Unknown
  Obtained from environmental sample
  DOMAIN (11)...(141): NAD-dependent glycerol-3-phosphate dehydrogenase C-terminus
  misc_feature (1)..(146): Xaa is any amino acid
MLDAIKSIGGSDMFGDGTDSLLLAAGLNEIQLLGKALGATHPETFTSIAGIGDLDVTCRSIYGRNRRFGREIIEKNILEPYKDLDDLLARIGEISYLPEGVAAAKYVRVLAEKHKLKMPVSIGLSRILNRELDPYEFVKDFFEDLR

SEQ ID NO: 66053 - DNA, 1344 bp, Unknown
  Obtained from environmental sample
  misc_feature (1)..(1344): n is a, c, g, or t
atgtttgaaaaattatctgaaaaaataacagacgcgtttcgttttgttactggcaaatcctcaatctcggaaaaaaacattgaagacgcggtagaaacgataaagatggctcttcttgaggcggacgtaaacctgcgcgtcgttcgccgctttgtcaactccaccattgaggaagcaaaaggcgaaaaggtactgcgctcggttgatcccggccagcagtttgtaaaaatagtccatgataaacttgtttcctttcttggagacgcggatccctcaagccgcgccttaaaactccggggcccggatgtaatttctaccgtgctgatgctgggcttgcagggctcgggtaaaaccaccagttccgccaagctggccctgcgccttaaaaaagaaggccgtaagcccttgttggtcgcctgcgacctgatacgccccgcggcaatagaacagcttgccgtgcttggcgctcagatcggcgtgccggttcaccgcgaggacggggcgacggacagcgccgtggtttacaggaacgctctggcctgggcaaagcagaacctgattgacaccctgattattgataccacgggacgcctgcagatcgacgaagacatgatggcggaactttcccgtctgaaagaagctgtacgacccgatgaaatgctcctggtcgccgactcgatgaccggccagtctgccgttgacatcgcaaaaacctttgatgaaaaaatcggcctgacgggcgttattctgaccaagttcgattcggatacgcggggcggggcggcgctttcccttaaaaccatcaccggcaagccccttaaatttacgggaaccggagaaaagcccgaaaattttgagcctttccaccccgagcgcatggcgggacgcatcctgggcatgggcgatgttgtaagcctggtggaaaaggcccaggaggtaattgaccaggaagaggccctggaactccagaaaaaaatggagaaagatacctttacccttgaggactggcttatgcagcttcgttcggtaaagaaaatgggctccctgcagtcaatgctggaaatgatccccggaatgcagggacagataaacgaggacgacattgacaaggcgaatctgaagcgtcaggaggctatcatctcatccatgacccgcaaggagcgctccaaccatctgatcataggccccccgcgccgaagcagaatagccaaaggttccggaacctcggtagcggaagtcgcccgccttattaaacagttcgagaagatgcgcgtcatgatgaaaaaaatggctaaaatgggaaaaaacccggcacagctgcagaaattaggaattaggagttag

SEQ ID NO: 66054 - protein, 447 aa, Unknown
  Obtained from environmental sample
  DOMAIN (1)...(87): SRP54-type protein, helical bundle domain
  misc_feature (1)..(447): Xaa is any amino acid
MFEKLSEKITDAFRFVTGKSSISEKNIEDAVETIKMALLEADVNLRVVRRFVNSTIEEAKGEKVLRSVDPGQQFVKIVHDKLVSFLGDADPSSRALKLRGPDVISTVLMLGLQGSGKTTSSAKLALRLKKEGRKPLLVACDLIRPAAIEQLAVLGAQIGVPVHREDGATDSAVVYRNALAWAKQNLIDTLIIDTTGRLQIDEDMMAELSRLKEAVRPDEMLLVADSMTGQSAVDIAKTFDEKIGLTGVILTKFDSDTRGGAALSLKTITGKPLKFTGTGEKPENFEPFHPERMAGRILGMGDVVSLVEKAQEVIDQEEALELQKKMEKDTFTLEDWLMQLRSVKKMGSLQSMLEMIPGMQGQINEDDIDKANLKRQEAIISSMTRKERSNHLIIGPPRRSRIAKGSGTSVAEVARLIKQFEKMRVMMKKMAKMGKNPAQLQKLGIRS

SEQ ID NO: 66055 - DNA, 588 bp, Unknown
  Obtained from environmental sample
  misc_feature (1)..(588): n is a, c, g, or t
ttgtcaatgtcgtcctcgtttatctgtccctgcattccggggatcatttccagcattgactgcagggagcccattttctttaccgaacgaagctgcataagccagtcctcaagggtaaaggtatctttctccatttttttctggagttccagggcctcttcctggtcaattacctcctgggccttttccaccaggcttacaacatcgcccatgcccaggatgcgtcccgccatgcgctcggggtggaaaggctcaaaattttcgggcttttctccggttcccgtaaatttaaggggcttgccggtgatggttttaagggaaagcgccgccccgccccgcgtatccgaatcgaacttggtcagaataacgcccgtcaggccgattttttcatcaaaggtttttgcgatgtcaacggcagactggccggtcatcgagtcggcgaccaggagcatttcatcgggtcgtacagcttctttcagacgggaaagttccgccatcatgtcttcgtcgatctgcaggcgtcccgtggtatcaataatcagggtgtcaatcaggttctgctttgcccaggccagagcgttcctgtaa

SEQ ID NO: 66056 - protein, 195 aa, Unknown
  Obtained from environmental sample
  misc_feature (1)..(195): Xaa is any amino acid
MSMSSSFICPCIPGIISSIDCREPIFFTERSCISQSSRVKVSFSIFFWSSRASSWSITSWAFSTRLTTSPMPRMRPAMRSGWKGSKFSGFSPVPVNLRGLPVMVLRESAAPPRVSESNLVRITPVRPIFSSKVFAMSTADWPVIESATRSISSGRTASFRRESSAIMSSSICRRPVVSIIRVSIRFCFAQARAFL

SEQ ID NO: 66057 - DNA, 1212 bp, Unknown
  Obtained from environmental sample
  misc_feature (1)..(1212): n is a, c, g, or t
atggaaggccaatcccagcttggtgttgttaaatacaaaaaagacacatatattattgtagaaggcaaacagaatgccgactgtttctttatcatccagcagggaacggtgagaattaccaaagaggcgacggtggaaggcgagggcgacgagacgcttggtcccggagacttcttcggcgttatttcaacaatgtcgtctcacagccatattgaaacagcccaggccatgactgatgttgtcatgatctctgtccgccagaatcagtatgtggggcttatccagaagaacagcaaggtagccataaaaataatcttgcaattttccaagcgcctcaggtatctgaacgaaaccctcgcgaggcttaccctgaaaaacaccgccgatgaaggcccttcccatctttatgacgtggcggaatactacctgggtcaaaaacagtataaccaggccggacacgcctatgcccaatacatcaagcactgccccaacggggaaaaagcggcttctgccaaagataagctgacgaggctgggaagccgcgtcaatcttattaaattcgccgcaagtgacgtaaaccggacttaccgcaaggatacgatgctctttgccgaaagggagccgggagacgagcttttcatcattcagaaaggctccataaaaaatacaaaaattgttgacaataaagaagtgctttnggcgatgttgaatcccggggatatgctcggggagatggcgcttttggaaggcaaaccgcgggccgccagcgcggtggcttttgaagactgtgacgtgatggccgtgaacaagacgaactttgaattaatgattaagaaccagccccagctcattgccaaaatcaccaccctcctcgcggatcggctctggctcatctacaaacagttggcaaatacaatgattgaaaatccaatgggcagaatgtatgacacgctgcttatccagcttgaaaaaaaccgcattcccctggacggcaaaagctcgtataccttcacctttgggctgcctgaactgattaacatggtcgggcttcccggaaagaagggcaatgcggtttttagcgaaatgatggaaaacaaggaacttcagataataggcaacaaaatccgcactacatctacggaagaaatccttaaacaggcggaatctttccgcaagatggacaaaatagaaaaagcccgcactaactcctaa

SEQ ID NO: 66058 - protein, 403 aa, Unknown
  Obtained from environmental sample
  DOMAIN (9)...(99): Cyclic nucleotide-binding domain
  misc_feature (1)..(403): Xaa is any amino acid
MEGQSQLGVVKYKKDTYIIVEGKQNADCFFIIQQGTVRITKEATVEGEGDETLGPGDFFGVISTMSSHSHIETAQAMTDVVMISVRQNQYVGLIQKNSKVAIKIILQFSKRLRYLNETLARLTLKNTADEGPSHLYDVAEYYLGQKQYNQAGHAYAQYIKHCPNGEKAASAKDKLTRLGSRVNLIKFAASDVNRTYRKDTMLFAEREPGDELFIIQKGSIKNTKIVDNKEVLXAMLNPGDMLGEMALLEGKPRAASAVAFEDCDVMAVNKTNFELMIKNQPQLIAKITTLLADRLWLIYKQLANTMIENPMGRMYDTLLIQLEKNRIPLDGKSSYTFTFGLPELINMVGLPGKKGNAVFSEMMENKELQIIGNKIRTTSTEEILKQAESFRKMDKIEKARTNS

SEQ ID NO: 66059 - DNA, 660 bp, Unknown
  Obtained from environmental sample
  misc_feature (1)..(660): n is a, c, g, or t
atggatcttggtgttttttcccgttttacacgggtattccagagcgatgaaataatctttagtgaatatgaaccgggagatactttctacgttatccagtccggaagggtgaagctgttgaaatacgacggtgaatccgagcggagcctggatattctgcagccgccggaaatgtttggtgaaatggcgatacttgaaggttcgccgcgcagcgccaccgccattgccgtggacgaagtaaaggtgctggaattcaacgcgcagaactttgagctcctcatgaccggaaacccgcagatcggcattaatctgttgaagattttcgcaaagaggattttcgattcaaaacggcgttacatgatccttaccctgcccaacccccaggtgaagatcgcagacgtgtttcttatgcttgatgaaaccatgccggacattaacagaaaaaccgacgcccgtgaatttcagactaccattgaagacgtggcgcattgggccggagtgagcgtctcggaggcaagagaaatactccacacctttgttgtgcagaaccgcctggagatgtattctacccgaatggttgttaaaaatattaatgattttgcccgtattgtcaccgcgcggcgtaaacaggcaaagaacccgaccggaataaaaacctga

SEQ ID NO: 66060 - protein, 219 aa, Unknown
  Obtained from environmental sample
  DOMAIN (10)...(99): Cyclic nucleotide-binding domain
  misc_feature (1)..(219): Xaa is any amino acid
MDLGVFSRFTRVFQSDEIIFSEYEPGDTFYVIQSGRVKLLKYDGESERSLDILQPPEMFGEMAILEGSPRSATAIAVDEVKVLEFNAQNFELLMTGNPQIGINLLKIFAKRIFDSKRRYMILTLPNPQVKIADVFLMLDETMPDINRKTDAREFQTTIEDVAHWAGVSVSEAREILHTFVVQNRLEMYSTRMVVKNINDFARIVTARRKQAKNPTGIKT

SEQ ID NO: 66061 - DNA, 471 bp, Unknown
  Obtained from environmental sample
  misc_feature (1)..(471): n is a, c, g, or t
atggccggtgttctggggtatacctttatggaaaccttgcggctttcgggggtaaaaattccggtggtttcaacgcttaccgcaatggcttcccgcccaagagatatgggggtttttgtacttggccctgtaaccctggggcttggcgctcttttgaccctgcttttgttcccctctccggcggcctgtatcggcatttacgcacttgccttcggcgacgggttcgccgggcttattggaaaactgtttggcaggattcgtcccgcgtttcttttcggcaaaagcctggaaggttcagccgcctgttttgccgcgacgtttgtctccgcttttttggtttcgcatagccccgtcgtttctgcagtggctgccattaccgcgatggcggtggaagccctgcccctggaagattatgacaacatctccctgcccctgattgtagctgttgttgtccagcanattaagttttaa

SEQ ID NO: 66062 - protein, 156 aa, Unknown
  Obtained from environmental sample
  DOMAIN (10)...(153): Cytidylyltransferase family
  misc_feature (1)..(156): Xaa is any amino acid
MAGVLGYTFMETLRLSGVKIPVVSTLTAMASRPRDMGVFVLGPVTLGLGALLTLLLFPSPAACIGIYALAFGDGFAGLIGKLFGRIRPAFLFGKSLEGSAACFAATFVSAFLVSHSPVVSAVAAITAMAVEALPLEDYDNISLPLIVAVVVQXIKF

SEQ ID NO: 66063 - DNA, 1035 bp, Unknown
  Obtained from environmental sample
  misc_feature (1)..(1035): n is a, c, g, or t
gtgaacctgttttatgcaacgtttattccgggtttacagaacttaattgcgcagacagtaaaaaagcgtcttactgatgtaaagatttacaaacttcttgacggcgctgttttatttgaaacggaaaccggttacgataaacttaattttttttgttttaacaatatatttgcggtaataagcgtaatggaacacggagataacaatgttaagccgaagaccgcgctggaaaagcacataaaattaacgcttgataataaaactgtcaatgaagttatatgcaacaataacaaaaaaatacacactttcagaattgtcgcttccgccgaaaacattccggcggcgattgatgaaaaaatcagagcggacgcggaaagttatatttcccggttttcaggattgaaagttaacagaaccttgccggatacggaattctggtttttattcagaaacgaaaagaaccaagataatttttcggtttttatgaaacgccttacgcttcgcccttcatgggaaaaaacgctccacaaaggggaactgccgccgcctctcgcgtggacattgtgccgccttgcgcgtcttgtccacagcgataccgttatggatccgttttgcggttacggctcgattcccgacgcggcgttaaaacattttcatataaaaaagctcattgcctgtgacaataacagggaagccgccttgtacacaaaggcaagatttcacaagcgcaaaaaagaagattttgttttttacgaaagcgatttttccgcgttgccttcattagtcgccggaaaaagcgttgacgcgattgttacagaccctccgtggggagagtataaggaaatcaataaagacactttctataaagagatgtttggtgtttttcacaaattactaaaagaaggcggaagagttgtcttgttatgcgcgaataatgattccttgaatgaggcgccagagtcttttaaacttgagagcagaactcccatactgctttcaggtaaaaaagcggctgttttggcatttaaaacttaa

SEQ ID NO: 66064 - protein, 344 aa, Unknown
  Obtained from environmental sample
  DOMAIN (169)...(342): Putative RNA methylase family UPF0020
  misc_feature (1)..(344): Xaa is any amino acid
MNLFYATFIPGLQNLIAQTVKKRLTDVKIYKLLDGAVLFETETGYDKLNFFCFNNIFAVISVMEHGDNNVKPKTALEKHIKLTLDNKTVNEVICNNNKKIHTFRIVASAENIPAAIDEKIRADAESYISRFSGLKVNRTLPDTEFWFLFRNEKNQDNFSVFMKRLTLRPSWEKTLHKGELPPPLAWTLCRLARLVHSDTVMDPFCGYGSIPDAALKHFHIKKLIACDNNREAALYTKARFHKRKKEDFVFYESDFSALPSLVAGKSVDAIVTDPPWGEYKEINKDTFYKEMFGVFHKLLKEGGRVVLLCANNDSLNEAPESFKLESRTPILLSGKKAAVLAFKT

SEQ ID NO: 66065 - DNA, 654 bp, Unknown
  Obtained from environmental sample
  misc_feature (1)..(654): n is a, c, g, or t
atgcacaaggaaggagccgctttccgaagcctgctcaacggatttgcaattacagtttcactcggacttcaatacggcgtaccgcttgaagaatatgttgacgcatttaccttcagccgttttgagccgaacggcatggtgcagggccatgattatgtgaaaatggcaaccagcgtaattgattatgtattccgcgatcttgcgatcagttatttaaaacgcagtgatttgggtcaggtgaaacctgaagaccttgtagctaccgcgacaaaaaacgaaattgatatgccggacggaaaacaacgctcggaaaaacaggaaaaacaggcagccggattcagacctcacgcaactgtcgccgcgtctcccgcgccgcagtctttgccgccttcatccggtaaatccgttacaaagggacaggccggtacggcaagcggcgctaaggcatcagtttattcagcgccggcagcgcagcctcaggctgctgtacttgaagaatcctatccggaagaaaatgaagttataaaaatagttcaggcccgtataaaaggttatgagggagacccatgttcttcgtgcggttcgtttacacttgtaagaaacggtacgtgcatgaaatgcgatacatgcggcagtacgacaggctgttcataa

SEQ ID NO: 66066 - protein, 217 aa, Unknown
  Obtained from environmental sample
  misc_feature (1)..(217): Xaa is any amino acid
MHKEGAAFRSLLNGFAITVSLGLQYGVPLEEYVDAFTFSRFEPNGMVQGHDYVKMATSVIDYVFRDLAISYLKRSDLGQVKPEDLVATATKNEIDMPDGKQRSEKQEKQAAGFRPHATVAASPAPQSLPPSSGKSVTKGQAGTASGAKASVYSAPAAQPQAAVLEESYPEENEVIKIVQARIKGYEGDPCSSCGSFTLVRNGTCMKCDTCGSTTGCS

SEQ ID NO: 66067 - DNA, 1719 bp, Unknown
  Obtained from environmental sample
  misc_feature (1)..(1719): n is a, c, g, or t
ttgagacaccgcctgcaacctcgcctcgataacctcgccgtgctgtacgatgcaaaatcgaaaaaattcaacatagacggctacctccgcgccattgaaatctggacgaccattctggaaatttccgtggtgatggcgcagtttccttcgccgcgcattgcggaactttcctaccagtaccgcaccctgggcctcggttacgcgaacctggggacgctgcttatgctgatggggcttgcctacgattccggcgagggccgagcggtggcgggggcgctttccgccctgctttccggcgaggcctatgcccagtctgcccgcatggcggcggcgctggggcctttcccccggtacggcgataatgccgaaagtatgctccgtgttatacgcaaccaccggcgggcggcgtacaacagccccgatgccgaatacgagggcctgcacaccgtcccctgcgggattgacggaacctactgcccggcgtacctgctggacgcggcaaaggcgtcatgggaccgcgcattggaactggggaaggcccacggttaccgcaacgcccaggtcagcgccgttgcccctaccggtaccatcggccttttaatggattgcgataccacgggcgtcgagccggatttttccctggtaaaattcaagaagctcgccggcggcggttatttcaaaataatcaaccagtcggtgccgccggcgcttgaagcgcttggctactcgccccaggcgatagaggaaattgtcacgtatgccaccggcagcaaaacgctttccggggccccggcgataaacccggaaagcctcaaggcaaaaggttttacaaacgaagcccttgccttaatgnaggacgcattaaagactgctctaaatcttgagggagtatttaatccttatgtgcttggcaaatcatttgttgaagaaactcttaacattcccgaatctacatggtctcttcaggggttcagtcttcttaaacacctcggtttcagtacgcaggacattgaagacgcggaattattcgcctgcggtacaatgggtcttgagggcgcacccggccttaaaaaagatcattacgctgtttttgacacggcggctccttccggcaaaaaaggaaaacgctccatatcatggaccgcccatatcggcatgatggcggcggtgcagccttttatctccggagcgatttccaaaactattaacatgcctaactcggcaaattacgacgacgtaaaaggcgcgtatatgctctcatggaaaaacgcccttaaagcagtcgctctttacagggacggttccaaactttcacagccgcttaacaccttcgcccccggaacagatccgctggcggacactatccttaaagttgaaaaagggctggagcttcccgcctcggcgccggataagagaaaatcggcaagcctgcgggggcttcgcaaatccttgcctaaccgcagaatgggatacacccaaaaagcgaaaatcggcgggcattcaattttatcagaaccggcgaatatgaagacggaaatctcggtgaaattttccttgatatgcacaaggaaggagccgctttccgaagcctgctcaacggatttgcaattacagtttcactcggacttcaatacggcgtaccgcttgaagaatatgttgacgcatttaccttcagccgttttgagccgaacggcatggtgcagggccatgattatgtga

SEQ ID NO: 66068 - protein, 572 aa, Unknown
  Obtained from environmental sample
  misc_feature (1)..(572): Xaa is any amino acid
MRHRLQPRLDNLAVLYDAKSKKFNIDGYLRAIEIWTTILEISVVMAQFPSPRIAELSYQYRTLGLGYANLGTLLMLMGLAYDSGEGRAVAGALSALLSGEAYAQSARMAAALGPFPRYGDNAESMLRVIRNHRRAAYNSPDAEYEGLHTVPCGIDGTYCPAYLLDAAKASWDRALELGKAHGYRNAQVSAVAPTGTIGLLMDCDTTGVEPDFSLVKFKKLAGGGYFKIINQSVPPALEALGYSPQAIEEIVTYATGSKTLSGAPAINPESLKAKGFTNEALALMXDALKTALNLEGVFNPYVLGKSFVEETLNIPESTWSLQGFSLLKHLGFSTQDIEDAELFACGTMGLEGAPGLKKDHYAVFDTAAPSGKKGKRSISWTAHIGMMAAVQPFISGAISKTINMPNSANYDDVKGAYMLSWKNALKAVALYRDGSKLSQPLNTFAPGTDPLADTILKVEKGLELPASAPDKRKSASLRGLRKSLPNRRMGYTQKAKIGGHSILSEPANMKTEISVKFSLICTRKEPLSEACSTDLQLQFHSDFNTAYRLKNMLTHLPSAVLSRTAWCRAMIM

SEQ ID NO: 66069 - DNA, 423 bp, Unknown
  Obtained from environmental sample
  misc_feature (1)..(423): n is a, c, g, or t
atgccatcattatttaatttcgaggtccatacgccccgcaggattttttattcgggcaaggtgcaggcgatcatcatcagccttgaggacggcgaaatcggcatatacccgaaccactccccctttaccgcgcattccgttacaggcacgctgcgcattaaagacgacaggggcggatggcgcaacgcgtttgtctgcggcggtattctgggagtgaaagagcataaaaacgtgcttatggtagaaagcgccgactggcctgaagaaattgacgttgagcgcgtccttcagattaaaaagcaagccgaggaagtactgatgaattcacaattaaaatttgagattgacaaggctaaaaagagacttcaccacgccgaatgcaggttgaaagtcaaagaagccgaaggaaggttaacacgatga

SEQ ID NO: 66070 - protein, 140 aa, Unknown
  Obtained from environmental sample
  DOMAIN (4)...(89): ATP synthase, Delta/Epsilon chain, beta-sandwich domain
  misc_feature (1)..(140): Xaa is any amino acid
MPSLFNFEVHTPRRIFYSGKVQAIIISLEDGEIGIYPNHSPFTAHSVTGTLRIKDDRGGWRNAFVCGGILGVKEHKNVLMVESADWPEEIDVERVLQIKKQAEEVLMNSQLKFEIDKAKKRLHHAECRLKVKEAEGRLTR

SEQ ID NO: 66071 - DNA, 1413 bp, Unknown
  Obtained from environmental sample
  misc_feature (1)..(1413): n is a, c, g, or t
ttgggaatgagtaatacaggatgtaatacaggttatattactcagataatcgggcctgttgtggacgtgcgttttgaaccggggcggatcccgcttattctgaacgccctgaaagtgaaaacaggcgacgccgggtttaaccgcgtcgttactcttgaagttcttcagcatataggcgacaaccgcgtgcgctgcgtggcgatgtcggccgccgaaggcttgtcacggggcctcaaggttgaggatacgggcaagcccatcagcgtgcccgtcggcaaggaagtgctgggtcgcatgttcagcgtaacgggcgaccccattgacgacaagggggcgttcagcgcggcccagtacgattcgatacaccgcggcgcgccgccatttaacgaacagcgtcccgcgaccgccctgcttgaaaccggaataaaagtaattgacctaatcgcgccctacgcgaagggcggaaaaatcggcctgttcggcggcgccggcgtggggaaaacggtcgttattatggaacttatccgcaacatagctaccgaacactcaggctactcggtgtttgccggagtcggcgagcgttcgcgcgaaggggccgacctctggaaagaaatgacggagagcggcgttatcgacaaaaccgccctggttttcggccagatgaacgagcctcccggggcgcgtatgagggtggcgctcgcgggccttaccatggcggagcatttccgcgatcaggacaggcaggacgtgcttctctttgttgacaatattttccggttcattcaggctggcgcggaagtctcggcgcttctcgggcgcatacccagcgcggtcggttaccagccgactctcgccaacgagatgggcagccttcaggagcgtatcgccagcacctcaaaaggctcgattaccagcattcaggcggtttatgtgcctgccgacgaccttaccgatcccgcgcccgcgacaaccttcgcgcaccttgacgccaccaccacgctttcgcgcaaaatcgtagagttgggaatatacccctcagttgacccgctcgcctcaagctcacgcatccttgacgcggctattgtaggcgacgatcactacaacaccgcccgccgcgcccagcagattttacagcgttacaaggaactgcaggacataatcgccattctgggcatggacgaactctccgaggaggacaagctgaccgtctcccgagccaggaagatccagcgtttcttcagccagcccttctttgtcggggaaaaatttaccggcattcccggcaaatatgtgggagttaaggataccgtgcgaggttttaaaatgatacttgacggcgaatgtgacgcgataccggagcagtccttttacatggccggcagtattgacgacgtactggagaaggcgaaataa

SEQ ID NO: 66072 - protein, 470 aa, Unknown
  Obtained from environmental sample
  DOMAIN (13)...(84): ATP synthase alpha/beta family, beta-barrel domain
  misc_feature (1)..(470): Xaa is any amino acid
MGMSNTGCNTGYITQIIGPVVDVRFEPGRIPLILNALKVKTGDAGFNRVVTLEVLQHIGDNRVRCVAMSAAEGLSRGLKVEDTGKPISVPVGKEVLGRMFSVTGDPIDDKGAFSAAQYDSIHRGAPPFNEQRPATALLETGIKVIDLIAPYAKGGKIGLFGGAGVGKTVVIMELIRNIATEHSGYSVFAGVGERSREGADLWKEMTESGVIDKTALVFGQMNEPPGARMRVALAGLTMAEHFRDQDRQDVLLFVDNIFRFIQAGAEVSALLGRIPSAVGYQPTLANEMGSLQERIASTSKGSITSIQAVYVPADDLTDPAPATTFAHLDATTTLSRKIVELGIYPSVDPLASSSRILDAAIVGDDHYNTARRAQQILQRYKELQDIIAILGMDELSEEDKLTVSRARKIQRFFSQPFFVGEKFTGIPGKYVGVKDTVRGFKMILDGECDAIPEQSFYMAGSIDDVLEKAK

SEQ ID NO: 66073 - DNA, 363 bp, Unknown
  Obtained from environmental sample
  misc_feature (1)..(363): n is a, c, g, or t
atggtaaaactcctgccgaccgtacatcagataattccccttgtaaaggaaaaaatccaggatgacctttttgaaatcggcggcgaaaaaagggtggatttaaaatttgaatttctgccctcattgggggcggtttttgacacgcttgttccccagtatataaagggcgtaatttacggcgcgatggtggaagcgcacgccagcgaacaaagctcccgcatgagggcgatggacgaggcttccaaaagcgcggaagacatgctcgcctccctgcgtataagttacaaccgcgcgcgccaggcgggcattacgcaggaaatgaccgagataatgggcggttccacggcgttggccgacaagtga

SEQ ID NO: 66074 - protein, 120 aa, Unknown
  Obtained from environmental sample
  DOMAIN (1)...(117): ATP synthase
  misc_feature (1)..(120): Xaa is any amino acid
MVKLLPTVHQIIPLVKEKIQDDLFEIGGEKRVDLKFEFLPSLGAVFDTLVPQYIKGVIYGAMVEAHASEQSSRMRAMDEASKSAEDMLASLRISYNRARQAGITQEMTEIMGGSTALADK

SEQ ID NO: 66075 - DNA, 537 bp, Unknown
  Obtained from environmental sample
  misc_feature (1)..(537): n is a, c, g, or t
atggccagcctccgtgacgtgcgcctgcggatgcgggctattgaacagacgttaaaagtcaccaaggcgatgaaccttatctccacggcgaaactgcgcaaggggcggaaaatgctcgcggataccgtgccgtatttcagcaggattcaaaaatccatgtacgacattctttcaagcgagaaatatatcggaggctcgttcttcagaaagcccgatccttcgaagcccagccacaccgcgataattgtcataaccagctataaggggcttgccggcggttataacgcgaatgttttccgcagcgtaaacgagttatgcgcaaaagtggaaaatccggtgctgatacttatcggcggcaatgtcggctaccgctattttgtccattccccgtatccaattcttgaaaatttttctttccatccggaaatacccaccgtggaacacgccgcggaagtttccgaatatgtggtttcgcagtatctgggcaaaatctttgattccatacatatcgcgtatacccatatgtcagcatggtaa

SEQ ID NO: 66076 - protein, 178 aa, Unknown
  Obtained from environmental sample
  DOMAIN (2)...(178): ATP synthase
  misc_feature (1)..(178): Xaa is any amino acid
MASLRDVRLRMRAIEQTLKVTKAMNLISTAKLRKGRKMLADTVPYFSRIQKSMYDILSSEKYIGGSFFRKPDPSKPSHTAIIVITSYKGLAGGYNANVFRSVNELCAKVENPVLILIGGNVGYRYFVHSPYPILENFSFHPEIPTVEHAAEVSEYVVSQYLGKIFDSIHIAYTHMSAW

SEQ ID NO: 66077 - DNA, 384 bp, Unknown
  Obtained from environmental sample
  misc_feature (1)..(384): n is a, c, g, or t
atgcgtaaaatttccggcagaatcaggctggacctcgcccagtaccgcgaaatggcggccttcgcccagttcggcagcgatttggacaaggccacccaggacaaacttgcccagggcgaaaggcttatggaagttttgaaacagcctcagctttcgccgtatccgctggaagtacagatcgccattctctttctcgcggtgaacggctatcttcttgacgttaagacggaaaatgtttccgcgtttgtaaaagatttcctgtcgcaccttaaagatcaaaaagcggagctgatgaaggccattgcggaaacgggagttgtttccaaggaacaggaagacgaattgcggctgacggtagaagccttcaaagggattaagaagtaa

SEQ ID NO: 66078 - protein, 127 aa, Unknown
  Obtained from environmental sample
  DOMAIN (2)...(106): ATP synthase alpha/beta chain, C terminal domain
  misc_feature (1)..(127): Xaa is any amino acid
MRKISGRIRLDLAQYREMAAFAQFGSDLDKATQDKLAQGERLMEVLKQPQLSPYPLEVQIAILFLAVNGYLLDVKTENVSAFVKDFLSHLKDQKAELMKAIAETGVVSKEQEDELRLTVEAFKGIKK

SEQ ID NO: 66079 - DNA, 357 bp, Unknown
  Obtained from environmental sample
  misc_feature (1)..(357): n is a, c, g, or t
ttgatctttaaggtgcgacaggaaatcttttacaaacgcggaaacattttccgtcttaacgtcaagaagatagccgttcaccgcgagaaagagaatggcgatctgtacttccagcggatacggcgaaagctgaggctgtttcaaaacttccataagcctttcgccctgggcaagtttgtcctgggtggccttgtccaaatcgctgccgaactgggcgaaggccgccatttcgcggtactgggcgaggtccagcctgattctgccggaaattttacgcatcgcctttgtctgcgccgaaccccccgacgcggcttaccgaaagggccacgtctatggccgggcggaaaccagaattaa

SEQ ID NO: 66080 - protein, 118 aa, Unknown
  Obtained from environmental sample
  misc_feature (1)..(118): Xaa is any amino acid
MIFKVRQEIFYKRGNIFRLNVKKIAVHREKENGDLYFQRIRRKLRLFQNFHKPFALGKFVLGGLVQIAAELGEGRHFAVLGEVQPDSAGNFTHRLCLRRTPRRGLPKGPRLWPGGNQN

SEQ ID NO: 66081 - DNA, 849 bp, Unknown
  Obtained from environmental sample
  misc_feature (1)..(849): n is a, c, g, or t
gtgtccgttccttcgggcaacggatttttcggcagggtggtaaacccgctcggcgaacccctggacggcaaggggccgataacagccgaagcctttatgccgatggaatcccccgccgcgcctgtaatcgaccggggaagcgtggacacccctcttcagacaggctgcgtttccatagacgcgatgatccccatcgggcgcggccagcgcgagctgataatcggcgaccgccagaccggaaaaacctcaatcgccgttgacacgataatcaaccaaaaagggaagaacgttatctgcatatactgcgctatcgggcagaaatcttcttcgatagtcgcgatcctgaataaccttgagaaacacggcgctatggactacacctttgtggtgcttgcgtcggcttcagattcggcggcccttcaatatatcgcgccctattcggcggtagcaatggcggaacattttttacatcagggaaaagacgtgctggtggtttacgacgatctttccaagcacgcggtcgcctaccgcgcggtcagcctgcttctgcgccgcccgcccgggcgcgaggcttttcccggcgacgtgttctaccttcactcgcggcttttggaacgcgccgtaaaactttctccgttgaaaggcagcggctcaatcaccgcattgccgatcatcgagacgcangccggcgacatttcggcctacattcccacaaacgtaatttcgataacggacgggcagatattcctcgattccgagttgtttaattctggtttccgcccggccatagacgtggccctttcggtaagccgcgtcggggggttcggcgcagacaaaggcgatgcgtaa

SEQ ID NO: 66082 - protein, 282 aa, Unknown
  Obtained from environmental sample
  DOMAIN (54)...(270): ATP synthase alpha/beta family, nucleotide-binding domain
  misc_feature (1)..(282): Xaa is any amino acid
MSVPSGNGFFGRVVNPLGEPLDGKGPITAEAFMPMESPAAPVIDRGSVDTPLQTGCVSIDAMIPIGRGQRELIIGDRQTGKTSIAVDTIINQKGKNVICIYCAIGQKSSSIVAILNNLEKHGAMDYTFVVLASASDSAALQYIAPYSAVAMAEHFLHQGKDVLVVYDDLSKHAVAYRAVSLLLRRPPGREAFPGDVFYLHSRLLERAVKLSPLKGSGSITALPIIETXAGDISAYIPTNVISITDGQIFLDSELFNSGFRPAIDVALSVSRVGGFGADKGDA

SEQ ID NO: 66083 - DNA, 564 bp, Unknown
  Obtained from environmental sample
  misc_feature (1)..(564): n is a, c, g, or t
atgtttcacgcggagcgttgggcgggggcgtttttatccgtttcgggcgcgaacgctgatgaggcgtttgtatgcttcaaggcgcttaccgcgaatgtaaaaaccctgcgcgggctgctcttcgggcacagcgccgctgcaaaactggaaaaaatactgagggaatgctcaaaagttgccggaacggcaactcccgccacagagtacgccatacgcctcctgtgcctgttagttgaaaagaactgcttcaggtatgtcgatatacttttacataagattgaacaggatcttgacgcgcgaaacgggatacttgacgtcaccctcgaaacggcggccgcagtggacagcggctttgagaaagaacttgagctgttaattaaagataagaccggggcctcgggcgttaaaatgaaaatatgcataaggcccgaactgctgggtggttaccttctgcgaattggcagtctttttattgacgcgagcctgaaggggcagttggaaaacatggcggctcaattaagcgcgcctgatttaggcgcggatacaggaggccgtaatggctaa

SEQ ID NO: 66084 - protein, 187 aa, Unknown
  Obtained from environmental sample
  SIGNAL (1)...(19)
  DOMAIN (4)...(173): ATP synthase delta (OSCP) subunit
  misc_feature (1)..(187): Xaa is any amino acid
MFHAERWAGAFLSVSGANADEAFVCFKALTANVKTLRGLLFGHSAAAKLEKILRECSKVAGTATPATEYAIRLLCLLVEKNCFRYVDILLHKIEQDLDARNGILDVTLETAAAVDSGFEKELELLIKDKTGASGVKMKICIRPELLGGYLLRIGSLFIDASLKGQLENMAAQLSAPDLGADTGGRNG

SEQ ID NO: 66085 - DNA, 441 bp, Unknown
  Obtained from environmental sample
  misc_feature (1)..(441): n is a, c, g, or t
atgattgccggtatcggaagcctttttattctttgttttaacgcgggttacttgggaattgtaacaggacatttaataaatgcaggtttcgcgcagactttttttccgtttgttatcgcacacagcgcttttgaaattacggcaatcattttcagcgcttacgccggattgctgctcggttacaggttttttataacaaaaggcttaacacgcggagcttcggtaaaaaaagccggcagggacgcgtttccgattattacaggcagcgcaataatgcttgtaattgccgccgttatcgaagcgttttggtcatcaagacatacattcccttttatgcttcgtataacgttcggtatcagtatgtggattttaacgcttctgtattttttatttgcaggcagaaaatccgccgggggaaaaataaatgaatcttccgtttaa

SEQ ID NO: 66086 - protein, 146 aa, Unknown
  Obtained from environmental sample
  misc_feature (1)..(146): Xaa is any amino acid
MIAGIGSLFILCFNAGYLGIVTGHLINAGFAQTFFPFVIAHSAFEITAIIFSAYAGLLLGYRFFITKGLTRGASVKKAGRDAFPIITGSAIMLVIAAVIEAFWSSRHTFPFMLRITFGISMWILTLLYFLFAGRKSAGGKINESSV

SEQ ID NO: 66087 - DNA, 1446 bp, Unknown
  Obtained from environmental sample
  misc_feature (1)..(1446): n is a, c, g, or t
atgaatcttccgtttaaaactgctccgaaacaaaaagattcaagagaagctgcagattcaggcttgctgctctggcgtgaaaatttcattaattttattcctttcttcgctattcccttttggatttgcgcgtttgcgcttagattacttccgggtgaattacagtatttttcatggttaattttatggctgctgaaacctctctttgacagaattattttgcacataatatctatacgtttttttgacagcggctcaggttttaaacggcttctgaaaggacttggtaaaagtttattgcgcggactggcaggcgatctgctctggagacgcttcagtccgctgcgttccgcgatgatgcccgaacgcgttcttgaaccccgcaaaaaatcaggtaaggaaaaagcgcagcgcagaaaattattaaagaacggaggtataaatttttgttttttcattactctctggggaattgcggttgaatttatccttttattgggtgaaataatatttgttatttttatagcaagtttttgggcagatataggtttttcatttaccctagaattttgggaaaaagcggaaatatacatatttgccgcatggtgcataaattatataataatagaaactatttatgtctgtatgggatttagcatttatatcaacagccggattaatgtagaaggctgggatttggaaattatgttccgcagttttgccgaaaaaataaaaagtaaaaaagcagcgggcttgttggctgtcttctgttttgtctgcatgtttttttctgttaatacgttcgctctggatttacaaaatgacacaacagatgtcccgttggaaacactgcataaaattcttgattctcctgatttcggcactgaaaaagatacatggggaataagatttaaagaaaagcctgaaccaaataatattaattttaactttaatcctttatatgaaaaggtacgcatgatttttgcttccgctttaagaataatattgattatgcttattgcggctcttgccgtaattttatttttatacgtgcgaaaatattttaatgaaagaagcgccgcggcaaagaaatccgccgtttcggttttacgcggaatcccaatgctaaatcctgatgatctcctggaaaaagcggcatacttctttgaacatcaaaacctgcgcctggcatggggatattgcgcggcggcggctattttatcatggtcattgtacagaggacttgcctttcctcccaatgcgaccgaaagtgactgcgcagacatggtaaaatctatgacatctgacaataataatgaaacctgcgctttttgtaatttaattaacgactggataaattttgcctatgcgggacggattccgagcgcagggcattttgaagaagccgccgctttctgcaaatcgcttaggactgcaaatgaataa

SEQ ID NO: 66088 - protein, 481 aa, Unknown
  Obtained from environmental sample
  misc_feature (1)..(481): Xaa is any amino acid
MNLPFKTAPKQKDSREAADSGLLLWRENFINFIPFFAIPFWICAFALRLLPGELQYFSWLILWLLKPLFDRIILHIISIRFFDSGSGFKRLLKGLGKSLLRGLAGDLLWRRFSPLRSAMMPERVLEPRKKSGKEKAQRRKLLKNGGINFCFFITLWGIAVEFILLLGEIIFVIFIASFWADIGFSFTLEFWEKAEIYIFAAWCINYIIIETIYVCMGFSIYINSRINVEGWDLEIMFRSFAEKIKSKKAAGLLAVFCFVCMFFSVNTFALDLQNDTTDVPLETLHKILDSPDFGTEKDTWGIRFKEKPEPNNINFNFNPLYEKVRMIFASALRIILIMLIAALAVILFLYVRKYFNERSAAAKKSAVSVLRGIPMLNPDDLLEKAAYFFEHQNLRLAWGYCAAAAILSWSLYRGLAFPPNATESDCADMVKSMTSDNNNETCAFCNLINDWINFAYAGRIPSAGHFEEAAAFCKSLRTANE

SEQ ID NO: 66089 - DNA, 624 bp, Unknown
  Obtained from environmental sample
  misc_feature (1)..(624): n is a, c, g, or t
atggaaaagacagatcttaacacagaatcagcggcggcattattggatcaggtaaggagcgaaattgccaaagcttttatcggccaaagttatcttgtaaataacgccctgataactcttgtcgcgggagggcatcttcttgtagaaggagtccccggacttggaaaaaccctgcttgtccgcgcccttgcaaaggcaacaggaggggattcaaagcgaatccagtttacgccggacttgatgccgagcgacataacaggcaacataatgcttgatcccgcaaccggtaaatttgttacgcgcaaagggcctgttttctcaaatttgcttatagccgatgaaataaaccgcgctcctgcaaaaacccaggccgctctttttgaggcaatgcaggagtttcaggtaagtcttgacggtgaagcgcatcctctgccgtctccattcatggttctggcaactcanaatccgtttgaacatgagggaacctatcctctgcccgacgctcaaaaagatcgctttttaatgaagataattgcggcgtatccgacaattgacgaagaaaaacaatggtcgccaaagtattggaccgagatacaggcgctgaactacagttgccgcagttaa

SEQ ID NO: 66090 - protein, 207 aa, Unknown
  Obtained from environmental sample
  DOMAIN (45)...(181): ATPase family associated with various cellular activities (AAA)
  misc_feature (1)..(207): Xaa is any amino acid
MEKTDLNTESAAALLDQVRSEIAKAFIGQSYLVNNALITLVAGGHLLVEGVPGLGKTLLVRALAKATGGDSKRIQFTPDLMPSDITGNIMLDPATGKFVTRKGPVFSNLLIADEINRAPAKTQAALFEAMQEFQVSLDGEAHPLPSPFMVLATXNPFEHEGTYPLPDAQKDRFLMKIIAAYPTIDEEKQWSPKYWTEIQALNYSCRS

SEQ ID NO: 66091 - DNA, 1134 bp, Unknown
  Obtained from environmental sample
  misc_feature (1)..(1134): n is a, c, g, or t
gtgtggcgcaagaagtgggtggagcagttgaaggaaaccgaagaaactttctacaaaataatcaactccgcctcaccgccatatactctgtattattccacagtcattgaaacaaagaacatcaattatcaaaaagaaaccgccgatttgagcatatcgctgaatttacttgcgagtgcggaatggttcgttgcgttgcagcggtcgcttaaagctgcacaggcggtatatgacggattgaacgcaacgggtaggaagaaagactgggagttggacaggtggtcaggtcagggagtgtctgacacaaacccatttgtctctaaaaagcagtatgatattccagtagagtttgagttggtgaatcagaagggcaaggtgataggcaagaatacaatcaggttaaatccaaatttcataatagacagaaatttcattgttagatttaacacaaacctatctggaatattaactttcaacgcggtcaatgctaacgaaatcagcgacaacttgaccatccgcttggcttcagtgaacggagcaccgcccaaaacagcaaggtttccaatcatcgctgtatcaggcaaagagtttccagaatatagagttccaacaaggcgaacaacctttactgattcccgtgatggcagaaaatacggagccattgaaattggttcccaaacttggatggcggagaatcttaactttgatgcggaaggcggaaaatgctatgataatgatcctacaaattgccaaaagtacggcaggctttacaattggaatacggctatgaaagtttgcccaaaaggctggcatttgcctagcaagtgggagtgggatatattgacgttatcggttggtggtgataaaacggcaggcaaatacttgaaggctacgagcggctggaaagaaaacggcaatggcacagatgcctacggtttttcggctttgcctggcggtaacggcgaaaatggcggtttcatcaatgtcggcaacctcggctattggtggtctgctacggagtactacgatgcttccgacgcctactaccagtacatgtaccgcggcagcgccgatgtggccagctacagccgcgataagtcgtacctatactctgtgcgttgcgtccaagattaa

SEQ ID NO: 66092 - protein, 377 aa, Unknown
  Obtained from environmental sample
  misc_feature (1)..(377): Xaa is any amino acid
MWRKKWVEQLKETEETFYKIINSASPPYTLYYSTVIETKNINYQKETADLSISLNLLASAEWFVALQRSLKAAQAVYDGLNATGRKKDWELDRWSGQGVSDTNPFVSKKQYDIPVEFELVNQKGKVIGKNTIRLNPNFIIDRNFIVRFNTNLSGILTFNAVNANEISDNLTIRLASVNGAPPKTARFPIIAVSGKEFPEYRVPTRRTTFTDSRDGRKYGAIEIGSQTWMAENLNFDAEGGKCYDNDPTNCQKYGRLYNWNTAMKVCPKGWHLPSKWEWDILTLSVGGDKTAGKYLKATSGWKENGNGTDAYGFSALPGGNGENGGFINVGNLGYWWSATEYYDASDAYYQYMYRGSADVASYSRDKSYLYSVRCVQD

SEQ ID NO: 66093 - DNA, 405 bp, Unknown
  Obtained from environmental sample
  misc_feature (1)..(405): n is a, c, g, or t
ttgtttgaaagtgtgagtattccagaggctgtatgggaggaattactgaattatgttgatttttttaatattccgcaaatatataattacaaaaataatgtgaaaaaggtaaactcaaaatatgatttagaacagtttgtggataagggtgaattggaagctattttattgagcaaggaaatagatgcggattatttgcttattgacaataaaaaagctagaacgatagcagaagaaatgtctgttgcttgtattggaacaattgctgttttaataaaagctaaatcaaaaggtataataaaagagctaagggaattatttatagaaatgctggacaaaaaaagatattattctgtggatttgttaaataaagttttgttggctaataatgaagaaataatttag

SEQ ID NO: 66094 - protein, 134 aa, Unknown
  Obtained from environmental sample
  misc_feature (1)..(134): Xaa is any amino acid
MFESVSIPEAVWEELLNYVDFFNIPQIYNYKNNVKKVNSKYDLEQFVDKGELEAILLSKEIDADYLLIDNKKARTIAEEMSVACIGTIAVLIKAKSKGIIKELRELFIEMLDKKRYYSVDLLNKVLLANNEEII

SEQ ID NO: 66095 - DNA, 1332 bp, Unknown
  Obtained from environmental sample
  misc_feature (1)..(1332): n is a, c, g, or t
atgatagaaaaattaccccaaacgcaacagcgcaacttgttccgcccaatgctagcggatttcatagaccccagccacgagctagtcttgctgtccaagaaaatagactggcagtatttcgaggacgaatttgcgcccctctattgccccgacaacggaacgcccagcgttcccatccgcctgatggtagcctgcctcatgctcaagcagttgtataatctaggcgatgagaccctgccctcccgttgggtcagtgatgtttactttcagtattttagcggcatgattttctttgagcatgaatttccattcaatcctagcgatttttctcatttccgcaaacgtataggcacagccggttttgagaagatatttgcgcacagcgtgaagcttcatggcagcgaagtttccaggcaggcgaaattctcgctttccgacacgaccgttcaggaaaacaacaccacgtttcccaccgatgccaagctatgcaagaaagtgatagacaaatgcaatcagatagcggagtctgaaggcatccaacagcggcagacgttccgcaaagaaagcaagcagctagttcgcgatgcctacaacggcaatcacccgaagcgtttcaggaaagcaaggaaggcaagaaagcgtttgaggaccatagccaatcatcaaatccgcgagcttgagaggaaaatgaatgccagccagaactcattctattgcaatgagttagagcttttcaagcgtgttgcgaatcagcaaaaaaacgacaaggacaaggtttatagcctgcacaagccattcacccagtgcatagccaaagggaagccgcacaggcagtatgaattcggcaacaaggttgggattgtatcaggcggagtgaaaggctccaagataatactcgccgtcaagggcttcatagacaatatttttgacgggcataccattgagcctctgcttgcgcaaatgcaggcaaatgatatagctctcccaagcgagcttgcctacgaccgcggcggcaaaggcagaagcgagatcatgggcgtaaaaatactgataccctcccctccgagaaaaacagacactgctttgcaaaagctaaccaagcggctgaaacaccgccgtagagcagccatagaaccgataattggacacttgaagagtgatttccgcatggcgaggaactatcttggcggagtggagggtgttgaaataaatgcgttcatgtctgcctgcgcttggaatctgaggaaaatgatggaagtgctcaagaagaaattcttgctctttattttgcaaacgctttttccaaaaaatttactccctatcgccgcttaa

SEQ ID NO: 66096 - protein, 443 aa, Unknown
  Obtained from environmental sample
  misc_feature (1)..(443): Xaa is any amino acid
MIEKLPQTQQRNLFRPMLADFIDPSHELVLLSKKIDWQYFEDEFAPLYCPDNGTPSVPIRLMVACLMLKQLYNLGDETLPSRWVSDVYFQYFSGMIFFEHEFPFNPSDFSHFRKRIGTAGFEKIFAHSVKLHGSEVSRQAKFSLSDTTVQENNTTFPTDAKLCKKVIDKCNQIAESEGIQQRQTFRKESKQLVRDAYNGNHPKRFRKARKARKRLRTIANHQIRELERKMNASQNSFYCNELELFKRVANQQKNDKDKVYSLHKPFTQCIAKGKPHRQYEFGNKVGIVSGGVKGSKIILAVKGFIDNIFDGHTIEPLLAQMQANDIALPSELAYDRGGKGRSEIMGVKILIPSPPRKTDTALQKLTKRLKHRRRAAIEPIIGHLKSDFRMARNYLGGVEGVEINAFMSACAWNLRKMMEVLKKKFLLFILQTLFPKNLLPIAA

SEQ ID NO: 66097 - DNA, 399 bp, Unknown
  Obtained from environmental sample
  misc_feature (1)..(399): n is a, c, g, or t
gtgcgggggcagaaagtagaagacatcaaaatgggaagccattttgagcgggtaaacgttatcggcgctctttgcagcaaagagcatatagccgttgaatgctataaacattcgacagacagcgctttttttgaagactggtttgaaaattattttctaaaagaaattcccaaaggatgcacggcaataatggacaatgcaagattccactcaaaggagcggctgcgcaagctagcgagaggaaaggtgagattattgttcctgccgccgtattcaccagactacaaccctatagaaaaatcatgggcaaatatgaaacgctatctccgcgataatatgcatgattatcaatttgttgattttgcaatctatgaatattttggttattcagttatttaa

SEQ ID NO: 66098 - protein, 132 aa, Unknown
  Obtained from environmental sample
  misc_feature (1)..(132): Xaa is any amino acid
MRGQKVEDIKMGSHFERVNVIGALCSKEHIAVECYKHSTDSAFFEDWFENYFLKEIPKGCTAIMDNARFHSKERLRKLARGKVRLLFLPPYSPDYNPIEKSWANMKRYLRDNMHDYQFVDFAIYEYFGYSVI

SEQ ID NO: 66099 - DNA, 366 bp, Unknown
  Obtained from environmental sample
  misc_feature (1)..(366): n is a, c, g, or t
atgtatagcatagattatatacggcgtgcggtagcctacaaagacgaagggcatactttcagggaattgaaagatgcgtttaatatcccggcagaaacgtattatcaatggaaagaaaagctcgaaaacggatatgacgggaaaaaagtctttcgggaacggtcgcgaaagatagacaaagagaaactaaaaaaagccgtagaggaaaaaccggatatgtatctctatgaactggcacagctgtttgattgcacgccccaagcggtttttctcatgcttgaaaaactcaatataacgcgaaaaaaaagtccttcacttattatgaaaaatccgaagaaaaacgcacagaatttattacacggctaa

SEQ ID NO: 66100 - protein, 121 aa, Unknown
  Obtained from environmental sample
  DOMAIN (1)...(120): Transposase
  misc_feature (1)..(121): Xaa is any amino acid
MYSIDYIRRAVAYKDEGHTFRELKDAFNIPAETYYQWKEKLENGYDGKKVFRERSRKIDKEKLKKAVEEKPDMYLYELAQLFDCTPQAVFLMLEKLNITRKKSPSLIMKNPKKNAQNLLHG

SEQ ID NO: 66101 - DNA, 303 bp, Unknown
  Obtained from environmental sample
  misc_feature (1)..(303): n is a, c, g, or t
ttgatcggctataatgtaaaatatcctttaggaactctctttgtaaattgtcttggagcattattaattggttttttaataaatatatttaatagatataatataaattttaaatttaaattattattaataacaggttttttaggaggttatacaacattttctgcatattcattagatacggtacaatattttataaatgggaatataaaattagcattgttaaatatattcttaaataatatattgtgtatattatttgtgtctataggaatatggatatataaaattattataaaataa

SEQ ID NO: 66102 - protein, 100 aa, Unknown
  Obtained from environmental sample
  DOMAIN (1)...(95): CrcB-like protein
  misc_feature (1)..(100): Xaa is any amino acid
MIGYNVKYPLGTLFVNCLGALLIGFLINIFNRYNINFKFKLLLITGFLGGYTTFSAYSLDTVQYFINGNIKLALLNIFLNNILCILFVSIGIWIYKIIIK

SEQ ID NO: 66103 - DNA, 879 bp, Unknown
  Obtained from environmental sample
  misc_feature (1)..(879): n is a, c, g, or t
ttgggggaaaccatgattagcatgacgggttatgcctgctgtgaaaaaacagggcaggatttatcggtttcggttgaaataaaagggtataacagccgctatctggaaatttttattaatcttccgtcgtggctttccgttttggaaaataaagtccgtgaacagattgtttcctgctgcggcagagggaaggtggaagtttctatccgtgtgcgcgaacaaaacgcgtccgtgaatatcagcgtaaacgcaaatgccgcaaaagcgtattataacgcgattaacaaacttgcggatgaattaaaccttgatgaaaagtgcggcctttccaccctgttaagaatggagaatgtacttgagatagaaaagaaccgcgacgaggaacgttattggaaagagatagagccgcttttgcgcgaggcaattcaggcgtttagtaaagaacgcgagcgggaagggaagcacacaacggaagatatattcgcgaatctggaaacgattgtttcttcggtaaaaactgtttcggcgtttgcccccgtaatagaaaataccttaaaagaaaatatcaggtcccgttttgcggaactgcttggcgataaggttgatgaaaaccgcgtgcttgccgaaacggcggcgctcttgctaaagtatacggtttccgaagaaatatcgcgtcttaattcgcatctttcggaattcagggcggaggcggaaaggaatcaaagaccgggtaaaaaactcgattttttatgtcaggaaattaacagagaaattaatactatcggctcaaaaagcgctataatagaagtaagcgccgaagtagttaaaatgaaggaggcccttgaaaatatcagggagcagttgaggaatattgagtaa

SEQ ID NO: 66104 - protein, 292 aa, Unknown
  Obtained from environmental sample
  DOMAIN (5)...(159): YicC-like family, N-terminal region
  misc_feature (1)..(292): Xaa is any amino acid
MGETMISMTGYACCEKTGQDLSVSVEIKGYNSRYLEIFINLPSWLSVLENKVREQIVSCCGRGKVEVSIRVREQNASVNISVNANAAKAYYNAINKLADELNLDEKCGLSTLLRMENVLEIEKNRDEERYWKEIEPLLREAIQAFSKEREREGKHTTEDIFANLETIVSSVKTVSAFAPVIENTLKENIRSRFAELLGDKVDENRVLAETAALLLKYTVSEEISRLNSHLSEFRAEAERNQRPGKKLDFLCQEINREINTIGSKSAIIEVSAEVVKMKEALENIREQLRNIE

SEQ ID NO: 66105 - DNA, 1131 bp, Unknown
  Obtained from environmental sample
  misc_feature (1)..(1131): n is a, c, g, or t
atgctcttggaaactggtcggcaaggtttgattctgcgggagtgtgcggcgttcacggaaaaaccaccacaacagcgcttgcgggcgtttgcgcgagaggggcgggcattgccggcacagatacttacgggaagcggcgcgtttgatttcggagggaagtcaacgcttatcatgggagaaaaattttttatcgcggaaacctgcgaataccgaaaacactttttatcgtttcatccaaaacggataatacttacttctatagaaagcgatcatcaggattattttccggattacaaatctattctggacgcttttgtcgaatactgccgcctgcttccttccggcggtcagctcatttactgcgccgatgatcccggagcaagcgaagcggctaaaattattgagagcgagaacagagggatttcccttgttccttacgggtttaacgctcttggcgattaccgcgtggtttcttataacgtagaaaatgagagagcgcttttttcacttgcgggatttccataccaatttacaatgaggattcccggccgccatcaggcgttaaacgccgcggcggctgtcgcgcttacggcgtcactgttaaaagagcagggcgctgtgttagacgaagaaaaaattcaatctgtgggcagagagcttgaaaattttaagagcacgaaacgccgaagcgaaattataggggaagcgggcggaattatttttatggatgattacgggcatcaccctacggcgataaaaactacccttgcaggcattaaaaatttttatccttcgcgcaggctgattgtaagctttatgtcgcatacttacacgcgtacatccgcccttcttgacgaatttgcctcggcttttgacggcgcggacattgttttctttcataaaatttacgcaagcgccagggaaaattacaagggcggcgtcaacggcagaaccctatacgaaaaagtcgcggaacgtaagacggctttttatcaggatgagccggacgacgcttttactccgttatgtgaaatgcttaaacccggcgatatatttatcacgcttggcgcgggaaacaactggccgctcggcgtaaaactgttcaatcattttgggggaaaccatgattag

SEQ ID NO: 66106 - protein, 376 aa, Unknown
  Obtained from environmental sample
  DOMAIN (39)...(197): Mur ligase middle domain
  misc_feature (1)..(376): Xaa is any amino acid
MLLETGRQGLILRECAAFTEKPPQQRLRAFAREGRALPAQILTGSGAFDFGGKSTLIMGEKFFIAETCEYRKHFLSFHPKRIILTSIESDHQDYFPDYKSILDAFVEYCRLLPSGGQLIYCADDPGASEAAKIIESENRGISLVPYGFNALGDYRVVSYNVENERALFSLAGFPYQFTMRIPGRHQALNAAAAVALTASLLKEQGAVLDEEKIQSVGRELENFKSTKRRSEIIGEAGGIIFMDDYGHHPTAIKTTLAGIKNFYPSRRLIVSFMSHTYTRTSALLDEFASAFDGADIVFFHKIYASARENYKGGVNGRTLYEKVAERKTAFYQDEPDDAFTPLCEMLKPGDIFITLGAGNNWPLGVKLFNHFGGNHD

SEQ ID NO: 66107 - DNA, 498 bp, Unknown
  Obtained from environmental sample
  misc_feature (1)..(498): n is a, c, g, or t
ttgaaaaacaatggttttaagttagaattatctataatagttatgactacggaaaatatctttaagccgggagcgcagttttattttgtcggaattaagggtacaggagtttgcgcgctggctgagcttatacttaacgccgggataaaagtgcgcggcagcgataccggcgaagttttttacacagatgaaatacttaaagagctaagaattccctactatgaaaattttgacgcggctcatatcagcagggatatcgacattgtaattcactctgcggcttacagcgctgaaacaaatccggaacttgcccgcgctctggaactcggcatacctgtcataaaatacaccgatgctcttggaaactggtcggcaaggtttgattctgcgggagtgtgcggcgttcacggaaaaaccaccacaacagcgcttgcgggcgtttgcgcgagaggggcgggcattgccggcacagatacttacgggaagcggcgcgtttga

SEQ ID NO: 66108 - protein, 165 aa, Unknown
  Obtained from environmental sample
  DOMAIN (26)...(128): Mur ligase family, catalytic domain
  misc_feature (1)..(165): Xaa is any amino acid
MKNNGFKLELSIIVMTTENIFKPGAQFYFVGIKGTGVCALAELILNAGIKVRGSDTGEVFYTDEILKELRIPYYENFDAAHISRDIDIVIHSAAYSAETNPELARALELGIPVIKYTDALGNWSARFDSAGVCGVHGKTTTTALAGVCARGAGIAGTDTYGKRRV

SEQ ID NO: 66109 - DNA, 714 bp, Unknown
  Obtained from environmental sample
  misc_feature (1)..(714): n is a, c, g, or t
atggatagcccctacatactcgaagaaacggatgactttgccgttgtttttaaaccgccaaaaatgcactgcgccccttccggcgcaaaatcgcaaaaagacggcacacttcttgaatggtactctactcaatcttcttgttttgacatcatgcaccgtttagattttgaaactcacgggcttgtattatttgcgaaaaataaaaagagttacgactcttttaaaactttgcaggacaatggggagtttataaaagaatactccgccatctgtacaaaaacagacgttaccgctcaattaaagggattccccgaatattcaaatggtaaaactcaacctccgtttgaaatcgaaagttttttccgtcctttcggtcccggcagaaaattagtccgtcccgtaatcgaagaaggcaaaaaaagccgtgaaatcgccaaagacaacggaggcttttaccgcacggaaattaccggcataaacgaaaatattttttccctgcgcctaaaacgcggtttccgtcaccagatacgctgtcatctctgctgggcaggcttccctataaagaacgaccccctctacccgcaccccttggagttcgacgttgtttacaacgatagctctgtccccgccctgtctctccgcgcctgttccctctccttcaccgacccctcaaccgggaaacaacgtgaatacaagattgataaattcgagtag

SEQ ID NO: 66110 - protein, 237 aa, Unknown
  Obtained from environmental sample
  DOMAIN (12)...(182): RNA pseudouridylate synthase
  misc_feature (1)..(237): Xaa is any amino acid
MDSPYILEETDDFAVVFKPPKMHCAPSGAKSQKDGTLLEWYSTQSSCFDIMHRLDFETHGLVLFAKNKKSYDSFKTLQDNGEFIKEYSAICTKTDVTAQLKGFPEYSNGKTQPPFEIESFFRPFGPGRKLVRPVIEEGKKSREIAKDNGGFYRTEITGINENIFSLRLKRGFRHQIRCHLCWAGFPIKNDPLYPHPLEFDVVYNDSSVPALSLRACSLSFTDPSTGKQREYKIDKFE

SEQ ID NO: 66111 - DNA, 495 bp, Unknown
  Obtained from environmental sample
  misc_feature (1)..(495): n is a, c, g, or t
gtgattatttccgcttttatgaagaggcacacngcgtttctcgcacagcagtttaaagcgcgtagtagtcgaaaaacttatatggcgattgttcaaggcacgccaaaagaaattaacgggcgcatagaaacttatattgcaagagacacgaaagatcgcaagaagtttactgtttcagctaacggaagaaacgccgtaacttattacaaagtggttaattcatggcgtagtcattcgctccttcttctgcgtccgcgcaccggacgcacccaccaactgcgggttcatctgcgccacattggacacccaattcttggagacccgatttacggaaacgcggataaattattccccgacgcaagccttatgctccattcaaaaagtctggcgattatcctgcccggcgagactgaggagagagttttttcatcgcaaatcccgaggcggtttacggaagtaattgaaaaattggacaggatgaatacaaatggatag

SEQ ID NO: 66112 - protein, 164 aa, Unknown
  Obtained from environmental sample
  DOMAIN (4)...(99): RNA pseudouridylate synthase
  misc_feature (1)..(164): Xaa is any amino acid
MIISAFMKRHTAFLAQQFKARSSRKTYMAIVQGTPKEINGRIETYIARDTKDRKKFTVSANGRNAVTYYKVVNSWRSHSLLLLRPRTGRTHQLRVHLRHIGHPILGDPIYGNADKLFPDASLMLHSKSLAIILPGETEERVFSSQIPRRFTEVIEKLDRMNTNG

SEQ ID NO: 66113 - DNA, 1461 bp, Unknown
  Obtained from environmental sample
  misc_feature (1)..(1461): n is a, c, g, or t
atgaaaaaaacaccgatcttaattaccgccctggtgtttattgtgagctgttatcagggaattatttttgatgatcagggaacacccggtggatctgttaatagcacacagggaacagacggtaaaaactttaatgatgagcaagggatagcttatacggatggttttgcgcaggacgcgcagggttcttcagtaaaaaggaaatggacatttataatttatatggcggcagacaacgatctggaagccgccgctattgcggatttaaatgaacttgaggcggtaaattacggcgcagctcccatttcaattttagccttattggatcgcaacagtggttatgatatgaccaacggtaactggagcgatacacgcctttttgaaataaaacctgacccaaacggtttgacatctacaattcgctctccgcggattgattgttttgagcttggtttgtcaaaaaatactgaaacagaactaaatacggcagacccgctggttttatcaaggcttatagattttgcaaggcgtgtttatccggctgaacaatacgccttgttcatatggggtcatggaacaggctggcgcggcggtttcaataacaacaatcttccggaaccggtcaaggctgtcgcctttgacgacaccaacaggcagtatatgacattatcttcctttggaagagcagtagcgggaaaaggcctttcggtcatcgcttttgacacatgctacggagcgttattggaagtagcgtatcagattagaaatgccgccgaactttttgtcgggtctgaaggagaaataatgtcaacaggctgggattactcggctttgtttaccgggtttttaaacaaagaaaatttatcgatttccgatcttggcaacgcaattcaaaatcaattcagtaaccagtatgcctcactggaaaaagcgtcaatatcgcaaataagactgtctaaggttaatgatctatttttgagttttaatgattttacaggtgagatggcgaaagcgatggttaccgatacggcaaaaaacgcggtttccagtcaaatatttaatcaggtagaaagctatttctttactaatttcccttcggatatgtatattgatattttcgatttcacggaaaaaatatcggcgataagggggagcattacttcaaataccgcccagcaggatgcaattttagatgcggccaataacctgaaaaccgatttggctatagcggtaccttcatcatgggcaaaaaacggctcaacaaaaaagattggggtacatgttattccgctccagggcaatagagttccggctgccaaccacggattggcgtataccaggggcagtatggaaatagataaaagcgcatttgttgaggattcaaaacattgggtgcctaattttgtcccaaaaagcgacagcttgcttgataaattgttttactggacgtatacgccgtaa

SEQ ID NO: 66114 - protein, 486 aa, Unknown
  Obtained from environmental sample
  SIGNAL (1)...(19)
  DOMAIN (73)...(464): Clostripain family
  misc_feature (1)..(486): Xaa is any amino acid
MKKTPILITALVFIVSCYQGIIFDDQGTPGGSVNSTQGTDGKNFNDEQGIAYTDGFAQDAQGSSVKRKWTFIIYMAADNDLEAAAIADLNELEAVNYGAAPISILALLDRNSGYDMTNGNWSDTRLFEIKPDPNGLTSTIRSPRIDCFELGLSKNTETELNTADPLVLSRLIDFARRVYPAEQYALFIWGHGTGWRGGFNNNNLPEPVKAVAFDDTNRQYMTLSSFGRAVAGKGLSVIAFDTCYGALLEVAYQIRNAAELFVGSEGEIMSTGWDYSALFTGFLNKENLSISDLGNAIQNQFSNQYASLEKASISQIRLSKVNDLFLSFNDFTGEMAKAMVTDTAKNAVSSQIFNQVESYFFTNFPSDMYIDIFDFTEKISAIRGSITSNTAQQDAILDAANNLKTDLAIAVPSSWAKNGSTKKIGVHVIPLQGNRVPAANHGLAYTRGSMEIDKSAFVEDSKHWVPNFVPKSDSLLDKLFYWTYTP

SEQ ID NO: 66115 - DNA, 1011 bp, Unknown
  Obtained from environmental sample
  misc_feature (1)..(1011): n is a, c, g, or t
atgaaattaaaacaaagctttaacgcagcgaacaaaagttaccgcttgggattcatactcttactgggcgttatgatgtcccagagtgtcccggcaaataccgcggcaaacagcggcattgatttcagcatccgcttttttgacaggcgtatttactacgcgcaaagcgaccccattaatatccaggtaactattaccaataacagccccttaacctaccggttcaaactggcggacgaaagggttttctcactcgatttcgatgtcagaaccgtgagcaaccggccgctggaaccggcggacatacttgtccgcaaacggacacagtaccagcagatattcttccgggaaatagccgtggaatccggcgaatcattttcgtttgtggaagaccttcgcaattatgtaaagataagccaggccggatcctttgtggtacaggcccgcgtttaccctgaactgttccgctttggaacggacgtggccgcaatagtgcccgtaacgcttgaatcaaaacggttgaacctcagtatctggccgccgcttgtcactaccgccgaaggcattcccctggaaatggacgtggcaacaggcgccgtgctggttcgggaacggctcgccccggatcaggtggtcgattacacgatcacgcaaagacagagatcgcatggggaaaaattctacctgtactcgattctggaagcgatgctggcgcaggacggggcccgccagcgcagatggcttagcgaaagcgaggaaggcagaaaacgcatggttgaccagtacaggcaggaattgagaaaccccacaaacgacgggatttccgtcatccccaccgaatattatatagagacgacccaatacaataattttgaggggactgtcaccgtactggaaaaattcaggaactccttctttaccgaggtaaaacgctacacctattacatgcgcttcaaggacaatgtctggacaataacgggttactcggtcaccaatctggggacggaatga

SEQ ID NO: 66116 - protein, 336 aa, Unknown
  Obtained from environmental sample
  misc_feature (1)..(336): Xaa is any amino acid
MKLKQSFNAANKSYRLGFILLLGVMMSQSVPANTAANSGIDFSIRFFDRRIYYAQSDPINIQVTITNNSPLTYRFKLADERVFSLDFDVRTVSNRPLEPADILVRKRTQYQQIFFREIAVESGESFSFVEDLRNYVKISQAGSFVVQARVYPELFRFGTDVAAIVPVTLESKRLNLSIWPPLVTTAEGIPLEMDVATGAVLVRERLAPDQVVDYTITQRQRSHGEKFYLYSILEAMLAQDGARQRRWLSESEEGRKRMVDQYRQELRNPTNDGISVIPTEYYIETTQYNNFEGTVTVLEKFRNSFFTEVKRYTYYMRFKDNVWTITGYSVTNLGTE

SEQ ID NO: 66117 - DNA, 642 bp, Unknown
  Obtained from environmental sample
  misc_feature (1)..(642): n is a, c, g, or t
ttgatggccgaggaggtggcgctttannccgctgggctgaatgtcccaaatgccaaaaacgccttcaggaactcnggccttaaaaaaccggcgcagttgcaaagttggattacctcccgtcttgcctctatgcttcaacagcgagggaaaaccgccataggctgggatgaagtcattgaagacactgaaaaatttccactgcccgatgattttatcgtaatgtcatggcgtggacaggaaggcggcattaaagccactgcccgcgggcaccgtgttattatgacaccgcttacagacggctgctatctggattacaaacacatcgaccagtatgaagaacccggccagctcagcgtcagcacaatcgcgcaatgtttcaacctgaacccggtaactcccgaaatggacgaggccgccgcttcccttgttctaggcggacagggaaacctctggtcggaaattatctacgcgggaaaaatcgccgagtacatgatcttcccgagaatctgcgccctcgccgaatccttctggtcgaccggcaaagacaataatatagaagattttagcaaacggcttgaaatccaccagaggcgacttgataaacttggactgctgcagtaccgtgggcctcttaagaattaa

SEQ ID NO: 66118 - protein, 213 aa, Unknown
  Obtained from environmental sample
  DOMAIN (1)...(180): Glycosyl hydrolase family 20, catalytic domain
  misc_feature (1)..(213): Xaa is any amino acid
MMAEEVALXXAGLNVPNAKNAFRNSGLKKPAQLQSWITSRLASMLQQRGKTAIGWDEVIEDTEKFPLPDDFIVMSWRGQEGGIKATARGHRVIMTPLTDGCYLDYKHIDQYEEPGQLSVSTIAQCFNLNPVTPEMDEAAASLVLGGQGNLWSEIIYAGKIAEYMIFPRICALAESFWSTGKDNNIEDFSKRLEIHQRRLDKLGLLQYRGPLKN

SEQ ID NO: 66119 - DNA, 357 bp, Unknown
  Obtained from environmental sample
  misc_feature (1)..(357): n is a, c, g, or t
gtgggtaatggtgaccggcccgcctttttgaatctgttgttggaacagcggcactatagagccgcgagagccaagaacgttgccgaaacggactaccatgaagttaggaccgcccgacgaggcggcggcttccagcaccatttgttcgcacaggtacttagaagcgccgtatacagaaacaggttcgaccgccttgtcggtggtgatgtggacgaaccttttgatgttatgttttatcgctgcaagcaccagattttcggttccaaagacattgttttctaccgccgccacggggttttcttccatcaaaggaacgtgcttgtacgccgcggtgtgaaaaaccgcgtccgcctttaa

SEQ ID NO: 66120 - protein, 118 aa, Unknown
  Obtained from environmental sample
  misc_feature (1)..(118): Xaa is any amino acid
MGNGDRPAFLNLLLEQRHYRAARAKNVAETDYHEVRTARRGGGFQHHLFAQVLRSAVYRNRFDRLVGGDVDEPFDVMFYRCKHQIFGSKDIVFYRRHGVFFHQRNVLVRRGVKNRVRL

SEQ ID NO: 66121 - DNA, 741 bp, Unknown
  Obtained from environmental sample
  misc_feature (1)..(741): n is a, c, g, or t
ttgatggaagaaaaccccgtggcggcggtagaaaacaatgtctttggaaccgaaaatctggtgcttgcagcgataaaacataacatcaaaaggttcgtccacatcaccaccgacaaggcggtcgaacctgtttctgtatacggcgcttctaagtacctgtgcgaacaaatggtgctggaagccgccgcctcgtcgggcggtcctaacttcatggtagtccgtttcggcaacgttcttggctctcgcggctctatagtgccgctgttccaacaacagattcaaaaaggcgggccggtcaccattacccaccccgacatacgccgctggtttatgaccataagcgaggcgtgttcactggtactcaaagcgggcggcgtcggcgtaaacggaggcctgtacctgctggacatgggcgaacccgtgcgcatcaaagatttggcggaacagttaatacgcttccacggatttgaaccggatacggaaattaaaatcgtatacacaggccttcgcccgggcgaacgcatggacgagcctctctggtcacaggatgaaaaagtcaaagaaaccgaatatagcaggattttacaggtaaaccgggaaaaacctttcaatgttgatcttaaggaaatgcttgaacaactgcgtcctatatgccgttttgatcctgcaaagccgcaggtttacagagacgcggaactactgcacgccattctaattgaaaaagtcatgaaattaaaataa

SEQ ID NO: 66122 - protein, 246 aa, Unknown
  Obtained from environmental sample
  DOMAIN (1)...(199): Polysaccharide biosynthesis protein
  misc_feature (1)..(246): Xaa is any amino acid
MMEENPVAAVENNVFGTENLVLAAIKHNIKRFVHITTDKAVEPVSVYGASKYLCEQMVLEAAASSGGPNFMVVRFGNVLGSRGSIVPLFQQQIQKGGPVTITHPDIRRWFMTISEACSLVLKAGGVGVNGGLYLLDMGEPVRIKDLAEQLIRFHGFEPDTEIKIVYTGLRPGERMDEPLWSQDEKVKETEYSRILQVNREKPFNVDLKEMLEQLRPICRFDPAKPQVYRDAELLHAILIEKVMKLK

SEQ ID NO: 66123 - DNA, 1680 bp, Unknown
  Obtained from environmental sample
  misc_feature (1)..(1680): n is a, c, g, or t
gtgacatattatgataaaaaagagaaagagactaagttaaaaaagacagaaaaaacattaatcgtaaaaaccgcgacccaatggccgtatcatgtaaaacgctcggtagcccgcgtacttggaatcgaccaatcgggcgtttgcgtggaaactacctctcttggcctgcacatggacggaaaacttatgtttacctcccttgtcgcctgccactgcgctctcggcacttttcttacaaacaagccggtacgtcttattcttaacagggaagaagattttttgtactctccaaaacgctgtaaaaccaacattgacttggtaaccaccatagacgacaaaggaaatataaccgccgctgaagctgacatcgttgttaaccttggcgcgcacggggttaacggcgaggaaatactggatcaggtttgtcttggcgtcatcggctataatgttgttgaaaattttaaaattaccgcaagggcatatgtttcaaacttaccgcctcagggccctttctcanggtttgggcttgcgcagggctttttcgccatacagcgccatttagcccaaattgcggataccgttcaaattaaccctctggaatggcgaaagacacattacaacccttctatggttctgccttcgggtataaatcccaaaaaccatatctctgttgataaactggtaagcgccgttacaaatacgagcgattataaccgcaaatgggcctcttacgaattattgaaacaaagcagacgggaaaagactttaacttatgagaaaggcgaaaatttaagaggaataggattgacggttggatttcagggaagcggccttctctaccacggcgaggacaagggaatttacagcgtggaagttactttgacaaaggacagtttccttgaaataaaaacaagcattacaagcacagaagaagattatgtaaaaatctgggtaaaaatcgcctgggatattttatcaatcgaagcggaaaaaatacgccttattattgaaaaggcgccggacggaggtccttcctgcgcgtcgagaaacattacggcgcttacaaaactggttgaaaaatgctgtcaggccatccgtaaacagcgctttcacgaccccttgcctattaccgtgcgccgttccgtaaaaccccaatacggctcgctgtggcagaaccgctttttaccccgcgaagggaagaacatagacataagcggcttttcaaaactcggcatggccgcctgtgtcgttgaggtttccattgacctcgtggaatgtataccgcaaatcagagggatatggcttgcgattgacggcggaaaaatcatctcgaaaaacagggcaagaaggaacatcacccggggagcggcccaggcgctgggctgggccttttctgaaaatatcgaatattctgaaggagtgcttcctaaggccaagtatgataaatttgttatttcatcctgtcttgatattccggtattaggcgttgaatttatgcctacgggtaatcctgaaacaaagggaataggagatctgccttttacatgcatacccgcggcttttttacaggccgtctcgcaggcaatggatcattgttataaaaacatccctttgaaaaggaaagaaatttgggaaattgcgcggatcaggaacagcgacgcgcaacaggggcagaaatga

SEQ ID NO: 66124 - protein, 559 aa, Unknown
  Obtained from environmental sample
  DOMAIN (2)...(492): Aldehyde oxidase and xanthine dehydrogenase, molybdopterin binding domain
  misc_feature (1)..(559): Xaa is any amino acid
MTYYDKKEKETKLKKTEKTLIVKTATQWPYHVKRSVARVLGIDQSGVCVETTSLGLHMDGKLMFTSLVACHCALGTFLTNKPVRLILNREEDFLYSPKRCKTNIDLVTTIDDKGNITAAEADIVVNLGAHGVNGEEILDQVCLGVIGYNVVENFKITARAYVSNLPPQGPFSXFGLAQGFFAIQRHLAQIADTVQINPLEWRKTHYNPSMVLPSGINPKNHISVDKLVSAVTNTSDYNRKWASYELLKQSRREKTLTYEKGENLRGIGLTVGFQGSGLLYHGEDKGIYSVEVTLTKDSFLEIKTSITSTEEDYVKIWVKIAWDILSIEAEKIRLIIEKAPDGGPSCASRNITALTKLVEKCCQAIRKQRFHDPLPITVRRSVKPQYGSLWQNRFLPREGKNIDISGFSKLGMAACVVEVSIDLVECIPQIRGIWLAIDGGKIISKNRARRNITRGAAQALGWAFSENIEYSEGVLPKAKYDKFVISSCLDIPVLGVEFMPTGNPETKGIGDLPFTCIPAAFLQAVSQAMDHCYKNIPLKRKEIWEIARIRNSDAQQGQK

SEQ ID NO: 66125 - DNA, 534 bp, Unknown
  Obtained from environmental sample
  misc_feature (1)..(534): n is a, c, g, or t
ttgggaaattgcgcggatcaggaacagcgacgcgcaacaggggcagaaatgacaattaattttatcttaaacggggaagacgttatggtacgcacggaagccggggtaaggcttattcatatactgcgggaaagtttcggcttgttcggcgcgaaagccggctgccttaacggacagtgcggcgcgtgtacggtaatctttaacagcatagtaacttccgcgtgcctgataccggcgttcagagtaagaggaagcgagattatcacaatagaaggattttcacagacggacgaatacaatgacatattaacgggatttaaggaagtgcatttgggaaattgcggattttgcgaagctggaaaaattctttgcacggagacgcttcttgaaagattcccaaaccccacaagggaagacatcattatgagttttgcgggtattaactgccgctgtaccaatatagacaggctggtagaagcggtaaattgcataataggcatacgccggcggagattatatggacgtactgcttaa

SEQ ID NO: 66126 - protein, 177 aa, Unknown
  Obtained from environmental sample
  DOMAIN (89)...(163): [2Fe-2S] binding domain
  misc_feature (1)..(177): Xaa is any amino acid
MGNCADQEQRRATGAEMTINFILNGEDVMVRTEAGVRLIHILRESFGLFGAKAGCLNGQCGACTVIFNSIVTSACLIPAFRVRGSEIITIEGFSQTDEYNDILTGFKEVHLGNCGFCEAGKILCTETLLERFPNPTREDIIMSFAGINCRCTNIDRLVEAVNCIIGIRRRRLYGRTA

SEQ ID NO: 66127 - DNA, 888 bp, Unknown
  Obtained from environmental sample
  misc_feature (1)..(888): n is a, c, g, or t
ttgaaatcctcggcattaaacacgccggagagtagggggcagcaaatgaaaaaacttatcagcgggaaagtaagggaagtatatgaaatctcggatgacaggctggtcatcgtcacgacggacaggatttccgcgtttgacgtaattctgccaaagccagtgctcaataagggaaaggttcttaatgccgtttccctgttctggtttaactatacaaaagatattattcccaatcacattatctcaaacgaactaaaagatatgcccgatttttttcaaaaggacgaattcgggggacgcgctgttttggttaaaaaggttaaaatacttccgtttgaatttatcatcaggggatatatgttcgggaatatgtggtcggcctattccaaaggcgaggaattctgcggtcagaaaataagaagcggttacaagctggctgaaaaactggataccccgctgtttaccccctcaacaaaagcccatgtagggcatgacgagtatatcaccgttaagcatgtctcggattcgattggcgccgaactggcaaaaagaattgagaaagtcagctttgatatttataacacctgttacaattacgcctacaagaaaaatattatcatcgccgacacgaaatttgaattcggccttgacgaagaaaacaatttatatctcgccgacgaggtgttaactccggattcaagcaggttctgggatcttgacggttatcaggtgggggtatcgccgaaaagttatgacaaacaatttgtaagggactggctcctcaataataaaaaagacggtgagatgcaatttgacaaagtaccggagcacattctgcaaaagacatcggagatttacgcggaatgtctgaagaagataacaggctaa

SEQ ID NO: 66128 - protein, 295 aa, Unknown
  Obtained from environmental sample
  DOMAIN (15)...(278): SAICAR synthetase
  misc_feature (1)..(295): Xaa is any amino acid
MKSSALNTPESRGQQMKKLISGKVREVYEISDDRLVIVTTDRISAFDVILPKPVLNKGKVLNAVSLFWFNYTKDIIPNHIISNELKDMPDFFQKDEFGGRAVLVKKVKILPFEFIIRGYMFGNMWSAYSKGEEFCGQKIRSGYKLAEKLDTPLFTPSTKAHVGHDEYITVKHVSDSIGAELAKRIEKVSFDIYNTCYNYAYKKNIIIADTKFEFGLDEENNLYLADEVLTPDSSRFWDLDGYQVGVSPKSYDKQFVRDWLLNNKKDGEMQFDKVPEHILQKTSEIYAECLKKITG

SEQ ID NO: 66129 - DNA, 432 bp, Unknown
  Obtained from environmental sample
  misc_feature (1)..(432): n is a, c, g, or t
gtgaaaagggtttatgtgaacgaaaaatggtgcttaggctgccatttgtgcgaatattactgcgcttttgcgggaaccggggaaaacgacatggcgcgggccttaaaaggcatgaaaataaacccgaatatccgtatagaggaaaaagacgggatcagtttcgccgtttcctgccggcactgcaaaacgccgttatgcgtcaaagcgtgtatcacgggcagcctgaccataacggacggcgttattaccattaacaggaacaggtgcgtcagctgttatacctgcattttaagctgcccttacggcgcggtggcgccttcggacgacggcgctgtgcagaaatgcgagctttgcgttaatacgaccgaaggaaccccgacctgcgtaaaaggctgccccaacaacgcgatagtttttgaggaaagaggctag

SEQ ID NO: 66130 - protein, 143 aa, Unknown
  Obtained from environmental sample
  DOMAIN (82)...(105): 4Fe-4S binding domain
  misc_feature (1)..(143): Xaa is any amino acid
MKRVYVNEKWCLGCHLCEYYCAFAGTGENDMARALKGMKINPNIRIEEKDGISFAVSCRHCKTPLCVKACITGSLTITDGVITINRNRCVSCYTCILSCPYGAVAPSDDGAVQKCELCVNTTEGTPTCVKGCPNNAIVFEERG

SEQ ID NO: 66131 - DNA, 1254 bp, Unknown
  Obtained from environmental sample
  misc_feature (1)..(1254): n is a, c, g, or t
atgaaatatattatcataggaaattccgccgcgggcataggcgcagtagagggtattcgtcacatggacaaggatggcgagatcaccattatcaccaacgaacggcatcacacctattcgcgtcctctgatttcgtatcttctgcttggcaaggttacaagggaagggattaaataccggaacgacagtttctacagggattataaatgtactctgcttgcggacacgaccgtaacggcaattgaagccgcggaaaagaaagtggttctgcaggacggcagaaaaatctcctacgacaagctgttggtcgccacaggttcttctccctttgtgcctgtttttgaggggcttgataccgtagcaaacaaacatacgtttatgagccttgatgacgcggacggactggacgccgtgctggctgaggacaagcgggtattgatcatcggcgcgggtcttatcggcctaaaatgcgccgagggcattctgaagcatgtgaaacacataacggtggttgaccttgctccccgcattttatcaagcattcttgatgatgaaggggcaaagttgattcaaagccacctggaaagcaaaggcatagagttcaggcttgcggctaacataaagaagtttacgtttaatcaggccattttagacggcggtgaaataatagatttcgatatccttgtcctcgctgtgggcgtgcgtcccaatacctcgctcttaaatgggatagcgaagattgaacgcggtattgttgtaaatgagaaatcagagacgacggcccctgacatttacgccgccggcgactgtactcaaacatttgacgtgtcaagcgggcagaacaaggtcatggcgcttctgcccaacgcctatatgcagggcgagtgcgccggaatcaacatgactggcaacgccgcgggcggagcgagtttcgataaggctatacccatgaacgccatcggatttttgggtctgcacgttattaccgccggcaactacgacggacaggtatattccgaaagcaataatcccaaaaccaaagatagcggctataaacgtctgtttttcagtaataacaaattgaatggttatatccttattggcaacgtggaaaaagcggggatttacacaaaccttatccgcgagcaaactcctcttgacaccatcgacttccagcttgtctgcgaaaaacccgggcttatggcgtttaccaaagaaaccagaatggagaaattgggaaaagcggcgtcttga

SEQ ID NO: 66132 - protein, 417 aa, Unknown
  Obtained from environmental sample
  DOMAIN (144)...(233): Pyridine nucleotide-disulphide oxidoreductase
  misc_feature (1)..(417): Xaa is any amino acid
MKYIIIGNSAAGIGAVEGIRHMDKDGEITIITNERHHTYSRPLISYLLLGKVTREGIKYRNDSFYRDYKCTLLADTTVTAIEAAEKKVVLQDGRKISYDKLLVATGSSPFVPVFEGLDTVANKHTFMSLDDADGLDAVLAEDKRVLIIGAGLIGLKCAEGILKHVKHITVVDLAPRILSSILDDEGAKLIQSHLESKGIEFRLAANIKKFTFNQAILDGGEIIDFDILVLAVGVRPNTSLLNGIAKIERGIVVNEKSETTAPDIYAAGDCTQTFDVSSGQNKVMALLPNAYMQGECAGINMTGNAAGGASFDKAIPMNAIGFLGLHVITAGNYDGQVYSESNNPKTKDSGYKRLFFSNNKLNGYILIGNVEKAGIYTNLIREQTPLDTIDFQLVCEKPGLMAFTKETRMEKLGKAAS

SEQ ID NO: 66133 - DNA, 942 bp, Unknown
  Obtained from environmental sample
  misc_feature (1)..(942): n is a, c, g, or t
atgagtgacgataacgattatgaaaatatagaagacgacgttgttcttgatgacgagcccaaggtaaacaatgtcattacaggcgccgacgccggcatagaatctctcgctcccgacacgcccatctacaggctcaggcttttatattctcatgaaacctttcttgccgtttacagggaagacagccttgcccccaacactatggttatagtgcctacccgttacggccgcgatcttgctcaggtaataggctccgtacgcggaaaacttccgcccgtttcagaaatcgcctggatagtgcgcaccgcgactcaggaggatctggacaaagcctgcaaaaaccacaaacaggaaaaagaaacctttgacatctgttttaaaaaaatcgaacagcacaaactggaaatgaagctggttcttgttcattatcttctggaagagcccaaaatactgttcttctttaccgccgacaacagggtagatttccgcgagcttgttaaagaccttgtaagcgtctttaagatgaggatagaactgcgtcaaatcggcgtgcgcgacgaagcgcgcgtccttggcggccttggcgtctgcggccgcggttattgctgccactgtgtttccgacaaactaaaacccgtttccattaaaatggcaaaagaccaaaaactttcacttaactccgtaaaaatttccggcccctgcggcaggctcatgtgctgtctcttttacgaatacaacttctacagcgaacagcagcgcaccctcccccaggaaggcgtaagggtaagccacaacaacgaatcatggaaaatcacggaagtaaaccccgttacgggtcaaattaagttgagctccgacgacggccgcttcatgaccgcctcctccgcccaattcgaaagaaccgaaaaccactggcgcttacgtgaagcggtgaaggtttaa

SEQ ID NO: 66134 - protein, 313 aa, Unknown
  Obtained from environmental sample
  DOMAIN (95)...(182): PSP1 C-terminal conserved region
  misc_feature (1)..(313): Xaa is any amino acid
MSDDNDYENIEDDVVLDDEPKVNNVITGADAGIESLAPDTPIYRLRLLYSHETFLAVYREDSLAPNTMVIVPTRYGRDLAQVIGSVRGKLPPVSEIAWIVRTATQEDLDKACKNHKQEKETFDICFKKIEQHKLEMKLVLVHYLLEEPKILFFFTADNRVDFRELVKDLVSVFKMRIELRQIGVRDEARVLGGLGVCGRGYCCHCVSDKLKPVSIKMAKDQKLSLNSVKISGPCGRLMCCLFYEYNFYSEQQRTLPQEGVRVSHNNESWKITEVNPVTGQIKLSSDDGRFMTASSAQFERTENHWRLREAVKV

SEQ ID NO: 66135 - DNA, 1365 bp, Unknown
  Obtained from environmental sample
  misc_feature (1)..(1365): n is a, c, g, or t
atgagcgaatattttaagtcgtccggagatgtttttaactggttatcaaaatttataaatttagagagggggcagactccgaaaagttttaggattgatcggatggaatttttgacatgttttgcgggggagcctcacaagcttatgccttctattcacatagccggatcgaaagggaaagggtctgtaacggggatgtcgacggctatgttatctgccgcggggtaccgtgttgcacggtatatgtcgcctcatgttgttgatatacgggagaggatttgccttaataattcttattttagcgaagaggtttaccgcgccgcgggtaatgaattgcgggatattacggaaaaactgccttcagcggcaaatcctctttttgacccatcaacccccgaaggatgcgagcctacatattttgagcttttaactctattctttttcctttgcgccaaacacgggaactgtaacgtcatggttgttgagacgggcatgggggggcggttggattctactaatgtgcttgatccggtgttaagcgtaataactttaatcgaattggaacatacgggctttttgggcgatactatcgcaaagattgcggcggagaaagcgggtatagttaagcagggcaagccgctggttttggcgaagcagagcgaagaggctcttgagatttttcaaaaaaccgcaaaagaaaaaaacagccccttaatttattttcccgaagcggcagaaatctccaacttaaaaatttttccggaaggtacggattttactctcagtttaaagagccggctcttccccgccccgctgtccctctttattcccgtgccgggcaaggtgcaggctgaaaacgccgctcttgccattgccgccgtaaaaaccgccttcccgcagattagcgaagacgctatccgcgcggggctgaaaaatttaaaaatccccgcccgctttgaaaaaatagcgcccgattttatcattgacggcgcgcacacgcctgagagtctcgctcttgccatagaaaccttttgccaactctacggcgaaggcggcgtacttattttcggctgcgccgccgacaaagacgctaaggcaatggcaaaaacagcgcacccccacttcgcgaaaatattcatcaccactccgggaacttttaaagcgagcaacccgccccaggtttacgaagccttcgcgtcgcaagcgtcgcagcaagcagcgggacaggagaaaacgcgattaatcgctgatacacgggaagctgtagaggaagcgcgggaattcgcggcgaagaataatttgccgattttggggacggggtctttttacttagtctcggaaataagaaaaatcattttaccttga

SEQ ID NO: 66136 - protein, 454 aa, Unknown
  Obtained from environmental sample
  DOMAIN (315)...(396): Mur ligase family, glutamate ligase domain
  misc_feature (1)..(454): Xaa is any amino acid
MSEYFKSSGDVFNWLSKFINLERGQTPKSFRIDRMEFLTCFAGEPHKLMPSIHIAGSKGKGSVTGMSTAMLSAAGYRVARYMSPHVVDIRERICLNNSYFSEEVYRAAGNELRDITEKLPSAANPLFDPSTPEGCEPTYFELLTLFFFLCAKHGNCNVMVVETGMGGRLDSTNVLDPVLSVITLIELEHTGFLGDTIAKIAAEKAGIVKQGKPLVLAKQSEEALEIFQKTAKEKNSPLIYFPEAAEISNLKIFPEGTDFTLSLKSRLFPAPLSLFIPVPGKVQAENAALAIAAVKTAFPQISEDAIRAGLKNLKIPARFEKIAPDFIIDGAHTPESLALAIETFCQLYGEGGVLIFGCAADKDAKAMAKTAHPHFAKIFITTPGTFKASNPPQVYEAFASQASQQAAGQEKTRLIADTREAVEEAREFAAKNNLPILGTGSFYLVSEIRKIILP

SEQ ID NO: 66137 - DNA, 2577 bp, Unknown
  Obtained from environmental sample
  misc_feature (1)..(2577): n is a, c, g, or t
atggaaaacatgtctccgtacaatgataagagtgtttcgttacaatttaaacgcccccggcttaacgaactgtttgctgaggctgtgaaattccctgtagttgtggtatgcgccggcgcgggttacggcaaaaccatagcggttcatgattttgcgcaggagtatcaggcgactacattttggctgcagctttcagagcgcgataacacaagcgcgcgtttttgggaaagttatatacatactttaacaaagattaacgcgcctcttgccaaagcattaactaaaatgggttttccagacacaaaagaaaaaataaatcattatctggatttattagacgagcttgtagagaaaaaaaggcgaatcattgtcatggatgattttcattgcattgaagagccttccgtaatcaggtttatagaggagtgtattctttttaaaatgcctccggggacgtctgtatttcttatctcccgcactgttccagatattaaaacagctaacgacgcttacgggaaaaaaatatttaatataaccgaagatgaccttcgctttacggaaagcgaacttgcccagtattttcgcggcaaaaatatttccccggcgcatgaaaacttgcgcgaaatcatgcgggataccggcggctgggcgtttgcgattaactttatcgcgcagtcttttcaaaaagcgccgggatacagcggttatgtgcgtaacgcgctcaggacaaatatattcggtataatcgagacaggactttggaatgatatttccaaccgcctgcaaaattttttactgcgtctttctcttatcggtcatctgtctatagatttaattactcaactggcgggaaatgaagaagagcttgtcgcggaaatggaaaaacaaagcgcttatgtgcgcagggacaattttatcaatgcgtaccttattcatcctttgtttttggaatttttaatcacaaagcaggatactctctcggaagaacaaaaaaaagaaacctacgctatttcgggtaattggtgcgctcataacggttttaatattgacgctatgtcgtactatgaaaaggcgggagattataaatcaatacttttggttatagccgggttaaccacccaaataccgcaagatatcgcgaaatacgcggcgcagattttagacaaggctccggcggacgcttttgataaggtggaatttcttgcggacatgcatttgcgcacatatatatgtcaagggttactgaaaaaatcacttgagctggtaaagcactacgaagaaaaatttcttaaattgccggatgaacctcaaccgagctcgaagagcgaaggttctcttattgatgactttataaagaatagaactcttacaagactttatatttgctggacatacatacgctgtttaatgagcgtaacggacgacgtttttgattttgacacttacattgaaaaagcctgtaaatacgtaaatgaagcggattccggcaaactcgatatttattatccgggagcgtggatcaactttgccggttctccaaggaagggaagtcccgaagaatttatcgccgttataacccgtaatcacgcgcatatacaaaaaagttacatgaaagggttcatggccggcgaattggaactggcgcgcggcgaattggaattttaccgaggagacgcttcttccgcggagcctcatattgtccttgcgatgaagcaggcgcgggcggaaaaacagtttggtcttatgcacagggcgttgttatataccctgcgtattgccgccgcgcagggaaattttgcgcttatggaacagactattaaagagacaaaagcccagttggacgaagttgattatgtaaatcgttttattgattatgatatttccctttcatggtattactgttttctaggaatgccggaaaaagcggttgattggctaaaggaagattttttaacttacagccacgccgcttccattgacaattttgcgaatcaaataatagcgcgtctttgttatgcgacgcgaaactattctcctttactgtcgtatatcgaggaaatgaagcggcgggaatcgtttttattcggacgggtggaaatgctggcaatggaagcctgtattcattacaaaatgaaaaacaaaaataaagcgtttgccgtatttgaggaagcgtacaaaaacgcggaacctaacagtatattgatgccgtttatcgaaatgggaaaagatatgcgcactttggcgtccgccatgctcaaagaatcaaaaaaaattattcccgccgcatggctggaagatattaatcataaatcagccacttatgcaaaacgccgctcccatgttatcgctaagtatacgcagttaagcggcacggcgggcggcattgctttgtccccgcgtgaaaccgaaatcttaaatgacatttcgcacggtctctctcgcgccgaaatcgccgcgtcgcgtaaactttcgattaatacaataaaaatgataattaacaaaatccataacaaacttggcgctgaaaatcttgcagaccttatccgcatagccgttgaacgcaaattaatctcttaa

SEQ ID NO: 66138 - protein, 858 aa, Unknown
  Obtained from environmental sample
  DOMAIN (794)...(851): Bacterial regulatory proteins, luxR family
  misc_feature (1)..(858): Xaa is any amino acid
MENMSPYNDKSVSLQFKRPRLNELFAEAVKFPVVVVCAGAGYGKTIAVHDFAQEYQATTFWLQLSERDNTSARFWESYIHTLTKINAPLAKALTKMGFPDTKEKINHYLDLLDELVEKKRRIIVMDDFHCIEEPSVIRFIEECILFKMPPGTSVFLISRTVPDIKTANDAYGKKIFNITEDDLRFTESELAQYFRGKNISPAHENLREIMRDTGGWAFAINFIAQSFQKAPGYSGYVRNALRTNIFGIIETGLWNDISNRLQNFLLRLSLIGHLSIDLITQLAGNEEELVAEMEKQSAYVRRDNFINAYLIHPLFLEFLITKQDTLSEEQKKETYAISGNWCAHNGFNIDAMSYYEKAGDYKSILLVIAGLTTQIPQDIAKYAAQILDKAPADAFDKVEFLADMHLRTYICQGLLKKSLELVKHYEEKFLKLPDEPQPSSKSEGSLIDDFIKNRTLTRLYICWTYIRCLMSVTDDVFDFDTYIEKACKYVNEADSGKLDIYYPGAWINFAGSPRKGSPEEFIAVITRNHAHIQKSYMKGFMAGELELARGELEFYRGDASSAEPHIVLAMKQARAEKQFGLMHRALLYTLRIAAAQGNFALMEQTIKETKAQLDEVDYVNRFIDYDISLSWYYCFLGMPEKAVDWLKEDFLTYSHAASIDNFANQIIARLCYATRNYSPLLSYIEEMKRRESFLFGRVEMLAMEACIHYKMKNKNKAFAVFEEAYKNAEPNSILMPFIEMGKDMRTLASAMLKESKKIIPAAWLEDINHKSATYAKRRSHVIAKYTQLSGTAGGIALSPRETEILNDISHGLSRAEIAASRKLSINTIKMIINKIHNKLGAENLADLIRIAVERKLIS

SEQ ID NO: 66139 - DNA, 1830 bp, Unknown
  Obtained from environmental sample
  misc_feature (1)..(1830): n is a, c, g, or t
ttggacatagtagatatggaagaactgcaagccgcaggaatttgggcaaaacatgaaaaaagcggcgcggaggtttttcatgttttaaatgacgacagcgaaaatcttttttcgtttacatttaaaacttttccgcaggacaataccggtgcgcctcacattcttgagcactcggttctatgcggttcacagcgttatccgctaaaagacgcgtttatggttcttgcgcagggaagccttcagacttttttgaatgcgatgacatttcccgacaaaacggtttatccggcaagttccaccaacgaacacgattattttaatttgatgtcggtgtacggcgatgcggttttccgaccgctgcttcccgaatggacatttatgcaggagggccacaggtacgagtatcaggacggcaggctctctgtcacaggagttgtttacaatgaaatgaaaggcgcttactccgcccttgattcctatgcttcaacatggtcggtaaaagcgatactgcccggcactccctatgcctttgactcaggcggcgatccgcaggaaatcccgcagcttacatgggaaggtttaaaagattttcaccgcagccgttattctcccgcaaattgcaaagtgttcctcgccggaaatatcccgacagagaaacagctttcatttttaaacgatcaatttttttcaaagattgaaggcggaaaagaatgcgcgccggttaacaagactgaacgctggaacgaacctaaaaaatttactgttccctgcccggcggacggcgaagctaaatcgacaatatttttatcatggctttgttccgatgttaccgatgtatacgaaagtatcgcgttagctgcacttacggaaattttattgggacacgacggctctccgttgacgcggacgttaattgaatccggttttggagaagacattacgcctgtctccgggcttgagggcgaaataagggaaacattatttgtagtcggcttgaaaggcgtaagcggcgatttacagcaaatgagtcaaaagattgaaaaacttatcatggacgagctgaacaggcttgttactgaaggcataccgccgcaagagacagaagcggctgttttatcaatggaattttctcagcgggaaatccgccggtctggaggaccgttttcccttgtttggatgcgccgttccctgcgttcatggctgcacggctgtaaaccgtgggaaagcctgcttcttctgccgtcaatggcaaagataaaagaaaaccttgccgccgacaatcgctattttgagaaacttataaaaaaatattttctggataacccgcaccgcgcccttgtcattcttgaaccaaaggaagattttttacagaagcaggaagaagccctttcgcggcagcttgccgataccgagaaaaacatgagcaaggacgcgcgtcaaaacattatcaaaaaagccgaagaactggaaaaaatccaaggccaggccgactccccgcaggcgcttgcgacaattccgcatctttcgcgtaacgatcttgccgctgaaagcgacattgttcaacgccgtcacgaagatttgcgcggaataccggctttatgccatgatctttacacaaacggcattacttatacggatttggcgttccccgtggatctttgtctgacgaagattatttgtggctgccgtttttttccagagcgattgtttctgtgggtcttccgggaatggattacggcgaagtgtcaagtttgctggcgcggacagccggcggctttaacgctgtattacacacaggctccgccgccgccggtacggataagtttctga

SEQ ID NO: 66140 - protein, 609 aa, Unknown
  Obtained from environmental sample
  DOMAIN (188)...(374): Peptidase M16 inactive domain
  misc_feature (1)..(609): Xaa is any amino acid
MDIVDMEELQAAGIWAKHEKSGAEVFHVLNDDSENLFSFTFKTFPQDNTGAPHILEHSVLCGSQRYPLKDAFMVLAQGSLQTFLNAMTFPDKTVYPASSTNEHDYFNLMSVYGDAVFRPLLPEWTFMQEGHRYEYQDGRLSVTGVVYNEMKGAYSALDSYASTWSVKAILPGTPYAFDSGGDPQEIPQLTWEGLKDFHRSRYSPANCKVFLAGNIPTEKQLSFLNDQFFSKIEGGKECAPVNKTERWNEPKKFTVPCPADGEAKSTIFLSWLCSDVTDVYESIALAALTEILLGHDGSPLTRTLIESGFGEDITPVSGLEGEIRETLFVVGLKGVSGDLQQMSQKIEKLIMDELNRLVTEGIPPQETEAAVLSMEFSQREIRRSGGPFSLVWMRRSLRSWLHGCKPWESLLLLPSMAKIKENLAADNRYFEKLIKKYFLDNPHRALVILEPKEDFLQKQEEALSRQLADTEKNMSKDARQNIIKKAEELEKIQGQADSPQALATIPHLSRNDLAAESDIVQRRHEDLRGIPALCHDLYTNGITYTDLAFPVDLCLTKIICGCRFFPERLFLWVFREWITAKCQVCWRGQPAALTLYYTQAPPPPVRISF

SEQ ID NO: 66141 - DNA, 1257 bp, Unknown
  Obtained from environmental sample
  misc_feature (1)..(1257): n is a, c, g, or t
ttgtctgacgaagattatttgtggctgccgtttttttccagagcgattgtttctgtgggtcttccgggaatggattacggcgaagtgtcaagtttgctggcgcggacagccggcggctttaacgctgtattacacacaggctccgccgccgccggtacggataagtttctgaaaactgcgtcgggtctttttgacttatccggccgcgactggcttatcttccgcttaaagtgtttggacgaaaagctcgcgccgtctttggatcttgtcctgcgcctgatctgcgaagctgatttatcagatcacgaccgtataaccgatcttgttctggaaatgaagaacgaaatttcttccagtcttgcgccgatgggacaccagtacgcctcttccaaggcgggacggggcaattccctatgcaaaaaaacagaagaaacatggaacggactttctcagatagagtttgtccaccgccttgcggaatatgatgcgcctgtagtcgccgctaaattaaaatatttacaggaaaaaatttcaagcgcagggttaatcgccaacctgacaggccagtccttgcagaccgcgggcgcggaagtttcgcaaaggttcggcaggtttggcgctcccgcgcctcgctcttctgcgcctcgcgcagatgtttcaggaaaaaaagcattcgccgaagttttcgcgtctccctctttgcaggttggtttcgcggcgcgttcaatgaattctgcggcttttgacactacagagcaaattgcggaaatggtactgactcaccagctttcgacaggggcgctttgggaagatatacgaatgaagggcggcgcctacggcgcgttcgcaaccagcgacagccttgaaaactgtgtttcctttgcgacctaccgcgaccccaatcctttgcgctcgcttgacattttttccgcaatactgaaaaacgccgtgcatgggaattgcgatgaagactcgcttgttaaaaatataatcgggtgttatgcgaaagaaacgcgcccaaggacaagcgccgaaaacgggctggttgatttttaccgtttcctttacgggatagaagacagttaccgcaaaagaaaaatagaacgccttgtttcgacttcaacatcggatattcaggcggctttttcggcgcttggatcaagggctgcgacaggctcggtagttattgcgggaacaaaagccgcggaacaggcggcaaaggcgcttggaacggaagtacaattactgcctgtgtaa

SEQ ID NO: 66142 - protein, 418 aa, Unknown
  Obtained from environmental sample
  DOMAIN (1)...(158): Peptidase M16C associated
  misc_feature (1)..(418): Xaa is any amino acid
MSDEDYLWLPFFSRAIVSVGLPGMDYGEVSSLLARTAGGFNAVLHTGSAAAGTDKFLKTASGLFDLSGRDWLIFRLKCLDEKLAPSLDLVLRLICEADLSDHDRITDLVLEMKNEISSSLAPMGHQYASSKAGRGNSLCKKTEETWNGLSQIEFVHRLAEYDAPVVAAKLKYLQEKISSAGLIANLTGQSLQTAGAEVSQRFGRFGAPAPRSSAPRADVSGKKAFAEVFASPSLQVGFAARSMNSAAFDTTEQIAEMVLTHQLSTGALWEDIRMKGGAYGAFATSDSLENCVSFATYRDPNPLRSLDIFSAILKNAVHGNCDEDSLVKNIIGCYAKETRPRTSAENGLVDFYRFLYGIEDSYRKRKIERLVSTSTSDIQAAFSALGSRAATGSVVIAGTKAAEQAAKALGTEVQLLPV

SEQ ID NO: 66143 - DNA, 1389 bp, Unknown
  Obtained from environmental sample
  misc_feature (1)..(1389): n is a, c, g, or t
atggacgcaaaggaaaaatatcaggatattattcgcaacattatagcgttaattgtggaaatacggcgggatgttcaacatggaatgtatccgctgttaatgaaattgatttccgatcgttttattccttatgggcggattttcatagaacgccgccgctgctttatggcttttctgaatgctaccgcagatgaacagttgtccgcggaggaaatagacatacgaaaaattgacagcatggatttagataccttgcagaaaaacagtgaatctgctgaaactggtgaaaatgccgaagataacgaaattgatgaagatatcgaaaacattgaagatatcgaagacattgaaaatattgaaagtgatgaaaatattgaacaggttgatgatacagaaaaacaggaggaagcggttgttcaggaagatcccaatgatccggcagtaatagaaagcaaaacaaaagaagaagccgaaaaagcggaacaaaaggcgctggaacagggacggacgatgctggaaaaattattcccaaaagccggttggaataaacttgatgaacaaccggatctttatccgtattttgccaatatgtacaacatgaagcagggctttgaattactttctcctacagacccgttgcagcagatttccgtaatgatgcatatactaaatgatttttttatcggaatgcgttatgtgaatttcgggacgataataagccatgacggcaaattaacaaaattaaatgaagaaatgccggatattattaacaactggggtttatatatagaaaacagttttttaaaagaatatctccctcgtttaacggaatattgccgtatgctggaaaattccgaagaagcaagaatgtctgcttacgcaaaaaaactcctgaatgaactatactggataaaacggctttattttcttccttactataaatttgaatcctttgggccgccgccctttacaaaacaggagactattcctatctatactcaaataagaaaagtcaggaaataccttacttcgattgcaataggtattgaacaaggtctacacgcaggcggagccgcggtcaaagccccctgtgacggaataactaacccatggcaaacctacaattttcaaataccaaaccccgtatcaagacgtttgaatacgatgcttccaccggaaagaaaaataaacgcaacgcttattttattttctctgtcagtggttactgtgatggattaccttataaacaacgaaagcagttggttttatacaaaccgttccgggacattttttagaagcttcaaaaacgaaggaattattccgatattcggcatagacgaaagggtggatgccgataagttattcagggaatctttaaagaaaagctga

SEQ ID NO: 66144 - protein, 462 aa, Unknown
  Obtained from environmental sample
  misc_feature (1)..(462): Xaa is any amino acid
MDAKEKYQDIIRNIIALIVEIRRDVQHGMYPLLMKLISDRFIPYGRIFIERRRCFMAFLNATADEQLSAEEIDIRKIDSMDLDTLQKNSESAETGENAEDNEIDEDIENIEDIEDIENIESDENIEQVDDTEKQEEAVVQEDPNDPAVIESKTKEEAEKAEQKALEQGRTMLEKLFPKAGWNKLDEQPDLYPYFANMYNMKQGFELLSPTDPLQQISVMMHILNDFFIGMRYVNFGTIISHDGKLTKLNEEMPDIINNWGLYIENSFLKEYLPRLTEYCRMLENSEEARMSAYAKKLLNELYWIKRLYFLPYYKFESFGPPPFTKQETIPIYTQIRKVRKYLTSIAIGIEQGLHAGGAAVKAPCDGITNPWQTYNFQIPNPVSRRLNTMLPPERKINATLILFSLSVVTVMDYLINNESSWFYTNRSGTFFRSFKNEGIIPIFGIDERVDADKLFRESLKKS

SEQ ID NO: 66145 - DNA, 930 bp, Unknown
  Obtained from environmental sample
  misc_feature (1)..(930): n is a, c, g, or t
ttgcggccccacgctgcactgaccagacaggtctttcaccggcttgcctacacttggatggattggggcaggcggaacaattactttgacggcgaagaggacgagaaggcgttttatgacgagacctgttacatgctggctcatcagttcgccgcgcctaacagcccgcagtggtttaacaccggcttgtacgccgtttacgggatcgacgggccggcgcaggggcatttttattttgatcctgaaaagaacgaagttgtaaaatccgagagcgcatacaggcggcctcagccgcacgcctgttttattctttctatagatgacgatcttgtgaacgagggcggcatcatggatctgatgacccgtgaggcgaggcttttcaagtacggctccgggacgggctccaatttttcgcgcattcgggggttgaacgaaaaactttcaggcggcggttattcgtcggggcttttgtcgtttttgaaagtgggagaccgttccgcttccgcgattaagtcgggggggactacccgcagagcggcgaaaatggttaccctcgatatcgatcaccccgatgtcgaaaattacatcaactggaaatcgggggaggaacacaaagtcgcctctatggtaacaggttctcttattttgaagaaacatatcgacgggatcaaaaaagccctgacaggctttcgcggcccggaagaagataaattcaacgccgagaaaaaccacgagcttgcggcggttctgcgctcggcgttaggcgacaagataccaatctcgtatctttaccagcagcttcgccgtcttgaacagggcgatgaggaggttgacgtttcccagtattccaccgcgtgggaagacgaggcgtacaatacggtttctggggcaagttcaataacagcctgcgcgttaccgacgaatttatga

SEQ ID NO: 66146 - protein, 309 aa, Unknown
  Obtained from environmental sample
  DOMAIN (2)...(49): Class II vitamin B12-dependent ribonucleotide reductase
  misc_feature (1)..(309): Xaa is any amino acid
MRPHAALTRQVFHRLAYTWMDWGRRNNYFDGEEDEKAFYDETCYMLAHQFAAPNSPQWFNTGLYAVYGIDGPAQGHFYFDPEKNEVVKSESAYRRPQPHACFILSIDDDLVNEGGIMDLMTREARLFKYGSGTGSNFSRIRGLNEKLSGGGYSSGLLSFLKVGDRSASAIKSGGTTRRAAKMVTLDIDHPDVENYINWKSGEEHKVASMVTGSLILKKHIDGIKKALTGFRGPEEDKFNAEKNHELAAVLRSALGDKIPISYLYQQLRRLEQGDEEVDVSQYSTAWEDEAYNTVSGASSITACALPTNL

SEQ ID NO: 66147 - DNA, 930 bp, Unknown
  Obtained from environmental sample
  misc_feature (1)..(930): n is a, c, g, or t
gtgggaagacgaggcgtacaatacggtttctggggcaagttcaataacagcctgcgcgttaccgacgaatttatgagggcggtgttaagcgatacggactgggatcttaaaagcaggacttccggcgaaccggtaaaaaccgtcaaggcgagaaaactttggacggacatagcgaggacaagctggcagtgcgcggaccccggccttcaatatcacacgacaattaacgattggcatacgtgtccggccggcggtgagatacgggcttccaatccctgttcggaatatatgtttttggatgataccgcgtgcaatctggcttctataaaccttgtcgcgttatacgacaaaagaagaaaagcgtttaacgtcgaaggttatcttcacgcgataagtatttggactacaattttggaaatttccgtcgtgatggcgcagtttccgtcttcacgcatcgccgagctttcatacgagtaccgaactctggggctcggttacgccaacttgggaaccctcctaatgatcatggggctggcctatgattcggagcaggggcgcgcggtagcgggagcgctttctgcgctgcttaccggcgaagcgtacgcgcaatccgcccgcatggcgggagagcacggtcctttcgcacgttacggcgaaaattcgcagaatatgctccgtgttatacgcaaccacaggcgggcggtgaataacgcgcctgatattgaatatgaggggctccataccgtgccaaagggaatagatcccgtttattgccctgcctatcttctggacgcggcaaaggacgcgtgggacagagcgcttgagttcggtaaaatacacggttttcgcaacgcgcaagttacggcaatcgcccccacaggaactatcggccttttgatggactgcgataccacagggattgagccctga

SEQ ID NO: 66148 - protein, 309 aa, Unknown
  Obtained from environmental sample
  misc_feature (1)..(309): Xaa is any amino acid
MGRRGVQYGFWGKFNNSLRVTDEFMRAVLSDTDWDLKSRTSGEPVKTVKARKLWTDIARTSWQCADPGLQYHTTINDWHTCPAGGEIRASNPCSEYMFLDDTACNLASINLVALYDKRRKAFNVEGYLHAISIWTTILEISVVMAQFPSSRIAELSYEYRTLGLGYANLGTLLMIMGLAYDSEQGRAVAGALSALLTGEAYAQSARMAGEHGPFARYGENSQNMLRVIRNHRRAVNNAPDIEYEGLHTVPKGIDPVYCPAYLLDAAKDAWDRALEFGKIHGFRNAQVTAIAPTGTIGLLMDCDTTGIEP

SEQ ID NO: 66149 - DNA, 1578 bp, Unknown
  Obtained from environmental sample
  misc_feature (1)..(1578): n is a, c, g, or t
ttgagccctgatttcgcgcttgttaaatttaaaaatcttgccggcggcggccagttcaaaataattaatcaatctgttcccatcgctcttgagacgctaggctattcgccagccactatcgaggaaattgtcgcgtacgcgatgggcagaaaaaccctgaacggcgctcctgccatcaatgtagaaagccttaaagcaaaaggttttactcccgaagcgatacaggcggcggaagacgcggtaaagacggcgaccagtctggaaggcgtttttactccgtgggtgttgggcaaatcgtttgtggagaaggtgcttaaggttccggaatcgacatgggcgcttgcgggtttttctctccttaaacatcttgaatttgtaaaggaagatattgaggaagctgagttgtttgcctgcggcactatggctctggagggcgcgcccggccttaaaaaagaacattatgttatttttgatactgccaatccttcgggtaagaagagcaagcgctcaattccatggacggcgcatataggcatgatggcggcggttcagccttttatttccggcgcgatttccaaaacgatcaatatgcctaacggcgcgaattacgacgacgttaagggcgcgtacatgctttcgtggaagaacgggcttaaggcggtggctttgtaccgcgacggctcgaaactttcacagccgcttaacagcgtagaccctggcgcggatccgttagccgacactattctgaaggttgagaagggtttggacattccggcttcctcgcccgaccgcaagaaattaaatgcgcgcggtttgcgcagggctttgcccaaccgcaggatgggttacactcagaaggcgaaaatcggcgggcactcgatttttatcagaacgggcgaatatgaggacggcaatctgggcgaaatcttccttgatatgcacaaggaaggcgccgctttcagaagccttttgaacagttttgcgattaccgtttccctgggactgcaatacggcgtacccctggaagaatacgttgacgcgttcacgttcagcaggtttgagccaaacggcatggtgcagggacacgattatgtgaagatggcgacaagcgtaattgattatgttttccgcgatctcgcgattagttatcttaaacgcagtgacttggggcaggtaaaaccggaagaccttgtcgccaccgcgatgaagagcgaaacggaaacgccggatcaaaaaggacgcggcgaaaaaaacagcgcgggtttcaggcccaacagcgtcacggttccggcggttaagcccgtgaagcaacagcctcaaggaacggggggaggttcctccccacagggaaacgcccccaagggattggcgtattcatcagccgtagcccaaccgcagacgcaagtcgcggtaatggaaagctcttatccgcaggaaaatgaagtgataagaattgtacaggcgcgtattaaaggttatgagggggatccatgctcttcctgcggatcatttactttggtcagaaacggaacttgtatgaagtgcgacacctgtggcagtaccacgggatgttcttaa

SEQ ID NO: 66150 - protein, 525 aa, Unknown
  Obtained from environmental sample
  misc_feature (1)..(525): Xaa is any amino acid
MSPDFALVKFKNLAGGGQFKIINQSVPIALETLGYSPATIEEIVAYAMGRKTLNGAPAINVESLKAKGFTPEAIQAAEDAVKTATSLEGVFTPWVLGKSFVEKVLKVPESTWALAGFSLLKHLEFVKEDIEEAELFACGTMALEGAPGLKKEHYVIFDTANPSGKKSKRSIPWTAHIGMMAAVQPFISGAISKTINMPNGANYDDVKGAYMLSWKNGLKAVALYRDGSKLSQPLNSVDPGADPLADTILKVEKGLDIPASSPDRKKLNARGLRRALPNRRMGYTQKAKIGGHSIFIRTGEYEDGNLGEIFLDMHKEGAAFRSLLNSFAITVSLGLQYGVPLEEYVDAFTFSRFEPNGMVQGHDYVKMATSVIDYVFRDLAISYLKRSDLGQVKPEDLVATAMKSETETPDQKGRGEKNSAGFRPNSVTVPAVKPVKQQPQGTGGGSSPQGNAPKGLAYSSAVAQPQTQVAVMESSYPQENEVIRIVQARIKGYEGDPCSSCGSFTLVRNGTCMKCDTCGSTTGCS

SEQ ID NO: 66151 - DNA, 630 bp, Unknown
  Obtained from environmental sample
  misc_feature (1)..(630): n is a, c, g, or t
atgaatttgatttttttaggccctccgggcgcgggcaagggaacattggcggtcagggccatagaaatacttggcataccccagataagcaccggttcaatttttcgcgtcgcaatagcggatcaaactccgcttggcgttaaggtgaaatccatcattgattcgggaaaacttgtagatgatgaaactacaatcgcgcttgtaaaagagcgtcttgccaaagacgatgttaaaaaagggtatatattggacggtttcccccggacaattccacaagcggaggcgttagccggtttttcaaaagtggacaaggttatcaactttgacattcccgattcaggcgtgcttgaaaggcttggagggcggagggtctgcagaaaatgcggatacaattttcacgcggtttttaacaagcctaaaaaagaaggggtttgcgattactgcggcggagaagtgtacatccgcgacgatgacaagagcgaagccgtgcaaaaacgccttgaagtttaccgcgcccaaaccgctccgttaatcgactactaccgtaaaaaaggcattcttctggatatagacgcaagaccgatgatagacgaaatagtcgtcaattttaaaaaagccttggggatataa

SEQ ID NO: 66152 - protein, 209 aa, Unknown
  Obtained from environmental sample
  DOMAIN (122)...(157): Adenylate kinase, active site lid
  misc_feature (1)..(209): Xaa is any amino acid
MNLIFLGPPGAGKGTLAVRAIEILGIPQISTGSIFRVAIADQTPLGVKVKSIIDSGKLVDDETTIALVKERLAKDDVKKGYILDGFPRTIPQAEALAGFSKVDKVINFDIPDSGVLERLGGRRVCRKCGYNFHAVFNKPKKEGVCDYCGGEVYIRDDDKSEAVQKRLEVYRAQTAPLIDYYRKKGILLDIDARPMIDEIVVNFKKALGI

SEQ ID NO: 66153 - DNA, 573 bp, Unknown
  Obtained from environmental sample
  misc_feature (1)..(573): n is a, c, g, or t
ttgcataaggtgatagaaaaaaataatatgtctgtatggaaacacatacaccggggcgagcgtatcgccgaaatacgcaaaacttattctgtcagcagggaagaccttgccgaacgcagcggcgtatcagttgaactgatctcaaaaattgaagatgacgggcatattcccgatctcgcgccgttaataaagatttccagggggctgggcgtacgcctgggcgcggttcttgacgaccatgaaaaactaggtcccgttatttgcagggtgggggaagccacatcctcaagccgttttaaaaccggattacccaatggctcgtcgtccggcgaacatcacggtcttaactttaacgcgcttgcggctgataaaaacggtaggcacatggaaccgtttatcgtaacaatcgaaaccgacgcgcgtcaggaaaaatcatcccacgaaggcgaagaatttatatatgttatggaagggaaaatggcctttgaatacggcacgagtaaagatatattaaacatcgggagattccgtttattacgattccattgtgcctcatcggatataatcctttga

SEQ ID NO: 66154 - protein, 190 aa, Unknown
  Obtained from environmental sample
  DOMAIN (22)...(76): Helix-turn-helix
  misc_feature (1)..(190): Xaa is any amino acid
MHKVIEKNNMSVWKHIHRGERIAEIRKTYSVSREDLAERSGVSVELISKIEDDGHIPDLAPLIKISRGLGVRLGAVLDDHEKLGPVICRVGEATSSSRFKTGLPNGSSSGEHHGLNFNALAADKNGRHMEPFIVTIETDARQEKSSHEGEEFIYVMEGKMAFEYGTSKDILNIGRFRLLRFHCASSDIIL

SEQ ID NO: 66155 - DNA, 495 bp, Unknown
  Obtained from environmental sample
  misc_feature (1)..(495): n is a, c, g, or t
atgcagaaaaagacgcggatagaagcccaagaggccacgcccgaactctaccagcggctgagcgtgatgggcgccgccgccctcatggagactatagaagccatagaaagcggaaaggccgcccccgtcaaacagagcgattcggaggccacgcccgcgcccaaactcaccaaagaggagggccgcgtagactggaggccccccgtggaggtggtgttcaacaaggtgcgcgcgcacaaaccgttccccgggtcgtacttcgtcctgaacggaaagcggatcaacatagagtggggcatagcgagcggcggcggcggcaccaacccgcccccgccgcccggcactatcctcatagcggaaaacgactacatagacgtccaatgcggcacaggcgcgttgcgcataaccaaggtaaaaccggagggccgccaagcaatggacgtccgctcgttcctgcagggacacgaggtggtcgaaggaacggtgcttgaatga

SEQ ID NO: 66156 - protein, 164 aa, Unknown
  Obtained from environmental sample
  DOMAIN (57)...(156): Formyl transferase, C-terminal domain
  misc_feature (1)..(164): Xaa is any amino acid
MQKKTRIEAQEATPELYQRLSVMGAAALMETIEAIESGKAAPVKQSDSEATPAPKLTKEEGRVDWRPPVEVVFNKVRAHKPFPGSYFVLNGKRINIEWGIASGGGGTNPPPPPGTILIAENDYIDVQCGTGALRITKVKPEGRQAMDVRSFLQGHEVVEGTVLE

SEQ ID NO: 66157 - DNA, 747 bp, Unknown
  Obtained from environmental sample
  misc_feature (1)..(747): n is a, c, g, or t
atggcgatctttacggcgattatcgccgcgggcgtcgtctttacggtaacggtctttgccgtactgacggtctccgccgcgatcgctcctacgcgtatcgtctttatgatatgtatccttacgatattctttgcggccggaatcgtccttatgatacgtatctttgcgatattctttacggacggaatcgtctttacgatacgtatctttgcgatactctttacggccggaatcgtctttatgatacgtatctttgcgatactctttacggccggaatcatccttgcgatacgtatctttatgatattctttacggacggaatcgtctttatgatacgtgtctttgcgatactctttacggccggaatcatccttgcgatacgtatctttatgatattctttacggacggaatcgtctttatgatacgtgtctttgcgatactctttacgcccggaatcatccttacgatacgtatccctatccttccgatactctttacgcccggaatcgtccttccccttactgctgctacggtacgtatctttgcgatactctttgcgcggggatacgtctttgcgatgcccgcctctaccgccgccccccgatcggttgctgttcattcaagcaccgttccttcgaccacctcgtgtccctgcaggaacgagcggacgtccattgcttggcggccctccggttttaccttggttatgcgcaacgcgcctgtgccgcattggacgtctatgtag

SEQ ID NO: 66158 - protein, 248 aa, Unknown
  Obtained from environmental sample
  SIGNAL (1)...(26)
  misc_feature (1)..(248): Xaa is any amino acid
MAIFTAIIAAGVVFTVTVFAVLTVSAAIAPTRIVFMICILTIFFAAGIVLMIRIFAIFFTDGIVFTIRIFAILFTAGIVFMIRIFAILFTAGIILAIRIFMIFFTDGIVFMIRVFAILFTAGIILAIRIFMIFFTDGIVFMIRVFAILFTPGIILTIRIPILPILFTPGIVLPLTAATVRIFAILFARGYVFAMPASTAAPRSVAVHSSTVPSTTSCPCRNERTSIAWRPSGFTLVMRNAPVPHWTSM

SEQ ID NO: 66159 - DNA, 1983 bp, Unknown
  Obtained from environmental sample
  misc_feature (1)..(1983): n is a, c, g, or t
atgaacagcaaccgatcggggggcggcggtagaggcgggcatcgcaaagacgtatccccgcgcaaagagtatcgcaaagatacgtaccgtagcagcagtaaggggaaggacgattccgggcgtaaagagtatcggaaggatagggatacgtatcgtaaggatgattccgggcgtaaagagtatcgcaaagacacgtatcataaagacgattccgtccgtaaagaatatcataaagatacgtatcgcaaggatgattccggccgtaaagagtatcgcaaagacacgtatcataaagacgattccgtccgtaaagaatatcataaagatacgtatcgcaaggatgattccggccgtaaagagtatcgcaaagatacgtatcataaagacgattccggccgtaaagagtatcgcaaagatacgtatcgtaaagacgattccgtccgtaaagaatatcgcaaagatacgtatcataaggacgattccggccgcaaagaatatcgtaaggatacatatcataaagacgatacgcgtaggagcgatcgcggcggagaccgtcagtacggcaaagaccgttaccgtaaagacgacgcccgcggcgataatcgccgtaaagatcgccatcgtagagacgatactcgcggtaaacccgattcatccgtcggtacccgtcagcttgtccaacggatactcgccgatttcgacggtaatcccggcgaccccgagcgcattgccgaccgtatactcgctcgccggtatattgagcaccgcgaccggcgttttgtctttgagcttgtctacggcgtgttgcgcaaccggatatacttggattatgttattgacaccttcatttcggatgaacgcgagcctatgtccgacgcgcttaggcgtatacttgagataggggcttatcagattttgtttttggacagggtgcccgaccacgccgcggtcaacgaaacggtgaatcttgccaagcgtgaccctagtacggcgcccggggccgggtttatcaacgcggtgcttaggaaagtcataagcaacaagtttgatattaagctgcctgattcgcagacggatttgtcagggcggttatcaatagagttttcgcaccccaagtggatggtggagaggtggcttgcccgttacggtttgggcgatacgaagaagatactcgccttcaacaacgagcggccggcggtttatttgcggcgcaagatgcgcgacatttcgcgtccgcagtttgagtttgacatgcggacgctctgcgaagccggaagcgggtacttgaatctgtactacaagatgaagaagccgctggagccggagaacctgcgtattttgcaggacggtttttgctcggtgcaagcgccgtcaagcgggtgggttgtggcgatgctcgggttgcgcgacggcgaacgggcgcttgatatgtgcagcgctcccggcggtaagaccacgcttatggcggagctcgtgggcgactcggggtctgtggtcgcctgcgacaaggggcggtggaagatgaagacggtggcggaggccgtcgcggcgcagggcattgggaatatccttcctttggtatgcgacagcgtcgaaccgccctttttcggcacgtttgacaaggtgctcttagacgctccttgcagcggcagcggggtcttgcagcgtcatcccgacgggcgttttgtccgcaccgccgaagacattgacagcagggtgttgttgcagagagggttgcttgacagcgcggcaaaattggtcggcgacggcggtatactcgtctactccacgtgttcgcttgagccggaagagaacgaacaccaagtagagcggttcttaaacgcgcatcccgagttcaaattggatcacccgccggatgtcattccggccatgtacatcgacgacgcggactgtctgcgcatcacgccttacaagcacggcatggacgggatgttcggggcgcggttcaaaaaggttgaataa

SEQ ID NO: 66160 - protein, 660 aa, Unknown
  Obtained from environmental sample
  DOMAIN (220)...(348): NusB family
  misc_feature (1)..(660): Xaa is any amino acid
MNSNRSGGGGRGGHRKDVSPRKEYRKDTYRSSSKGKDDSGRKEYRKDRDTYRKDDSGRKEYRKDTYHKDDSVRKEYHKDTYRKDDSGRKEYRKDTYHKDDSVRKEYHKDTYRKDDSGRKEYRKDTYHKDDSGRKEYRKDTYRKDDSVRKEYRKDTYHKDDSGRKEYRKDTYHKDDTRRSDRGGDRQYGKDRYRKDDARGDNRRKDRHRRDDTRGKPDSSVGTRQLVQRILADFDGNPGDPERIADRILARRYIEHRDRRFVFELVYGVLRNRIYLDYVIDTFISDEREPMSDALRRILEIGAYQILFLDRVPDHAAVNETVNLAKRDPSTAPGAGFINAVLRKVISNKFDIKLPDSQTDLSGRLSIEFSHPKWMVERWLARYGLGDTKKILAFNNERPAVYLRRKMRDISRPQFEFDMRTLCEAGSGYLNLYYKMKKPLEPENLRILQDGFCSVQAPSSGWVVAMLGLRDGERALDMCSAPGGKTTLMAELVGDSGSVVACDKGRWKMKTVAEAVAAQGIGNILPLVCDSVEPPFFGTFDKVLLDAPCSGSGVLQRHPDGRFVRTAEDIDSRVLLQRGLLDSAAKLVGDGGILVYSTCSLEPEENEHQVERFLNAHPEFKLDHPPDVIPAMYIDDADCLRITPYKHGMDGMFGARFKKVE

SEQ ID NO: 66161 - DNA, 741 bp, Unknown
  Obtained from environmental sample
  misc_feature (1)..(741): n is a, c, g, or t
atgattccgggcgtaaagagtatcgcaaagacacgtatcataaagacgattccgtccgtaaagaatatcataaagatacgtatcgcaaggatgattccggccgtaaagagtatcgcaaagacacgtatcataaagacgattccgtccgtaaagaatatcataaagatacgtatcgcaaggatgattccggccgtaaagagtatcgcaaagatacgtatcataaagacgattccggccgtaaagagtatcgcaaagatacgtatcgtaaagacgattccgtccgtaaagaatatcgcaaagatacgtatcataaggacgattccggccgcaaagaatatcgtaaggatacatatcataaagacgatacgcgtaggagcgatcgcggcggagaccgtcagtacggcaaagaccgttaccgtaaagacgacgcccgcggcgataatcgccgtaaagatcgccatcgtagagacgatactcgcggtaaacccgattcatccgtcggtacccgtcagcttgtccaacggatactcgccgatttcgacggtaatcccggcgaccccgagcgcattgccgaccgtatactcgctcgccggtatattgagcaccgcgaccggcgttttgtctttgagcttgtctacggcgtgttgcgcaaccggatatacttggattatgttattgacaccttcatttcggatgaacgcgagcctatgtccgacgcgcttaggcgtatacttgagatag

SEQ ID NO: 66162 - protein, 246 aa, Unknown
  Obtained from environmental sample
  misc_feature (1)..(246): Xaa is any amino acid
MIPGVKSIAKTRIIKTIPSVKNIIKIRIARMIPAVKSIAKTRIIKTIPSVKNIIKIRIARMIPAVKSIAKIRIIKTIPAVKSIAKIRIVKTIPSVKNIAKIRIIRTIPAAKNIVRIHIIKTIRVGAIAAETVSTAKTVTVKTTPAAIIAVKIAIVETILAVNPIHPSVPVSLSNGYSPISTVIPATPSALPTVYSLAGILSTATGVLSLSLSTACCATGYTWIMLLTPSFRMNASLCPTRLGVYLR

SEQ ID NO: 66163 - DNA, 1506 bp, Unknown
  Obtained from environmental sample
  misc_feature (1)..(1506): n is a, c, g, or t
ttggccgagtgcggactccttgccgcagtaacgcctgaaaaaatagatccaagtatgctggcttatatttgcaatttaacggaagttgccaaagttacgcccgaaatcgcgtcttctatcgttttggaaattgaaaaccagaggaaacgcgtaaaattgatcgcaagcgaaaattactgctctatggcggttcagcttgctatgggtaaccttttaactgacaaatacgccgagggcgtgcctttccaccgtttttacgcggggaacgaaaatgtagacgctatcgaatctttagcggcgcaagaggcttgcaagcttttcggcgcgcagtacgccaatgtgcaggcgcattgcggcgcggacgctaatctgctggcatactgggcaattctcagcacacgagttgaaaatccggcgctggaaaaattgggcgagactaatctttacaaattaaccgattcacaatggaatgaattaagggcttctctgggaaaccagcgccttttgggtttggattactattccggcggacatttaactcatggttacagaaataatctttcagggcggatgtttgaaattcacggatattccgtatccgccgaaaacggaatgttggattacgacgatatcgaaaaacaggcgatggaagtgcgcccgttaattttattggcgggctattccgcctaccctcggaaaataaattttaagcgcatgagggaaatcgctgataaagtaggcgcggtgttcatggtagacatggctcactttgcgggtcttgtcgcgggcaaggtttttacgggcgaatatgatcctgtgccctggtcgcatgttgtaacaagcactacgcataaaaccctgcgcggtccccgctccggagtcgtactctccacaagcgagtttgcggaagccttggacaagggttgtccgttgacaatgggcggacctctcccccacgttatcgcggcaaaggcagtcgctttccgcgaagccgccgccccggaattcaggcagtacgcgcaaaagattgtagataactgcaaagcgcttgcggcgagctgcatgaaaaacggtcttgatgttttaacgggcggcacggataaccatcttttactggtaaatgtaaacaacgcgggtatcacaggcagacaggcggaaagcgctctgcatgaatgtcttataacgcttaaccgcaacagtcttccccgcgacccgaacggtccttggtatacgtcgggtatcaggattggaacagccgccactacgtctctcggcatgggagaggcggaaatgacggagcttggcgaattaatagcgaaggttgtcaaaggaacaacgcaggcgcaagacgcgaaagatccgtcgaaaaagagcaaggcaaagtacgctgtagatgacgctgtaaaaagcgaagttcatacgcgggtaaaatcgttattggagcggtttcctgtgtatcctcagcttaaccttgatctgttaaaaaaatatttcgttcaaaattaa

SEQ ID NO: 66164 - protein, 501 aa, Unknown
  Obtained from environmental sample
  DOMAIN (29)...(438): Serine hydroxymethyltransferase
  misc_feature (1)..(501): Xaa is any amino acid
MAECGLLAAVTPEKIDPSMLAYICNLTEVAKVTPEIASSIVLEIENQRKRVKLIASENYCSMAVQLAMGNLLTDKYAEGVPFHRFYAGNENVDAIESLAAQEACKLFGAQYANVQAHCGADANLLAYWAILSTRVENPALEKLGETNLYKLTDSQWNELRASLGNQRLLGLDYYSGGHLTHGYRNNLSGRMFEIHGYSVSAENGMLDYDDIEKQAMEVRPLILLAGYSAYPRKINFKRMREIADKVGAVFMVDMAHFAGLVAGKVFTGEYDPVPWSHVVTSTTHKTLRGPRSGVVLSTSEFAEALDKGCPLTMGGPLPHVIAAKAVAFREAAAPEFRQYAQKIVDNCKALAASCMKNGLDVLTGGTDNHLLLVNVNNAGITGRQAESALHECLITLNRNSLPRDPNGPWYTSGIRIGTAATTSLGMGEAEMTELGELIAKVVKGTTQAQDAKDPSKKSKAKYAVDDAVKSEVHTRVKSLLERFPVYPQLNLDLLKKYFVQN

SEQ ID NO: 66165 - DNA, 1566 bp, Unknown
  Obtained from environmental sample
  misc_feature (1)..(1566): n is a, c, g, or t
atgggccgagcttgccgccggccttgtcaaggcgaccgcgtcgtgctttggtcggaaaacaggccggagtggatgtcagtctggatgggagcggcaatcgccggcctctgcatagtgccggtcgacttcctcgctacagaagaagaatgtcttaatataattaaaataacaagagccaaagccttcttttattcaggcagaaaaaaagatttttccgtttcccttaaaaccggcagtattccaatgtcagtctcggtttgcataagccccgaaagtgaaaacatcccgcccgattatgaaaccgaatacaacaaattcggaaaaaacgcaggcaatcaggctctgccctccatcgacagcatctcgccggatgaccccgtttcaattgtatttacttccggaactacgggttttgccaagggcgttaccctgtcgcataaaaatataatagcgaacaccagcgcggcaatccgtattcttgagcctacaaaagaagatgtttttattgatgtccttccgcttcatcatacatatcccacaacctgctcatttatggctcccatctcctacggcatcccgacggtaatctcggaaaaaattgtcggcaaggttgtcgtggacgacataaacgacggaaaggtgacattcttaatcggcgttccgctcctctacgacaaagtaatgaccgcgatagaagcaaaatataacaagattccttttattgtacgcgggccgttaaatgttttacggaaaatcgcgctcgcgaaagcgcggaagggaaatcccgaattcgggcggaaggtattccgctttatccgcaagaaagcgggcttacagtctattttaataatggtagccggcggcgggcccttaagcataaagacggcggacttttttgactcgcttggtttcaatattgttcagggttacggcatgagcgagaacagcccgcttatcaccgtaaatactccgcgccataaacgcaacgaatcggtcgggcttcccgtaagttataccgatgtaaaaattctcgatacggggccggacggcataggcgaaattgcctgcaaatcgccgtccgtaatgctcggctactttgagaatgaagaagcgacaaaagaagttattacgccggacggatatttgctgacaggcgaccttggctgtaaagacgaacttggttttgtttatatcaaggggcgcaaaaaaaatcttatcgtcggctcgggcggcaaaaatgtttacccggaagaagtcgaagcccatttttccaattctcccgttataagcgaaatccttgtaacaggaaaaaaggagcatactcacggcagcgagcagatttttgccgttattgttcccaattatgaatacatcagggaaaaatatccggacagggaaaacgacgataatttagttgtggaccttatcaagaaagaaattgaggaagtaaaccgcacattgcccgttttcaaaaaagtcagcgactttaccttacgcaaagatccgttcgagaaaaacgcgcagcagaagatacggcgcttcctgtattcggcaatgtattcataa

SEQ ID NO: 66166 - protein, 521 aa, Unknown
  Obtained from environmental sample
  DOMAIN (1)...(434): AMP-binding enzyme
  misc_feature (1)..(521): Xaa is any amino acid
MGRACRRPCQGDRVVLWSENRPEWMSVWMGAAIAGLCIVPVDFLATEEECLNIIKITRAKAFFYSGRKKDFSVSLKTGSIPMSVSVCISPESENIPPDYETEYNKFGKNAGNQALPSIDSISPDDPVSIVFTSGTTGFAKGVTLSHKNIIANTSAAIRILEPTKEDVFIDVLPLHHTYPTTCSFMAPISYGIPTVISEKIVGKVVVDDINDGKVTFLIGVPLLYDKVMTAIEAKYNKIPFIVRGPLNVLRKIALAKARKGNPEFGRKVFRFIRKKAGLQSILIMVAGGGPLSIKTADFFDSLGFNIVQGYGMSENSPLITVNTPRHKRNESVGLPVSYTDVKILDTGPDGIGEIACKSPSVMLGYFENEEATKEVITPDGYLLTGDLGCKDELGFVYIKGRKKNLIVGSGGKNVYPEEVEAHFSNSPVISEILVTGKKEHTHGSEQIFAVIVPNYEYIREKYPDRENDDNLVVDLIKKEIEEVNRTLPVFKKVSDFTLRKDPFEKNAQQKIRRFLYSAMYS

SEQ ID NO: 66167 - DNA, 1005 bp, Unknown
  Obtained from environmental sample
  misc_feature (1)..(1005): n is a, c, g, or t
atggcgcagggcaagcttagaaacttttttaaaaattattttaagggcaggttaaaagtggcggaattcgccattaccaacgcgtgtatcgcaaaatgctctttctgcgaaatatggaaacaacagcccaaggtttttgttgacaaggataaagccctgcaagtaatcgacaggttggcggatcacggaaccgtccatgtcaccatcacgggcggcgagccgcttctccaccccaatgtggtggacattgtccgcagggcgacggaacacaagatgcacagcgccgttcttgacgccgccccccagcttttgctgcgaaacgacatagttaaacgccttgaagacgcgggaaacgacatgatctgcatttcatttgactcgggcgacccgaaaaccatggcggaatcccggcagattcccaatatcatggaagatatggcaaaggcggtggaacttatcagcaaaacaaagataacaaccatggcgtccgttttaatctggaacgataattacgacaagcttgacgaagtctgcatacgcgcgaagaacatgggctttgacattatctccctgaattacccgaccttttcccaatcgaaggtttacccgctgggcggagaggggatcagcctttcgcgggaaagcgtaattcagggactggaatcggctattaaactgcgaaaaaccaaaaaatacggaattatcaatactatggcatccatgaaaaacattatacgctttcttaaagatccggcaaaagttcactatcactgtcttggcggaaccaatgtgatttttgtagactggttctttgacgtacacccctgcatgcagcttccgaaggtaataggaaatattttaacaatggaagaaaaggattataaaatgtccccctgcaatgaatgtaacatgagctggtaccgcgatttaagcgccatgtttcacggcttaaaatctgtccccgtctggtttgagtctctggaaggtttcagggtattatcatag

SEQ ID NO: 66168 - protein, 334 aa, Unknown
  Obtained from environmental sample
  DOMAIN (23)...(181): Radical SAM superfamily
  misc_feature (1)..(334): Xaa is any amino acid
MAQGKLRNFFKNYFKGRLKVAEFAITNACIAKCSFCEIWKQQPKVFVDKDKALQVIDRLADHGTVHVTITGGEPLLHPNVVDIVRRATEHKMHSAVLDAAPQLLLRNDIVKRLEDAGNDMICISFDSGDPKTMAESRQIPNIMEDMAKAVELISKTKITTMASVLIWNDNYDKLDEVCIRAKNMGFDIISLNYPTFSQSKVYPLGGEGISLSRESVIQGLESAIKLRKTKKYGIINTMASMKNIIRFLKDPAKVHYHCLGGTNVIFVDWFFDVHPCMQLPKVIGNILTMEEKDYKMSPCNECNMSWYRDLSAMFHGLKSVPVWFESLEGFRVLS

SEQ ID NO: 66169 - DNA, 984 bp, Unknown
  Obtained from environmental sample
  misc_feature (1)..(984): n is a, c, g, or t
ttggtccgaggttcagtccttgatggcccaatgtccgacaaattgttcttaaaacttcttgccgacggagaattaaaaaacgactggattattgacatatcaaacggcggaaaagtccttattatcagcgacatacacatgggctcaggcgtccgggacgatttaagcgaaaataacggggaaatgctaatccgcactctggaagactattactttaaaaacggctggattctggttcttaatggcgatattgaggaacttcaacggtactcgcttgatctgatacgggaaaaatgggccgggctttacaaggtttttaaccttttcgccagggaaaaaaggctctataaaaccgtcggaaaccacgacgaacagcttctttttaagcggtatagttcatacccctatcctttgtctacggttgtaaaaatcgaaaccgggactgttccagcctatgttttccacggccaccagttgtcaaatatttattcaaattttaataaattaataggaatctgcatccgttacattctaaaaccgtttgggataaaaaacattatagacgcgcgcagtccgtacaaacgttttctcatagaaagcaaagcgtacgcgttttcgataaacaaccattgcctttccattatcggccatacccacaggccgctttttgaatcattggggcgctttgattacattaaatttgaaattgaacggctctgcagagattatccctcctgtaaaaacgaggacaagctgcgcatagaaaacgaagttaccgccctcagaaaagaactcggcaagcttaaacgaaaagagcggcaggatgtcctgcgtcagagtctttacggggacgagcttcccgtgcccgtgcctttttattcaggctgtacccttggcaaaaaaagaataaacgcgattgaaatacacacgagaatattgcccttgtctactggtttatcgaggggaaaagcaaaaaattcataa

SEQ ID NO: 66170 - protein, 327 aa, Unknown
  Obtained from environmental sample
  misc_feature (1)..(327): Xaa is any amino acid
MVRGSVLDGPMSDKLFLKLLADGELKNDWIIDISNGGKVLIISDIHMGSGVRDDLSENNGEMLIRTLEDYYFKNGWILVLNGDIEELQRYSLDLIREKWAGLYKVFNLFAREKRLYKTVGNHDEQLLFKRYSSYPYPLSTVVKIETGTVPAYVFHGHQLSNIYSNFNKLIGICIRYILKPFGIKNIIDARSPYKRFLIESKAYAFSINNHCLSIIGHTHRPLFESLGRFDYIKFEIERLCRDYPSCKNEDKLRIENEVTALRKELGKLKRKERQDVLRQSLYGDELPVPVPFYSGCTLGKKRINAIEIHTRILPLSTGLSRGKAKNS

SEQ ID NO: 66171 - DNA, 1545 bp, Unknown
  Obtained from environmental sample
  misc_feature (1)..(1545): n is a, c, g, or t
gtgaaaccgcgcagcgccagcgcgataccttttaccgagcatgttgaggatgatgatgagaatgtacaaagccttggcgcggacgagataccgcatcccataagaatgcacagcatgacaagcggctcccctgattatacagttgatccgctgttgtttaaatttcttgatatggctgtaaattgggcggaaaagtacgggatatatatcataatagacaatcattcgtttgatccggttaaaaatacggaagataacatagacaaaattttaattcctgtatgggaacagttcgcgaagcgttacaaggatcgaagtgattatgtgctttatgaaattttaaacgaaccgcacggcatcagcgacgcaagatggggggaaatacaggggatggcgataaacgcgatccgaaaacatgataccaaacattttattgtcgcgggcggcacggaatacaattccattaataaattgtccgcgattccgaaatacgcggattcaaaaattatctatactttccatttttatgatccgtatctttttacccatcagggagcgagctggggcgggccgcctttattgacaaaccttgccggggttccctttccttatgacagcaaacgcaggccgaaaatcccttcggatttaagaggaacatgggtggaaagttctttgaataatgattacagaaaggcatccgatccaaagacgctttacaataccttaaacaaagcggtttctttttccaaagaacacaatgttcctgttttttgcggggaattcggagtgttcatggttaacagtttgaatgaagaccgcgtagggtggtacaggattgttacagccgcgcttgacaggagaaatatttcaaggacaagctgggattattacggcggtttcgggctgtttaatacggacaacaagaaggatttttttgaggatatgaatacggatgtcgcgcgcgcaatgggatttacgccgcctgttcaaagcccgcgcaagtatgagccgttaaataaaacttttataatttatgatgattatccggcaagagatatttcctgcggttattgggatgaaaagagtgattttagtttatatgataccaatgccgcacagggagaatattcaataagatggggtaacgcttcacagtataatacattttattttacttttgacagaggcggaaatttcagtgaaattgtaaataacgcgtttattgaatttaaagctcgtacggaaaaatcagtcctttttgatattcgctttattaatccggaaaacgcgtcttccatcccgtggcgtatgcgttacacgattaatgataaaattctcccgccggacggcaagtggcatacaatccgtatagcgcttaacagcatggaagacatgggcgcatggttaaactcgacgcaaaaatggcttccttcgcagaataaattctcatggaacaatataaaacaattggaaattgtcgctgaacacggagatatgaagggtatttgcgtctggtttgacgatataaaattacttgttccctaa

SEQ ID NO: 66172 - protein, 514 aa, Unknown
  Obtained from environmental sample
  DOMAIN (3)...(304): Cellulase (glycosyl hydrolase family 5)
  misc_feature (1)..(514): Xaa is any amino acid
MKPRSASAIPFTEHVEDDDENVQSLGADEIPHPIRMHSMTSGSPDYTVDPLLFKFLDMAVNWAEKYGIYIIIDNHSFDPVKNTEDNIDKILIPVWEQFAKRYKDRSDYVLYEILNEPHGISDARWGEIQGMAINAIRKHDTKHFIVAGGTEYNSINKLSAIPKYADSKIIYTFHFYDPYLFTHQGASWGGPPLLTNLAGVPFPYDSKRRPKIPSDLRGTWVESSLNNDYRKASDPKTLYNTLNKAVSFSKEHNVPVFCGEFGVFMVNSLNEDRVGWYRIVTAALDRRNISRTSWDYYGGFGLFNTDNKKDFFEDMNTDVARAMGFTPPVQSPRKYEPLNKTFIIYDDYPARDISCGYWDEKSDFSLYDTNAAQGEYSIRWGNASQYNTFYFTFDRGGNFSEIVNNAFIEFKARTEKSVLFDIRFINPENASSIPWRMRYTINDKILPPDGKWHTIRIALNSMEDMGAWLNSTQKWLPSQNKFSWNNIKQLEIVAEHGDMKGICVWFDDIKLLVP

SEQ ID NO: 66173 - DNA, 912 bp, Unknown
  Obtained from environmental sample
  misc_feature (1)..(912): n is a, c, g, or t
ttggtgctgacgtcgtccgcgtccctatcgncttttcataactttacccttggagataaggcttatacccttgaaaaaggcctgttagaatatcttgataaggctgtggattgggcggaaaagcatgaattatacgtcatccttgacaaccattccttccatcctattaaccctacagaagttaatattgataaaattcttctccctgtctgggaacaaaccgctgaacattttaaggagcgcggtaaatatgttatttatgaaatcctgaacgaaccgcatggcattcccgacgagcgctggagcgaaatacaggaggcggcaattgacatgatacgcaaaattgataaaaaacatacgatcattgtcggagggacaaattataattcgcttgaaaaaatgacaaaagttcccgcttataaagataaaaatcttatctatacatttcacttttacgatcctcatatttttacacatcagggagcggaatggaacaagccgtctcttgcgcctttatcctgtcttccgtttccttttgataaaaacaaaatgcctaaaccgcatgaaacatttatcggaacatgggcggaagcctcgcttaactcttacgaagaggattcaaaatttgcaaaattatgttctacgcttgataaggctgaaaagttttcaaaagagagaaatattcctgttttttgcggtgagttcggcgtatttatgaaacagagtccgcatgaagaccgcgtaaggtggtataagtttgtctgcgaagagcttgaaaagagaaatatcccatggacatgctgggactatttcggaggtttcggtattttcaaaacagaacaaagaggaaattttccttctgatttgaatattgatgtggttaacgctatgaagtttaaagggattaaataa

SEQ ID NO: 66174 - protein, 303 aa, Unknown
  Obtained from environmental sample
  DOMAIN (1)...(275): Cellulase (glycosyl hydrolase family 5)
  misc_feature (1)..(303): Xaa is any amino acid
MVLTSSASLSXFHNFTLGDKAYTLEKGLLEYLDKAVDWAEKHELYVILDNHSFHPINPTEVNIDKILLPVWEQTAEHFKERGKYVIYEILNEPHGIPDERWSEIQEAAIDMIRKIDKKHTIIVGGTNYNSLEKMTKVPAYKDKNLIYTFHFYDPHIFTHQGAEWNKPSLAPLSCLPFPFDKNKMPKPHETFIGTWAEASLNSYEEDSKFAKLCSTLDKAEKFSKERNIPVFCGEFGVFMKQSPHEDRVRWYKFVCEELEKRNIPWTCWDYFGGFGIFKTEQRGNFPSDLNIDVVNAMKFKGIK

SEQ ID NO: 66175 - DNA, 405 bp, Unknown
  Obtained from environmental sample
  misc_feature (1)..(405): n is a, c, g, or t
atggcaagaaatattaaaaaacagttgctgtcgcacccatcacgggtgcgtggattgaaactatgtgtaggcgcctcacagagccggcgaactctgtcgcacccatcacgggtgcgtggattgaaaccacgccgaccatgtcgacgcggatgttgcgtagcgtcgcacccatcacgggtgcgtggattgaaactcaaaaatacccggaaacgtcgacacaaattcgagtcgcacccatcacgggtgcgtggattgaaaccggttaggtctgcgggagcgtccaaggcctgctgcgtcgcacccatcacgggtgcgtggattgaaactgtagaaatatatcgcgtcactgtcaatgcttatgctgtcgcacccatcacgggtgcgtggattgaaaccaaccactga

SEQ ID NO: 66176 - protein, 134 aa, Unknown
  Obtained from environmental sample
  misc_feature (1)..(134): Xaa is any amino acid
MARNIKKQLLSHPSRVRGLKLCVGASQSRRTLSHPSRVRGLKPRRPCRRGCCVASHPSRVRGLKLKNTRKRRHKFESHPSRVRGLKPVRSAGASKACCVAPITGAWIETVEIYRVTVNAYAVAPITGAWIETNH

SEQ ID NO: 66177 - DNA, 381 bp, Unknown
  Obtained from environmental sample
  misc_feature (1)..(381): n is a, c, g, or t
ttgacagtgacgcgatatatttctacagtttcaatccacgcacccgtgatgggtgcgacgcagcaggccttggacgctcccgcagacctaaccggtttcaatccacgcacccgtgatgggtgcgactcgaatttgtgtcgacgtttccgggtatttttgagtttcaatccacgcacccgtgatgggtgcgacgctacgcaacatccgcgtcgacatggtcggcgtggtttcaatccacgcacccgtgatgggtgcgacagagttcgccggctctgtgaggcgcctacacatagtttcaatccacgcacccgtgatgggtgcgacagcaactgttttttaatatttcttgccattaatcagtttcaatccacgcacccgtga

SEQ ID NO: 66178 - protein, 126 aa, Unknown
  Obtained from environmental sample
  misc_feature (1)..(126): Xaa is any amino acid
MTVTRYISTVSIHAPVMGATQQALDAPADLTGFNPRTRDGCDSNLCRRFRVFLSFNPRTRDGCDATQHPRRHGRRGFNPRTRDGCDRVRRLCEAPTHSFNPRTRDGCDSNCFLIFLAINQFQSTHP

SEQ ID NO: 66179 - DNA, 561 bp, Unknown
  Obtained from environmental sample
  misc_feature (1)..(561): n is a, c, g, or t
gtgcgtggattgaaactttttgagtttcatccctacacctcctctcccgtggtcgcacccatcacgggtgcgtggattgaaactatggttgcggtcgcccactctccatcgacgttggtcgcacccatcacgggtgcgtggattgaaacctcaagagatcgtctaacatgcaaggctcgctcatcgtcgcacccatcacgggtgcgtggattgaaactctaccaacgccaagaaagaactgttaatactttcgtcgcacccatcacgggtgcgtggattgaaacttcattttctctcaactctaaccatttacgtattatgtcgcacccatcacgggtgcgtggattgaaacaggagaatcaacaccaccgtaagatggcggcacaagtcgcacccatcacgggtgcgtggattgaaacgcggtcagagcgagcaacaaggtcaggccgactgtttgtcgcacccatcacgggtgcgtggattgaaacagatatgtcagcccccgaatcgaatatgcggatagtcgcacccatcacgggtgcgtggattgaaactgattaa

SEQ ID NO: 66180 - protein, 186 aa, Unknown
  Obtained from environmental sample
  misc_feature (1)..(186): Xaa is any amino acid
MRGLKLFEFHPYTSSPVVAPITGAWIETMVAVAHSPSTLVAPITGAWIETSRDRLTCKARSSSHPSRVRGLKLYQRQERTVNTFVAPITGAWIETSFSLNSNHLRIMSHPSRVRGLKQENQHHRKMAAQVAPITGAWIETRSERATRSGRLFVAPITGAWIETDMSAPESNMRIVAPITGAWIETD

SEQ ID NO: 66181 - DNA, 531 bp, Unknown
  Obtained from environmental sample
  misc_feature (1)..(531): n is a, c, g, or t
gtgcgaccacatagcaaatggatggacaagcaccgccgatgtgtttcaatccacgcacccgtgatgggtgcgacttgcggacgccagaagcaaactgcagggatttgctgtttcaatccacgcacccgtgatgggtgcgaccggcggccggctggtcggatttacaaccgagaagaggtttcaatccacgcacccgtgatgggtgcgactccgcgacggcgcagagttcgatcaggccctcggcgtttcaatccacgcacccgtgatgggtgcgaccttgagagggtccttctcctctttgaaatcatcgtttcaatccacgcacccgtgatgggtgcgaccaaaaacgcgccaataatagtcaaaattgagccggtttcaatccacgcacccgtgatgggtgcgacgccgcgagttcgggacagtcggctttcgcccgacagtttcaatccacgcacccgtgatgggtgcgacccatcaacgattgtcggtaaaatatcagagacggggtttcaatccacgcacccgtga

SEQ ID NO: 66182 - protein, 176 aa, Unknown
  Obtained from environmental sample
  misc_feature (1)..(176): Xaa is any amino acid
MRPHSKWMDKHRRCVSIHAPVMGATCGRQKQTAGICCFNPRTRDGCDRRPAGRIYNREEVSIHAPVMGATPRRRRVRSGPRRFNPRTRDGCDLERVLLLFEIIVSIHAPVMGATKNAPIIVKIEPVSIHAPVMGATPRVRDSRLSPDSFNPRTRDGCDPSTIVGKISETGFQSTHP

SEQ ID NO: 66183 - DNA, 342 bp, Unknown
  Obtained from environmental sample
  misc_feature (1)..(342): n is a, c, g, or t
gtgcgaccacaacacggcatagggccatcatgcctgacttgggtttcaatccacgcacccgtgatgggtgcgacacggttaatgcttcaacgtctgacatcgacctgctgtttcaatccacgcacccgtgatgggtgcgacagtcggttttgtttgctacgaatttgttataagcgtttcaatccacgcacccgtgatgggtgcgactccctccgctgtcgtgtcgggcgtgtacgtgggggtttcaatccacgcacccgtgatgggtgcgactgtaactaccgttccagtgtatgccgtcaggagagtttcaatccacgcacccgtgatgggtgcgactaa

SEQ ID NO: 66184 - protein, 113 aa, Unknown
  Obtained from environmental sample
  misc_feature (1)..(113): Xaa is any amino acid
MRPQHGIGPSCLTWVSIHAPVMGATRLMLQRLTSTCCFNPRTRDGCDSRFCLLRICYKRFNPRTRDGCDSLRCRVGRVRGGFNPRTRDGCDCNYRSSVCRQESFNPRTRDGCD

SEQ ID NO: 66185 - DNA, 396 bp, Unknown
  Obtained from environmental sample
  misc_feature (1)..(396): n is a, c, g, or t
ttgattttaaagcttttgatttttattattttcatatacataaccaggagactaaacacaatggataacgacttattattagaattgaccgatcaaaacttcgacgaagccgttttgtcgaaccctcagcctgtagttgttgatttttgggctccgtggtgcgggccgtgcaagatgcttacaccgatcatacacgagcttgcggcggagtacgcggggcgcgtcgtcgtcggcaagctcaatatagataacgctccggccgttgcggccaagtacggcatagagaccattccgacgctgctcttcttcagtaacggcggcattgcggggcggcaggtggggcttttggcgaaagcgccgctcaaggccaaaattgacgacgcgtttaaggtttaa

SEQ ID NO: 66186 - protein, 131 aa, Unknown
  Obtained from environmental sample
  DOMAIN (25)...(128): Thioredoxin
  misc_feature (1)..(131): Xaa is any amino acid
MILKLLIFIIFIYITRRLNTMDNDLLLELTDQNFDEAVLSNPQPVVVDFWAPWCGPCKMLTPIIHELAAEYAGRVVVGKLNIDNAPAVAAKYGIETIPTLLFFSNGGIAGRQVGLLAKAPLKAKIDDAFKV

SEQ ID NO: 66187 - DNA, 1608 bp, Unknown
  Obtained from environmental sample
  misc_feature (1)..(1608): n is a, c, g, or t
atgggtaatgaccgaaaaaaaattatagcagttgatgacaacgtcgaaaacctgaccgctattaaaaatacccttaaagacatatacgacgtgtatcccagcccgtccgcggcgaagatgttcagtttgctggagcatattcagcctgatttgattctacttgacgtggaaatgccggaaatgaacggatatgaagccatagaaaaactgaaaagcatggataaataccgggaaacgccagttatcttcctgacctccatgagcgacgcgaaaagcgaaatggaaggcttgcagcttggcgccgtcgattatatccgcaagccctttgtcgccctgctgctgcttcagcgtataaaaacgcatattgccattatggaacaggaacgggaaattaaaaacctgcttgaattaaaaacaaaggaagtcagcctccgcgaatttgcggaacaggaagcgcagaacgcgtcccgcgccaagggcgagttcctttcccacatgagccatgaaataagatccccgttaaacgccgttataggcatgataaacatcgccaccgacgagaatgacattgactctataaagctgtatctcgggaaggcggacaatgcggcaaagcacgtgctgggcgttatcaacgacattcttgacatgtcaaaaattgaggctgacaaacttgatctttccaacggcgaatttgatttcgggaaaatgatgaccaacattatcgacgtgaccggcatccgcgcccgggagaaaaaccagcaaattgtagttaacatgaatcccaatattccgtctttcgtaatcagcgacgaattgcggctgtcgcaggttattaccaacctgatgaccaacgcgataaaattcacccctgaaaacggcaaggtgacgctgagcgctgaaaagatggaagaaaaagatggtgagattagccttagaattgaaatcgcggactcaggcataggaatttcgcaggaacagcagaaaaaactcttccaggcctacaatcaggcggattcaagcatcaccggcaaattcggcggtacgggcctgggtcttgtcatttccaaacgtattatagagctgatgcagggaacaatatggattgaatcggaacttggcaaaggcgcgaaatttatttttaccataaaagtgaaaccggggacgcataacgccggtaaaactgacggcgctcccgtcggaataaaagcggctgatttgcatttacagggttatacgatattggccgcggaagacatggactttaacagggaagtgcttgccaagtatcttgaaaaaaccggcgtaacaatagattttgccgaaaacggcaaaatctgcgttgacatgttcaaagagaatcccgataaatacagtttgattttcatggacattaacatgccggaaatgacaggagacgaggcgacaaagataataagggcgcttaatacgcaaaaggcgaaggagatacccattatcgccatgaccgcggatgtttttaaggaagacgtggaaaaatgcctgtcaacaggcatgaacgatcacatctcaaaaccgattgttccgaaaaccatttacgcgaaactaaaacaacacctgaaaatataa

SEQ ID NO: 66188 - protein, 535 aa, Unknown
  Obtained from environmental sample
  DOMAIN (158)...(223): His Kinase A (phosphoacceptor) domain
  misc_feature (1)..(535): Xaa is any amino acid
MGNDRKKIIAVDDNVENLTAIKNTLKDIYDVYPSPSAAKMFSLLEHIQPDLILLDVEMPEMNGYEAIEKLKSMDKYRETPVIFLTSMSDAKSEMEGLQLGAVDYIRKPFVALLLLQRIKTHIAIMEQEREIKNLLELKTKEVSLREFAEQEAQNASRAKGEFLSHMSHEIRSPLNAVIGMINIATDENDIDSIKLYLGKADNAAKHVLGVINDILDMSKIEADKLDLSNGEFDFGKMMTNIIDVTGIRAREKNQQIVVNMNPNIPSFVISDELRLSQVITNLMTNAIKFTPENGKVTLSAEKMEEKDGEISLRIEIADSGIGISQEQQKKLFQAYNQADSSITGKFGGTGLGLVISKRIIELMQGTIWIESELGKGAKFIFTIKVKPGTHNAGKTDGAPVGIKAADLHLQGYTILAAEDMDFNREVLAKYLEKTGVTIDFAENGKICVDMFKENPDKYSLIFMDINMPEMTGDEATKIIRALNTQKAKEIPIIAMTADVFKEDVEKCLSTGMNDHISKPIVPKTIYAKLKQHLKI

SEQ ID NO: 66189 - DNA, 1248 bp, Unknown
  Obtained from environmental sample
  misc_feature (1)..(1248): n is a, c, g, or t
gtgaccggggagcggaaaataattatcgttgtggatgattctcgtgaaaatctggccagcctcaaagaaactttgaaaggcacgtacgaggtatatccatgcccttcggctgcaaagatgtttgaattgctggaacatgttacgccggatctaattctgctggatgtggaaatgccccagatgaacgggtatgaagccgcaaagaagctgaaaagcaccgtgaaatacagccaaataccctttatgtttctgactgtcagggacgacgtacaaagcgaaattcttggtttggaacttggcgccgttgattatatacacaaaccgtttctctctccccttcttctccagcggataaaaaaccaggtcaccctgatggattatcaaaaaatagcgattatttccgtagcgacggtaaccgccatgaaccacatcagggaaggttttgtcctggtggacgtggacaataattacctgacttccaatccggcaatggcgaaaatgcttccgggaattaccaggcttgagaaggggaaatccatattcctcgcgaagggctggcccgaagaacttaacagtattgaacacggttccgtcgaattttccattaccgatgaaagcaccaggtattttagggccggtgtcagcccggtttttatcgggagcaagacttacatcggcagaatttttctgttcaccgacattaccgataatatcaattacctggaaggaattgaaaaagcggcctatacggacgctcttacgggactctataacagaaagcattttttggaactcgcggacgcgaacacggaaagagccgtcaggattaatcagtcgatctatatagcaatggttgatattgacggtttcaataaaattaatgacacttacggccacaccgccggagatatgattctgaaaatggcctcggaaattatcaagcagacgattcgttcctctgatctgcttggccgttacgcgggcgagaaattcagtatcatgctcgctttctcggatgaagcggaagtaattaatcttgcggaaagaatacgggagaatatagaaaacaacagcacaaactatgagggagatgagataaaagttacctgcagcataggcatcgcaaaattgctaaaaggcgataccatggaaaccgtcacaaagaaggccgatgaagccctctgcgtcgcgaaaaattcaggccgtaacatggtaaaatttcacgattccaggctgtacgaaggataa

SEQ ID NO: 66190 - protein, 415 aa, Unknown
  Obtained from environmental sample
  DOMAIN (6)...(119): Response regulator receiver domain
  misc_feature (1)..(415): Xaa is any amino acid
MTGERKIIIVVDDSRENLASLKETLKGTYEVYPCPSAAKMFELLEHVTPDLILLDVEMPQMNGYEAAKKLKSTVKYSQIPFMFLTVRDDVQSEILGLELGAVDYIHKPFLSPLLLQRIKNQVTLMDYQKIAIISVATVTAMNHIREGFVLVDVDNNYLTSNPAMAKMLPGITRLEKGKSIFLAKGWPEELNSIEHGSVEFSITDESTRYFRAGVSPVFIGSKTYIGRIFLFTDITDNINYLEGIEKAAYTDALTGLYNRKHFLELADANTERAVRINQSIYIAMVDIDGFNKINDTYGHTAGDMILKMASEIIKQTIRSSDLLGRYAGEKFSIMLAFSDEAEVINLAERIRENIENNSTNYEGDEIKVTCSIGIAKLLKGDTMETVTKKADEALCVAKNSGRNMVKFHDSRLYEG

SEQ ID NO: 66191 - DNA, 606 bp, Unknown
  Obtained from environmental sample
  misc_feature (1)..(606): n is a, c, g, or t
ttgttaaaagaagtatcagttgacaaattcgaacatgacggtttttggcgttccacaatgtcgagcgacgagggttatacgaccacaaggctgttcacaggttcaccgtcggctaaagaggcgattcctgacgaagaaggaaaaaatattacggacaagtacgttcttggtacaagagtagatttccttcgcagaggacataacagttttacaatttatccgacccgccccattccgattgagggaattacaaaaaccgtttccgtatgggttgccggccgtaactttaaccacgagcttacccttctgcttcaggatttcttcggaagatattatgagttctatgtcggaagactgaactttatcggctggaagaaattaactgtagcgattcctccgcaggctgaagacggctttagcggcgttgttcagagaaattaccattataataaccagatgggacttaagattatgggtttcagaattgactgtgatcctatggaagcttatggaagttattatatttactttgacgatctccgcgcagtaacagacctttttgcggaaaataaccgtgaccccgacgacatggtcgacggctggtaa

SEQ ID NO: 66192 - protein, 201 aa, Unknown
  Obtained from environmental sample
  DOMAIN (2)...(192): Flagellar filament outer layer protein FlaA
  misc_feature (1)..(201): Xaa is any amino acid
MLKEVSVDKFEHDGFWRSTMSSDEGYTTTRLFTGSPSAKEAIPDEEGKNITDKYVLGTRVDFLRRGHNSFTIYPTRPIPIEGITKTVSVWVAGRNFNHELTLLLQDFFGRYYEFYVGRLNFIGWKKLTVAIPPQAEDGFSGVVQRNYHYNNQMGLKIMGFRIDCDPMEAYGSYYIYFDDLRAVTDLFAENNRDPDDMVDGW

SEQ ID NO: 66193 - DNA, 1749 bp, Unknown
  Obtained from environmental sample
  misc_feature (1)..(1749): n is a, c, g, or t
atggtcagatggtcggtttttttttatctatatcttatggttttaagcggaaagagggccgcccccgggatagcggttggcgcggtttatgtttataaaaatacaggtttgcttcccaaagaaaattttatccctaaaggggaagaacaatctcatctggacaggtatcaggcggtaaaaaaagaagcgtttaacgaacttgaaaaactaaaaattaccatgcaaaaacacgatccgcaaaaggccggtattttcagcgcgcatcaggaaattattgaagatattgtcattaatgaggaaattccgtccaggatattaaacgacaaatgggcgggcgactgggcgatttatcatgtttatgaaactgtccttatagtgcttcaaaaagccggcgatcctttaattgccgaacgcgccgcggattttgacgacgtgcgcgcgcttcttttgcggttatggtacggcaaaaaaaacgacggtctttcttccctgaccgagcctgttattatcgcggcgcatgatttaatgccttccgataccgcttctttggacaggagcaaggcgctggcgcttcttaccgagaagggcgggcttaccacccacaccgcgattatagcgaaaagttacggaatccctacattgttcggcattcacgggcttatggacgctgtaaaacaaggccagcttgcggtggtaaacgccgatgaagaaaaagtaattctggagccggaaaccgaaattgccgccgaatatgagaaaaagtacgaagcctggcgccgcgacaaacagaatgcagacacatacctcgttaaacaagcctgtactcaggacggaacgcggattgacattggtttaaatctttcgggagctttagacgatgaacttcaagcggcttcttttgcggattccgtcgggcttttcaggaccgagtttctttatcttggcagggatttcctgccggacgaggaagagcaggtatccgcttacaaaaaggttcttgaatgtttcggtcagcggcctgtaatcctgcgcactcttgacataggcggggacaagcagctttcaagcctgaatataaagcgcgaggaaaacccgtttttgggaaaccgcggcattcgtttttgtttaagttaccccgatgtatttaagacgcagattagggcggccttacgcgcgggcgtttacggaaacttgtggatcatgttcccaatggtaaattctattgacgacatacgaaatgcgaaagagattatcgcgtctgttcaggaagaacttgaaaaagaaggaaaacccttcgggcggattaaaaccggcatcatgatagaaactccttccatcgcgcttatggcccggcaggccgcgcgtgaagtcgatttcgcgagcataggcaccaatgatttatgccagtatctgtgcgcggcggacaggatgaacagcgaggtggagccttattaccagtcttttcatccggcgatattcaagctgataaaagaggttacagccgcttttgaaaaaaacggaaagcccatatcaatctgcggagaacttgccgccgacccgcttgcggcccctgtatttgtggggcttggcttaaaaaaactgagcatgggcgccgcctcagtagccgccgtaaaacgcgtgatatgttccataaccgaaaaaaaagcgcgggagattgcggacaaagttctggaatgcgctaccgcggaagaagtgaagattgaattggaaaaaattaagaattattaa

SEQ ID NO: 66194 - protein, 582 aa, Unknown
  Obtained from environmental sample
  DOMAIN (15)...(139): PEP-utilising enzyme, N-terminal
  misc_feature (1)..(582): Xaa is any amino acid
MVRWSVFFYLYLMVLSGKRAAPGIAVGAVYVYKNTGLLPKENFIPKGEEQSHLDRYQAVKKEAFNELEKLKITMQKHDPQKAGIFSAHQEIIEDIVINEEIPSRILNDKWAGDWAIYHVYETVLIVLQKAGDPLIAERAADFDDVRALLLRLWYGKKNDGLSSLTEPVIIAAHDLMPSDTASLDRSKALALLTEKGGLTTHTAIIAKSYGIPTLFGIHGLMDAVKQGQLAVVNADEEKVILEPETEIAAEYEKKYEAWRRDKQNADTYLVKQACTQDGTRIDIGLNLSGALDDELQAASFADSVGLFRTEFLYLGRDFLPDEEEQVSAYKKVLECFGQRPVILRTLDIGGDKQLSSLNIKREENPFLGNRGIRFCLSYPDVFKTQIRAALRAGVYGNLWIMFPMVNSIDDIRNAKEIIASVQEELEKEGKPFGRIKTGIMIETPSIALMARQAAREVDFASIGTNDLCQYLCAADRMNSEVEPYYQSFHPAIFKLIKEVTAAFEKNGKPISICGELAADPLAAPVFVGLGLKKLSMGAASVAAVKRVICSITEKKAREIADKVLECATAEEVKIELEKIKNY

SEQ ID NO: 66195 - DNA, 921 bp, Unknown
  Obtained from environmental sample
  misc_feature (1)..(921): n is a, c, g, or t
atgtgtcggcgaaggctgccggataggcgtagacgatatcaaacgcacggacggcaattacggccattatcatgttgtagacggaattatcgttattccaaagaacaccattctgtatcccggaacagttatttgacgccttttcgtttctttttgttaagttttttatttttttcttttttntcatgcacaaaaaattatccccaatcaacgcaaaagcaaaaagaaaaacaggacgagcgtcttataaccgtaacaagcaaagccatgttacccgaaaatatatccgccgctcttattaaagccgcaaatgaaaatccctctttttcttccgatattgccgccattttacagacagacccgtatttatggaaactggtagacaagaagaacagtctcggcgaatcctacgcgcccgacgatcttgtcgaattaaaaagcggcgcgtatcttgtaaacaggacggggctgtttctgcgcaaaagcgccgcttcttcgcttgaagaaatggccgccgccgcaaaaaaagacggcgtaacccttacggcgtcgtccgcctaccgctcatattcgtatcaggtgcaggtttacgagcgcaacgtaaaagaacttggaagggaggcggctgacagggaatcggcccgccccggctacagccagcatcaattaggccttgtcatagacttcggctcaattacggacgcttttaccggcacaaaagaagaggtatggctgactaaaaacgcgtggcgctacggctggattatctccttccccaaagacatggaagaggttacaggctaccgctgggaaagctggcactaccgctacatgggcaaggaactggcgaaatttataaacgattattttgagggagtacagcagtacgccctgcaattcttaaaagagtggaaagaatag

SEQ ID NO: 66196 - protein, 306 aa, Unknown
  Obtained from environmental sample
  DOMAIN (156)...(280): D-alanyl-D-alanine carboxypeptidase
  misc_feature (1)..(306): Xaa is any amino acid
MCRRRLPDRRRRYQTHGRQLRPLSCCRRNYRYSKEHHSVSRNSYLTPFRFFLLSFLFFSFXSCTKNYPQSTQKQKEKQDERLITVTSKAMLPENISAALIKAANENPSFSSDIAAILQTDPYLWKLVDKKNSLGESYAPDDLVELKSGAYLVNRTGLFLRKSAASSLEEMAAAAKKDGVTLTASSAYRSYSYQVQVYERNVKELGREAADRESARPGYSQHQLGLVIDFGSITDAFTGTKEEVWLTKNAWRYGWIISFPKDMEEVTGYRWESWHYRYMGKELAKFINDYFEGVQQYALQFLKEWKE

SEQ ID NO: 66197 - DNA, 792 bp, Unknown
  Obtained from environmental sample
  misc_feature (1)..(792): n is a, c, g, or t
ttggcattcttaaagttgataaatccaaccaaattaccgaatttttggaaaaaccctggtcctacaaaagatatttccaatttcagagctccgcaggaattacttacggaaaaaaacaaggatgactgctatcttggttctatgggaatctatgtttttaacgcaaaaacaatggaagaatgtcttgcgaatgatcttaccgattttggaaaagaaataattccctcggcgatcagcaggttaaaggtaaacgcctatctttttgacggctactgggaagatattggaacgataagaaatttttatgataccaatcttgagcttacaacattaaggccgcgtttcgatttttatgacgagcccaagccaatctatacccatatgcgaaaccttccgccgtcaaaaatgaacttttcaaatatgaaccagtccattgccgccgaaggatgtattattaccaacgcaaacattaccaattcaattgtcggtatccgtacaattatcgaaacaggctcaagcctgaacggcgttgtatgtatgggagccgactattacgaaactgaatcgcaaaaaatgaaaaacgccgaggccagaatcccgaatgtcggaatcggacgcggggcgattgtcaaaggagcgatcatagacaagaacgtatgtgtcggcgaaggctgccggataggcgtagacgatatcaaacgcacggacggcaattacggccattatcatgttgtagacggaattatcgttattccaaagaacaccattctgtatcccggaacagttatttga

SEQ ID NO: 66198 - protein, 263 aa, Unknown
  Obtained from environmental sample
  misc_feature (1)..(263): Xaa is any amino acid
MAFLKLINPTKLPNFWKNPGPTKDISNFRAPQELLTEKNKDDCYLGSMGIYVFNAKTMEECLANDLTDFGKEIIPSAISRLKVNAYLFDGYWEDIGTIRNFYDTNLELTTLRPRFDFYDEPKPIYTHMRNLPPSKMNFSNMNQSIAAEGCIITNANITNSIVGIRTIIETGSSLNGVVCMGADYYETESQKMKNAEARIPNVGIGRGAIVKGAIIDKNVCVGEGCRIGVDDIKRTDGNYGHYHVVDGIIVIPKNTILYPGTVI

SEQ ID NO: 66199 - DNA, 543 bp, Unknown
  Obtained from environmental sample
  misc_feature (1)..(543): n is a, c, g, or t
atgaaaaaatgggtttgttcagtgtgcggttatgtgcacacaggcgatcagccgcccgcggcctgccccacgtgcaaggctccggcggaaaaattcaaggaacaggctgcgggcgggggtttcgccgccgagcatgtggtcggcgtagccaagggcgttgacgcggacatcgtaaaggatctgcaggcgcactttaacggcgaatgttgcgaagtgggaatgtacctggccatggcgcgggtggcgttccgggaaggctatccggaagtcggccagtattgggagaaggccgcctatgaagaagcggaacacgccgccaaattcgccgagcttctgggcgaggtagtcaccgacagcacaaagaaaaacctggaaatgcggatagaagccgaacacggcgcctgcaccggcaagacggacatcgcaaaacgcgccaaggaaaaaggcctggacgcgatacacgacactgtccacgaaatggcccgtgacgaagcccgccactgcgccgcattcaagggactgctgaaacactacttctcataa

SEQ ID NO: 66200 - protein, 180 aa, Unknown
  Obtained from environmental sample
  DOMAIN (1)...(32): Rubredoxin
  misc_feature (1)..(180): Xaa is any amino acid
MKKWVCSVCGYVHTGDQPPAACPTCKAPAEKFKEQAAGGGFAAEHVVGVAKGVDADIVKDLQAHFNGECCEVGMYLAMARVAFREGYPEVGQYWEKAAYEEAEHAAKFAELLGEVVTDSTKKNLEMRIEAEHGACTGKTDIAKRAKEKGLDAIHDTVHEMARDEARHCAAFKGLLKHYFS

SEQ ID NO: 66201 - DNA, 501 bp, Unknown
  Obtained from environmental sample
  misc_feature (1)..(501): n is a, c, g, or t
atgagcgatattgaagaacaggcggccaaaactgcggccatgctggttgagaaactggcgggcgggcattacagtttggcgcttgcggaatcctgcacctgtgggcttgtaagcgatctcctcgcgcgggtaagcggggcctccgccgtgttgtggggttcttttgtatgctattcaccggaagcaaagacgcggatgcttcgcattgacggaaactttcttgagaagcacggactggtgagcgcggagactgccgaaaaaatggcgttgagcgcccttgaattatccggcgctgccattggggcgtcggttacaggccttgccgggccgcaaggcgacggcagcgcaacgccggtggggacggtttttgtcggaattgcgcggcgggttaacggcgaagcaacggcggatgtaaaaccgttattttttcagggcacacgccaagagataaggctgcaggcggcgttggcggttttggagaagtgtaaaatcaatgaataa

SEQ ID NO: 66202 - protein, 166 aa, Unknown
  Obtained from environmental sample
  DOMAIN (8)...(163): Competence-damaged protein
  misc_feature (1)..(166): Xaa is any amino acid
MSDIEEQAAKTAAMLVEKLAGGHYSLALAESCTCGLVSDLLARVSGASAVLWGSFVCYSPEAKTRMLRIDGNFLEKHGLVSAETAEKMALSALELSGAAIGASVTGLAGPQGDGSATPVGTVFVGIARRVNGEATADVKPLFFQGTRQEIRLQAALAVLEKCKINE

SEQ ID NO: 66203 - DNA, 504 bp, Unknown
  Obtained from environmental sample
  misc_feature (1)..(504): n is a, c, g, or t
atgtcaaagtatgaaggaaaaagaaaagattcctctatagtaacccttggcagggagaccaggttcagcggctttttgagatttaaggagacgctgcggatacagggacaattcaagggaaccattgaagcgggcggagatctgattgttgacaaagacgcggtagtagaggtggatcatttaaatgtggattcgctgaccgtatatggcgatgttacaggcaatatttacgctgttgacaaggttgacatgatgaccggggcgaaggtgcgcggcgacattacggccgccagactgcgcctggccgacggcgttttatttgaaggccaatgcagcatgaccggcgtggacgaagaggttgagattttctcccggcctattgaggacattaaagccgagttggcgcgggtaaacccggtacgtaagccgcatcatcagcattacagcgcgccgcatcatggcgcatcgcaccatataggggacgcatatgaggcaccgcgttaa

SEQ ID NO: 66204 - protein, 167 aa, Unknown
  Obtained from environmental sample
  DOMAIN (6)...(117): Protein of unknown function, DUF583
  misc_feature (1)..(167): Xaa is any amino acid
MSKYEGKRKDSSIVTLGRETRFSGFLRFKETLRIQGQFKGTIEAGGDLIVDKDAVVEVDHLNVDSLTVYGDVTGNIYAVDKVDMMTGAKVRGDITAARLRLADGVLFEGQCSMTGVDEEVEIFSRPIEDIKAELARVNPVRKPHHQHYSAPHHGASHHIGDAYEAPR

SEQ ID NO: 66205 - DNA, 429 bp, Unknown
  Obtained from environmental sample
  misc_feature (1)..(429): n is a, c, g, or t
gtgaaggacaaggtggccggatttgagcttggcgttgacgactatatcaccaagcctttcaatttttccgaggtgctggcgcggataagaacggcgctcagaaaccgggagttgtttgcccagattgcgctacgggaagcgcgtcttgaccttgccgaagaattaaaccgggatttgaaacggagccttggggaatttgccagaagcattgacgagttggattccgttatcaccgagattgaaacgggcggaaagccggcggagttggctggcaatattcgggaaaaagccaggaaagcccgcggacagcttgcggatattgacgcgcatattggaaaaatgatacttaaatgggaggatcttaaaaagaacgaaataggtctttccacgctggaaacacagattcgaaagtttcccagccaggaataa

SEQ ID NO: 66206 - protein, 142 aa, Unknown
  Obtained from environmental sample
  misc_feature (1)..(142): Xaa is any amino acid
MKDKVAGFELGVDDYITKPFNFSEVLARIRTALRNRELFAQIALREARLDLAEELNRDLKRSLGEFARSIDELDSVITEIETGGKPAELAGNIREKARKARGQLADIDAHIGKMILKWEDLKKNEIGLSTLETQIRKFPSQE

SEQ ID NO: 66207 - DNA, 2238 bp, Unknown
  Obtained from environmental sample
  misc_feature (1)..(2238): n is a, c, g, or t
gtggcaatccgcgcgatcagccttaaagcccctgtaccggctcaaaactaccggcagtacgcgcaggggattgatacggacaagttccgcaatacggtttcctcttacaggttaaggatacagggcgaggacgccaggtaccgttccgatccttcgttatacgccatttacgaccgttcttccggcgcgacgaatccgcccagcgtggcaaaaataaggctcaacatgataggcggacagagctggcgcgtcgccggacagtggatcgagtgggatttctatgtgcccgaagacggcatgtaccggtttaccgtcaagggccgtcagaattacaaccgcggttttgtttcaaaccgcaaggtgatgatagacgggcagattccctgcatggaactttccgccgtgccttttacctacagcaataaatggaagctggtgactttcaacgacgatcagggtgatatgctgtttcccctggaacacggcgcgcacagtttgcgcctgcaggtggctatgggcggcatgggcgagatgttaagcgtcatggaagaaagcgtattccgccttaacagcatttaccgaaaaatactggtgctgaccggcacggaaccggacatttaccgcgattaccgcgtggatgtggtatatcccgacattattaaggcaatggatctggaaagcaagatcctctataaactcgttgatgatttaaccgcctattcgggcgagcgcagcgcccaggcggcggctacgctgactctggcccgccaactggaactttttgtcaggcggcccgataaaatccccagaactttggtaaattttaaattcaatatcagcgccctgggcgacagtcttttggccctttcccagtcccagcttgatgttgattacattgtggtaagcgccgccaacgcaagaatacagccggaaagggaaaattttctggtcgccttttcccatgagatacggtcttttctggtctcgttttttgttgattacaacaaccttggcgacgtgtaccgcaaaggcgccgacgtcgtcgaagtgtggatgcttgccggacgcgatcaaagcacgattctgaaaggcatgattgacgatacctttacccccaacaccgggattaaagtgaacgttaaacttgtggcccccgacgcggttatgccggctgttgtcgcgggcacggggccggacgcggcgctgaccgtgccgcaggtcgatccggtgaattacgccgtccgccacgccgcgcttgacgtttcaaaattggaaggctttcaggctctgacgcgggagtttgattccagcgtcctcgtgccgttccgttacgcgggcgggatttacggccttcccgaaacccagtacttccatgtcatgttttaccgcaaggatatttttgaggaactgggcattgaggttcccgaaacctgggatgagctgatcagcattttgcccataattcaaaagaacaatatgaacgtgggaatcccttcggtggcgacgaccgaacagatcaacatcgatttttccaatttccttgcccatctataccagcgtaacggcagcctctacaacgaggacggctcgcggactttactggacggcgagacggccattgaggcgtttgacgtttacaccaaattttttacccattataaaactcctatagtgtataattttttaaaccgtttccgcaccggcgagatgcccctcgctttcgccgattacaccaattttaacaccctggaagttttcgcgccggaactgcgcggactctgggggtttgcccgcatgcccggactgcgcaaagcggacggcagcattgaccgctcggtgccgacgggaacgcttgcctccatgattttttccaacgcgaaaaaaccggagcttgcctgggagtttctgaagtggtgggtcagcgccgatacccagcttcgtttcggcagggagcttgaaagcgtcatgggcgcggcggcgcgttatcccactgcgaattttgacgcttttacgcggctttcctggggctcggagcaaatggccgtgctgagggaacagcgttcctggacggtaggcacgccggaagtgcccggcggttactacgtcagccgccatataaccaacgcggtgcgccgcatattgaacgaaggcgaagacacgagggaaaccctgctggattacagcattacgataaatgacgagctgataaaaaaacgtaaggaattcggtctggaataa

SEQ ID NO: 66208 - protein, 745 aa, Unknown
  Obtained from environmental sample
  DOMAIN (318)...(646): Bacterial extracellular solute-binding protein
  misc_feature (1)..(745): Xaa is any amino acid
MAIRAISLKAPVPAQNYRQYAQGIDTDKFRNTVSSYRLRIQGEDARYRSDPSLYAIYDRSSGATNPPSVAKIRLNMIGGQSWRVAGQWIEWDFYVPEDGMYRFTVKGRQNYNRGFVSNRKVMIDGQIPCMELSAVPFTYSNKWKLVTFNDDQGDMLFPLEHGAHSLRLQVAMGGMGEMLSVMEESVFRLNSIYRKILVLTGTEPDIYRDYRVDVVYPDIIKAMDLESKILYKLVDDLTAYSGERSAQAAATLTLARQLELFVRRPDKIPRTLVNFKFNISALGDSLLALSQSQLDVDYIVVSAANARIQPERENFLVAFSHEIRSFLVSFFVDYNNLGDVYRKGADVVEVWMLAGRDQSTILKGMIDDTFTPNTGIKVNVKLVAPDAVMPAVVAGTGPDAALTVPQVDPVNYAVRHAALDVSKLEGFQALTREFDSSVLVPFRYAGGIYGLPETQYFHVMFYRKDIFEELGIEVPETWDELISILPIIQKNNMNVGIPSVATTEQINIDFSNFLAHLYQRNGSLYNEDGSRTLLDGETAIEAFDVYTKFFTHYKTPIVYNFLNRFRTGEMPLAFADYTNFNTLEVFAPELRGLWGFARMPGLRKADGSIDRSVPTGTLASMIFSNAKKPELAWEFLKWWVSADTQLRFGRELESVMGAAARYPTANFDAFTRLSWGSEQMAVLREQRSWTVGTPEVPGGYYVSRHITNAVRRILNEGEDTRETLLDYSITINDELIKKRKEFGLE

SEQ ID NO: 66209 - DNA, 933 bp, Unknown
  Obtained from environmental sample
  misc_feature (1)..(933): n is a, c, g, or t
atgagtttagcgcggtatacggaaaaaaagaaagcggccttttcgtatctgttaagggaaatagcaaaaagccgcgtgtgctatatttttcttgccccttacgccataatcttcgccctgttctatatcgctccgcttgtggtttccgtattttacagttttacatacttcaatatcctggagccgcccaaatttatcggccttcgcaattatatcaatcttatgttaggcgacgacgtgttcctcaaggcggtgaaaaacacctttattatggcggcggtaaccggccccataggttatattttttcatttctgttcgcgtggtttatcaacgaactgccccgctatatccgcgccgtggtaacgcttgttttttacgcgccttcaatttccggcgcggtgtacatgatatgggcgatcattttctccggcgacgcctacggctacatcaacgggctgctgctgaatctgggcatactggatcagccggtgctatggctgacggatcccaggtacatgatgccggttatgttagttgtcattttatggatgagtttggggacgggatttctggcttttatagcgggcctcagcaccatcgacgtgtcgctctacgaggcgggcctggtggacgggataaagaaccgctggcaggaactctggtacattaccctgcccaatatgaaggggatgctgatgttcggcgcggtcatggcgattacccagtcattcggggtcgccgatgtcaccgtggccctggcgggattccccagtacggattacgcggtgcataccgtggtgaatcacctggtcgattacggttctcttcgctttgaaatgggttatgcgtcagcgattgcgaccctgctgttcctgaccatgattatctgcaatactctggtgcagaaattactgcgccgggtggggacctga

SEQ ID NO: 66210 - protein, 310 aa, Unknown
  Obtained from environmental sample
  DOMAIN (81)...(310): Binding-protein-dependent transport system inner membrane component
  misc_feature (1)..(310): Xaa is any amino acid
MSLARYTEKKKAAFSYLLREIAKSRVCYIFLAPYAIIFALFYIAPLVVSVFYSFTYFNILEPPKFIGLRNYINLMLGDDVFLKAVKNTFIMAAVTGPIGYIFSFLFAWFINELPRYIRAVVTLVFYAPSISGAVYMIWAIIFSGDAYGYINGLLLNLGILDQPVLWLTDPRYMMPVMLVVILWMSLGTGFLAFIAGLSTIDVSLYEAGLVDGIKNRWQELWYITLPNMKGMLMFGAVMAITQSFGVADVTVALAGFPSTDYAVHTVVNHLVDYGSLRFEMGYASAIATLLFLTMIICNTLVQKLLRRVGT

SEQ ID NO: 66211 - DNA, 888 bp, Unknown
  Obtained from environmental sample
  misc_feature (1)..(888): n is a, c, g, or t
atggcggcggtaaaagcggcgaaaaaaacaaaaaaactcgtgggcggcagaaggctgaaccgttcctacggcggcgacgcttttatcttcttcattctgacggtcttcggactgttttttgcctatcccctggtgtacgccattaacaacgcctttaaacccctgaatgaaattttcctgttcccgccgcgtctttgggtacgccagccgacgatgaataactttcaggatctgtttatcattatgagcaagtcctgggttaccttttcccgctatatttttaacaccgtgctgatcaccgccgtgggtacgggcggcctcattatcgtggcctcgatgggagcctttgtggtgtcaaaataccgcttccccggcgcgaagctgttttttaacgtggtcattgtcaccctgatgttctccggttatgttacggcgattcccaactatctgattatggcaaaactcggctgggtggataccttcctttccgtcatagtgccggccttcgcaatgcctatgggattctttttgctcanacagtttattgacaccataccgaatacccttctggaagcggcaaaggttgacggcgcgagggaatggcgcattttcctgttgataatacttcccatgataaggcccgcgtggctgaccgtgatgattttttccgtgcagagtctgtggaacgcccgcgcttccaattttatttattcggagcagcttaaaaccctgccctacgcgctttcgcagattatttcaggcggcatagcccgcgccggagtaggagcggcggtaacgctctttgttatgatcgtgccgctggtgatgttcattttcgcgcagagtaacattctgcaaacaatggcaagttcggggataaaggaatga

SEQ ID NO: 66212 - protein, 295 aa, Unknown
  Obtained from environmental sample
  DOMAIN (89)...(295): Binding-protein-dependent transport system inner membrane component
  misc_feature (1)..(295): Xaa is any amino acid
MAAVKAAKKTKKLVGGRRLNRSYGGDAFIFFILTVFGLFFAYPLVYAINNAFKPLNEIFLFPPRLWVRQPTMNNFQDLFIIMSKSWVTFSRYIFNTVLITAVGTGGLIIVASMGAFVVSKYRFPGAKLFFNVVIVTLMFSGYVTAIPNYLIMAKLGWVDTFLSVIVPAFAMPMGFFLLXQFIDTIPNTLLEAAKVDGAREWRIFLLIILPMIRPAWLTVMIFSVQSLWNARASNFIYSEQLKTLPYALSQIISGGIARAGVGAAVTLFVMIVPLVMFIFAQSNILQTMASSGIKE

SEQ ID NO: 66213 - DNA, 1350 bp, Unknown
  Obtained from environmental sample
  misc_feature (1)..(1350): n is a, c, g, or t
atgatgaaaaataacaaagaaaaaaagggcttctcccgctttatcatgaattttaaccgcagtttttttcttttttcttttatttgttacctgttatttgttatttgtaatttgtcggcttcgccgaccaattacacctacaattacgatttctggtttgaacaggtcgcttctcccgacccgtactatgtgggcgcgtatatactgggtacgactttgggcatcggccatttccgcgatcctcaggggctgtttgtgcgggataatcgcatttacatctgcgattcgggcaacaaccggataattctgctggcttatgaaaacggggaacaccggcttataatgacagtagattcggtgatgattaacggcgaaaagagtccttttaattatcctatggatatttttgaaagcagggacggcttgttgtacattgccgataccaacaaccaccgcatactcaaactggaccggaactggaattatatcgcttctgtattgaagcccgatgatgaaagtatcgacgaacacgcggaatttttgccgctgaaactggcagttgattttgccaaccgcctctttgtgcaggcgcggaatatcaacaagggtcttatggaatttgacagccggggactatttgccggttacatgggggcgaacaaagtacaggtcaatattattgattatgtatggaaactcatcgccacccaggcgcaaaaagagcgaatgacattgtttgtccccaccgaatacagcaacctctgccttgatcgggacggttttatttatgtcaccaacgcaagcgggcagacatatccgatccggcggctcaacgccatgggacaggatattttgattcgtaacggctatgaagaccccgtcggcgacctggcgtacggcaacgcgggaggcgtaaccggcccgtcaaagtttattgacgtggcggctatggataacgattcctatgcctgctttgactttgtacgggggcggatttttgtgtatgactttcaggggaacctgttatacgcttttggcggactgggtaaccgcgaaggccgttttttgaaacctgtcgctcttgcccagatgggccactccctgtatgccctggattccggagccgccgcccttacccgatttgatttgaccggttatggggaaaagataaacagggccctggatgagtatcaggcgggccgctatgaatcttccgcggaagtatgggaagaagtgcttaaaatgaacggcaattatgaccttgcctacatcggcataggccgggcggcgctgcggcagggcgagtatcaaaagagcgatgaagtattacaaactcaaacatttccgtga

SEQ ID NO: 66214 - protein, 449 aa, Unknown
  Obtained from environmental sample
  DOMAIN (78)...(104): NHL repeat
  misc_feature (1)..(449): Xaa is any amino acid
MMKNNKEKKGFSRFIMNFNRSFFLFSFICYLLFVICNLSASPTNYTYNYDFWFEQVASPDPYYVGAYILGTTLGIGHFRDPQGLFVRDNRIYICDSGNNRIILLAYENGEHRLIMTVDSVMINGEKSPFNYPMDIFESRDGLLYIADTNNHRILKLDRNWNYIASVLKPDDESIDEHAEFLPLKLAVDFANRLFVQARNINKGLMEFDSRGLFAGYMGANKVQVNIIDYVWKLIATQAQKERMTLFVPTEYSNLCLDRDGFIYVTNASGQTYPIRRLNAMGQDILIRNGYEDPVGDLAYGNAGGVTGPSKFIDVAAMDNDSYACFDFVRGRIFVYDFQGNLLYAFGGLGNREGRFLKPVALAQMGHSLYALDSGAAALTRFDLTGYGEKINRALDEYQAGRYESSAEVWEEVLKMNGNYDLAYIGIGRAALRQGEYQKSDEVLQTQTFP

SEQ ID NO: 66215 - DNA, 519 bp, Unknown
  Obtained from environmental sample
  misc_feature (1)..(519): n is a, c, g, or t
atgtacagagacgaggtgtcgtcgtggaacatagacttcctgctgcagtcgtcgcagctgcacgacgtgggcaagatcgccatcaaggacagcatcctccaaaagccctccaagctcactccggaggagttcgaggagatgaagacgcacaccactttcggtataaaggttatagagaagatacaggagaacacctcggaggcgacattccttgagtacgctaagatattcgcgagcacgcaccacgagaagtgggacgggtcggggtatccgtgcgggcttattggggaggccattccgcttcaggggcgtctgatggccatagccgatgtctacgacgcgcttatctcggagcgtccttacaagaaggcgttcacgcacgaggaggcggtgaagatcatatcggacgggagcgggtcgcacttcgacccgaacttggtcaagctgtttttggagcgtgagcaggagttcaagctgatctcaaagagtatgggcggaaagtccggggcgcagttatga

SEQ ID NO: 66216 - protein, 172 aa, Unknown
  Obtained from environmental sample
  DOMAIN (3)...(115): HD domain
  misc_feature (1)..(172): Xaa is any amino acid
MYRDEVSSWNIDFLLQSSQLHDVGKIAIKDSILQKPSKLTPEEFEEMKTHTTFGIKVIEKIQENTSEATFLEYAKIFASTHHEKWDGSGYPCGLIGEAIPLQGRLMAIADVYDALISERPYKKAFTHEEAVKIISDGSGSHFDPNLVKLFLEREQEFKLISKSMGGKSGAQL

SEQ ID NO: 66217 - DNA, 1206 bp, Unknown
  Obtained from environmental sample
  misc_feature (1)..(1206): n is a, c, g, or t
atgatcaagtcgtacacggtggcggttagggagatcgatgacggcgcggcggcggtcgggcaggccgcgaagggcgtcgcgtctctgccgttgcttaaaaataccgtgggcattatcaccgcgcacccggagtgcgtcccctccggcgtcttacgcgacgtggcgagggcgttgccctttccaagcgtagggatgaccaccatcgcccactgcgccggcgccgaggccgacacctacatgctgtcgattttggtgctgacgagcgacgactgcgtcttttcctgcggggcgagcgatccgatacctgagaagtgcggcgtcgagacggcgagggaggccgtgcgcaagtgttacggggagcttagcggccgcttgccgtcagagcccaagttggcgctcctctactcgcaattctttctcgctccgcgccaataccagtttaccgccgccatttcggaggtcatccctcagcttccgatattcggcgcggtgacaaacgacgataagcagaatgtgcggtcgcagacgaacgcccggattttggccgacggggagctttacgacgacaggccggccctgcttttggtatcgggcgacgtgtccccgaaattttacatagcctccgtcaccgaagacgcgataatcatgccgcgcgttggtgttataacgaaggcggacggtatcaagctgctcaaggtgaacaacgtgagcgcccccgaatttttcaagcagataggctttttgggcgaggagtcgggcggttggcgcaacggcggggaggggctgctttcgagcctcttcgtattgcacatcaacgacgattgcggcggcgccgccgacctcacgcgaataccgttcatggtggacgccgaggccgtctactgcgccggaccgctcgtagagggcgcggcgatatcagtggcttttaatacgcgggacggcgtggtggagaccgcgtcgcgaatatgcgaacaagtaaaacgggacagcgccggcgggacggtgatcatttacacctgcataggcaggcgcttcggattgcttggcgaacctatggccgaactgtcggcgataatcgaacacttggggaatgattttgtctacactgccgcctacggtacgggggagatgtgccccacaagagtcactaagggcaaggcgttcaatcaagaccatagccaaactattgtggcgtgtgtgttttaa

SEQ ID NO: 66218 - protein, 401 aa, Unknown
  Obtained from environmental sample
  misc_feature (1)..(401): Xaa is any amino acid
MIKSYTVAVREIDDGAAAVGQAAKGVASLPLLKNTVGIITAHPECVPSGVLRDVARALPFPSVGMTTIAHCAGAEADTYMLSILVLTSDDCVFSCGASDPIPEKCGVETAREAVRKCYGELSGRLPSEPKLALLYSQFFLAPRQYQFTAAISEVIPQLPIFGAVTNDDKQNVRSQTNARILADGELYDDRPALLLVSGDVSPKFYIASVTEDAIIMPRVGVITKADGIKLLKVNNVSAPEFFKQIGFLGEESGGWRNGGEGLLSSLFVLHINDDCGGAADLTRIPFMVDAEAVYCAGPLVEGAAISVAFNTRDGVVETASRICEQVKRDSAGGTVIIYTCIGRRFGLLGEPMAELSAIIEHLGNDFVYTAAYGTGEMCPTRVTKGKAFNQDHSQTIVACVF

SEQ ID NO: 66219 - DNA, 1257 bp, Unknown
  Obtained from environmental sample
  misc_feature (1)..(1257): n is a, c, g, or t
atggaaaaccaactccagctgggttcattaaattataaaaaagacgcctatatttttgtagaaggcgaacggaatgccgactgtttttttataatccagcagggaaaggtaaaaatatccaaggaagcaaaggtggaaggcgaaaatgacgagacgctcggtccgggagattttttcggcgttatttcaacaatgtcgtctcacagccgtatcgaatccgcccaggccctgaccgatgtcgttctgatctctgtccgccagaatcagtatgtggggcttatccggaacaatacgcaggtagccataaaaataatcctgcaattttccaaacgcctcaggtatctgaacgaaaccctcgcaaagcttaccctgaaaaataccgccgataacggcccttcccacctttatgacgtggcggaatattatctgggccaaaaacaatataaccaggccggacacgcctatgcccaatatgtcaggcattgccccaatggggaaaaagcggcttcggcaaaggataaactggcaaggctggcaagccgtatcgatcagccgaaattcgccccggatgatgtaaaccggatttaccgcaaggatacgatgctctttgccgaaggggagccgggagaccaacttttcatcattcagaaaggctccataaaaattacaaaaatcgtgacccaaaaagaagtgcttctggcaatgttgaagcccggtgacatactcggtgagatggcgctgttggaaggcaaaccccgggccgccagcgctgttgcctatgaggactgcgacgtgatggccgtgaacaaggcaaactttgaattaatgataaagaaccagccccagcttatcgccaggattacaatcctcctcgcggatcgtatctggctgatttacaagcagttggccaacaccatgcttggcaaacccatgggcaggatgtatgactcgctgcttatccagcttgaaaaaaaccgcgttcccctggacggcaaaaccccttataccttcgcctttgggctgcctgagttgattaacatggtcgggctttccgagaaagagggcactgcgatttttacacagatgatggaaggcaagaaactacagataatgaacaacaagatccatactacatctacggaagaaatttataaacagtcggagtacttccgcaagatggacaagatagagaaagccaaaaaggaaagccgcctggcaagggaacagggaacagggaacaaggaacaggactcgtaa

SEQ ID NO: 66220 - protein, 418 aa, Unknown
  Obtained from environmental sample
  DOMAIN (9)...(99): Cyclic nucleotide-binding domain
  misc_feature (1)..(418): Xaa is any amino acid
MENQLQLGSLNYKKDAYIFVEGERNADCFFIIQQGKVKISKEAKVEGENDETLGPGDFFGVISTMSSHSRIESAQALTDVVLISVRQNQYVGLIRNNTQVAIKIILQFSKRLRYLNETLAKLTLKNTADNGPSHLYDVAEYYLGQKQYNQAGHAYAQYVRHCPNGEKAASAKDKLARLASRIDQPKFAPDDVNRIYRKDTMLFAEGEPGDQLFIIQKGSIKITKIVTQKEVLLAMLKPGDILGEMALLEGKPRAASAVAYEDCDVMAVNKANFELMIKNQPQLIARITILLADRIWLIYKQLANTMLGKPMGRMYDSLLIQLEKNRVPLDGKTPYTFAFGLPELINMVGLSEKEGTAIFTQMMEGKKLQIMNNKIHTTSTEEIYKQSEYFRKMDKIEKAKKESRLAREQGTGNKEQDS

SEQ ID NO: 66221 - DNA, 660 bp, Unknown
  Obtained from environmental sample
  misc_feature (1)..(660): n is a, c, g, or t
atggatcttggtgttttctcccgttttacgcgggtattccagagcgatgaaataatctttagtgaatatgaaccgggggatactttctacgttatacagtccggaagggtaaaactgttgaaatacgacggtgaatccgagcggagcctggatattctgcagccgccggaaatgtttggtgaaatggcaatacttgaaggctcgccgcgcagcgccaccgccattgccgtggacgaagtaaaggtgctggaattcaacgcgcagaattttgagctgctcatgaccggaaacccgcagatcggcattaatctgctgaagattttcgcaaagaggatttacgattcaaaacggcgtttcatgattcttaccctgcccaacccccaggtaaagatcgccgacgtgtttcttatgcttgatgaaactatgccggatattaacagaaaaaccgatgcccgcgaatttcagactactattgaagatatagcccattgggccggagtcagcattgagcagacaagggacatacttcacacctttgtggtgcagaaccgcctggaggtgtacgctacccgcatggtggttaaaaacattaatgatttaaaccgtattgtcaacgcccggcgtaaacaggcaatgaacccgacaggtataaagacctga

SEQ ID NO: 66222 - protein, 219 aa, Unknown
  Obtained from environmental sample
  DOMAIN (10)...(99): Cyclic nucleotide-binding domain
  misc_feature (1)..(219): Xaa is any amino acid
MDLGVFSRFTRVFQSDEIIFSEYEPGDTFYVIQSGRVKLLKYDGESERSLDILQPPEMFGEMAILEGSPRSATAIAVDEVKVLEFNAQNFELLMTGNPQIGINLLKIFAKRIYDSKRRFMILTLPNPQVKIADVFLMLDETMPDINRKTDAREFQTTIEDIAHWAGVSIEQTRDILHTFVVQNRLEVYATRMVVKNINDLNRIVNARRKQAMNPTGIKT

SEQ ID NO: 66223 - DNA, 939 bp, Unknown
  Obtained from environmental sample
  misc_feature (1)..(939): n is a, c, g, or t
atgcccaaaccccaccaatattttacaggttcgatggtttacgcgcgcggagatgaggcgaataaactttttatcctccaaagcggaaaggtaagccttgtcactctggaccctgagacagggactgaaacacgcgatccggtattgccgggtgagtttttcggcgttaaatccgcgcttgggcatttcccgcgcgaagaaaacgccattgcagtggcggactcaatcgcgatggtgttcacggttcccgaatttgaagcgtttgccatatcaaacccaaaaattattattaagatgctcaaggttttttccacccaaatgcggcgtgttcaccagcagattgcgagacttaaggaaaaagaagatctaaaacccgacgaggggcttttcggcataggcgagacatacatgaaacttaaacgttactcccacgcgaaatacattttcagacgttaccttacccattaccccacaggccctaaggctgtccttgccgcgaaaaacctccagattgcggagaaagccatcgcgaataccgtcgtcaagattcagcaaaaaggagcggccagggaataccgtgaagcgataagcctgatttcaaaacatgaatacgaagaggcaattcaggctttcacaaaaatcattaacacttgcaaagaacaggaatgggtttccaaaagcgaatacgcaatcggacactgtcagtttcttctgggaaagtatgaggattgcattaaatacttttccgatctgctttcaaaaaaacccaatcatcccgacgcaaaggaggcgatgttctacctgggagaggctttcgagaagatcggcagcaaggcgcaggcggtggtctggtataacaagctcctggcattgccggatctggaagcgggcgggatgagggcgagagtaaaacaggcgcttaggggtttgggggcataa

SEQ ID NO: 66224 - protein, 312 aa, Unknown
  Obtained from environmental sample
  DOMAIN (225)...(258): Tetratricopeptide repeat
  misc_feature (1)..(312): Xaa is any amino acid
MPKPHQYFTGSMVYARGDEANKLFILQSGKVSLVTLDPETGTETRDPVLPGEFFGVKSALGHFPREENAIAVADSIAMVFTVPEFEAFAISNPKIIIKMLKVFSTQMRRVHQQIARLKEKEDLKPDEGLFGIGETYMKLKRYSHAKYIFRRYLTHYPTGPKAVLAAKNLQIAEKAIANTVVKIQQKGAAREYREAISLISKHEYEEAIQAFTKIINTCKEQEWVSKSEYAIGHCQFLLGKYEDCIKYFSDLLSKKPNHPDAKEAMFYLGEAFEKIGSKAQAVVWYNKLLALPDLEAGGMRARVKQALRGLGA

SEQ ID NO: 66225 - DNA, 1077 bp, Unknown
  Obtained from environmental sample
  misc_feature (1)..(1077): n is a, c, g, or t
atgatggcgagaattccgtcctgcggtaggtccaagccgggtaactactaccttacatggcagccttgggacaatgaccttaaagcttcggatacattcagggaacgatccaatctcagcagggaagatctgtacgcgctgtccggttacaagtgccttttttccggggtaaccaccgtcaacgaccatttcccgcaaaagttcaacagcgggattctccctaccttgccgatccgggcattccttgaatacagccttgcccatgaatgttcttcctatgatcttaaatggggcgacgggatagagattgagcataagcgggcggtgaaaaacaagtggcctttcataacccacctctgcgagggttttgacgaagaatcaatgcacggcattcagacgcttgaaaaattgaaggtgcttgacaatcactgccttcttgtccactgtatcgctttcagcgacgcggacataaaaacagcggcaaaagccggggcaagcgtttcatggtgcggcttttccaatatgtttatgtttaatgtcaccgcgaaagtccgcaagatgatcaaagccggagtaaatgtcaccattggaacggattcatcggcaagtggctcggcgaacctgcttgccgaaatcaaatacgacagagaactgtaccgttccatgtacggcgaggatctgccggcaaaaaaattattcgatatggttacatataacgcggcaaaggctttttggatggaagacaggattggaacgctggacgaaggcaaactgggcgacattctggtgctgaaagccaggcatgacgatccttacgaaaaccttgtaaacgcttccatgaaggacattcagcttctggtattggcaggtacgccaatatacggcgaaacgcgttttatggatattttcgggggcgaaatgcccgggggcgaattgccccttggatattcacaaattaaagtaagcggccgggccatgtttgtaaaaggcgatcccgccggtttgtacgccagtatccgcggcaaggtcggctttaataaaaagctggattatatgccttttgatcctgatttttaa

SEQ ID NO: 66226 - protein, 358 aa, Unknown
  Obtained from environmental sample
  DOMAIN (26)...(265): Amidohydrolase family
  misc_feature (1)..(358): Xaa is any amino acid
MMARIPSCGRSKPGNYYLTWQPWDNDLKASDTFRERSNLSREDLYALSGYKCLFSGVTTVNDHFPQKFNSGILPTLPIRAFLEYSLAHECSSYDLKWGDGIEIEHKRAVKNKWPFITHLCEGFDEESMHGIQTLEKLKVLDNHCLLVHCIAFSDADIKTAAKAGASVSWCGFSNMFMFNVTAKVRKMIKAGVNVTIGTDSSASGSANLLAEIKYDRELYRSMYGEDLPAKKLFDMVTYNAAKAFWMEDRIGTLDEGKLGDILVLKARHDDPYENLVNASMKDIQLLVLAGTPIYGETRFMDIFGGEMPGGELPLGYSQIKVSGRAMFVKGDPAGLYASIRGKVGFNKKLDYMPFDPDF

SEQ ID NO: 66227 - DNA, 1110 bp, Unknown
  Obtained from environmental sample
  misc_feature (1)..(1110): n is a, c, g, or t
atgagtaccgaaaaaatgaacgacaatcaaggcactgcccgcatggacgccggaaccgcccgaatggagacggcaaaggcaagccccaaaaaagccggagccgttttcgcttccgggcagaccattgttttgaacggcaagaactgcgtcattgaaagcacgatctcaggcagttccggcgaggcggttgtctacaaggcaaccatagacggcaagccctacgctttgaaactctacaaacccaacatgccgttaagcgatacggcgaaaaaagttattacaaaaattaaggacagccccaaagacaggattgtaaaaatatacgactttggcagttataacgggcaggattttgaagtcatggagtacgccgaaggcggcacccttgaggagtacctcaaaagctcaggcgcgatacacaacaccagcagtataaaaaacattgtaaagatgattgtcgaagggcttgaacagctacaccgtgagtataaggttatttatcaggacttaaaacctgaaaacatctatttcagagacgcgaacaaaacgtctattgttcttgccgattttggcatctcaagcattatggcgggttatgatgaagaagttgaagtaaccgccagcattacggacctttacgccgcacccgaattggcgcataaaggaaacagaaatgaagtaatggtgaccccgtccgttgattattttgccctggggataaccatgtttgaactctggctgggcgaaaaaccgtttaagggtgttaaggcgaccaagcgggattacttgatcgcggaagaaaaagtcgatttccccattgatatgccggacgattatgcaacaattatccggggccttatcaggccgcagcgaaaagaccgctggggtaatgaacacgtaagaaaatggcttaaaggcgaagctcttgcggttgaatccagggggagccaaaaagcaagcgcgtcttatgatcccttaaagttcagcaatacggaatccgctgtaagccccaaagagcttgccgaccttatggaaaaatatcccaaaatagggaaaacctgcctttatgacgacattataaaagaatggcttaaaaagcgggcgacttga

SEQ ID NO: 66228 - protein, 369 aa, Unknown
  Obtained from environmental sample
  DOMAIN (62)...(304): Protein tyrosine kinase
  misc_feature (1)..(369): Xaa is any amino acid
MSTEKMNDNQGTARMDAGTARMETAKASPKKAGAVFASGQTIVLNGKNCVIESTISGSSGEAVVYKATIDGKPYALKLYKPNMPLSDTAKKVITKIKDSPKDRIVKIYDFGSYNGQDFEVMEYAEGGTLEEYLKSSGAIHNTSSIKNIVKMIVEGLEQLHREYKVIYQDLKPENIYFRDANKTSIVLADFGISSIMAGYDEEVEVTASITDLYAAPELAHKGNRNEVMVTPSVDYFALGITMFELWLGEKPFKGVKATKRDYLIAEEKVDFPIDMPDDYATIIRGLIRPQRKDRWGNEHVRKWLKGEALAVESRGSQKASASYDPLKFSNTESAVSPKELADLMEKYPKIGKTCLYDDIIKEWLKKRAT

SEQ ID NO: 66229 - DNA, 744 bp, Unknown
  Obtained from environmental sample
  misc_feature (1)..(744): n is a, c, g, or t
atgaaaacaatcctttccgtttacggcgtttgcgacattggcttaaaaaagccaaacaacgaagacatgatcctgcttaatgatgaaatgttccgggacggttcaagacagaaggaatttgacgccgagaataatgtagtaatagccgtagccgacggaataggcgggctggacaagggggaagcggccagcgaaatggcgttggccaggttaaaggaacttcttgaaaaaattcccgatgatttgagcaatcaggaattaaaagaagtgttcgacgtatatacccaggaaacccataatgcaatgtcacagggaatgggaagcaccatagccgggctttttgtttaccggaataaagttttccgtttccatgccggggactcaagaatttatctgctccgtgacggcggactgcgccgtcttaccatagaccactcgctaagggagtcaggggagaaccctgacgccccttccaatataattaccaacgctttaggaggcgggagcagcgcgttcattgaatttgaggaagtcgaacagccttttttgaacaacgacatatatcttttgtcttccgacggcttgcatgatcttgtccctcccgatgtaatttcagatacgcttatgctgccgcgaatcgaagggttagatgccgccgaaaaactactggcgctcgccaaagagaatggcggaaatgacaatatttcaatcatcacgataagagtaaaggagaaaaaagaatga

SEQ ID NO: 66230 - protein, 247 aa, Unknown
  Obtained from environmental sample
  DOMAIN (6)...(235): Protein phosphatase 2C
  misc_feature (1)..(247): Xaa is any amino acid
MKTILSVYGVCDIGLKKPNNEDMILLNDEMFRDGSRQKEFDAENNVVIAVADGIGGLDKGEAASEMALARLKELLEKIPDDLSNQELKEVFDVYTQETHNAMSQGMGSTIAGLFVYRNKVFRFHAGDSRIYLLRDGGLRRLTIDHSLRESGENPDAPSNIITNALGGGSSAFIEFEEVEQPFLNNDIYLLSSDGLHDLVPPDVISDTLMLPRIEGLDAAEKLLALAKENGGNDNISIITIRVKEKKE

SEQ ID NO: 66231 - DNA, 2154 bp, Unknown
  Obtained from environmental sample
  misc_feature (1)..(2154): n is a, c, g, or t
ttgacagcncttttttcaaaagctaagggcgggatgttatttattgacaacgcccaaaaactcctggattccgaaggcaaggcagtgccggctttttcccatttcattgacgctatggacgccaacccggacgaccctgtcgtgcttatggcgggccttcctgtgggcctgagggaaatggtaaaaagctccgaatcggcaaacaagcaaatagtcaaccgttttgaaaaaatatttattatccccgattatacgccggaccagtatgttaaaattacagagaacgaattaaaaaaacaaagttttacattcagccccgaattttccgaaaaactactccagcggttccgttacctctacaaggaactgaagaagcccgacaacaatataaaatccgtaaacggctatcttgccgataaagaagcgcatgcaataacgggccgttattacctgagaaaggcttccgataaaataattctgccggaggatatacaggggcaggttgatgaaaagaaaaacatacaggaaattatggcggagcttgacgccattatcggcatgaccgcgttaaaaaaagaaatcaagagcctttacacgcagttaaaccagatcgccgaaatggaaaagaaaggcatcaagacggacaaacccgcccagcattttgtcattaccggcaatccgggcaccggcaaaaccacggtggcaagactgcttggaaaaatattcgaagggctgggcttgctggattccggccatgttgtcgaagtggacagaagcaaactggtcgcgggttacgttggccagaccgcgcctcttaccaacaacgcctgcgatacggcggcgggagggatactttttatcgacgaagtgtacacattaaaacaaaatgacggcgacagtttcggccaggaatgtatcgacaccctgcttaaacggatggaagacgaccggggcaagttcatggttgtcgttgccggatacaaaagcccgatggaaaaattccttacggccaacgagggcttaaaaagcaggtttacaaaatattttaaccttgaagattataccccggaagaactcgcggcgatatttgagtcccttgcaaaaaaacagcgttttatagtaccgccggaaacaaagattaaggttgtagctttcttcaaagacaggtgcgcgcggaaaaccaaagactttgccaacggaagggaagcgaggaaccttatggacgaggcgaggaagaatcaggcggaacgtttgtcctcggcggatatcgcggacatatccggggaagacctccttattacatttctccctgaagatattcccggcacaacttccgataaaatggtttccattgacgaggcgctcaaagacctcaacacgctggtggggcttaaatcggtgaaggacgcggtaacaaagataaccaactctttgcaggcccaaaaacttaccggcgaaacggaaacgcttgccaagcactttgtttttatgggcaaccccggcacgggaaaaacgactgtcgcgcggataatgggcgacgtgttcaaggccgtgggcatgcttcccacccacaatttgatagagcgggacaggggaaaactggtggcntcctatgtaggtcagacggccaagctggtggcgcagcaatgcgacgacgctatgggtggcatcctttttatagacgaagcatactcgctgaaacaggggccacaagattcattcggacaggaagcggtggatacgcttctaaaacgaatggaagatgatcggggcaaatttgtggttatagccgccggctataccaaagagatggaagagtttttggcgtccaacagcgggtttaaatcgcggttttcggattatataaattttgaagactacaatacgtccgaaatgcgggaaatttttataggaatgtgcaaaaaaaggaaaattgaattcgcccccggctttgacgaagcgctgaaaaaaaggctggataatttatatgccaaccggaacgcccagtttgcgaatgcccgcacggtaaggcaattatttgacaaaacaagggagaacgtatccgtgagggttcttgccatgaagaaacctgaagaagaactaaagcgtgaaatattaatcatgcgaccggaagatttggatatgaccgtatag

SEQ ID NO: 66232 - protein, 717 aa, Unknown
  Obtained from environmental sample
  DOMAIN (493)...(677): ATPase family associated with various cellular activities (AAA)
  misc_feature (1)..(717): Xaa is any amino acid
MTALFSKAKGGMLFIDNAQKLLDSEGKAVPAFSHFIDAMDANPDDPVVLMAGLPVGLREMVKSSESANKQIVNRFEKIFIIPDYTPDQYVKITENELKKQSFTFSPEFSEKLLQRFRYLYKELKKPDNNIKSVNGYLADKEAHAITGRYYLRKASDKIILPEDIQGQVDEKKNIQEIMAELDAIIGMTALKKEIKSLYTQLNQIAEMEKKGIKTDKPAQHFVITGNPGTGKTTVARLLGKIFEGLGLLDSGHVVEVDRSKLVAGYVGQTAPLTNNACDTAAGGILFIDEVYTLKQNDGDSFGQECIDTLLKRMEDDRGKFMVVVAGYKSPMEKFLTANEGLKSRFTKYFNLEDYTPEELAAIFESLAKKQRFIVPPETKIKVVAFFKDRCARKTKDFANGREARNLMDEARKNQAERLSSADIADISGEDLLITFLPEDIPGTTSDKMVSIDEALKDLNTLVGLKSVKDAVTKITNSLQAQKLTGETETLAKHFVFMGNPGTGKTTVARIMGDVFKAVGMLPTHNLIERDRGKLVASYVGQTAKLVAQQCDDAMGGILFIDEAYSLKQGPQDSFGQEAVDTLLKRMEDDRGKFVVIAAGYTKEMEEFLASNSGFKSRFSDYINFEDYNTSEMREIFIGMCKKRKIEFAPGFDEALKKRLDNLYANRNAQFANARTVRQLFDKTRENVSVRVLAMKKPEEELKREILIMRPEDLDMTV

SEQ ID NO: 66233 - DNA, 1314 bp, Unknown
  Obtained from environmental sample
  misc_feature (1)..(1314): n is a, c, g, or t
gtggaaatgctatgcaacaagtacgttattcacaacgattatcacaggacagccgttgaagacggcttaaagaggcttctctcccctgcggtgatccgcgagctacggggggatcagagcgaggccgccgacagccacggcatatccgtatttggccagaatctgaaaaacctgctgatgcagcagcccatcaagggaaccagggtaatgggcatagatccaggcatacgcaccggaacaaaatgcgcttttttgaacgatacggggaagtatcttggcagcgttgtcatccacaatcacaaggtggaagaagcgaaaaaactcatccttgaaggggtaaaaaaatacgacatccagctcattgccgtgggaaacggaaccggaagccgggaggtgcaggaaatcgtgtctgcggtcatagcggaaaacaacctggaagttctttacactgttgtggacgaagacggggcatcggtgtactcggcaagcgacatagcgagggaggaatttcccgaactcgatcttacgatccgaggggcaatctccattggccgccgattgcaggatcctctggcggaacttgtgaaaatcgatccaaaatcaattggcgtcggcctttaccagcatgatgtaaaccaaaagaaactatcagacaccctggacgaggttgtttcgtcggtggtgaacaacgtgggagtaaacctaaacacggccagtacctcacttttaagatacgtttcgggaatcaacagttcccttgcaaaaaagatagtaaagtacagggaagaaaaagggaaaatcggaagcagggaagagcttctttcggttccgggcatgggccccaaaagttttgagcaggccgccgggtttctgaaaattcccgaaagcggcgaggctctggacaacacctgggtgcatcctgaaaactataagctggccagggacatacagaccattacggttaccggcaacctgtccgccgaagctgcggacaggatcaaaaagcagtacagtatcggggacgctaccatcaacgatattattgaagagctaaaaaagcccaaccgcgaccccagagatggctacccaaaaccggtaatgcaaaaagaggtaatcacattcgaagacctgaaagaaggcatgaccgttacaggcaagataaagaacgtggttgattttggcgctttcgttgaccttggaataaaagagagcgcccttgtacacatttcagagctaagcgatagcttcgtcaaaaacccaatggatttaatcaaggtgggagatgttttggaattccgcantcgtcagccttga

SEQ ID NO: 66234 - protein, 437 aa, Unknown
  Obtained from environmental sample
  DOMAIN (376)...(435): S1 RNA binding domain
  misc_feature (1)..(437): Xaa is any amino acid
MEMLCNKYVIHNDYHRTAVEDGLKRLLSPAVIRELRGDQSEAADSHGISVFGQNLKNLLMQQPIKGTRVMGIDPGIRTGTKCAFLNDTGKYLGSVVIHNHKVEEAKKLILEGVKKYDIQLIAVGNGTGSREVQEIVSAVIAENNLEVLYTVVDEDGASVYSASDIAREEFPELDLTIRGAISIGRRLQDPLAELVKIDPKSIGVGLYQHDVNQKKLSDTLDEVVSSVVNNVGVNLNTASTSLLRYVSGINSSLAKKIVKYREEKGKIGSREELLSVPGMGPKSFEQAAGFLKIPESGEALDNTWVHPENYKLARDIQTITVTGNLSAEAADRIKKQYSIGDATINDIIEELKKPNRDPRDGYPKPVMQKEVITFEDLKEGMTVTGKIKNVVDFGAFVDLGIKESALVHISELSDSFVKNPMDLIKVGDVLEFRXRQP

SEQ ID NO: 66235 - DNA, 711 bp, Unknown
  Obtained from environmental sample
  misc_feature (1)..(711): n is a, c, g, or t
atgtcggatcacaatgggtttgagaagatcctggcgagtaccgctgaaaagctctgccctgaactaatgtcgattttggccgatccaaaattgcttgtggtgtaccaggagatggaccgcaaagagaacgccgttccaactgacatgaaaattttttatgatgggaaactccttccttattcgtccgtatttcatatccggcgaagggaaatgctgctggaagcgaaatttacccttcctttctggtattccctacccctaattcccgctttgatcaggttttttagcaacctctttaagaaaaagaagaaagatgccaagccatctatagacgaaagcgaacaattaactccggaagaaactgatcacgcggcaggaatcaggaaggcggcggaggaaatcgaatttgatattgttccgccagggtatacaattgatagttatcttgatgaactagctgcccgctggagccgtcttattgacaggcaggcaagggaaaacctgatagaagacgcaaagtttttggctcgggatcagcttcgccgtcacctaaaaataaacaaacacttcgagcccgccagggatgagttaaggcaaatggcatataatatggtaacctacaatgcagcgctctcttccctcagagcaaaggattccctcatcctcttcatggaactatacatggtcaaactgttgttaaatatcaaataa

SEQ ID NO: 66236 - protein, 236 aa, Unknown
  Obtained from environmental sample
  misc_feature (1)..(236): Xaa is any amino acid
MSDHNGFEKILASTAEKLCPELMSILADPKLLVVYQEMDRKENAVPTDMKIFYDGKLLPYSSVFHIRRREMLLEAKFTLPFWYSLPLIPALIRFFSNLFKKKKKDAKPSIDESEQLTPEETDHAAGIRKAAEEIEFDIVPPGYTIDSYLDELAARWSRLIDRQARENLIEDAKFLARDQLRRHLKINKHFEPARDELRQMAYNMVTYNAALSSLRAKDSLILFMELYMVKLLLNIK

SEQ ID NO: 66237 - DNA, 384 bp, Unknown
  Obtained from environmental sample
  misc_feature (1)..(384): n is a, c, g, or t
ttgaaattatcagcgggcatttcagaactttggcaattaagcgggcaggaagcggaaacagcttttggtaacctggaaagccagcttgcaaaaccgccttatctttataccatggatcagatcctgaagttttcggggccgggcggggagcttcttttgggccagtatacgtccgaagagctttcggaatggatgaaaagacaaacaaccgaaagcaggagcaatgggcttcctgccctgcttgttgtaaatattaatagcaaagatgaccagtattttttgcttaaagaaaaaatgatgcttctctgcgcgaggcttcttcatgacgggcaaatggttattaaaagggcaataataaagaaatggagcaggttaattttatga

SEQ ID NO: 66238 - protein, 127 aa, Unknown
  Obtained from environmental sample
  misc_feature (1)..(127): Xaa is any amino acid
MKLSAGISELWQLSGQEAETAFGNLESQLAKPPYLYTMDQILKFSGPGGELLLGQYTSEELSEWMKRQTTESRSNGLPALLVVNINSKDDQYFLLKEKMMLLCARLLHDGQMVIKRAIIKKWSRLIL

SEQ ID NO: 66239 - DNA, 855 bp, Unknown
  Obtained from environmental sample
  misc_feature (1)..(855): n is a, c, g, or t
atggttccggagacagatttatattcgattttagtagcatatgcaaacaaaaacaattctccctatattgaagtaaacccttttcttgattatttggaaaaattggctaaaaaattctccaaagaaaaccttgactggaataaatggactgtagacaagtcggtaaaattctggtccgaagtgacctctctggttgataatggaaaatgcgagctgcttgactctgaacccgcaaaggtttatctgtcatcttattatcctgaaaaaattcgtgaagcgtacgagtcagccgatgaaaacgcgaatcagccgtttccaagcgaggagtcgctcgggatttcctgccctgtgaataaggtaaagtacctgaattctgattacgaaattctatcagttttggcgaaaccagggaatgttaacgcgtcgatttataaaattggctttcctgacgattttggtttcgccgttgtacttccggacatgattccgcggcagttgactgaaatttgccttttaaaagtgcggaattacctgcgccggcagggaaataaagaatacttttatcgtaaaattattccgcagctacagggcaaagaagcgtatttaaaggatcagatcgagcaattgctggcaaagcccgttgatcaatacatggcaatagcggaaggcaaagagttttcctcaaccttctgggctcatttatgcggcttaatcaaaactgacattaaaaagaaaaacgaaaagctttctgtagatttttcggtattccaggcagtttatattattgaaattatcagcgggcatttcagaactttggcaattaagcgggcaggaagcggaaacagcttttggtaa

SEQ ID NO: 66240 - protein, 284 aa, Unknown
  Obtained from environmental sample
  misc_feature (1)..(284): Xaa is any amino acid
MVPETDLYSILVAYANKNNSPYIEVNPFLDYLEKLAKKFSKENLDWNKWTVDKSVKFWSEVTSLVDNGKCELLDSEPAKVYLSSYYPEKIREAYESADENANQPFPSEESLGISCPVNKVKYLNSDYEILSVLAKPGNVNASIYKIGFPDDFGFAVVLPDMIPRQLTEICLLKVRNYLRRQGNKEYFYRKIIPQLQGKEAYLKDQIEQLLAKPVDQYMAIAEGKEFSSTFWAHLCGLIKTDIKKKNEKLSVDFSVFQAVYIIEIISGHFRTLAIKRAGSGNSFW

SEQ ID NO: 66241 - DNA, 1362 bp, Unknown
  Obtained from environmental sample
  misc_feature (1)..(1362): n is a, c, g, or t
atgttatttacgccgtttgagataaaagaaaccgttgatatgtttatgcgttataaactggacatacgcgctataacactaggcgtctctcttttggactgcattagcgcaacaggagacgctactcgaaaaagaatgcgtgaaaaactattgcgcgtcgcaggttcccttgtaaaaacaggctgtgacattgagaccgaatacggtattccaatcatcaataaacgtatatccgttacgccgatagcccttgtcgccgcctcttgcgaagataaagactatacgccctttgccaaaactcttgattccgtagcgaaagaactcggcgttgattttatcggcggcttttccgctcttgttcaaaaagggatctcttcaggcgatgaaaaacttatccgctccctgcccgacgctctttcgcagaccgcacaagtctgcgcttctgtcaatgtcgcggcgacaaagagtggtattaacatggacgcggtgcgcctaatgggcgaaataattaaaaaaacggcggaagccaccgctgacaaagacggaataggctgcgcgaagctggttgttttttgcaacgcgccggaagacaatcctttcatggcgggcgcgtttcacggagtaggagaggcggagagcgttcttaatgtgggagtatcgggacccggcgtaataaaagccgcaattgaaaactgccgcgaaatgacatttgacgcgttagctgacactatcaaaaaaacagcttttaaaataacccgcatgggtcagcttgtaggcatggaagccgctaaccgcataggagttcccttcggcattttagacctctctcttgcgccgactccggcggtaggcgactctgtagcgcggatacttgaagaaatgggtcttgaagccgccggaacacacggcactacagccgctcttgcgatgttaaccgacatggtaaaaaaaggcggcgtaatggcgtcgactcatgtaggcggcttttccggcgcgtttattcccgtctccgaggacgaaggcatggtggcggcggtaaaaaacggtactatctctcttgataaacttgaagcgatgacatgcgtctgctccgtaggattggatatgattccgcttcccggcgacacaacgcccgcgacaatcgccgcaattatcgccgatgaaatggcaatcggcatggtgaacaataaaacaaccgcagtgcgcgtaattcctgtccccggaaaaaaagcgggacagtgggcggaattcggcggcttacttggcggttctcccataatggcggttaatagcgcaaaaagcgacgcattcatcaaccgaggcggacggatccctgcgcctattcacagttttaggaattga

SEQ ID NO: 66242 - protein, 453 aa, Unknown
  Obtained from environmental sample
  DOMAIN (1)...(453): Uncharacterized ACR (DUF711)
  misc_feature (1)..(453): Xaa is any amino acid
MLFTPFEIKETVDMFMRYKLDIRAITLGVSLLDCISATGDATRKRMREKLLRVAGSLVKTGCDIETEYGIPIINKRISVTPIALVAASCEDKDYTPFAKTLDSVAKELGVDFIGGFSALVQKGISSGDEKLIRSLPDALSQTAQVCASVNVAATKSGINMDAVRLMGEIIKKTAEATADKDGIGCAKLVVFCNAPEDNPFMAGAFHGVGEAESVLNVGVSGPGVIKAAIENCREMTFDALADTIKKTAFKITRMGQLVGMEAANRIGVPFGILDLSLAPTPAVGDSVARILEEMGLEAAGTHGTTAALAMLTDMVKKGGVMASTHVGGFSGAFIPVSEDEGMVAAVKNGTISLDKLEAMTCVCSVGLDMIPLPGDTTPATIAAIIADEMAIGMVNNKTTAVRVIPVPGKKAGQWAEFGGLLGGSPIMAVNSAKSDAFINRGGRIPAPIHSFRN

SEQ ID NO: 66243 - DNA, 534 bp, Unknown
  Obtained from environmental sample
  misc_feature (1)..(534): n is a, c, g, or t
gtgactaaaaaatttataactgacgcgcttctttccgccggtaaaactacaggcgtttccatacatgaaaaagcaattctgcccgtaactgcgctcaccttttcccctgtcctgcttgacagttgtaaaacaaatgtatgcggcaattacaataaatcatgggtttgccctcccgcttgcgagagcgttgaagagcaaaagaaaaaaatacttttctataaaagttttttagtatttacaacaatgcacaccctcgaaaattcttttgactatgacggaatgacaaatggaagagaactacatcttttgctaacatcagaattaaaaaaaagattagacgctcccgtgtatggtgcgggaaattgccccgtgtgtaagacttgcgcttttccgaaaccatgcccatttcccgaaaaaaaaattagctcagtagaagccgcaggaattgacgtaacaagtttgagtaaggcggcgggtatcgcttataataacggacaaaatacggttacatttttttctattgcattattttaa

SEQ ID NO: 66244 - protein, 177 aa, Unknown
  Obtained from environmental sample
  misc_feature (1)..(177): Xaa is any amino acid
MTKKFITDALLSAGKTTGVSIHEKAILPVTALTFSPVLLDSCKTNVCGNYNKSWVCPPACESVEEQKKKILFYKSFLVFTTMHTLENSFDYDGMTNGRELHLLLTSELKKRLDAPVYGAGNCPVCKTCAFPKPCPFPEKKISSVEAAGIDVTSLSKAAGIAYNNGQNTVTFFSIALF

SEQ ID NO: 66245 - DNA, 450 bp, Unknown
  Obtained from environmental sample
  misc_feature (1)..(450): n is a, c, g, or t
atgataaaggaattctggtatccgtttaagacgacggtggacgatgtaacaaagaatattgaatcgttcaagggaattcttgacgaaccaaccgatcatgtatgcgaaaaatgcggcaagcccatgttaaaaaaactcggccgcttcggattcttccttgcatgttcgggatttcccgagtgcagaaacaccaaatccataccgcttgccaagtgccccaagtgcggcggcgatatagtgacgcgcaaaacaaagggcaaaaacaaagagttttacggctgtacaaattatcctcagtgcgattttataagccattttaagccgctcaatcagagctgcccaaaatgcggatttttccttgtggaaaaatatgacaagaaaaacggcgcccacaaaatatgtataaatcccgaatgtgattacctgcacagcgcggagacggaggaataa

SEQ ID NO: 66246 - protein, 149 aa, Unknown
  Obtained from environmental sample
  DOMAIN (71)...(109): Topoisomerase DNA binding C4 zinc finger
  misc_feature (1)..(149): Xaa is any amino acid
MIKEFWYPFKTTVDDVTKNIESFKGILDEPTDHVCEKCGKPMLKKLGRFGFFLACSGFPECRNTKSIPLAKCPKCGGDIVTRKTKGKNKEFYGCTNYPQCDFISHFKPLNQSCPKCGFFLVEKYDKKNGAHKICINPECDYLHSAETEE

SEQ ID NO: 66247 - DNA, 963 bp, Unknown
  Obtained from environmental sample
  misc_feature (1)..(963): n is a, c, g, or t
gtgattacctgcacagcgcggagacggaggaataatatggaaactgcaatcagggaatatttatcgtatcttgaatctgtgcgcggctgttcgcaaaggacgctggaagcgtactcaggcgatcttgcgcattacgagaattattgcgcgaataacaatattattcccaataacgcttcccattacgaggtgcagaaatttatcgccgatttaaccgcggaaaacatggcggcggccagcgtaaaccgctgtctttcgtctatccgcggtttttaccgctggcaggtccgcgtaaaaaaacgcgcggacaatccgtgtaccgcgttaaaaaatgttaaaacgcccgttaaagtgcccagcgttctttgggaaaaagagatggcatctttcgcggctctgccggatacagtcggcatactttggcctgaaagggacaaggcgctgatcttaaccatgtattcggcagggctgcgcgtttcagaactggtgtccctttgcatggaaaacattacctatacgcttgatgaagcccgcattacgggaaaaggcggcaaggaaaggtatgtattcttctctgaagaggcaaagattgccatcgctgaatatctgcctacgcgcgccgcaagacttgccatgaatggaatagactcaaaaaaaggttctctttttatcagcagaaaaggacagcctatttccgtaccgggagtacgctggataatttctcgttacgcgcagcaatccgggcttggaaaaaatattcatcctcactctctgcgtcacagttttgcgactcatcttgtaaattcgggctgcgacgtgcgcattgttcaggagatgcttgggcactcaagcctttcaactacgcagcgttacacgcatgtgaatatggaaaacattaaaaaggtgtacaaaaaggcgcatcctcacgggacaaagaaaaaaggagcggaaaatgcgatatag

SEQ ID NO: 66248 - protein, 320 aa, Unknown
  Obtained from environmental sample
  DOMAIN (17)...(99): Phage integrase, N-terminal SAM-like domain
  misc_feature (1)..(320): Xaa is any amino acid
MITCTARRRRNNMETAIREYLSYLESVRGCSQRTLEAYSGDLAHYENYCANNNIIPNNASHYEVQKFIADLTAENMAAASVNRCLSSIRGFYRWQVRVKKRADNPCTALKNVKTPVKVPSVLWEKEMASFAALPDTVGILWPERDKALILTMYSAGLRVSELVSLCMENITYTLDEARITGKGGKERYVFFSEEAKIAIAEYLPTRAARLAMNGIDSKKGSLFISRKGQPISVPGVRWIISRYAQQSGLGKNIHPHSLRHSFATHLVNSGCDVRIVQEMLGHSSLSTTQRYTHVNMENIKKVYKKAHPHGTKKKGAENAI

SEQ ID NO: 66249 - DNA, 546 bp, Unknown
  Obtained from environmental sample
  misc_feature (1)..(546): n is a, c, g, or t
atgcgatataggccggagattcattcaacaacggtaatcgccgtaagaaaagacggaaaagtcgccatggctggagacggacaggtgacaatgggcgagactgtaatgaagaacaacgcccgcaaagtgcgccgcctgatggacggaaaggtgctgtgcggattcgccggcgccaccgccgacgcgttcaccctctttgaccgttttgaggcgaagctgaaagaatactcaggcgatttgctgagggcggcggtggaacttgcgaaggattggcggctggacaggactttaaggcggcttgaagctctgctgttggtagcggacgcgtcaaaaaccctgcttatttccggcaccggggacgtgatagaaccggcggagaacgcgctggctatcggttcgggcggcaattacgcgtacgccgcagctctcgcgtttttggacggcagtaatttttccgccgccgaaattgcggaaaaaagtttgaaaattgcgggtaacatttgtatttatacaaatttacaaataacattagaggaattaaattaa

SEQ ID NO: 66250 - protein, 181 aa, Unknown
  Obtained from environmental sample
  DOMAIN (6)...(180): Proteasome A-type and B-type
  misc_feature (1)..(181): Xaa is any amino acid
MRYRPEIHSTTVIAVRKDGKVAMAGDGQVTMGETVMKNNARKVRRLMDGKVLCGFAGATADAFTLFDRFEAKLKEYSGDLLRAAVELAKDWRLDRTLRRLEALLLVADASKTLLISGTGDVIEPAENALAIGSGGNYAYAAALAFLDGSNFSAAEIAEKSLKIAGNICIYTNLQITLEELN

SEQ ID NO: 66251 - DNA, 387 bp, Unknown
  Obtained from environmental sample
  misc_feature (1)..(387): n is a, c, g, or t
ttgccgcccgaaccgatagccagcgcgttctccgccggttctatcacgtccccggtgccggaaataagcagggtttttgacgcgtccgctaccaacagcagagcttcaagccgccttaaagtcctgtccagccgccaatccttcgcaagttccaccgccgccctcagcaaatcgcctgagtattctttcagcttcgcctcaaaacggtcaaagagggtgaacgcgtcggcggtggcgccggcgaatccgcacagcacctttccgtccatcaggcggcgcactttgcgggcgttgttcttcattacagtctcgcccattgtcacctgtccgtctccagccatggcgacttttccgtcttttcttacggcgattaccgttgttgaatga

SEQ ID NO: 66252 - protein, 128 aa, Unknown
  Obtained from environmental sample
  misc_feature (1)..(128): Xaa is any amino acid
MPPEPIASAFSAGSITSPVPEISRVFDASATNSRASSRLKVLSSRQSFASSTAALSKSPEYSFSFASKRSKRVNASAVAPANPHSTFPSIRRRTLRALFFITVSPIVTCPSPAMATFPSFLTAITVVE

SEQ ID NO: 66253 - DNA, 1938 bp, Unknown
  Obtained from environmental sample
  misc_feature (1)..(1938): n is a, c, g, or t
atgtctgacgctgcgttaggcgcgggaggaaaaggatcccgcaacatatacaattttttccgtgacagcgttcccgcggttgcggtaatcatcattgtcgtaatgttgatcttgccgcttccgacggttttgcttgacgcgcttatggcgatgaaccttatgctttcgcttttaattctgcttatagtcctttataacccaaaaccgacggaattcagcctttttccgactatgcttcttgtcgctacggttttctcgcttgctttgaacgtttcttccacacggcttattttagcgcaaggcattaaatttaacggaaagatggtaagggcgttttccagttttgtagtcggggtttcgggcaacgaaggccttgttatcggttttattatctttattataattatcgcggttcaggccgtcgttattaccaagggcgcgacccgtgtcgcggaagtcgcggcgcgctttaccctggacagtatgcaggtaaagatgatggctgtagaaaccgagtacagttccggttctatcacggaagaagagtcacaaataagaaaaagggaaattcaaaaagaatctgatttttacggatcaatggacggagcgagtaaatttatttccggcaatgtaaaaataggaatcctgataaccgtaataaacgtgattggcggaattattgtcggaatgtcgattcataaagagtcgtggtctcttgcggctaacaactatgtaaccctagcgataggagacggactggtctcccagtttccggcgttgttaatttctaccgcgatgggcattgtggtaacaagggccgccgcgtccggcagcctgcctaaacagatattggagcaaattctatacaagggctcaatcgtctattggatctgttccgccgttcttgtgtttctttcagtcatgccgggtttcccgtggtatgttcttattcccatggcggctcttatcgccgctcacgcgtacagaataggaagacggcagaaaattgaagcaagcaataaagagatgatgacaaaaaccagagatcgcaaagacgagaaaacgggcgagatttcccccgttgtcccgcttgacgccctttcgctggaactcggttacgggcttgtccctcttgtcgaaaaagaaaaaggcgcggaacttttggaaagggtgcagggtatcaggcgccaatgcgccctagatctgggccttgtaattcctatggtaaggataatcgacaattcaacgctggaaccttcggaatactgttttaaaattaaaggagttgattcgggcaggggaaaaatccgcataggatattacctttgcataaacccgggaaccgtaacaaccgaaatgccgggcgaaaaaaccgtggatcccgctttcgggcttccggctatctgggtagatcaagacaaacgggacgaggcggaaaggtgcggctataccgttgtggatccgccgtccataatcgcgacccatttaacagaaattatccgccgccacgccgcggatattctgggcttgcaggacactcagaagattcttaacgaattgaagaaagagtacccggctgttgttgaagaagttttaagggacggcaagggcttaaggattactgaaatacaaaagatactgcacggtctgttacgcgaaagagtttcaatccgtaatatggtaactattctggaaaccatcgccgattacgcgcctgtatccaaaggaaacatagggttccttacggaaaaagcgcgtcaggcccttgccagccagatatgcagccagtatgccgatgatgaccgcaggctccgcgttcttgcgattgatcccgctcttgagcaaaagatcatcgaatccagatatgagacttcgtccggcgtgatatccgccatggaacccctctccgcaaaatgggatcatgctcggccgatctga

SEQ ID NO: 66254 - protein, 645 aa, Unknown
  Obtained from environmental sample
  DOMAIN (31)...(645): FHIPEP family
  misc_feature (1)..(645): Xaa is any amino acid
MSDAALGAGGKGSRNIYNFFRDSVPAVAVIIIVVMLILPLPTVLLDALMAMNLMLSLLILLIVLYNPKPTEFSLFPTMLLVATVFSLALNVSSTRLILAQGIKFNGKMVRAFSSFVVGVSGNEGLVIGFIIFIIIIAVQAVVITKGATRVAEVAARFTLDSMQVKMMAVETEYSSGSITEEESQIRKREIQKESDFYGSMDGASKFISGNVKIGILITVINVIGGIIVGMSIHKESWSLAANNYVTLAIGDGLVSQFPALLISTAMGIVVTRAAASGSLPKQILEQILYKGSIVYWICSAVLVFLSVMPGFPWYVLIPMAALIAAHAYRIGRRQKIEASNKEMMTKTRDRKDEKTGEISPVVPLDALSLELGYGLVPLVEKEKGAELLERVQGIRRQCALDLGLVIPMVRIIDNSTLEPSEYCFKIKGVDSGRGKIRIGYYLCINPGTVTTEMPGEKTVDPAFGLPAIWVDQDKRDEAERCGYTVVDPPSIIATHLTEIIRRHAADILGLQDTQKILNELKKEYPAVVEEVLRDGKGLRITEIQKILHGLLRERVSIRNMVTILETIADYAPVSKGNIGFLTEKARQALASQICSQYADDDRRLRVLAIDPALEQKIIESRYETSSGVISAMEPLSAKWDHARPI

SEQ ID NO: 66255 - DNA, 1206 bp, Unknown
  Obtained from environmental sample
  misc_feature (1)..(1206): n is a, c, g, or t
atgagtaagttagttgattgggatataaatacgatatgcgcatcacagtatgtttcttactcttctctatccactaacaactatccactaacaactatccacctgcagtggtttgcggacgaagaagacgcgccgggcaggacagaagaacctacagagcataaattacagcgtctgcgtgaagaagggcaggttgtaaaaagtcaggaacttgtcggcgcgatagggctgcttataccggccctgctgattctggctctggcgccttcaatgctgaacacatgcaaagaattaatccgctttttcttcgagcgcgccgtcgaactggatcccaccaaggacgcggttattctggctgtttttatgcgttattttatacggcttgccgcgcctattatggctgtcgcgtttatagcggcgattgtttcaaatgtcgcgcaagtggggtttttgtttaccacaaagcccattgttcccgatttttcaaaagtgcttcccaagatagggcagtacttcaggcgtattttttccgtggacggactttacaattttattaaatcaataatcaagatggcgattatcgggtttgtggcttttattttgatctattcggaaaaggacaaattattaaggcttcaggaaacaagcatcatggtggggcttaccacagtatctacaatcgccgttaagatgctgatcatctcagctcttttgctggttgccttgtcgataccggatttattatttcaacgatggcgtttcagggaacgcaatcggatgaccaggtacgagataaaagaagaaatgaaaatgtacgaagcggatccgcagatacagggcaggatacgcagccgtttccgtgaattgttaaggcagaatatcagggcgtctgtgccgaaagcggatgtggtagtaacaaacccgacccaccttgccgtggcgattcaatatgatcagagttacatggaagggccgatgattgtcgccatgggcgaagatgaaatggcagcgaggatcaggcagattgcgcaggagaatgacgtgccgctggtggaaaacaagcctctcgcgtgggctttgtaccgcgacccgaaaatcgatgttggggatattatccccagggagtactggagtactgtagcggttgtattaagcaaagtttggtacttgaatgaggaaaaacggcgcaggaggatgagcgcgtga

SEQ ID NO: 66256 - protein, 401 aa, Unknown
  Obtained from environmental sample
  DOMAIN (43)...(388): FlhB HrpN YscU SpaS Family
  misc_feature (1)..(401): Xaa is any amino acid
MSKLVDWDINTICASQYVSYSSLSTNNYPLTTIHLQWFADEEDAPGRTEEPTEHKLQRLREEGQVVKSQELVGAIGLLIPALLILALAPSMLNTCKELIRFFFERAVELDPTKDAVILAVFMRYFIRLAAPIMAVAFIAAIVSNVAQVGFLFTTKPIVPDFSKVLPKIGQYFRRIFSVDGLYNFIKSIIKMAIIGFVAFILIYSEKDKLLRLQETSIMVGLTTVSTIAVKMLIISALLLVALSIPDLLFQRWRFRERNRMTRYEIKEEMKMYEADPQIQGRIRSRFRELLRQNIRASVPKADVVVTNPTHLAVAIQYDQSYMEGPMIVAMGEDEMAARIRQIAQENDVPLVENKPLAWALYRDPKIDVGDIIPREYWSTVAVVLSKVWYLNEEKRRRRMSA

SEQ ID NO: 66257 - DNA, 714 bp, Unknown
  Obtained from environmental sample
  misc_feature (1)..(714): n is a, c, g, or t
ttgccgttttcccacggcggaatttttatggcggctaattctccgtccggcatagtcaccctgcccggcggaactttgagcgatttgcgaaacgaaacattcaacctgcgcttcttcctgctgattatcggagaaggaataattggccttattttaggttttttcataatgattattttttccgctttttcaaccgccggacaatttttctccctgcaaatgggcttcggcgcctctgaaacttttgatcccctgtcgcaaattgaaaatccgctcatgggccaataccttaaccttgtgtccatgcttgtctttgtaacaataggcggttttcacctgcttttcaaaggtttctggcgttccgtgcaatcaattaacattatctatctaatcgaaggcagagagcctgttgtaaaaatgttcgctaccggcctttcgcaattatttttggacgcgatgataatttccctgcctatcctgggtactttgttcttaacgtctcttacaacggggcttatctcaaaagcagcgccgcagatcaacattctttccgaaggtttccccatttcaatttccgtcgcctttctccttatttttgcttcgctcccctttatggtcgacgcctttatccatgtaattaattcaggttttgagactatccaaactttgtacatagacataggccgccaaataacagccggaggcggattatga

SEQ ID NO: 66258 - protein, 237 aa, Unknown
  Obtained from environmental sample
  DOMAIN (3)...(221): Bacterial export proteins, family 1
  misc_feature (1)..(237): Xaa is any amino acid
MPFSHGGIFMAANSPSGIVTLPGGTLSDLRNETFNLRFFLLIIGEGIIGLILGFFIMIIFSAFSTAGQFFSLQMGFGASETFDPLSQIENPLMGQYLNLVSMLVFVTIGGFHLLFKGFWRSVQSINIIYLIEGREPVVKMFATGLSQLFLDAMIISLPILGTLFLTSLTTGLISKAAPQINILSEGFPISISVAFLLIFASLPFMVDAFIHVINSGFETIQTLYIDIGRQITAGGGL

SEQ ID NO: 66259 - DNA, 1275 bp, Unknown
  Obtained from environmental sample
  misc_feature (1)..(1275): n is a, c, g, or t
atgacatcatattcccaaaaagaggtagttatgaagattcataatgattttaccttatattttcgggttgccccttcggggaaacggatcgtgtatttctacgcttatgacgaaaacggcaggcggacgcagggcaggtccaccgggcagaccacaaaaacggcggcaagggtgctggtgaacaggcttttgaaagaagaggcattattgccgaagaaagacgacgtgcctaccttcggcgaatacgccgtgaactggtgggattgggaaaaatgcgaatacctgaaaaaaaggcggaagcgggctaatttgacccaaagctattccgaccacatgaagcggaatttagacaaggttattttgccgtatttcaaaaatatgaagatgaacgccattactcccgcggttatcgaggcgtttctggacagcctcatcaaacaaaaatataagaataccacgattaacggctattacgggactttcaaaaccatgatgattgaagccgtcgagcgcggggttattgccgctgaccctaccgccaaagtcgagcggctgataaacgaccgcgatgaaattaagattatcaccccgcttgaatttaaaaagctgtttgtcggggattggcgcaaagtgtgggaagataaccgcatctgttgcaccgtgaacaaactggcggcgctgtcgggcatgagggtgtccgagattttggggctgaaagggagctgcctgttcgatgatcacatttacgtctgtatgcaacatgataattacggctacaggccgacaaaaacgaaagacaaacataacataccgcttccggcttctttgattggcgatttgaaactgctgaaagaaaagagcggggacggctatctgttttccactgacggcggtggcagccctatttgcaggaaaacggttttaatgtatctccgcaaggcgttgataaatatcggcattaccgctgttgagataaaggagcggaatttgcatatccacgcatggaggcatttcttcaatacggagatgttaaagggcgggatgactacggaacaggcgcaggcgataaccacgcataagagcgaaaggatgacggaacggtacacgcattttgacccgcttgggtttgtgaaagcgaaggaaattcaggaagccttgctacagcctgttgatgaaaaaccgcaagggcgggaagcggaaaaaaaggaactacctccgaatgttttttctttccctgtgtccggcataccgcaagaggaactgaaacaggcgtaa

SEQ ID NO: 66260 - protein, 424 aa, Unknown
  Obtained from environmental sample
  DOMAIN (205)...(378): Phage integrase family
  misc_feature (1)..(424): Xaa is any amino acid
MTSYSQKEVVMKIHNDFTLYFRVAPSGKRIVYFYAYDENGRRTQGRSTGQTTKTAARVLVNRLLKEEALLPKKDDVPTFGEYAVNWWDWEKCEYLKKRRKRANLTQSYSDHMKRNLDKVILPYFKNMKMNAITPAVIEAFLDSLIKQKYKNTTINGYYGTFKTMMIEAVERGVIAADPTAKVERLINDRDEIKIITPLEFKKLFVGDWRKVWEDNRICCTVNKLAALSGMRVSEILGLKGSCLFDDHIYVCMQHDNYGYRPTKTKDKHNIPLPASLIGDLKLLKEKSGDGYLFSTDGGGSPICRKTVLMYLRKALINIGITAVEIKERNLHIHAWRHFFNTEMLKGGMTTEQAQAITTHKSERMTERYTHFDPLGFVKAKEIQEALLQPVDEKPQGREAEKKELPPNVFSFPVSGIPQEELKQA

SEQ ID NO: 66261 - DNA, 726 bp, Unknown
  Obtained from environmental sample
  misc_feature (1)..(726): n is a, c, g, or t
atgataggcggggtgttggtgttgtccagggcggcggaactgcatacggaaataaaagggcggcttgaagcatttggttttgaaaatgttacggttacggataaggaaaatgacgaattgaatacggttatctgcaacaagaatccccgcttggtaatgattgacagttggttttatcaagacggaacatcgtgcaggatcggcgaactggtaaaattgtttccaagattgaatatcgccgttgtttccgtccatgacttccccgcaagccgcgcccagtggttcatttgggatggggcgaggtcatatctcaatttgtgggaagggtctgaggaatttcaacgtggcttgcgggttgtacgtgaaggcgggcagtatatttcgcctaaggttcaaaaactgatttatcaccgtgatgaatggccggataccagaagcaaaacgaccaaacggcagaaggaatgccttgtcatgttgtgttgcgggattatccctctccaaattggagaaatactgaatatatccaaaagaacggttgataatcatttaaacagcttatacagggcttttcatgtcggcagccgtgaagagatggtcgctcttgcatgggaaatggaactggtaactcccaaagatattcatttatacaacaggaaaaaagaacgcttgctgcttcctgaatgggcggaggtgaaacggaaatgcgacaggttttatcttgattga

SEQ ID NO: 66262 - protein, 241 aa, Unknown
  Obtained from environmental sample
  DOMAIN (145)...(202): Bacterial regulatory proteins, luxR family
  misc_feature (1)..(241): Xaa is any amino acid
MIGGVLVLSRAAELHTEIKGRLEAFGFENVTVTDKENDELNTVICNKNPRLVMIDSWFYQDGTSCRIGELVKLFPRLNIAVVSVHDFPASRAQWFIWDGARSYLNLWEGSEEFQRGLRVVREGGQYISPKVQKLIYHRDEWPDTRSKTTKRQKECLVMLCCGIIPLQIGEILNISKRTVDNHLNSLYRAFHVGSREEMVALAWEMELVTPKDIHLYNRKKERLLLPEWAEVKRKCDRFYLD

SEQ ID NO: 66263 - DNA, 537 bp, Unknown
  Obtained from environmental sample
  misc_feature (1)..(537): n is a, c, g, or t
atgatatacgactggataatgaacaatatgcaaatttcagataaaacgacggaaaaaagccttaccgaatctctgggaaacaaacgcgcaaacccatacactatcgcaatgctgtacacagctctgctccgcgccgccggcgttccggctattccggtcgcaggcgttttagtaaatcaaaacggacaaacattgcgtcattactggactgaattctgggtagatagtttcggttgggttccggttgatccggctatgggagccggagcggttaaacttaaagacgcctcaaaccggcagattgaagaacaggcggaaaaagatttattaaatttctactttggcaatttagataaccagcgtataacattttccagaggggaacttaccctttcgcagattgaaaaacgaggcaggcttgtttcgcgttcgcagtcttattcactgcaaaatgtttgggaagaatccgcaggcggacttgaatcgtattccagcctttggggagatattataatcagcggaatctatggcatgtaa

SEQ ID NO: 66264 - protein, 178 aa, Unknown
  Obtained from environmental sample
  DOMAIN (27)...(85): Transglutaminase-like superfamily
  misc_feature (1)..(178): Xaa is any amino acid
MIYDWIMNNMQISDKTTEKSLTESLGNKRANPYTIAMLYTALLRAAGVPAIPVAGVLVNQNGQTLRHYWTEFWVDSFGWVPVDPAMGAGAVKLKDASNRQIEEQAEKDLLNFYFGNLDNQRITFSRGELTLSQIEKRGRLVSRSQSYSLQNVWEESAGGLESYSSLWGDIIISGIYGM

SEQ ID NO: 66265 - DNA, 498 bp, Unknown
  Obtained from environmental sample
  misc_feature (1)..(498): n is a, c, g, or t
atggtaaccgttatttcattgggaggatcaattgttgcgcctaaagaggttgatatagaatttttaaaaaactttgtgggcgttatccgttcttttatagaggaagattccaacagacgttttatttttgttgtgggcggcgggggacctgcgaggatatggcagaatgcttaccgcgaaatttcagcgggcggcgtaaagaacgatgaagccgactggattggaattacggcgacaagactaaacgcgcaattaataaaagcgattatgggcgaatggtgttcgcaggaagttgttacaaacccaagtgaagttgaccctctaaccggcaaaatacttgtagccgccggctggaaacccgggttttctacggattacgacgctgtattgttagccgaacgtttcggcgcgcagatgctgataaacctttcaaatatagaaaaagtttacacggcggatccaagaacgacaaaaatgcgcgcccaatcgataaaataa

SEQ ID NO: 66266 - protein, 165 aa, Unknown
  Obtained from environmental sample
  DOMAIN (1)...(165): Amino acid kinase family
  misc_feature (1)..(165): Xaa is any amino acid
MVTVISLGGSIVAPKEVDIEFLKNFVGVIRSFIEEDSNRRFIFVVGGGGPARIWQNAYREISAGGVKNDEADWIGITATRLNAQLIKAIMGEWCSQEVVTNPSEVDPLTGKILVAAGWKPGFSTDYDAVLLAERFGAQMLINLSNIEKVYTADPRTTKMRAQSIK

SEQ ID NO: 66267 - DNA, 1308 bp, Unknown
  Obtained from environmental sample
  misc_feature (1)..(1308): n is a, c, g, or t
atggccggaaccaggcagcgcgctttcaatatgtttgacgcggagccgggtattcgcgcgtataacataataggttacgacgccgcaactttcggcaatcatgaatttgacggcaatatggaaaaacttgaaaagcaaatcggtcttgcggattttccttttgtttcatcaaatattaaaaaatcggacggttcatatcttggcggcaacaggtatcttgtaaaacagtataataattttacagtgggcatattcggtattacaactttgcgcacgctcactatcgcaagccccgataaatcccttgtgtttgtaaatgaaatcgaagccgcccgcgaagtagtggatattttgcgtaaccgggaaaaagttgacattattatcggcttaacgcacatgggcgacgtaaaagagacgcaagatcatataacgtctgttgaacttgcttcggcagttaagggaatagacataatagtagacgcccattctcattcttattttgaaattccaaaaagaatagataacacatgggtagtgtccgcaaatgaaatgggaaaatacatgggttttggaaggctcagcatacggaacggaaaacttgccgactttgactgggtgtcaatagctgtaagaccggatgtcgatgtagatacaatgcttaaaccttatatcgaaaaagccggaaaatttttaaaagaagaaataggagaagcctctgatacctttatctttggaaatcgtctgacgcggtatcaggagacggcaataggcaatatgattaccgacgcaaatgtctggtacttgcggaatgtaagcaagcaacaggttgatttcgcgttccataacggcggaaatatccgcgcggaacttaaaaaaggaccgataacgcaggaaaatattttaacggtacttccctttgaaaactatctttttgtggcttcaatgacaggttcgcagattattaaactgtttgactttatcgcgacaattccgcagggaaacggcgggttcccgcagttctcaagcgatgtgcgttatacaatcgataaaacttcaattgacggagtaattaaaaatttaactatcggcggcaagcctgttgatcctaaccgcgtgtaccgtttttgcacaaacgattatattcttggaggcggagacggttatacgccgatgttagacgcaacagataaattaaacacttcgatattgctttcgtatgttgtaacggagtacataaaggcgaataaaacaataaaacccgcaacagacggaagattgataatcataggcggagtaaagattcagtaa

SEQ ID NO: 66268 - protein, 435 aa, Unknown
  Obtained from environmental sample
  DOMAIN (234)...(393): 5'-nucleotidase, C-terminal domain
  misc_feature (1)..(435): Xaa is any amino acid
MAGTRQRAFNMFDAEPGIRAYNIIGYDAATFGNHEFDGNMEKLEKQIGLADFPFVSSNIKKSDGSYLGGNRYLVKQYNNFTVGIFGITTLRTLTIASPDKSLVFVNEIEAAREVVDILRNREKVDIIIGLTHMGDVKETQDHITSVELASAVKGIDIIVDAHSHSYFEIPKRIDNTWVVSANEMGKYMGFGRLSIRNGKLADFDWVSIAVRPDVDVDTMLKPYIEKAGKFLKEEIGEASDTFIFGNRLTRYQETAIGNMITDANVWYLRNVSKQQVDFAFHNGGNIRAELKKGPITQENILTVLPFENYLFVASMTGSQIIKLFDFIATIPQGNGGFPQFSSDVRYTIDKTSIDGVIKNLTIGGKPVDPNRVYRFCTNDYILGGGDGYTPMLDATDKLNTSILLSYVVTEYIKANKTIKPATDGRLIIIGGVKIQ

SEQ ID NO: 66269 - DNA, 396 bp, Unknown
  Obtained from environmental sample
  misc_feature (1)..(396): n is a, c, g, or t
atgatcgatacgcttaaggcgataaaaaccctgcacgaaatgggtccttcaattgtgcttgtaacaagttacaaggaaaaagatggagaactttccatgatagcttccgataaaaaagtaatttataaaattacaacgcccgaattgcctcttggcagcggcgtcgcggggacaggggacatgaccgcggcggtatttttatcgcgataccttgaaaccaaagaccttaaaaaaactttggagttgtgtacggcgtcggtctttggcattttagagacaagttttaaagcggctaacgcaaaaagcggcgcgctgatagaactgaaaatcattgacacccagcaggaacttgtcaccccttcatattcctttaaggcggaaaaaataaccgcgtga

SEQ ID NO: 66270 - protein, 131 aa, Unknown
  Obtained from environmental sample
  misc_feature (1)..(131): Xaa is any amino acid
MIDTLKAIKTLHEMGPSIVLVTSYKEKDGELSMIASDKKVIYKITTPELPLGSGVAGTGDMTAAVFLSRYLETKDLKKTLELCTASVFGILETSFKAANAKSGALIELKIIDTQQELVTPSYSFKAEKITA

SEQ ID NO: 66271 - DNA, 423 bp, Unknown
  Obtained from environmental sample
  misc_feature (1)..(423): n is a, c, g, or t
atgaagctttatggctttgcaagcgtcaggcggcgtgccgcttttcttgaacttttaaaagttgaaggaataggaccaaagggcgcgttaaaaatattaagcggtatcagtcaggatgatcttgaaaaagcccttgaaaacggcgatattgcgcgccttgaggcagtaccggggcttggcaagaaaacggcgcaaaaaatggttcttgcgctcaagggaaaacttgttcaaacgcaggatgtttccgtctcttcgtccccttacaacgaccttgtagaggcccttgcggctatgggttacgacaggcgcatggcggcggacgcgcttgcaagagcggaaaatgctatcgggcgcgacctgcccgataaagaaagagaaaagctcctttttcaggaagcgattatttttttaagcggcgcgtaa

SEQ ID NO: 66272 - protein, 140 aa, Unknown
  Obtained from environmental sample
  misc_feature (1)..(140): Xaa is any amino acid
MKLYGFASVRRRAAFLELLKVEGIGPKGALKILSGISQDDLEKALENGDIARLEAVPGLGKKTAQKMVLALKGKLVQTQDVSVSSSPYNDLVEALAAMGYDRRMAADALARAENAIGRDLPDKEREKLLFQEAIIFLSGA

SEQ ID NO: 66273 - DNA, 441 bp, Unknown
  Obtained from environmental sample
  misc_feature (1)..(441): n is a, c, g, or t
atggcaaaaaaagaaagccttgtaaggccggagcaaattaacgaagacgagcgcgacatgactcttcgtcccaaatacctttccgagtttttggggcaaaaggggatgaaggaaaatctttcggtatttattacaacagccaaacagcgcggcgagagccttgatcatctgtttttaattggacctccggggttgggcaaaaccactcttgctcaggtagtcgcaaacgaacttgaaaccggttttgtacaaacttccgctcccgctctggacaagccgaaagatttggttgggctattaacaaacctgaaaaaaggcgatgttttttttattgatgagattcacaggttaaaacccgctatcgaggaattgctgtatatcgccatggaagactacggaatcgactgggtagtgnggcagggaccgatggcgagacattaa

SEQ ID NO: 66274 - protein, 146 aa, Unknown
  Obtained from environmental sample
  DOMAIN (5)...(55): Holliday junction DNA helicase ruvB N-terminus
  misc_feature (1)..(146): Xaa is any amino acid
MAKKESLVRPEQINEDERDMTLRPKYLSEFLGQKGMKENLSVFITTAKQRGESLDHLFLIGPPGLGKTTLAQVVANELETGFVQTSAPALDKPKDLVGLLTNLKKGDVFFIDEIHRLKPAIEELLYIAMEDYGIDWVVXQGPMARH

SEQ ID NO: 66275 - DNA, 561 bp, Unknown
  Obtained from environmental sample
  misc_feature (1)..(561): n is a, c, g, or t
gtgggcgcgactacaaaagcgggaatagtctccggtccattgataagccgtttcggaattacctgccgtttttctttttacgaacaggaagacatggaagccatagtgcgccgttccgccgggcttttggatataaaaattcaaaacgacgccgcgtctcttttggcaaagtcgtcgaggggaactccgcgtgtggtgaaccggcttttgcggcgcatgcgggatttcgcccagttttcgggagaaaaatcaatcacactgcctgtaattcaatcgggactgtcgcggctggaaatagatgctctcgggcttgaaaaacaggacagggatattcttaaaataataattgagcgttacaagggcgggcctgtaggcgcggatacgcttgccatttccatcggagagtctgtagaaactctggaagattactacgagccctaccttattcaagccggccttttacagcgcagcccgcgcggaagaatggtaacaagcctcgcctacggccatttgggacttgtttctccctcaggcggaaacagcgaaggttctcttttttaa

SEQ ID NO: 66276 - protein, 186 aa, Unknown
  Obtained from environmental sample
  DOMAIN (96)...(174): Holliday junction DNA helicase ruvB C-terminus
  misc_feature (1)..(186): Xaa is any amino acid
MGATTKAGIVSGPLISRFGITCRFSFYEQEDMEAIVRRSAGLLDIKIQNDAASLLAKSSRGTPRVVNRLLRRMRDFAQFSGEKSITLPVIQSGLSRLEIDALGLEKQDRDILKIIIERYKGGPVGADTLAISIGESVETLEDYYEPYLIQAGLLQRSPRGRMVTSLAYGHLGLVSPSGGNSEGSLF

SEQ ID NO: 66277 - DNA, 762 bp, Unknown
  Obtained from environmental sample
  misc_feature (1)..(762): n is a, c, g, or t
ttggaaaacattgtaaaacacgcaagacgccgcaaacctttaagccgttatgtgttttatgatacggcaggagagcaaatagcgagagcgaaaatagtattagctataaatgagttcaggatactggagtttgaaaatccaatttccgaggactggctggaaaagtacgggcatattcctctgccgccgtacataaagcgcgaagacgccccgtcagacgccgcccgttatcagacaatttacgcgaaggagacaggttcgtccgcggcgcccacggcgggtctgcattttacgcgggaaatacttgacaggctttccgctaacggaatagaaagcgtttttgtaacccttcatgtgggtatggggactttttaccccgtaagaagcgagaacattgaagatcatactatgcacagcgagcctttcagcatagatgaaaataccgcgcgaaaaataaatggggcaaaagaagaaggacggaaaattatcgcggcagggacaacaagcgcgcgtactttggaaagcgcgtacagcgaagggaaaattgtctgtggagagggcagcacagcaatttttatttatcccggctacaaatttaatgtcatagacgctctttttacaaattttcacacccccgaatccacgctgttaatgcttgtgtcggcgtttgccggaagagaattgattctggaaagttacgcggaagccgtaagagaaggatacaaatttttcagctacggcgacgctatgttaatttattga

SEQ ID NO: 66278 - protein, 253 aa, Unknown
  Obtained from environmental sample
  DOMAIN (2)...(129): Queuosine biosynthesis protein
  misc_feature (1)..(253): Xaa is any amino acid
MENIVKHARRRKPLSRYVFYDTAGEQIARAKIVLAINEFRILEFENPISEDWLEKYGHIPLPPYIKREDAPSDAARYQTIYAKETGSSAAPTAGLHFTREILDRLSANGIESVFVTLHVGMGTFYPVRSENIEDHTMHSEPFSIDENTARKINGAKEEGRKIIAAGTTSARTLESAYSEGKIVCGEGSTAIFIYPGYKFNVIDALFTNFHTPESTLLMLVSAFAGRELILESYAEAVREGYKFFSYGDAMLIY

SEQ ID NO: 66279 - DNA, 510 bp, Unknown
  Obtained from environmental sample
  misc_feature (1)..(510): n is a, c, g, or t
ttggttcttttttttgtaataaaaacaaataaaattattcaggaagcacccgaaaacgcgagaataatgaaattaaccgacattcaggaagcccctcccccggaaccggaaattccgcaggtggaagccattgccgaaaatatgatagaaaccgatgtcgcgcccgtccaacaggtgcttgcggcaggagtttttcttaccgagacttatcttgcgatgaatcaagtgtccgttcctcccaaatttgactccggcttggtcatgaaatcccttgtctaccctcccatcgcgctgcgttccggcattgagggaaaggtcatccttgaattatttgttgaccgtaccggtatggtgcaaaaaattgtaatcttaaaggaagatcctcccgaccgcggtttcggcgaagcggctgtaaaagcgttcacggacagaaaaggcgtgccggcttacgccaacggagaacccgtctcagcaagataccgctaccctgtgacatttaagttgaaatag

SEQ ID NO: 66280 - protein, 169 aa, Unknown
  Obtained from environmental sample
  DOMAIN (90)...(124): Gram-negative bacterial tonB protein
  misc_feature (1)..(169): Xaa is any amino acid
MVLFFVIKTNKIIQEAPENARIMKLTDIQEAPPPEPEIPQVEAIAENMIETDVAPVQQVLAAGVFLTETYLAMNQVSVPPKFDSGLVMKSLVYPPIALRSGIEGKVILELFVDRTGMVQKIVILKEDPPDRGFGEAAVKAFTDRKGVPAYANGEPVSARYRYPVTFKLK

SEQ ID NO: 66281 - DNA, 315 bp, Unknown
  Obtained from environmental sample
  misc_feature (1)..(315): n is a, c, g, or t
ttgaaaaattctgaaaccagatacaaagttataaaaacctccgtttttacggaagaaaatatagaatactccgttttggaactggaacttggcacgggaagaatgcaccaaatccgtcgccaccttgccatgaacggcaaccccatactcggcgacgacaaatacggcgacttcaatttaaacaaaaaattacacaaaatcatcggtttaaaacacctcctccttcacgcatccagactgataattaaagatgaacccaatgcggatatacacgcgccgttgccggagtatttttcattcttttattccgtgtga

SEQ ID NO: 66282 - protein, 104 aa, Unknown
  Obtained from environmental sample
  misc_feature (1)..(104): Xaa is any amino acid
MKNSETRYKVIKTSVFTEENIEYSVLELELGTGRMHQIRRHLAMNGNPILGDDKYGDFNLNKKLHKIIGLKHLLLHASRLIIKDEPNADIHAPLPEYFSFFYSV

SEQ ID NO: 66283 - DNA, 681 bp, Unknown
  Obtained from environmental sample
  misc_feature (1)..(681): n is a, c, g, or t
atgatattctttcttactatatttatgagaaaaatttttatttttataatcgttttaagcgtattttcaggctgcggtcagaatttaactaaacaggaaaaggcattatgcaaatcgcttggcattgacgaaaatatcgctttagaaattaaaaaagtatcaaaatctgcaattgaacaactgccgcaaattaacgaatacggggaagtattagaggaaaaatttgatggaatatgctcaaaagcgcctactatgacccataataggcttggtccgaatacacttaattttgtttctaaaaacaagtcaaaatttcaagaacaaaattacaatttgtttatttttgacagcggagaaaattattatcttgcggtaatcaaaggaaaatcagatatcgaaattttgaaatggcggcaaactaacggaattaattatgatattgataatgacagcttaatttccaaattgcaggaatggaaatcgaaaaatgattttattcttttgggagcgggaatagattggttagaaattcgatttatttctcaaacgcctgatttcgatgaatttgcaaaagaagtttacgagttttgtcccgatgttgttgaccaaggagcaggtgattttgaaagacttgctcctgtaatgaaaagaatgaatggggtgtttttgtggtgggattaa

SEQ ID NO: 66284 - protein, 226 aa, Unknown
  Obtained from environmental sample
  SIGNAL (1)...(26)
  misc_feature (1)..(226): Xaa is any amino acid
MIFFLTIFMRKIFIFIIVLSVFSGCGQNLTKQEKALCKSLGIDENIALEIKKVSKSAIEQLPQINEYGEVLEEKFDGICSKAPTMTHNRLGPNTLNFVSKNKSKFQEQNYNLFIFDSGENYYLAVIKGKSDIEILKWRQTNGINYDIDNDSLISKLQEWKSKNDFILLGAGIDWLEIRFISQTPDFDEFAKEVYEFCPDVVDQGAGDFERLAPVMKRMNGVFLWWD

SEQ ID NO: 66285 - DNA, 681 bp, Unknown
  Obtained from environmental sample
  misc_feature (1)..(681): n is a, c, g, or t
atggaagataaacttcaaatacctgtaacacgccactggttggaaagtttaagtatggagcaattaatcaaactcgccgactcttacggagtagatattcctcccggactggaaaggattttcataatagaagaaatattggatgtttccaatacggactacgatgaaaatcttgaggaaattgaggtaaacgaggaatattccgagaccgccgtccttccaagccagtacaatatttcatatattgatgtaattataagagaccctctttgggtttttgtcttttgggaagtaaaaaaacacgacagggaattgcatgaaactgcggaagattttgacggttattgccttagggtaattccgcttgataaaaacggaaaagaaaaaaaaccgaatgaaaacccttttacggtttccgtaggagccgaagacagcggcagatatttgggcattgtggaacattccgcgcaagacaatgacagttatgtcgtacagctttgcataaacaagggcaatatcctgctgcaaattgcggcatctcagccgttttctctgccgaaaccgtacaccaatgaaattatcgccgatatggaacgcaacccgttaattcatctttcgggtgcgcgcgatttattaataataaaaaacaaggatcgccaatccgcagttaagaggcagtaa

SEQ ID NO: 66286 - protein, 226 aa, Unknown
  Obtained from environmental sample
  misc_feature (1)..(226): Xaa is any amino acid
MEDKLQIPVTRHWLESLSMEQLIKLADSYGVDIPPGLERIFIIEEILDVSNTDYDENLEEIEVNEEYSETAVLPSQYNISYIDVIIRDPLWVFVFWEVKKHDRELHETAEDFDGYCLRVIPLDKNGKEKKPNENPFTVSVGAEDSGRYLGIVEHSAQDNDSYVVQLCINKGNILLQIAASQPFSLPKPYTNEIIADMERNPLIHLSGARDLLIIKNKDRQSAVKRQ

SEQ ID NO: 66287 - DNA, 2640 bp, Unknown
  Obtained from environmental sample
  misc_feature (1)..(2640): n is a, c, g, or t
atgcgcgtaactggagcggccgaccctcttcaaagcgcttcttgcgcaatagaaggcaaattaccccagcgaaaaatttgcagaaccgcggccgcgggttacagctcttacggcaaccagatagggcttgccacagggcacgtccatgaaatttatcacccgggttacgcggcaaaacgcatggagataggggctgtaataggcgccgctccggcggaaaatgttatacgcaatacgccggaaccgggagacatagtaattcttcttggcggacgcacgggacgggacggtataggaggggcgacaggctcttccaaatcgcacacttccctctcgcttgaaacacttggcgccgaagttcagaaaggaaacgcgccggaagagcggaaacttcaaaggcttttccgtaatccgcgggcggcgcagctgataaaacgctgtaacgatttcggcgcgggtggagtgagcgtctcggtcggagagcttgcggacggtcttttaattaaccttgataaagttacaaaaaaatacgaagggctggacggcacggaactcgctatcagcgaaagccaggaaagaatgtccgttgtaacggcaaaaaaagacgcgaaaaaatttattgagcttgcggacgccgaaaatcttgaagcggttataatagcggaagttacaaaagaaaaacgccttgtaatgagttggaacggaaaaacagtagtaaatctttcaagggaattccttaacagcaacggcgctgaaaaacacgcgaaagcccgtattgtttccgcgcgggttaataataaaaaaacggaacccgacgcggttcaattggaaaaatttatagccggattaaatatttgttcgcagaaaggtcttgttgaccgttttgattcaagcgttggtacggcgaccgttctcgcgccttacggcggaaaatttcaacttacgccggcgcaggcaatggcggcgaaaatacccgtccttaacggcgaaacaaacacctgctcccttatgtcatgggggtttgatcctgaaatatcgtctttaagcccgtatcacggggcggttttcgccgttactcattcgcttgcgaaaataattgccgcgggcggaagcagaaagcgctgctggctttcgtttcaggaatattttgaaaggttacgcgacgatcctttaaggtggggaaagcccgtatcggctctgctcggcgcgcttgacgcccagcttggactggaaatagcagcgataggcggcaaggattcaatgtcaggctcctttacgcttaaaaacggcggtaacatcgacgttcccccgactttagtttcatttgccgtctcaaccgcaaaaatagacggcatagtaacgccggaattcaagcgcgccggaaactatgtttatctttacaaaccgccctgctctgtttttgaaaaagcggacttcgccgcccttcgtgaatactttgacgccgcggaaaaattaatagcggggcaaaaaatcatttccgcgtgggcggtcggctcgggcggaactgccgaagccattgtaaaaatgtgcgccggtaacaggattggttttaacgcggaattgccgctttattatgagcaaggtttcggcgggttaatctttgaaacagacaagcctttggaaaaaggcgttttattgggacgcactacagaagaatatatccttaacacaaaaacttttaacatcccccttgataaactgcaaagtacgtgggaaaaaacgctggagccagtttatccgtacaatattgaacaggaaggaaaaaccgaatcgttcttttataacaagggcgtaactatcaaggcaaaagaaccttacgcgaaaccgaggtttattatccccgtttttcccggtacaaacagcgaatacgacacggcaaaagcgattgaaaaagcgggtggacaggcgcaaatattcgtaatacgcaatcttaccccctcttccatcgccgaaagcgtaagcgcttttgaaaaagccgttaaatcggcgcagggggtggttattcccggaggtttttcaggcggcgatgaacctgacggttcgggaaaatttataacggcttttttcagaaatccagcagtctgcgcatccgtaacggaactgttacaaaaaagagacggtcttatttgcggtatctgcaacggttttcaggcccttatcaaactcggtcttgtcccttacggcgaaatccgcgacatgactcaggactcccccaccttaacttttaacacaataggcagacatcaggccgtccttgtaaggacaaaggtgacatcgaataaatcgccctggctttcccgtctagaacttggcgctgattacatagttcctatatctcacggcgagggccgttttatcgcaagagaagaacaaatccgctgtcttgcggcaaacggccagatagccacgcaatatgtagatttagacggctccccttcccaggacatacgttttaacccgaacaattccaatttcgccatagaaggcatcacctcccccgacggccgcgtcttcggccgcatggcccacaacgagcgcttcgacgaggggctttttaagaatatcccggggattagaaagatggatattttcgccggagccgtggattattttagatga

SEQ ID NO: 66288 - protein, 879 aa, Unknown
  Obtained from environmental sample
  DOMAIN (81)...(234): AIR synthase related protein, C-terminal domain
  misc_feature (1)..(879): Xaa is any amino acid
MRVTGAADPLQSASCAIEGKLPQRKICRTAAAGYSSYGNQIGLATGHVHEIYHPGYAAKRMEIGAVIGAAPAENVIRNTPEPGDIVILLGGRTGRDGIGGATGSSKSHTSLSLETLGAEVQKGNAPEERKLQRLFRNPRAAQLIKRCNDFGAGGVSVSVGELADGLLINLDKVTKKYEGLDGTELAISESQERMSVVTAKKDAKKFIELADAENLEAVIIAEVTKEKRLVMSWNGKTVVNLSREFLNSNGAEKHAKARIVSARVNNKKTEPDAVQLEKFIAGLNICSQKGLVDRFDSSVGTATVLAPYGGKFQLTPAQAMAAKIPVLNGETNTCSLMSWGFDPEISSLSPYHGAVFAVTHSLAKIIAAGGSRKRCWLSFQEYFERLRDDPLRWGKPVSALLGALDAQLGLEIAAIGGKDSMSGSFTLKNGGNIDVPPTLVSFAVSTAKIDGIVTPEFKRAGNYVYLYKPPCSVFEKADFAALREYFDAAEKLIAGQKIISAWAVGSGGTAEAIVKMCAGNRIGFNAELPLYYEQGFGGLIFETDKPLEKGVLLGRTTEEYILNTKTFNIPLDKLQSTWEKTLEPVYPYNIEQEGKTESFFYNKGVTIKAKEPYAKPRFIIPVFPGTNSEYDTAKAIEKAGGQAQIFVIRNLTPSSIAESVSAFEKAVKSAQGVVIPGGFSGGDEPDGSGKFITAFFRNPAVCASVTELLQKRDGLICGICNGFQALIKLGLVPYGEIRDMTQDSPTLTFNTIGRHQAVLVRTKVTSNKSPWLSRLELGADYIVPISHGEGRFIAREEQIRCLAANGQIATQYVDLDGSPSQDIRFNPNNSNFAIEGITSPDGRVFGRMAHNERFDEGLFKNIPGIRKMDIFAGAVDYFR

SEQ ID NO: 66289 - DNA, 1023 bp, Unknown
  Obtained from environmental sample
  misc_feature (1)..(1023): n is a, c, g, or t
ttgccgatgtctttgaaaaaaggacagtctttgcgttacggtgaaaacgggcatcaatccgccgccttgtacttaaataccgaccgaccgggcgttttaagcggcatggaacaacttaacggaaaggaacttggctacaataacataaaagaccttgatatagcttggaaagcggtctgcgctttcggtcttgaaagcgatggaacagaaccgataggggaggctgatatccgccgccttgttccttcggcggcaagcggcaaagaagtttgctgtgtagcaattaagcacaacaccccctgcggcattgcgctggcggataatcagttagacgcatatcataaagtttttgcctgcgattccacgtcaatattcggcggaatagtggcgtttaacgttaagttagacaaggcagtcgctttaagactcggcgaattgtttttagaagttgtcgtggctcccgattttgacgacgacgctcttgaagtattaaaaaagaaaaaaaatctgcgtgttataagaatgaaaaaagctccgaaagaaaagcatgaatacgttgccgttgacggcggcattttggttcagcagagcgaccgcgccttgcttgaaaaatgggaagtagttacaaaaaccgctccgcaggaatgcgacttaaaagacatggtctttggaatgagagctgtaacatttgtaaaatcgaacgcaattttaatcgtaaaagagcaatccgctaccggtattggcggcggacaggtgaaccgcatctggcccacaatgcagtccctgaaagaagcgccgcngtataaaagccgaaaacaatcgtggaaagacaacacccccgctagggttctggcctccgacgcgtttttccccttccccgacatagttgaagccgccgccgccgccggaatcaaatcaataatccaacccggcggctccatgaacgacaagctgtctgtagaagcctgcgacaaacacggcatagctatggtctttacgggaacaaggcactttaagcattag

SEQ ID NO: 66290 - protein, 340 aa, Unknown
  Obtained from environmental sample
  DOMAIN (1)...(265): AICARFT/IMPCHase bienzyme
  misc_feature (1)..(340): Xaa is any amino acid
MPMSLKKGQSLRYGENGHQSAALYLNTDRPGVLSGMEQLNGKELGYNNIKDLDIAWKAVCAFGLESDGTEPIGEADIRRLVPSAASGKEVCCVAIKHNTPCGIALADNQLDAYHKVFACDSTSIFGGIVAFNVKLDKAVALRLGELFLEVVVAPDFDDDALEVLKKKKNLRVIRMKKAPKEKHEYVAVDGGILVQQSDRALLEKWEVVTKTAPQECDLKDMVFGMRAVTFVKSNAILIVKEQSATGIGGGQVNRIWPTMQSLKEAPXYKSRKQSWKDNTPARVLASDAFFPFPDIVEAAAAAGIKSIIQPGGSMNDKLSVEACDKHGIAMVFTGTRHFKH

SEQ ID NO: 66291 - DNA, 1281 bp, Unknown
  Obtained from environmental sample
  misc_feature (1)..(1281): n is a, c, g, or t
ttgtcccggcctttatctgaagtctgtatgtgggctgacatacttgaaaaacagatgaaaagaggattggcgaataaaccggataatatttccgccgcttttcaaagagcagtagacccccggtattcaagctggtatgtgccactgcaattcaaacgtattcagaaaattatacctgcaattaccaagcggcctcacatggttacgatcagccttaattttcctttctttcataaagggcaaagggactataccgatatatcctgcgaattaaccgcgtatgtttcagagtttcttcgtcaaacggaaccggctgcggggccgctgatgaagacagtagcggcgcttattgaatcgggagtttattatgagcgcggcaatcttatggaagccgaaaccaccgccgaagctctgataaaagatgccggtaaaatgccgccggaactatgtttctgtatacatatcctgcatcttgaaaccctgcgcgtacagggcaaaaagattgagccagaaataataagcgatatgattgagaataccggggcgtattatctgtcggcaaattttaatgcttatatgacaaatatccggctttataacggggacaaaaccgccgcggcccaatggctggatcagcaaagttcggttcacgctttgcagttatacaaaatatatcagcattttaccacggcaagggcaatgatggtaaaaagcaagctgtccgccgcggaaaaacttctggaaagaattgcgcgattttcacaggatttcaggcggaacgctgactatatcgaagcgctgaccttgcgtgcaatatgcttatggcgcgtggaacggacaggcgaagcggtaaaaacaatgaccgctgccattgtaaaagccgccgagttacagcttgtcacgccaatcgttaaagacggtgaagatgtattgcctgttttgcaaaaaatattgaatcggctaaaatatggttacgacacggacatacttgacaaggcttttgtgaacttgctgtatataaaagcgcggaatatatcaaagcatacgccgggtatgttttcgcacaacaaaacacaggctatgaaattgtcgcagaggcaatcggaagtaatgaattatttggtgaaaaatctcagttaccaggaaatcagcgaaaaaatgggagtaaccaaagcggcggtagattaccatattcgtattttacacgaaaaatttgaggcatcgaatacccgtgatttattgcaaaaactacaggatttaggattcatagatatgcagtag

SEQ ID NO: 66292 - protein, 426 aa, Unknown
  Obtained from environmental sample
  DOMAIN (360)...(417): Bacterial regulatory proteins, luxR family
  misc_feature (1)..(426): Xaa is any amino acid
MSRPLSEVCMWADILEKQMKRGLANKPDNISAAFQRAVDPRYSSWYVPLQFKRIQKIIPAITKRPHMVTISLNFPFFHKGQRDYTDISCELTAYVSEFLRQTEPAAGPLMKTVAALIESGVYYERGNLMEAETTAEALIKDAGKMPPELCFCIHILHLETLRVQGKKIEPEIISDMIENTGAYYLSANFNAYMTNIRLYNGDKTAAAQWLDQQSSVHALQLYKIYQHFTTARAMMVKSKLSAAEKLLERIARFSQDFRRNADYIEALTLRAICLWRVERTGEAVKTMTAAIVKAAELQLVTPIVKDGEDVLPVLQKILNRLKYGYDTDILDKAFVNLLYIKARNISKHTPGMFSHNKTQAMKLSQRQSEVMNYLVKNLSYQEISEKMGVTKAAVDYHIRILHEKFEASNTRDLLQKLQDLGFIDMQ

SEQ ID NO: 66293 - DNA, 1011 bp, Unknown
  Obtained from environmental sample
  misc_feature (1)..(1011): n is a, c, g, or t
atgctgcttcggcttttagcggcagtctgcgcgcttgccgcttccggcgtaatcatggcgcttatgggatataacccttttgacgtttacgcgaagatcatttcaggttctcttggctctgcttaccgcttcagggaaacgattaacaaagccatacccttgtgcgttctttctctgggtaccgcgattgccttcaggatgaaattctggaacataggccaggaagggcagttttaccttggggcctacggctcggccctggccgcctttgccttcccgaaccttcccgcgcccatcctcctgtcaataatgctgataatgggcatggcgttcggcggcctgtgggcattgattccggcgttattgaaaataaaattttcaacaaatgagacgctggtgacattgatgctgaattacatagcgatcaagtggatttcattcctgcagtacgtggcgtggaaagacccgacggcgctcggtttcccgaaaatcacccctttcagcgccaacgcggtgcttccccgccttttcaatatccatatcggctggataatcagcctctgtctcgcttttttgctgtatgtattgttaaaaaaaaccaagttcggttatgagattgacgtaataggggagagcgaagctaccgcgcgttacgcgggcatgaacgtgttcaggatcagcgttctcgcgatcatgctttcaggcggcctttgcgggattgcgggaatgatgcaggcctccgcgattgaacgttccctctcggagcagctttcgggcgggcttggctttacgtcggttattgtcacctggcttgcccgccttgagccgggcgtgattatcgtcatggcgtttcttttttccatcctgatacagggcggcaatttcctgcaatcgagtctgcagattcccgcttctatctcacaggtactgcaggggatcattattttctttgtgcttggttctgaattttttatccggtaccgttttgtacgggagaagaacaatgactga

SEQ ID NO: 66294 - protein, 336 aa, Unknown
  Obtained from environmental sample
  SIGNAL (1)...(20)
  DOMAIN (43)...(319): Branched-chain amino acid transport system / permease component
  misc_feature (1)..(336): Xaa is any amino acid
MLLRLLAAVCALAASGVIMALMGYNPFDVYAKIISGSLGSAYRFRETINKAIPLCVLSLGTAIAFRMKFWNIGQEGQFYLGAYGSALAAFAFPNLPAPILLSIMLIMGMAFGGLWALIPALLKIKFSTNETLVTLMLNYIAIKWISFLQYVAWKDPTALGFPKITPFSANAVLPRLFNIHIGWIISLCLAFLLYVLLKKTKFGYEIDVIGESEATARYAGMNVFRISVLAIMLSGGLCGIAGMMQASAIERSLSEQLSGGLGFTSVIVTWLARLEPGVIIVMAFLFSILIQGGNFLQSSLQIPASISQVLQGIIIFFVLGSEFFIRYRFVREKNND

SEQ ID NO: 66295 - DNA, 864 bp, Unknown
  Obtained from environmental sample
  misc_feature (1)..(864): n is a, c, g, or t
ttgtgcttggttctgaattttttatccggtaccgttttgtacgggagaagaacaatgactgagtttttgaatatgatgactttattcctgcaaacctccgtgcagatgggaacccacatcctctttgccgtgcttggcgggatcatgtgcgaaaaaatcggaaaccttaacctcggcatagagggcatgatgctgttaggcgcttccgttggtttttctttcgcccttactacggcgaatccttttgcggctgtttttgcagcgggtattgccggttctcttggcgcgcttatttacgggatgataacgattacattgcggggcaaccaggttgttaccgggcttgtccttacgatttttggcatcggcgtatcgggctttatcggcaaaagccttgccggaaaacccctgcccgacgcggtacagaaggctttttcccctgttaccgtccccctcctgggcaggatccccgttatcgggcaggtcttttttattcagagcccttatgttttggccggtctaatcctcggcgtcctgctttatttttattttcgcagcacccgcgtcggccttaacgcccgcgcggtcggcgagaaccccgccgtcgccgacgccgccggtattccggtgatactctacaaatatgtccatgtcattcttggcggttttctctgcggcgtgggcggggcctatctttcccttgtttttgtcccccgctggcaggaaaacatcaccgcgggcgcgggctggatagctgtcgcgctggttatattcagcacatggaatcccctgcgggcgatttttgccgcctgtctctttggcgccctgcgggggctgggtttcaattacagaatatcgatatga

SEQ ID NO: 66296 - protein, 287 aa, Unknown
  Obtained from environmental sample
  DOMAIN (29)...(287): Branched-chain amino acid transport system / permease component
  misc_feature (1)..(287): Xaa is any amino acid
MCLVLNFLSGTVLYGRRTMTEFLNMMTLFLQTSVQMGTHILFAVLGGIMCEKIGNLNLGIEGMMLLGASVGFSFALTTANPFAAVFAAGIAGSLGALIYGMITITLRGNQVVTGLVLTIFGIGVSGFIGKSLAGKPLPDAVQKAFSPVTVPLLGRIPVIGQVFFIQSPYVLAGLILGVLLYFYFRSTRVGLNARAVGENPAVADAAGIPVILYKYVHVILGGFLCGVGGAYLSLVFVPRWQENITAGAGWIAVALVIFSTWNPLRAIFAACLFGALRGLGFNYRISI

SEQ ID NO: 66297 - DNA, 1422 bp, Unknown
  Obtained from environmental sample
  misc_feature (1)..(1422): n is a, c, g, or t
ttgacaagaccggtgaagacgttttgcgtgtcagcaatgggaaagcagccgctgttgtttacagaggaagcggaacaaacagaaataaaaggggaaactccgcaagaatttgaaacaataaaaccattcacccgcaagaaagcggggcgaaagccgatagacccgaacttgaaacgcgagcccaggatcatagacataccggaaaatgagaaaacatgcgcctgcggggctaaattaaccaagataggcgaagaaatccgtgaaaaagtggtaataatacccatgcagatttatgtggaccacgcaatccgcccgaagtacgcctgccggcaatgcgaagggacggaagacgaaggcaggccgacagtccgcatagcgccggtggaaccggcaatgattcccaagggcatagcgagcgacagcgtgttagccactattttcacgcaaaagtttgaaatgcacctgccatactacaggcaggagaaacaatttgaacagataggcgtagaaataagccggcaggacatggcgaactggcagcagcaggcgtatgaaaagctggaaccgttattcgccatactcaaaagaacggtaaaagaaggccccgtggtgcagatggatgagacggaggtacaggtaatcggggaggagaaccggagtgatattcagaaaagccgtatgtggctggcccggggaggcccccccggcaaaaaagtaatctggtatgaatactaccctacccgcgccgcgtataacgcgaaagcgtttctggaagggtattcgggttatctgcaaacggacggctatgacgggtatgacagcgcggtgaaagacatgcccggtattattcacgtggggtgcatggctcacgcgaggaggcggttctttgaagcggcaaaaataaacaagaaaccgcagtccgccgaggaagggataaaatatatacgcaagctgtaccagcttgaagacgcgctgagggacaaatggaaagacgaccttgaaagattcaatgaagagagaaaaaaagaagcggcctccctgttagatgaatttaaagcgtggctgttaaagcgcgtgaatgaagtgccgccgaagacgctgttaggtgaagcggtaaactatacgttgaaccaatgggacaaattgataaagtatcttgaaagcccctatttgacgcccgacaacaacgcgtgtgaaaacgcgatccggccttttgtccttggaaggaaaaattggttgttctgccagagcgttggcggggcaaaaagttcatgcggcatgtttacccttatagagacggcaaagcaaaacggtcttgttccccgaaaatatcttactgctctttttgagaaagcgccgtatgccgcaaccttcgaagactgggaaaaacttctcccctggaatattacattccctgtttag

SEQ ID NO: 66298 - protein, 473 aa, Unknown
  Obtained from environmental sample
  DOMAIN (79)...(281): Transposase IS66 family
  misc_feature (1)..(473): Xaa is any amino acid
MTRPVKTFCVSAMGKQPLLFTEEAEQTEIKGETPQEFETIKPFTRKKAGRKPIDPNLKREPRIIDIPENEKTCACGAKLTKIGEEIREKVVIIPMQIYVDHAIRPKYACRQCEGTEDEGRPTVRIAPVEPAMIPKGIASDSVLATIFTQKFEMHLPYYRQEKQFEQIGVEISRQDMANWQQQAYEKLEPLFAILKRTVKEGPVVQMDETEVQVIGEENRSDIQKSRMWLARGGPPGKKVIWYEYYPTRAAYNAKAFLEGYSGYLQTDGYDGYDSAVKDMPGIIHVGCMAHARRRFFEAAKINKKPQSAEEGIKYIRKLYQLEDALRDKWKDDLERFNEERKKEAASLLDEFKAWLLKRVNEVPPKTLLGEAVNYTLNQWDKLIKYLESPYLTPDNNACENAIRPFVLGRKNWLFCQSVGGAKSSCGMFTLIETAKQNGLVPRKYLTALFEKAPYAATFEDWEKLLPWNITFPV

SEQ ID NO: 66299 - DNA, 714 bp, Unknown
  Obtained from environmental sample
  misc_feature (1)..(714): n is a, c, g, or t
atgcctttttggatttttagccaaattccccatataaaaaaaataatgaaagaagaaaataaatggctaacttcaatgtgcgaaaagcaaaaatatactcttgttataagcgacaaccgctttggctttttctgcaaaaaaataaaatccgtgtatataacgcatcaactgcgaatagccttcccaaaaccttttacctcttttgaaaaaataggagaaaactggcacaaaaacataatgaaaaattttgacgaaatatggattccagactacgaagaattccccggtcttgccggcaaactgagccacccttcatacaagagcgaaaaaataaaatacataggtcctttgtctagattggatttgagagtacccgttcccccaaaaaaatacgacattttggctctgatttccggtcccgaacctcatagaagcgcatttgaaaaatacgttattgaatttttgtctgaaaaacctggcaatcattgcattgtacgtggtttgccaaatgaaacagaaattccaaatttgcctttccctgcattcaaccatcttggagcagcagatttgcgggaaattattttggcgagcaaggaggtgctttgccgttctggttattcaacgattatggatttggctttgttaaaggcaaaggctatttttgttccaacacctgggcaaacggagcaggaatatttggctagtttatattag

SEQ ID NO: 66300 - protein, 237 aa, Unknown
  Obtained from environmental sample
  misc_feature (1)..(237): Xaa is any amino acid
MPFWIFSQIPHIKKIMKEENKWLTSMCEKQKYTLVISDNRFGFFCKKIKSVYITHQLRIAFPKPFTSFEKIGENWHKNIMKNFDEIWIPDYEEFPGLAGKLSHPSYKSEKIKYIGPLSRLDLRVPVPPKKYDILALISGPEPHRSAFEKYVIEFLSEKPGNHCIVRGLPNETEIPNLPFPAFNHLGAADLREIILASKEVLCRSGYSTIMDLALLKAKAIFVPTPGQTEQEYLASLY

SEQ ID NO: 66301 - DNA, 819 bp, Unknown
  Obtained from environmental sample
  misc_feature (1)..(819): n is a, c, g, or t
gtgggaagagttcaatcttggaaattcgtcatcgttgccgattctggattgatgagcaaagacaatatctcntatttgaattcaagaaattatgaatacatacttggggcgaggataaagggcgaaagcgaaaatgtcaggcagtggatattttcattggagaaacagcacggggctttttacgagcataagaagaatgggaatgcgaggctggtggttggctattcggacgacagggcgaggaaagaccggtacaacagagaaaaaggcgtgagacggcttgaaaaggagttcaaaacgggaacactgaccaaatccaaagtttcaaagcgtggctacaacaaattcttggaggcaagcggcgatgtgaaagtcgtcataaatcaggagaagataaaggaagacgagcgatgggatggattcaaaggatacataaccaacacgaaacttccggcaaaagctgtctgcgaggagtacggcgggctatggcaggtggagaaagcattccgcattgcgaaaggaactttggaaatgagaccgatgtttcattttactgaaaaacgaatcaaagcgcacgtttgcatttgctttgccgcatacaaggtgtacaaagaattggaaaggatattgaaaatgagcggctttgaattaagcgtggataaagttctggacattgcaaaaacaataacgaccataaaagtcaggctgcctatgagcggaaatacattgactcaaacaatgctgctcactgaaaggcacaaatcaattgaacaactattcaataaaaatttctggagaccgtttagggtgactttttga

SEQ ID NO: 66302 - protein, 272 aa, Unknown
  Obtained from environmental sample
  misc_feature (1)..(272): Xaa is any amino acid
MGRVQSWKFVIVADSGLMSKDNISYLNSRNYEYILGARIKGESENVRQWIFSLEKQHGAFYEHKKNGNARLVVGYSDDRARKDRYNREKGVRRLEKEFKTGTLTKSKVSKRGYNKFLEASGDVKVVINQEKIKEDERWDGFKGYITNTKLPAKAVCEEYGGLWQVEKAFRIAKGTLEMRPMFHFTEKRIKAHVCICFAAYKVYKELERILKMSGFELSVDKVLDIAKTITTIKVRLPMSGNTLTQTMLLTERHKSIEQLFNKNFWRPFRVTF

SEQ ID NO: 66303 - DNA, 831 bp, Unknown
  Obtained from environmental sample
  misc_feature (1)..(831): n is a, c, g, or t
atgtttgttcgcaaaaagaagaataaatctggcagcacaagtgtaatcgtcatagacaagagcaatggcaaattcaaggaactgaaaacgataggcattagctctgacgagaatgagatatctgagctttgtcagtcaggcaagaaatggattcgtgacaattacggcgagccggacatgttcgccatttacgacagggaacgggaagagaagcaaacggcagaacggcttctgtccaatgtggagaacatattgctgaatggcgcaaagctgatattggacagagtatttgagcttatcggttttgatgctataagagacgatatattcaaatccttggttgtagcccgcatctgccagccgttgagcaagctggcaacggttgaatatctgaaatcccattttgacgaggatgttgagctttgcaagatatatcgttacttggacaagcttcaagacaggcataagcccatagttcaaaaaataagcgttgagcatacctgcaagattttaggcggcaggataggtcttgtgttttatgatgtgaccacgctctattttgagacggacatcggcgataatttgcgggtgcccggattctcaaaagacggcaagcacagccagcctcagatagttcttggtcttctggtcagcgcgggcggctatccgctcgcgtattcaatccacgaaggcggcaaatacgaggggcacacaatgcgcctgcgattgagaacttgtgggaagagttcaatcttggaaattcgtcatcgttgccgattctggattgatgagcaaagacaatatctcntatttgaattcaagaaattatga

SEQ ID NO: 66304 - protein, 276 aa, Unknown
  Obtained from environmental sample
  misc_feature (1)..(276): Xaa is any amino acid
MFVRKKKNKSGSTSVIVIDKSNGKFKELKTIGISSDENEISELCQSGKKWIRDNYGEPDMFAIYDREREEKQTAERLLSNVENILLNGAKLILDRVFELIGFDAIRDDIFKSLVVARICQPLSKLATVEYLKSHFDEDVELCKIYRYLDKLQDRHKPIVQKISVEHTCKILGGRIGLVFYDVTTLYFETDIGDNLRVPGFSKDGKHSQPQIVLGLLVSAGGYPLAYSIHEGGKYEGHTMRLRLRTCGKSSILEIRHRCRFWIDEQRQYLXFEFKKL

SEQ ID NO: 66305 - DNA, 1539 bp, Unknown
  Obtained from environmental sample
  misc_feature (1)..(1539): n is a, c, g, or t
atgaggtcttttacctttgcggatataaaacgtctttcagataaagccgcaaacgctctgagttcgttaggaataaaaaaaggcgacgtagttaagcttatcttaaaacagcgtcccggcgtatgggtattaatgtgcgccctttcaaaactgggtgcgatttgcattcccggtacatatcagctaacagccaaagatttggaatacaggtgcaatattgccgatgtaaaacttttaattaccgttgacgacaaagagttgatggaaaatatagctcttgcccgtccaaactgtaaaaaattggaaaaaatagcggttatcggcaaaacaattcccgacggctatattgatatgagagcggaaattcaaaaatcgtctgaaaattttacaagggcagcgactgtaacaaaagaccctatgcttatttatttttcttccggtactgccggaatgcctaaaatggtgcttcacaaccacagtctgccattggggcatattgttaccgcaaaatactggcactgcgtggaagacaactgcgtccaccttactcagactgattcaggctgggcaaaattcgcgtgggggaaaatttacgggcagtggatttgcggcgcggcaatcggcgtttatgacacagagaaatttacccccaatggaatgttagacgcaattttacgcttaaaaccggtaaccttttgcgctcccgccaccgtattccgttatttgataaaggaagacctttcacattatgattttagttttatccgccacacatccgtggcaggggagccattaagcccggaagtttataataaattattggaacttacaaaacttgaaattcgcgagggctttggtcagagcgagacttccgtaatggcggctgtttttaaatggctgcctgtaaaacccggctcaatgggaaaacccgctccgcttttcggtcttaaattgctggaagagaacggggtggaatgcgacgaaggtattgtcggaaatatgagcataacctgcgcaggaaaaaatatgtacgaaactaaagactgcgatcccgacagtatgccgcctgtaatcggcagctcggactttccgggtattttccgcggttattggaaagacaaggaaataacggaaacatgctggaataacggaacatataaaacaggcgacatggcgtggaaagacaacgacggctatctgtggtttgtcgggcgcaacgacgatgtaattaaatgctcaggctaccgcattggtccttttgaggttgaaagcgcgttaatggaacacccgtccgtgcttgagtgcgctgtcaccgccgcccccgatccaatgcgcggtcaggttgtgaaggcaaccatcgttcttgcgcggggttacacagcctcggatgaattaatccgtgaattgcaaaaccatgtaaaacatgtaacagccccctacaaatacccgcgcatcattgaatttgtgcctgaattgccaaagacaatcagcggtaaaattcagcgtaacatgatacgaaaaaaagattttaaggactaa

SEQ ID NO: 66306 - protein, 512 aa, Unknown
  Obtained from environmental sample
  DOMAIN (5)...(437): AMP-binding enzyme
  misc_feature (1)..(512): Xaa is any amino acid
MRSFTFADIKRLSDKAANALSSLGIKKGDVVKLILKQRPGVWVLMCALSKLGAICIPGTYQLTAKDLEYRCNIADVKLLITVDDKELMENIALARPNCKKLEKIAVIGKTIPDGYIDMRAEIQKSSENFTRAATVTKDPMLIYFSSGTAGMPKMVLHNHSLPLGHIVTAKYWHCVEDNCVHLTQTDSGWAKFAWGKIYGQWICGAAIGVYDTEKFTPNGMLDAILRLKPVTFCAPATVFRYLIKEDLSHYDFSFIRHTSVAGEPLSPEVYNKLLELTKLEIREGFGQSETSVMAAVFKWLPVKPGSMGKPAPLFGLKLLEENGVECDEGIVGNMSITCAGKNMYETKDCDPDSMPPVIGSSDFPGIFRGYWKDKEITETCWNNGTYKTGDMAWKDNDGYLWFVGRNDDVIKCSGYRIGPFEVESALMEHPSVLECAVTAAPDPMRGQVVKATIVLARGYTASDELIRELQNHVKHVTAPYKYPRIIEFVPELPKTISGKIQRNMIRKKDFKD

SEQ ID NO: 66307 - DNA, 1623 bp, Unknown
  Obtained from environmental sample
  misc_feature (1)..(1623): n is a, c, g, or t
ttgcttagcctgataaacaacatactggacatgtccaagatagagtcaggcaaaatggaactttctcttaacaattacgatttcccaagtctgataaacgatacggtttctcttaatgttatattatacgacaataaacatattgaatttacacttaatgttgatgaaaatattccctcaagtatgttaggtgatgatatacgtatcaagcaaatcataaacaatctgctttccaatgcctttaaatacacggataaaggcgaggtttccatgtctatctccgccgaatatcaggaagacccggcgattgttacgcttgtattacgcgtatcggacacaggacagggtatgacggcggaacagattgatacgttgtacgatgagttcacccgctttaatactgaagttaacagcaaagtagaaggcaccggtcttggaatgagtattacaaaacaacttgttcttataatgggcggtgaaattgacgtagagagcgaaccgggcaaaggctccgtatttaccgtgcgcttgccgcagaaaattgacaaccacgaggtaataggcaaagaaatggcggaaaaacttaaaaatttccgctccgctgatttgacgcaaacgggaaaaaagaagcatcttgtatacgagtacatgccttacggcagagttttgatagtagatgatgtggatacaaacctttatgtcgccaaaggattaatgtccccttatggtttgtcgcttgaaaccgccaagagcggtttcgaaatgattgaaaagattaaaggcggcgctgtctttgacataatattcctggatcattttatgccgaaaatggacggtatagaagccgtaaaaattataagagatatgggctacacgcaacctgtcatagcgttgacagctaacgcaattgtagggcaggcggaaatgtttttagagaacggattcgacggatttatttccaaaccgatagacatacggcaaataaacgctatgcttaataaactggtgcgcgacaaatacccgcctgaagttgttgaagccgcgcgaaaacaggcggctgttattacagaccaaacagttaagaatatagaaccatccactgattccaaattaagggctattttcacgcgcgacgccgaaagcgcatttataagaatgaaaacaatactatcgaattcattccgcagaagcgacgatatacagcaatttgttatcgacgtccactcaatgaaaagcgcgcttaaccatatgagtgaaaaacagttatccgccgtcgcgcgtaaactggaaatggcaggacgggcaaaagatgtacctgtaatgatagccgaaactccggcatttttggaagagttacgcaaaaccattgacaaattcaaacaaaaagacgacgattccgtggaagaagtttttgaaaatgatctggttttgttatccgaaaaaatgctcgctattcaaaaggcctgcgaaaagtatgatgaaatagccgccaattcagcgctggaagaacttgaacaaaaaaagtggtcgcgctccatcaaggaacatattaacgccatctccatgcatttactgcacagcgattttgataaagccgcaaatgtcgcaagtgaatacgtttag

SEQ ID NO: 66308 - protein, 540 aa, Unknown
  Obtained from environmental sample
  DOMAIN (220)...(333): Response regulator receiver domain
  misc_feature (1)..(540): Xaa is any amino acid
MLSLINNILDMSKIESGKMELSLNNYDFPSLINDTVSLNVILYDNKHIEFTLNVDENIPSSMLGDDIRIKQIINNLLSNAFKYTDKGEVSMSISAEYQEDPAIVTLVLRVSDTGQGMTAEQIDTLYDEFTRFNTEVNSKVEGTGLGMSITKQLVLIMGGEIDVESEPGKGSVFTVRLPQKIDNHEVIGKEMAEKLKNFRSADLTQTGKKKHLVYEYMPYGRVLIVDDVDTNLYVAKGLMSPYGLSLETAKSGFEMIEKIKGGAVFDIIFLDHFMPKMDGIEAVKIIRDMGYTQPVIALTANAIVGQAEMFLENGFDGFISKPIDIRQINAMLNKLVRDKYPPEVVEAARKQAAVITDQTVKNIEPSTDSKLRAIFTRDAESAFIRMKTILSNSFRRSDDIQQFVIDVHSMKSALNHMSEKQLSAVARKLEMAGRAKDVPVMIAETPAFLEELRKTIDKFKQKDDDSVEEVFENDLVLLSEKMLAIQKACEKYDEIAANSALEELEQKKWSRSIKEHINAISMHLLHSDFDKAANVASEYV

SEQ ID NO: 66309 - DNA, 315 bp, Unknown
  Obtained from environmental sample
  misc_feature (1)..(315): n is a, c, g, or t
ttgttttcggatgtgacgcttgaaccgtcggagtacgtgtacgtggagtttgggtacgatacggataagtacggcgtctcggtcttggacaagagcggcgcgcttacccgtcagaccgtccttagcaagatggagcgccagataaaagggcagggcgacatggacgactccggccgcggcctgcacatgtgccgcctcttcgccgaccgcctcgtagtgaacatagagcgcggaaagcgcacggaagtcatagtttttaactatataaacggcaagtacagcgggtacaaaccgctatatatcaacgaagtgtag

SEQ ID NO: 66310 - protein, 104 aa, Unknown
  Obtained from environmental sample
  misc_feature (1)..(104): Xaa is any amino acid
MFSDVTLEPSEYVYVEFGYDTDKYGVSVLDKSGALTRQTVLSKMERQIKGQGDMDDSGRGLHMCRLFADRLVVNIERGKRTEVIVFNYINGKYSGYKPLYINEV

SEQ ID NO: 66311 - DNA, 786 bp, Unknown
  Obtained from environmental sample
  misc_feature (1)..(786): n is a, c, g, or t
gtgctaaatcactgtcgcggacgcaagctaaagctgcacggcttcaacaacctgacgaagtcgctcagtttcaatatatacgatatttgttacgccccttccaagtcgtcgcagatggactacttggagtacgtagacgagatgtacaactcggaaaaactgcgcggcatactcgaagaggtgacgagcatcatagaggcgcggatagtgaacatttccacgcaggactacgacccgcgcggagcgagcgtcaccattttgataaacgagggaaacaaccagcttacgtcggagggcgtggttgcgcatttggacaagagccacatcaccgcgcatacctatcccgagaacaacaccgaaaacgggatagccaccttcagggtggacatcgacgtgtcgacatgcgggatgatttcgccgctcaaggcgctcgactttctgatagacagcttcgactccgatatagtgctgttggactacagggtccgcggtttcacccgcgacgttaaggggaggaaggtctacattgaccacgatatcacctcgatacaagactatatctccgatgatactctggataagtacaccgcctacgacataaatatcgtgtcggacaacatattccactccaaaatgcagatcaagagtatgaagctcgaaaactaccttttcggtcccgacaccgataaaatgtccaaggccgagaggactaaaatccgtacgctcctaaagaaggagatgcaggagatatttgagtgcagaaacatctacgatagggaagcgtga

SEQ ID NO: 66312 - protein, 261 aa, Unknown
  Obtained from environmental sample
  DOMAIN (44)...(164): S-adenosylmethionine decarboxylase
  misc_feature (1)..(261): Xaa is any amino acid
MLNHCRGRKLKLHGFNNLTKSLSFNIYDICYAPSKSSQMDYLEYVDEMYNSEKLRGILEEVTSIIEARIVNISTQDYDPRGASVTILINEGNNQLTSEGVVAHLDKSHITAHTYPENNTENGIATFRVDIDVSTCGMISPLKALDFLIDSFDSDIVLLDYRVRGFTRDVKGRKVYIDHDITSIQDYISDDTLDKYTAYDINIVSDNIFHSKMQIKSMKLENYLFGPDTDKMSKAERTKIRTLLKKEMQEIFECRNIYDREA

SEQ ID NO: 66313 - DNA, 600 bp, Unknown
  Obtained from environmental sample
  misc_feature (1)..(600): n is a, c, g, or t
gtggaatatgttgtccgacacgatatttatgtcgtaggcggtgtacttatccagagtatcatcggagatatagtcttgtatcgaggtgatatcgtggtcaatgtagaccttcctccccttaacgtcgcgggtgaaaccgcggaccctgtagtccaacagcactatatcggagtcgaagctgtctatcagaaagtcgagcgccttgagcggcgaaatcatcccgcatgtcgacacgtcgatgtccaccctgaaggtggctatcccgttttcggtgttgttctcgggataggtatgcgcggtgatgtggctcttgtccaaatgcgcaaccacgccctccgacgtaagctggttgtttccctcgtttatcaaaatggtgacgctcgctccgcgcgggtcgtagtcctgcgtggaaatgttcactatccgcgcctctatgatgctcgtcacctcttcgagtatgccgcgcagtttttccgagttgtacatctcgtctacgtactccaagtagtccatctgcgacgacttggaaggggcgtaacaaatatcgtatatattgaaactgagcgacttcgtcaggttgttgaagccgtgcagctttag

SEQ ID NO: 66314 - protein, 199 aa, Unknown
  Obtained from environmental sample
  misc_feature (1)..(199): Xaa is any amino acid
MEYVVRHDIYVVGGVLIQSIIGDIVLYRGDIVVNVDLPPLNVAGETADPVVQQHYIGVEAVYQKVERLERRNHPACRHVDVHPEGGYPVFGVVLGIGMRGDVALVQMRNHALRRKLVVSLVYQNGDARSARVVVLRGNVHYPRLYDARHLFEYAAQFFRVVHLVYVLQVVHLRRLGRGVTNIVYIETERLRQVVEAVQL

SEQ ID NO: 66315 - DNA, 960 bp, Unknown
  Obtained from environmental sample
  misc_feature (1)..(960): n is a, c, g, or t
ttgagtgcagaaacatctacgatagggaagcgtgatatggctaggattatgaagaagcggcggttataccacgaggcgctgaatccggcgttcggtttctactacaccataaaaaagacgttgcgccgggcgaataccaagtaccagcggatagagcttgtggacaccgacgagttcggcagggtactgctcttagacgatatcacccaagtcgccgagagaaacgagttcatgtaccacgagccgatggtgcatccggcgcttgcctgccatccgaagccgcggagcgtattggtcgttggcggcggcgacggcgggataatacgcgaggtgctgaaataccccgccgtggagcgcgtagagttggccgaactcgacggcggggtggtcaacttttcgaaaaagtatttgaccgatgtccacggcggatgcttcgacgacagccgggtgaaggtcaacataaccgacggacgcaagtttacggaggatcaccccggcgagtttgatgttataataatggacatgaccgaccctttcggcccgtcaaccatgctctacacaaaggagttctaccgcatagccaaaagagcgatgcgagacagcgccggcgtctacataatgcactccgagtctccgatagcccgtccggcggcgtttgcatgcatacaaaagacgctgtcgtcggtcttcaaaaacgtgaatccattatatatgtatatacagatgtacgccgtactgtggtcgataacgatggcctcggacagggtagacccgtcggcgataaagccggcggtcatagacagaaagttggcgaagtttggtatcaaaggtttaaagatgtacaacggaacaacgcaatcggcaatgctgacgccgtatccgtacatagaagaaatattagagcgcccgacgaggataattacggacgagaaccctgaattcccggatgatttcttgtaa

SEQ ID NO: 66316 - protein, 319 aa, Unknown
  Obtained from environmental sample
  DOMAIN (18)...(260): Spermine/spermidine synthase
  misc_feature (1)..(319): Xaa is any amino acid
MSAETSTIGKRDMARIMKKRRLYHEALNPAFGFYYTIKKTLRRANTKYQRIELVDTDEFGRVLLLDDITQVAERNEFMYHEPMVHPALACHPKPRSVLVVGGGDGGIIREVLKYPAVERVELAELDGGVVNFSKKYLTDVHGGCFDDSRVKVNITDGRKFTEDHPGEFDVIIMDMTDPFGPSTMLYTKEFYRIAKRAMRDSAGVYIMHSESPIARPAAFACIQKTLSSVFKNVNPLYMYIQMYAVLWSITMASDRVDPSAIKPAVIDRKLAKFGIKGLKMYNGTTQSAMLTPYPYIEEILERPTRIITDENPEFPDDFL

SEQ ID NO: 66317 - DNA, 996 bp, Unknown
  Obtained from environmental sample
  misc_feature (1)..(996): n is a, c, g, or t
atgcatgttttgatttttattgccgggattttagtcacgtgtattgttttagttccggcattgctttcatataaaaagagaatccgcgaatgggaagacatatccgaacaatcttttgcgagcgtgtcaaatttcaagggtaaaaccattaagcttgccgcggtcgtaaaagaatcggcggatgtggttttccgtaccggaaaaaacaataaaacttccggaagcgggcaagccggcagcatggagaaagttgaaagcaccattaacgaaaacgccagaatcgcggcggatattgtcgaaaaaacgcgcagcgtcgcggttatcgcctccaaaatggaagaagacgtgcttgacggctttaaagtgctggaaaaaaacgtcaaaaagatgggagacataaaggaaaaaaattcaggggtaatcaacggcattatttccttgggcaacaaggtaagcaaaatccgcgacattgtccgggtcatcaacaccattacggatcagacaaaggtaatagcgtttaacgccgcccttgaagcggcaagcgccggtgaaacgggaaagcgttttgccgtggtagcgggggaagtaaacaggctggccgacgatatagcggtccttacccgccagattcgggagcaggttgaggaaattcaaagctcttcgtcctcattgattgtatacagcgaggaaggttccgacagaatcgcggaaggttacaagcttatcaaggatttggaggatgtttttaaggaaattaaagccggcgccgagataacttccaatcaggcgcagaccattactatttccacacaacagcaattaaaatccagcgaacaaatcgttttcgcgatttccgaagtttcccaggaagtaaaacattttatatactcggtcgaagcggcggcgtgtcncgcgggaaccatgaaagagcgcacccgagagcttgaacgctttctgacccaagaatcaatcggacagggtaaacatggcggttga

SEQ ID NO: 66318 - protein, 331 aa, Unknown
  Obtained from environmental sample
  DOMAIN (57)...(325): Methyl-accepting chemotaxis protein (MCP) signaling domain
  misc_feature (1)..(331): Xaa is any amino acid
MHVLIFIAGILVTCIVLVPALLSYKKRIREWEDISEQSFASVSNFKGKTIKLAAVVKESADVVFRTGKNNKTSGSGQAGSMEKVESTINENARIAADIVEKTRSVAVIASKMEEDVLDGFKVLEKNVKKMGDIKEKNSGVINGIISLGNKVSKIRDIVRVINTITDQTKVIAFNAALEAASAGETGKRFAVVAGEVNRLADDIAVLTRQIREQVEEIQSSSSSLIVYSEEGSDRIAEGYKLIKDLEDVFKEIKAGAEITSNQAQTITISTQQQLKSSEQIVFAISEVSQEVKHFIYSVEAAACXAGTMKERTRELERFLTQESIGQGKHGG

SEQ ID NO: 66319 - DNA, 2172 bp, Unknown
  Obtained from environmental sample
  misc_feature (1)..(2172): n is a, c, g, or t
atggcggttgataaatccaagtacattaaccaatttgccgaagaagggcttgaaaatatctcgaccgtgcaaaaactgctttttgagataaaagaaggttcttccgttcaggatgatcttgttacgctgatgcgtgcgctgcataccttaaaaggctccgcgcgtatgcttgaatttaaaaacattgaggcagtttctcacgcgctggaaacagcgtttgcttccttaaaggaagagcggattggcctcaatgacaaggcgatgaaactgattcttgccggtctggacgaagtaaaagcgggaatcgaaaaagtcaaatcgggcggaaaagacgaaataagagcgccgttgtttcagaaggagctgtcatcgcttgccgcaaacgaggaatacgccatacccaacgccgaagccgacacggaagaaaagccccagcaaaagccaaagcttgaagactccaaacacaggccggatgacacgagcataagaataccgcttgaacggatcgacagggttattcatgacatggcggcgctacagtcattggaaataatcgccagaaatatcgcgcgcgacaccgaagcggtcaacgccgcgtccagacagttttcaaaacttctcagcgcgagcctgccctggaattcccccataattcaggaatttcgcccgatagaattgatggcgggcaaactgggttccgtcgtaaggaattacgccctggatgtgggcaatcatatccgaagcgcttatgacagcataatctccttaaggatgctgcccctttccacggtgcttgacgaatacccccgccaggtttttaccatttcctccgaactgggcaaaaaggtaaagctccatattgagggagctgaaaatgaaattgacaaaaatttaattgaatcattatccgaggtgttccttcacatgataaggaattcgattgatcacggaattgaaagccccgaagaacggcgcaaggcgggaaaagatgagacaggccggttgacgattacctgcgtccgtgagagcggaaacatgaaagtgacaatcgccgatgacggaaagggcatcaacaccgggggaatacgcaagagaattgttgaaaaaggcctggttaccgccgaagcggccgcggcccttggcgaagaagaacttataaattttattttccagagcggattttcaaccgcggataaaatttccaatgtttcgggacgcggcgtcggaatggacgcggtcaggaacaacattgagcgcatgaagggcagtatcgccatacagacaaaagtcggggaaggaacgacatttaccatttccgtccccttgtcgctggccgcccttatgggcttccccatttcatcgggcagcatgaaatttatcatccccgccaattttgtggatacggtcatgcttatcaatacaaaagagattatcaccgtggtggaccgtccgggcattaaatacaacgggcgtatcatcaagctgttctacctgcatcatgtcttgaagatacccgtagacgaaaaaaagaacacgggcgattcgatcttcgtcgccattgtccaggcttatgaggaaacagtggccctcgcggtaaaccaggtaagcagcatgaggcaggtgattcttaaaaacctgccctctttcatggaaaaaatggaagtgttttccggtgtggtgctcagcgaagactatgaaatgataccggcgctgcatattccgacggtgatcagaatggcgcggcgcacaaagaccatcgacatgaaaaaacgccatatcgattacgaacgtatgcgcaagtcaattctggtagtggacgattcccgcccgacgcgggacatagagcgtgatattctggaggccgaaggctataaagtggatgtcgcctcggacggttcagaagcgctggccgccgcgaagaacgcccagtacgatttgatttgcaccgatattataatgccgaatatggacggttttatgctggcggagaacatccgcaaaaacgaccgtttaaagaatatccccattatcgccatttcatcaaaaagcggcgagaaagatcaaaacagggctgcgcttcttgggataaaccgctttatcgcaaaaaattcgtttaacgtccataatttgacagccattgtgcgggaattaatcggagaggccaatggataa

SEQ ID NO: 66320 - protein, 723 aa, Unknown
  Obtained from environmental sample
  DOMAIN (446)...(581): CheW-like domain
  misc_feature (1)..(723): Xaa is any amino acid
MAVDKSKYINQFAEEGLENISTVQKLLFEIKEGSSVQDDLVTLMRALHTLKGSARMLEFKNIEAVSHALETAFASLKEERIGLNDKAMKLILAGLDEVKAGIEKVKSGGKDEIRAPLFQKELSSLAANEEYAIPNAEADTEEKPQQKPKLEDSKHRPDDTSIRIPLERIDRVIHDMAALQSLEIIARNIARDTEAVNAASRQFSKLLSASLPWNSPIIQEFRPIELMAGKLGSVVRNYALDVGNHIRSAYDSIISLRMLPLSTVLDEYPRQVFTISSELGKKVKLHIEGAENEIDKNLIESLSEVFLHMIRNSIDHGIESPEERRKAGKDETGRLTITCVRESGNMKVTIADDGKGINTGGIRKRIVEKGLVTAEAAAALGEEELINFIFQSGFSTADKISNVSGRGVGMDAVRNNIERMKGSIAIQTKVGEGTTFTISVPLSLAALMGFPISSGSMKFIIPANFVDTVMLINTKEIITVVDRPGIKYNGRIIKLFYLHHVLKIPVDEKKNTGDSIFVAIVQAYEETVALAVNQVSSMRQVILKNLPSFMEKMEVFSGVVLSEDYEMIPALHIPTVIRMARRTKTIDMKKRHIDYERMRKSILVVDDSRPTRDIERDILEAEGYKVDVASDGSEALAAAKNAQYDLICTDIIMPNMDGFMLAENIRKNDRLKNIPIIAISSKSGEKDQNRAALLGINRFIAKNSFNVHNLTAIVRELIGEANG

SEQ ID NO: 66321 - DNA, 537 bp, Unknown
  Obtained from environmental sample
  misc_feature (1)..(537): n is a, c, g, or t
ttgatgatacgcccgttgtatttaatgcccggacggtccaccacggtgataatctcttttgtattgataagcatgaccgtatccacaaaattggcggggatgataaatttcatgctgcccgatgaaatggggaagcccataagggcggccagcgacaaggggacggaaatggtaaatgtcgttccttccccgacttttgtctgtatggcgatactgcccttcatgcgctcaatgttgttcctgaccgcgtccattccgacgccgcgtcccgaaacattggaaattttatccgcggttgaaaatccgctctggaaaataaaatttataagttcttcttcgccaagggccgcggccgcttcggcggtaaccaggcctttttcaacaattctcttgcgtattcccccggtgttgatgccctttccgtcatcggcgattgtcactttcatgtttccgctctcacggacgcaggtaatcgtcaaccggcctgtctcatcttttcccgccttgcgccgttcttcggggctttcaattccgtga

SEQ ID NO: 66322 - protein, 178 aa, Unknown
  Obtained from environmental sample
  misc_feature (1)..(178): Xaa is any amino acid
MMIRPLYLMPGRSTTVIISFVLISMTVSTKLAGMINFMLPDEMGKPIRAASDKGTEMVNVVPSPTFVCMAILPFMRSMLFLTASIPTPRPETLEILSAVENPLWKIKFISSSSPRAAAASAVTRPFSTILLRIPPVLMPFPSSAIVTFMFPLSRTQVIVNRPVSSFPALRRSSGLSIP

SEQ ID NO: 66323 - DNA, 438 bp, Unknown
  Obtained from environmental sample
  misc_feature (1)..(438): n is a, c, g, or t
atggataaaaggcgcgcgctgctttttgaggattctaaaattttcgcggacgtgctgcttcatgtcctgaacgagcaaggctatgaaacacaactggcgaaaaacggcctggagggaataaaacttgtttacagtttccttcccgaaattatcattaccgccgtggaaatgccgctctttaagggctgcgaatccgtccgttttcttaaatcccgccccgctacctggaacataccaataattatgcttaccaatgcgggagaaacaaaggataaattctggggggaacaggccggagccgacgtttacatcgagaagacacccgaaaatatagaagagttatccaaacaaatacggcgcttgttggacgaaaaccggcttattgattacgaaaggattaagaaggaagcggaaaagataaacgataattccttgtag

SEQ ID NO: 66324 - protein, 145 aa, Unknown
  Obtained from environmental sample
  DOMAIN (4)...(119): Response regulator receiver domain
  misc_feature (1)..(145): Xaa is any amino acid
MDKRRALLFEDSKIFADVLLHVLNEQGYETQLAKNGLEGIKLVYSFLPEIIITAVEMPLFKGCESVRFLKSRPATWNIPIIMLTNAGETKDKFWGEQAGADVYIEKTPENIEELSKQIRRLLDENRLIDYERIKKEAEKINDNSL

SEQ ID NO: 66325 - DNA, 1845 bp, Unknown
  Obtained from environmental sample
  misc_feature (1)..(1845): n is a, c, g, or t
ttgctgaaactgcgtgaacggttgctgagggaacagcagcttgccgattcggttttggcgtcggcttcggaggcaagcgcgcgcgaggtcgaggcccagcgtcttgcccttcagcggcttgaaaacgagaggcggcagcttgaagccgaggctcagcgtcttgcccatcagcgttcggaaaccgacaggcaacagcgtgatgcagatgcccagcgtactgccgcccaacagcgtgcggaaaacgagagacagcagcagcgggaagccgagacggcaaagcaaagagcggcggaggccgaagccgaacgtcttgcccagcaacgagccgaaaacgaaaggttacagcgtgaagccgaagccgcgagacaaaaagctgaagctgaagcgcttgcccacgcttcgcgtgaattacaggaacggatgcgggcggtgaatgacctgatttcacagggaaaggcattgcttgaaaaaaatgattttgcgggcgcggagagagcctttgcggaggcgcgttcccgtatgccgccgggcgaggataaatttgaggcgcagaaactggctgagatggcggaagcatggtatgacgcgtatgcccggaatcccaattccccctccgctccggaagctttaaacaaggcgtcggcattggcaagggaagccatccccaaagatccaagcctggccttgccccattccacattgggaaaaatcagccgtgaccagcaggactgggataaggccattgccgaattcagggaagcggcccgactggatccttccaactatatatacttttatgaactgggccggagctatttttccgcacagcgctatgttgacgcaagggggggctttgaaaacacagtcaggctaaatccccggtttgagcccggctggtacaaccttggcggaaccctgcggattttgaatcgttatgacgacgcccttgccgcgtaccgcagggcaatagcgataaaaaacgattacgccgcggcgcaccgggagcttgggcgaattctggttttaaagaaagattacaaaggcgcgatagaatcctttaccaatgcccttaaatataaccccggcgatcttgcgtccctgcgggaactgggcgccgcgcagaatgaagcgggcaattataccgccgcggaggaatcttttgccagggctttacaggcggccccctcggacggccagacaaactacaatatgtctgtggtaaaactcgcccttaagaagaacaacgaggcgctttcctatgcccgtcatgccgttgaaagcaatccttccagcgccgtatatacctataccctggggcttgcccttgaagccacaggcaacaacgacgccgccattgccgcataccaaaaatccgcttcgcttgacaaaaaatacctgcggccccgcataaacctggggaacctctatctttcccataataatgttaacgaggggatacgccatctttccgaggcttatgcaatagagccgtcaaattttgaagtgaataacaatcttggcgcggtatacgcaaaaatggagaattggccaaaaagcgttgagcattacgagcgggcgctttccgtggattcaaaaaaccccacagtgcatttgaatctggcaagagcctacaccagcgccggcgagcttgcaaaggcgcagaattcataccaggccgtactgcggcttaacccggataactgggatgccctttatgaactgggaaaaacgtacgtcagcatgggaaggccggacgaggctaaaaaactcctccgggacctgcttcagcgcaacgccgcgtacggcgcaagggcggatgccgaaaggatacttgcggggctatga

SEQ ID NO: 66326 - protein, 614 aa, Unknown
  Obtained from environmental sample
  DOMAIN (228)...(261): Tetratricopeptide repeat
  misc_feature (1)..(614): Xaa is any amino acid
MLKLRERLLREQQLADSVLASASEASAREVEAQRLALQRLENERRQLEAEAQRLAHQRSETDRQQRDADAQRTAAQQRAENERQQQREAETAKQRAAEAEAERLAQQRAENERLQREAEAARQKAEAEALAHASRELQERMRAVNDLISQGKALLEKNDFAGAERAFAEARSRMPPGEDKFEAQKLAEMAEAWYDAYARNPNSPSAPEALNKASALAREAIPKDPSLALPHSTLGKISRDQQDWDKAIAEFREAARLDPSNYIYFYELGRSYFSAQRYVDARGGFENTVRLNPRFEPGWYNLGGTLRILNRYDDALAAYRRAIAIKNDYAAAHRELGRILVLKKDYKGAIESFTNALKYNPGDLASLRELGAAQNEAGNYTAAEESFARALQAAPSDGQTNYNMSVVKLALKKNNEALSYARHAVESNPSSAVYTYTLGLALEATGNNDAAIAAYQKSASLDKKYLRPRINLGNLYLSHNNVNEGIRHLSEAYAIEPSNFEVNNNLGAVYAKMENWPKSVEHYERALSVDSKNPTVHLNLARAYTSAGELAKAQNSYQAVLRLNPDNWDALYELGKTYVSMGRPDEAKKLLRDLLQRNAAYGARADAERILAGL

SEQ ID NO: 66327 - DNA, 1047 bp, Unknown
  Obtained from environmental sample
  misc_feature (1)..(1047): n is a, c, g, or t
atgagcgacttgcagactaatccgccttctccccacaggcccatccaaagctatgtctttggagttatttttattgttctttttttggtcgtgtgcaggctttttaccccgttcttcaccgccctgctttggtctatccttttgtacatactattcagccccctgcaccgccgcctaatcaaaaacctgaactttgaaaccatgaaaggaaaaatactccgcagtttttgggcaatagtttttgccctgggaacaatggcggttatttttatccccctttccctgatggcctccattttttttcggcagattatggatctgggacgctatgcccgcgatacgctgaatcagcggcccgaatacctgcatgatctttttgaaaaaatatcggcgtttatccgtgaggtatccgccgggcaaataaaaattactgccgatgatattaacaaccagcttaaagccattatttccaatgaactgctcggtaacaagcaaatggtttttcttagcggcaatatagtgcggattatcggcactctcgcgataaatacgctggtaatggtattttcactgtttttcttttacgccgacgggccgtatctatcacggctgttactccgcgccattccgataaggacagaatacatcagcgccctcacgagaaaatttctggatattacaaggaatctttttttcggttacattatcgtggcgttactgcaggcggtagtggcgtttatcattttcaccatttttgagattaacggttctctggtgcttgcggtagtgacatttctttttgtattcattcccgtgcttggagccacggtggtatatatacccctggctatcctgaaaatcgcaagcgggaacatagcgggcggggtgattttctttattgtatcggcggtatttatttcaggcattgacaacgttctaagaccaatctttctgagagaccgtatacagcttcatccattgataatattttttgccatccttggcggcctggtcgttttggcttcaacggattctcggccgatctga

SEQ ID NO: 66328 - protein, 348 aa, Unknown
  Obtained from environmental sample
  DOMAIN (19)...(346): Domain of unknown function DUF20
  misc_feature (1)..(348): Xaa is any amino acid
MSDLQTNPPSPHRPIQSYVFGVIFIVLFLVVCRLFTPFFTALLWSILLYILFSPLHRRLIKNLNFETMKGKILRSFWAIVFALGTMAVIFIPLSLMASIFFRQIMDLGRYARDTLNQRPEYLHDLFEKISAFIREVSAGQIKITADDINNQLKAIISNELLGNKQMVFLSGNIVRIIGTLAINTLVMVFSLFFFYADGPYLSRLLLRAIPIRTEYISALTRKFLDITRNLFFGYIIVALLQAVVAFIIFTIFEINGSLVLAVVTFLFVFIPVLGATVVYIPLAILKIASGNIAGGVIFFIVSAVFISGIDNVLRPIFLRDRIQLHPLIIFFAILGGLVVLASTDSRPI

SEQ ID NO: 66329 - DNA, 471 bp, Unknown
  Obtained from environmental sample
  misc_feature (1)..(471): n is a, c, g, or t
atgcgttatctttcgctggacccgaatcctgaaggcaaaacgattccgtcttacgccgaacccaccccttcgaccggctgtgattttatcgacagttggcgggaatgggaacgctcgttaaggcttaacctcgcgaagaaccgcgccgccaagcttaaaagagacaacctttccgcagccgagccgcctttctatcctgtggaagctgtcgccgccgccgtaaaagcggtcaacgccgaaatctcccctctggaaggagagtatcttatcgacaaggcgcgctggaacgccatagaaacattggcgggcactaactattttgatcgtaacagcgtttacgcttattttctaaaacttatgttaattgagcggcgtatgtcgttcaatactgaaagaggatttactgaatataaatcattgtacgcttctattattgaaagcgagcataattccctgggggttcctaaatga

SEQ ID NO: 66330 - protein, 156 aa, Unknown
  Obtained from environmental sample
  misc_feature (1)..(156): Xaa is any amino acid
MRYLSLDPNPEGKTIPSYAEPTPSTGCDFIDSWREWERSLRLNLAKNRAAKLKRDNLSAAEPPFYPVEAVAAAVKAVNAEISPLEGEYLIDKARWNAIETLAGTNYFDRNSVYAYFLKLMLIERRMSFNTERGFTEYKSLYASIIESEHNSLGVPK

SEQ ID NO: 66331 - DNA, 519 bp, Unknown
  Obtained from environmental sample
  misc_feature (1)..(519): n is a, c, g, or t
atgatcggaacaaaaggaacggttgtagccgttaacggcaatatggtaagcgtccgttttgacggtattgtttccatgaacgaggtcggctatgtaaaggttgccgactcaaaacttaaaagcgaagttatccgggttcgcggcaatataagccaactgcaggtttttgagatcacaaaaggcattactgtcggtgatcaggtagagtttaccggagacatgctgtcggtcgaagtagggccgggattgttaggtcaagtttatgacggccttcaaaaccctctgcctcagcttgcgaaagccgccggttactttctggaaagaggcgtctacatcgacccctctgccgggagatataggctggcagtttacaccgaaggtaaaagaaggcgacaaggtagaacgcgccgacaccctcggcacagtgccggaaggttcctttacccaccgcatcatggttccgttttatctttacggctcatacaccgtttcttgggtcaagcccgaaggtacatataa

SEQ ID NO: 66332 - protein, 172 aa, Unknown
  Obtained from environmental sample
  DOMAIN (8)...(72): ATP synthase alpha/beta family, beta-barrel domain
  misc_feature (1)..(172): Xaa is any amino acid
MIGTKGTVVAVNGNMVSVRFDGIVSMNEVGYVKVADSKLKSEVIRVRGNISQLQVFEITKGITVGDQVEFTGDMLSVEVGPGLLGQVYDGLQNPLPQLAKAAGYFLERGVYIDPSAGRYRLAVYTEGKRRRQGRTRRHPRHSAGRFLYPPHHGSVLSLRLIHRFLGQARRYI

SEQ ID NO: 66333 - DNA, 1050 bp, Unknown
  Obtained from environmental sample
  misc_feature (1)..(1050): n is a, c, g, or t
atgacggccttcaaaaccctctgcctcagcttgcgaaagccgccggttactttctggaaagaggcgtctacatcgacccctctgccgggagatataggctggcagtttacaccgaaggtaaaagaaggcgacaaggtagaacgcgccgacaccctcggcacagtgccggaaggttcctttacccaccgcatcatggttccgttttatctttacggctcatacaccgtttcttgggtcaagcccgaaggtacatataaaattcacgacacaatcgcggaacttaaagacgaaaaaggaaacgccatacaggtaaaattaagtttccgctggccggtaaagcgcgccgttgactgttacgaagagaggcttaaacccgtagaccctatggttacccgcgtccgccttatcgacacattcttccccgtggcgcgcggcggaacctactgtattcccggccccttcggcgcgggcaagacggttctccagcagataacaagccgtttcgcggacgttgacatagtaatcgtcgccgcctgcggtgagcgcgccggcgaggttgttgaaaccctcaaagagttccccgaattaaaagacgaaagaacaggccgctccctcatggaacggactatcattatttgtaacacctcctccatgccggtagccgcgcgcgaagcgtcggtttacacggcggtaacccttgccgagtactacaggcagatgggcttgcacgtcctccttctcgcggactcaaccagccgctgggcgcaggctatgcgcgaaatgtccggccgccttgaggaaatccccggtgaggaagcgttccccgcctacatggaatctacaatcgccaacttctacgaaagagccggtattgtgcgcctgcgcgacggaagcctcggctccgtaacaataggcggcacggtaagcccggcgggcggtaactttgaaggaacctgtaacgcaggctacattgaaggtagtaggcgcgttccacggtctttcacgcgaaaggtcagacgcgcgcaagttccccgccattcacccccttga

SEQ ID NO: 66334 - protein, 349 aa, Unknown
  Obtained from environmental sample
  DOMAIN (131)...(335): ATP synthase alpha/beta family, nucleotide-binding domain
  misc_feature (1)..(349): Xaa is any amino acid
MTAFKTLCLSLRKPPVTFWKEASTSTPLPGDIGWQFTPKVKEGDKVERADTLGTVPEGSFTHRIMVPFYLYGSYTVSWVKPEGTYKIHDTIAELKDEKGNAIQVKLSFRWPVKRAVDCYEERLKPVDPMVTRVRLIDTFFPVARGGTYCIPGPFGAGKTVLQQITSRFADVDIVIVAACGERAGEVVETLKEFPELKDERTGRSLMERTIIICNTSSMPVAAREASVYTAVTLAEYYRQMGLHVLLLADSTSRWAQAMREMSGRLEEIPGEEAFPAYMESTIANFYERAGIVRLRDGSLGSVTIGGTVSPAGGNFEGTCNAGYIEGSRRVPRSFTRKVRRAQVPRHSPP

SEQ ID NO: 66335 - DNA, 558 bp, Unknown
  Obtained from environmental sample
  misc_feature (1)..(558): n is a, c, g, or t
ttgaaggaacctgtaacgcaggctacattgaaggtagtaggcgcgttccacggtctttcacgcgaaaggtcagacgcgcgcaagttccccgccattcacccccttgattcatggtcaaaatacaagggaattattcccgccgagaaagttgcctacgcgcacggctttatgcgccgaagttccgaagttgagcagatgatgaaggtcgtcggcgaagaaggaacaagcatagaagactacattatcttcctgaaaggcgacttaatcgacgccgtatacttccagcagaactcgttcgatgaagtagacgcggcggtaaaacccgacagacaaaaatatgtttttgccaaattgctgtttattctcggttcaaagtttacctttaccgacaaaaacgaagcgcgttcatggtttaacaaactcaggcaaaaattccttgactataacggaagccagtggaagagcgatcgttttgacgcgcttgaggctgagattgaatcgtctgtaaagagtcagtctcagggacttgataaatcagccgagaaaataatttattag

SEQ ID NO: 66336 - protein, 185 aa, Unknown
  Obtained from environmental sample
  misc_feature (1)..(185): Xaa is any amino acid
MKEPVTQATLKVVGAFHGLSRERSDARKFPAIHPLDSWSKYKGIIPAEKVAYAHGFMRRSSEVEQMMKVVGEEGTSIEDYIIFLKGDLIDAVYFQQNSFDEVDAAVKPDRQKYVFAKLLFILGSKFTFTDKNEARSWFNKLRQKFLDYNGSQWKSDRFDALEAEIESSVKSQSQGLDKSAEKIIY

SEQ ID NO: 66337 - DNA, 465 bp, Unknown
  Obtained from environmental sample
  misc_feature (1)..(465): n is a, c, g, or t
atgaacaaggtatatagcaaaattgaatcaataacaggaagcgttataaccgtcaaagctgacggcgttcgctacggagacttggcggaagtcgatacggtattcggcacatctctcgccgaggtaaacaggcttcatgacgatatcgtatcgcttcaggttttcgccggcggccgcggtatctcgacaggcgatacagtgcgctttctcggacgccccatgcaggttgcctattctgaaaaccttatgggcagggtgttcacaggttcaggcaaaccgcgcgataacggtcccgaattaacggacaataaaatcccgataggcggaccttcggtaaatcccgtccgagcgtattatcccccgcaagatgatccgtaccggtatccccatgatcgacctgttcaacaccctggtcgtctcgcagaaactgccgatcttctcggtctcgggcgagccgtacaatga

SEQ ID NO: 66338 - protein, 154 aa, Unknown
  Obtained from environmental sample
  DOMAIN (8)...(71): ATP synthase alpha/beta family, beta-barrel domain
  misc_feature (1)..(154): Xaa is any amino acid
MNKVYSKIESITGSVITVKADGVRYGDLAEVDTVFGTSLAEVNRLHDDIVSLQVFAGGRGISTGDTVRFLGRPMQVAYSENLMGRVFTGSGKPRDNGPELTDNKIPIGGPSVNPVRAYYPPQDDPYRYPHDRPVQHPGRLAETADLLGLGRAVQ

SEQ ID NO: 66339 - DNA, 699 bp, Unknown
  Obtained from environmental sample
  misc_feature (1)..(699): n is a, c, g, or t
atgtttgaggtagtactggccctcggtgatatacccggtattatcgggaaccgggtgggttacgtcgtcgccgggcattgtcgttacgcccaggaccgtaatggagccggccttttcaaagtcaacggctttttcgtagcggcttgcaagctggctgtaaagatcgccggggtagccgcggttggacggtacctgctcctggataatggaaatttccttcatcgcatcggcaaagttggtcatgtcagtaagaagcaccagtacgtccttgcccttcagcgcgaactgttcggctacggcgagggacatatcggggatcatgaggcactcgaccgtcgggtcgctggcggtatgcatgaacatgaccgtgcgcgccagggctccggcgttttcaagcgtgttcttgaaggtaaggtagtcgtcatacttaagacccatgccgccaagtacgattacgtcaacttcggcctgcatagcgatacgcgccagaagctcattgtacggctcgcccgagaccgagaagatcggcagtttctgcgagacgaccagggtgttgaacaggtcgatcatggggataccggtacggatcatcttgcgggggataatacgctcggacgggatttaccgaaggtccgcctatcgggattttattgtccgttaattcgggaccgttatcgcgcggtttgcctgaacctgtga

SEQ ID NO: 66340 - protein, 232 aa, Unknown
  Obtained from environmental sample
  misc_feature (1)..(232): Xaa is any amino acid
MFEVVLALGDIPGIIGNRVGYVVAGHCRYAQDRNGAGLFKVNGFFVAACKLAVKIAGVAAVGRYLLLDNGNFLHRIGKVGHVSKKHQYVLALQRELFGYGEGHIGDHEALDRRVAGGMHEHDRARQGSGVFKRVLEGKVVVILKTHAAKYDYVNFGLHSDTRQKLIVRLARDREDRQFLRDDQGVEQVDHGDTGTDHLAGDNTLGRDLPKVRLSGFYCPLIRDRYRAVCLNL

SEQ ID NO: 66341 - DNA, 447 bp, Unknown
  Obtained from environmental sample
  misc_feature (1)..(447): n is a, c, g, or t
gtgtgccgcctggggagtatgcccgcaagggtgaaactcaaaggaattgacgggggcccgcacaagcggtggagcatgtggtttaattcgatggtacgcgaggaaccttacctgggtttgacatgggggcggatgcgccagagatggcgcagcgtagcaatacgcgcccctgcaggtgctgcatggctgtcgtcagctcgtgccgtgaggtgttgggttaagtcccgcaacgagcgcaacccctactgccagttaccagcaggtaaagctggggactctggcggaactgccggcgacaagccggaggaaggcggggatgacgtcaagtcatcatggcccttatgtccagggctacacacgtgctacaatgggcggcacaaagcgaagcaagtccgagaggacatagcgaaccgcagaaagccgaccgtagtccggattgaagtctga

SEQ ID NO: 66342 - protein, 148 aa, Unknown
  Obtained from environmental sample
  misc_feature (1)..(148): Xaa is any amino acid
MCRLGSMPARVKLKGIDGGPHKRWSMWFNSMVREEPYLGLTWGRMRQRWRSVAIRAPAGAAWLSSARAVRCWVKSRNERNPYCQLPAGKAGDSGGTAGDKPEEGGDDVKSSWPLCPGLHTCYNGRHKAKQVREDIANRRKPTVVRIEV

SEQ ID NO: 66343 - DNA, 483 bp, Unknown
  Obtained from environmental sample
  misc_feature (1)..(483): n is a, c, g, or t
gtggctagatcacttggcttcgggtccatggcatgcgactgcgcgaacttgcgttcgcgatacgccctcttcagactcggtttccctccggctccgggactcccatcccttagcctcgccgcataccatgactcgcaggctcattctacaaaaggcacgccgtcaccgcatcgctgcggctccgacatgttgcgggtccacggtttcaggttctctttcactcccctcgccggggttcttttcgcctttccctcacggtacttctgcgctatcggtcgcgccctgtgtttagccttggatcgtggtcgacccggattccggcggggtttctcgtgccccgccgtacttaggattccgctcccaaacgttcacaatttcagatacggggctttcaccctctccggccggctttcccaaaaccgttctcttatcatggacgcccagttatcgcggtcctgcaaccccgcccaaagggcggtttag

SEQ ID NO: 66344 - protein, 160 aa, Unknown
  Obtained from environmental sample
  misc_feature (1)..(160): Xaa is any amino acid
MARSLGFGSMACDCANLRSRYALFRLGFPPAPGLPSLSLAAYHDSQAHSTKGTPSPHRCGSDMLRVHGFRFSFTPLAGVLFAFPSRYFCAIGRALCLALDRGRPGFRRGFSCPAVLRIPLPNVHNFRYGAFTLSGRLSQNRSLIMDAQLSRSCNPAQRAV

SEQ ID NO: 66345 - DNA, 486 bp, Unknown
  Obtained from environmental sample
  misc_feature (1)..(486): n is a, c, g, or t
gtgaggccccctagtccatccagtgctctacctgcgcgagcttttggcgaggctgtccctcaaggcatttcggggagagccagctatttccaagtttgtttagtctttcgctccgagccaccggtcatccctgccttttttaacagactagggttcggccctccacccggtttcacccgggcttcagcctgccggtggctagatcacttggcttcgggtccatggcatgcgactgcgcgaacttgcgttcgcgatacgccctcttcagactcggtttccctccggctccgggactcccatcccttagcctcgccgcataccatgactcgcaggctcattctacaaaaggcacgccgtcaccgcatcgctgcggctccgacatgttgcgggtccacggtttcaggttctctttcactcccctcgccggggttcttttcgcctttccctcacggtacttctgcgctatcggtcgcgccctgtgtttag

SEQ ID NO: 66346 - protein, 161 aa, Unknown
  Obtained from environmental sample
  misc_feature (1)..(161): Xaa is any amino acid
MRPPSPSSALPARAFGEAVPQGISGRASYFQVCLVFRSEPPVIPAFFNRLGFGPPPGFTRASACRWLDHLASGPWHATARTCVRDTPSSDSVSLRLRDSHPLASPHTMTRRLILQKARRHRIAAAPTCCGSTVSGSLSLPSPGFFSPFPHGTSALSVAPCV

SEQ ID NO: 66347 - DNA, 399 bp, Unknown; identical to SEQ ID NO: 53647
  Obtained from environmental sample
  misc_feature (1)..(399): n is a, c, g, or t

SEQ ID NO: 66348 - protein, 132 aa, Unknown; identical to SEQ ID NO: 53648
  Obtained from environmental sample
  misc_feature (1)..(132): Xaa is any amino acid

SEQ ID NO: 66349 - DNA, 303 bp, Unknown
  Obtained from environmental sample
  misc_feature (1)..(303): n is a, c, g, or t
gtgccaaaccttcccgtcgatgtgaactcttggggaagatcagcctgttatccccggagtaccttttatccgttaagtgacggcgcttccactcgctaccgccagatcactaagacctactttcgtacctgctcgacctgtcagtctcgcagtcaagcctccttgtgcctttacactcatacgatgatttccaaccaccgcgaggagaccttcgcgcacctccgttactctttgggaggcgaccgccccagtcaaaccgcccgcctatcactgtccgcagaccagattcatggcccacgttag

SEQ ID NO: 66350 - protein, 100 aa, Unknown
  Obtained from environmental sample
  misc_feature (1)..(100): Xaa is any amino acid
MPNLPVDVNSWGRSACYPRSTFYPLSDGASTRYRQITKTYFRTCSTCQSRSQASLCLYTHTMISNHREETFAHLRYSLGGDRPSQTARLSLSADQIHGPR

SEQ ID NO: 66351 - DNA, 438 bp, Unknown
  Obtained from environmental sample
  misc_feature (1)..(438): n is a, c, g, or t
atgcgtagacctccaacctatcaaccaggtagtctccctggtacctttaggagggttaaaccctcagggatggtttatcttgaggtgggcttcccacttagatgccttcagcggttatcccttcccgacgtagctacccggcacttgcccttggcaggacaaccggtacaccagaggtcggtccatttcggtcctctcgtactaaaaacagctcctctcaaccatccaacgcccatggcagatagggaccgaactgtctcgcgacgttctgaacccagctcacgtaccgctttaattggcgaacagccaaacccttgggacctgcttcagccccaggatgcgatgagccgacatcgaggtgccaaaccttcccgtcgatgtgaactcttggggaagatcagcctgttatccccggagtaccttttatccgttaagtga

SEQ ID NO: 66352 - protein, 145 aa, Unknown
  Obtained from environmental sample
  misc_feature (1)..(145): Xaa is any amino acid
MRRPPTYQPGSLPGTFRRVKPSGMVYLEVGFPLRCLQRLSLPDVATRHLPLAGQPVHQRSVHFGPLVLKTAPLNHPTPMADRDRTVSRRSEPSSRTALIGEQPNPWDLLQPQDAMSRHRGAKPSRRCELLGKISLLSPEYLLSVK

SEQ ID NO: 66353 - DNA, 723 bp, Unknown
  Obtained from environmental sample
  misc_feature (1)..(723): n is a, c, g, or t
atgatacgccaatgcgtcgagggaatctacaacacggttctggttaaggacatttcatggcaaagcgggatcagcgatattcccctgcttgaaaatatcgcgaaactcatgggcgaatccgcgggccgttcaatcagttcaaaaaaattaagcgtggatattgacgcgaagggaagaaaaatatcgactaacacggttgagacgtatatgcgcgccctttgttcggcgtatgttttttaccacaccgaccgctttgacatgaagacgggacgaccgcttaaaactctcggcaaatattacattgccgataccggaatcaagaatctgctgctggatcaggaaccgccggacattaccagactgcttgagaacatcgtgtacctggaactactgcgccgggactgccgggtgagccttggaaaacttggcggtgaagaggtaaattttatcgctctttttccgacttcaccgccgggcgccgtaaaacagggggccgcggctgaaaatgcggatgggaatttcgcatattttcaggttgccgcttcagtccgcgaccactctgtccttgcaaaaaaaatctctccgctggaaaagataaaaggcaacagccccaaatacattctaagcctggatgaaacgcctttccgttcaaataataaaggcattatacagcggaatttgatcgaatggcttcttgaaacaaaaagtcaggggcaaacatga

SEQ ID NO: 66354 - protein, 240 aa, Unknown
  Obtained from environmental sample
  misc_feature (1)..(240): Xaa is any amino acid
MIRQCVEGIYNTVLVKDISWQSGISDIPLLENIAKLMGESAGRSISSKKLSVDIDAKGRKISTNTVETYMRALCSAYVFYHTDRFDMKTGRPLKTLGKYYIADTGIKNLLLDQEPPDITRLLENIVYLELLRRDCRVSLGKLGGEEVNFIALFPTSPPGAVKQGAAAENADGNFAYFQVAASVRDHSVLAKKISPLEKIKGNSPKYILSLDETPFRSNNKGIIQRNLIEWLLETKSQGQT

SEQ ID NO: 66355 - DNA, 837 bp, Unknown
  Obtained from environmental sample
  misc_feature (1)..(837): n is a, c, g, or t
atgagtatcattcacgcggtattgctgggtataatccagggtttgacggagttcctgccggtttccagttccggtcatctggttttatttcagaagctgtttggtatttccgaacccgcgttgttattcgacacaatgcttcatgtgggaacgctggcggcggttgtcgcggttctttggaaggatatctgggcgatcttgcggaaacttaaccagccgcttaccttgtatttgatatttgctacagtcccaacagtaatagcggctctggttttcagaaaaccgcttgaaagggcttttgaaacagggcattttctgggttttgcctttcttatgacatcggcattgctggcagcagcggaactgctggcgaaaagaggcgcaaccaaaggcggtactgccaaaaacgctactactatgaactggctggacgcgcttatcgttggcgttatgcaggcaatcgccattatccccggcgtgtcccgttccggcgcgactctgtccggggcgctttcccgcaggctggacagggactttgccgcccgtttttctttcctgttgtcaatccccgcgattcttggcgcggtggttttccagctaaaggatttggtgaagggcgaagcggtagaggcaacggccggcgcaactgcgtccggcggcattggagcggcggctatgatcgcgggaaccatgagcgccgccgttgtcgggtttttcgccgtacggcttatgctgaaaatcgtcagggaaaaatcgctgtggggttttgccatttacaccggcgttcttgggctgcttgtgctgctggatcagtttgcgctaaagctggtgttttaa

SEQ ID NO: 66356 - protein, 278 aa, Unknown
  Obtained from environmental sample
  DOMAIN (5)...(267): Bacitracin resistance protein BacA
  misc_feature (1)..(278): Xaa is any amino acid
MSIIHAVLLGIIQGLTEFLPVSSSGHLVLFQKLFGISEPALLFDTMLHVGTLAAVVAVLWKDIWAILRKLNQPLTLYLIFATVPTVIAALVFRKPLERAFETGHFLGFAFLMTSALLAAAELLAKRGATKGGTAKNATTMNWLDALIVGVMQAIAIIPGVSRSGATLSGALSRRLDRDFAARFSFLLSIPAILGAVVFQLKDLVKGEAVEATAGATASGGIGAAAMIAGTMSAAVVGFFAVRLMLKIVREKSLWGFAIYTGVLGLLVLLDQFALKLVF

SEQ ID NO: 66357 - DNA, 2313 bp, Unknown
  Obtained from environmental sample
  misc_feature (1)..(2313): n is a, c, g, or t
atgacttctagtgaaaatctggagaaaatacttgagagccccgaatttgcgcctaatatagttgtaaaccgccttataccggcaaaagagggaatttatgcccggtttcctgaaagcttgaacgcaggaattgtaaattctttaaggaaaaggggcatagacaaactctatactcaccaaaccgaagtttacgctttagcgcaggcgggaaaaaacgcggttgttgttacgcctaccgcgtccggaaagactctttgctacaatcttccctgtttacaggcgctactagccgacgaaagcgctcgatgtctgtacctttttccaacaaaagcgctttcccaggaccagcaggctgaattaaacgaaaccgtaggcgatggcgatattggtttaaacctgaaaatcgcgacttacgacggggatacgcctgaatctttgcggatatccgcacgggatacgggcagaatcatcatttccaatcccgatatgctgcatacgggcattcttcccaatcatccaaagtggataaaattcttttcccatttgaaatatatcgtaatagacgaagctcacgcctaccgcggcgttatggggagtcatgtagccaatgtgatacgccgtcttcgccgaattgccgccttttacggcgcgaaaccgcaatttatcctctgttccgcgacaataggcaacccgaaagaattggcgcaagcgctgacaggccttcccgtggaattggttgacaataacggcgcgccgcgcggagaaaagcggataatcctttacaacccgccccttgttgacaaggtgcagggcatacgccgctcgtcggtaacggaaagccgccgctggatgattgccctcttaaaagcgggaataaaaacgatacttttcgcccactccagggtaaagaccgaagtagccgcctcctatgtaaacgaggacttaaaaaacatctttacggacaactcacgcataagggtagaggcgtaccgcggcggcttcttgcccaatgagcgccgtgaaatagagagggggctgcgcgagggcgatattcagggagttgtttcaactaacgcgctggagctggggatagacataggcgggcttgacgcctctattgtagcgggctttcccggttcttttaacagtttttggcagcagtcgggcagggcggggcgcaggggaggcacatctgtgtctgtgtttgtcgctacggtttcccctattgatcagtttattatgaacgattctgaatggtttttcagaaagagcgccgaggaagcccgcatagacccggataatccttacattttaaccgatcatgtaaagtgcgcctgctttgaactgccgtttcttgacagcgaattggaagagggttcctccctcggaagttacgcttgttacggagaaaacgcanaggacgttcttgaatatcttgaagaatcgggtgttgtgcgccatacgagcggcaaatggcattgggcggaccgttctaccccggcgaaagccgtaagccttcgcagcgcaagcgctgacaatgttgtaataattgacgtancggaaggcagaaattccgtaatcggggagatggacaggccgagcgccaaagagcttatttttgtaaacgccgtttacattcaccgcggaaggcagtatctggtagaagagcttgatattgaaaaccgcaaatgccatgtccgcgaagccgacgtaaattattttaccgacgggcttgtaaaaacggacattaaggttttatcggaggacgagaaaataaagtacagggaagcggagggcgttctttccgacgtccttgtgcgcacccaggtgacaaagttcaagaagatacgcttccgtacccacgaaaatatcggttacggagatataactcttcccgaagaggaaatgcagacccgttcccttgcccttcttttcggacaggaaaccgaatgcggcaaggcgttggaaaatattaaaggacatgaaacaggcgaagcggcggaacaaacagacgaacagaaaataggcgaagttctttacggaaccggaaacttaatccgcaatatcgctcctattttccttctctgcgacccgcgcgacataggaattgcagagcgcgtgcgggacacgcactttagggttccggctctttatatttacgacaaatatccggggggaacaggccttactgaaagccttgcagggcgcatagagccgctgttggacgccatccgcgaagctgtaagccgctgtccgtgcggaaacggctgtccttcctgcgtgggagccggcggtaataaaaaagcntgttaa

SEQ ID NO: 66358 - protein, 770 aa, Unknown
  Obtained from environmental sample
  DOMAIN (53)...(230): Type III restriction enzyme, res subunit
  misc_feature (1)..(770): Xaa is any amino acid
MTSSENLEKILESPEFAPNIVVNRLIPAKEGIYARFPESLNAGIVNSLRKRGIDKLYTHQTEVYALAQAGKNAVVVTPTASGKTLCYNLPCLQALLADESARCLYLFPTKALSQDQQAELNETVGDGDIGLNLKIATYDGDTPESLRISARDTGRIIISNPDMLHTGILPNHPKWIKFFSHLKYIVIDEAHAYRGVMGSHVANVIRRLRRIAAFYGAKPQFILCSATIGNPKELAQALTGLPVELVDNNGAPRGEKRIILYNPPLVDKVQGIRRSSVTESRRWMIALLKAGIKTILFAHSRVKTEVAASYVNEDLKNIFTDNSRIRVEAYRGGFLPNERREIERGLREGDIQGVVSTNALELGIDIGGLDASIVAGFPGSFNSFWQQSGRAGRRGGTSVSVFVATVSPIDQFIMNDSEWFFRKSAEEARIDPDNPYILTDHVKCACFELPFLDSELEEGSSLGSYACYGENAXDVLEYLEESGVVRHTSGKWHWADRSTPAKAVSLRSASADNVVIIDVXEGRNSVIGEMDRPSAKELIFVNAVYIHRGRQYLVEELDIENRKCHVREADVNYFTDGLVKTDIKVLSEDEKIKYREAEGVLSDVLVRTQVTKFKKIRFRTHENIGYGDITLPEEEMQTRSLALLFGQETECGKALENIKGHETGEAAEQTDEQKIGEVLYGTGNLIRNIAPIFLLCDPRDIGIAERVRDTHFRVPALYIYDKYPGGTGLTESLAGRIEPLLDAIREAVSRCPCGNGCPSCVGAGGNKKAC

SEQ ID NO: 66359 - DNA, 555 bp, Unknown
  Obtained from environmental sample
  misc_feature (1)..(555): n is a, c, g, or t
gtggacaaggctaatgccgaggcttcaaaaatactgtctgaagccaagaacaaggcggctcaaatagtcaaagatgcggaggcggaagctaaagccaaactcgaaaaagccgataaggactcacaggcttatgccgagcgaagcgaaaagacccttcagcaggcggctcgagacgtggtgctagctgttagccaaggcgttgaaaaggcagtgcttggggtgctagctctaaatgtggataaaaccctcacgccggagcttctgcaacagattctcctgatgctcgcaagtagctatgcaggcaaggccgcaacggtttccctgtcggaaaacgacactaagaaactcgcttcctttgtctctggcgaattccagaaaaaactgggagcaggagttgatattcaaagcgacagcggcatttttgcagggttccgtctttcttttgaaaacggcaaggttagccaggaatggactaatgctgcaatagcagatgcactttccgcaattcttcgccctgccctcgcaaaggcagtccagcaagctataaagagttga

SEQ ID NO: 66360 - protein, 184 aa, Unknown
  Obtained from environmental sample
  DOMAIN (1)...(179): ATP synthase (E/31 kDa) subunit
  misc_feature (1)..(184): Xaa is any amino acid
MDKANAEASKILSEAKNKAAQIVKDAEAEAKAKLEKADKDSQAYAERSEKTLQQAARDVVLAVSQGVEKAVLGVLALNVDKTLTPELLQQILLMLASSYAGKAATVSLSENDTKKLASFVSGEFQKKLGAGVDIQSDSGIFAGFRLSFENGKVSQEWTNAAIADALSAILRPALAKAVQQAIKS

SEQ ID NO: 66361 - DNA, 1524 bp, Unknown
  Obtained from environmental sample
  misc_feature (1)..(1524): n is a, c, g, or t
atggcaaatatcggaaaaatcataggcgtgaacagcaatttgctgcgagttcgctttgaacaacccgttgtgcaaaacgaggtggcttacgccttgttggaaagcgggacccgcttaaaaagcgaagtgattcgcgtaagaggctcggttgccgagttgcaggtgtttgaagacaccaccggcttaaaagagggtaactctgtggagtttactggcgagcttctatcggtggagcttgggcctggccttttgacccaggtgttcgacggcttgcaaaacccgcttccgcagctcgctgagcaatgcggcttcttcttgcagagaggaaagtacttggatgccctgccacgggacaagaaatgggctttcactccaaaggtaaaagttggcgacaaggtttctgcgggtgaaactctgggctctgttccagagggaatttttgagcacttgattatggtgccgtttcgttggcacgggacattcaccgttgagagcatctcgtctgctggcgattacaaggtaaccgataccatcgcgaaactcaaagaccaaaacggcaaagtgcttgaagccaagctgatgcagagttggccggtaaaacttccaattaaatgttatacggaaaggcttagacccgtagaacctttaataacaaaacagagaattatagatacattcttccccgtcaacagaggcggagtttactgcattccgggcccttttggcgcaggcaaaacagtgttgcagcagttaaccgctcgccacgcggaagttgatatagttattataaccgcttgcggcgaacgtgctggcgaagttgtggaaaccttgaaggaattccccgaacagaccgacccgcgcacgggcaagagtttgatggaacgcacgcttattatatgcaacaccagctccatgccggtagctgctcgtgaagcatctgtttatacaggtgtgacccttgcggaatactaccgccagatgggactgagcgttcttttgcttgcagattcaacaagccgttgggcacaggctctccgtgaaatgagcggacgcttggaagaaatccccggcgaagaagccttccccgcttacttggaatctgttatagccagcttttatgaacgcggtggcatagttcgtttaaagaacggaaaaacaggttccgtgaccataggtggaacggtttcgcccgcgggtggaaattttgaagaaccggtgacccaggcaacattaaaagtggttggtgcattccacgggctttccagagaacgctccgaccaacgccgcttccccgctattcacccccttgatagctggtcaaaataccacggcataatagaccgcgcaaaatcggttgaagctcatagcattttgcacaaaggcaacgacgttgggcagatgatgaaagtggttggcgaagaaggcacatctatggatgattttgtgctttacctcaaaggcgaatttttggattccgtttatctgcaacaagacgctttaaccaatagacgctcggccatctga

SEQ ID NO: 66362 - protein, 507 aa, Unknown
  Obtained from environmental sample
  DOMAIN (7)...(72): ATP synthase alpha/beta family, beta-barrel domain
  misc_feature (1)..(507): Xaa is any amino acid
MANIGKIIGVNSNLLRVRFEQPVVQNEVAYALLESGTRLKSEVIRVRGSVAELQVFEDTTGLKEGNSVEFTGELLSVELGPGLLTQVFDGLQNPLPQLAEQCGFFLQRGKYLDALPRDKKWAFTPKVKVGDKVSAGETLGSVPEGIFEHLIMVPFRWHGTFTVESISSAGDYKVTDTIAKLKDQNGKVLEAKLMQSWPVKLPIKCYTERLRPVEPLITKQRIIDTFFPVNRGGVYCIPGPFGAGKTVLQQLTARHAEVDIVIITACGERAGEVVETLKEFPEQTDPRTGKSLMERTLIICNTSSMPVAAREASVYTGVTLAEYYRQMGLSVLLLADSTSRWAQALREMSGRLEEIPGEEAFPAYLESVIASFYERGGIVRLKNGKTGSVTIGGTVSPAGGNFEEPVTQATLKVVGAFHGLSRERSDQRRFPAIHPLDSWSKYHGIIDRAKSVEAHSILHKGNDVGQMMKVVGEEGTSMDDFVLYLKGEFLDSVYLQQDALTNRRSAI

SEQ ID NO: 66363 - DNA, 411 bp, Unknown
  Obtained from environmental sample
  misc_feature (1)..(411): n is a, c, g, or t
atgctctcaacggtgaatgtcccgtgccaacgaaacggcaccataatcaagtgctcaaaaattccctctggaacagagcccagagtttcacccgcagaaaccttgtcgccaacttttacctttggagtgaaagcccatttcttgtcccgtggcagggcatccaagtactttcctctctgcaagaagaagccgcattgctcagcgagctgcggaagcgggttttgcaagccgtcgaacacctgggtcaaaaggccaggcccaagctccaccgatagaagctcgccagtaaactccacagagttaccctcttttaagccggtggtgtcttcaaacacctgcaactcggcaaccgagcctcttacgcgaatcacttcgctttttaagcgggtcccgctttccaacaaggcgtaa

SEQ ID NO: 66364 - protein, 136 aa, Unknown
  Obtained from environmental sample
  misc_feature (1)..(136): Xaa is any amino acid
MLSTVNVPCQRNGTIIKCSKIPSGTEPRVSPAETLSPTFTFGVKAHFLSRGRASKYFPLCKKKPHCSASCGSGFCKPSNTWVKRPGPSSTDRSSPVNSTELPSFKPVVSSNTCNSATEPLTRITSLFKRVPLSNKA

SEQ ID NO: 66365 - DNA, 702 bp, Unknown
  Obtained from environmental sample
  misc_feature (1)..(702): n is a, c, g, or t
atgtttctaaagcaaaacagcatactcttggcccccttggccggtattaccgaccccgtctaccgccgggtctgccgacgcttaggcgccgacgccgtggttaccgagatggtgagcgccgacgggctgcactacaagtcggagaacaccgccaaactcatggagtttgacgagtccgagagacccataggcgtgcagttcttcggatccgaccccgagcggatggccgacgccgcgcgtttcgcctacgagcgggtgaatccggatttcgtagacctgaacgccggctgccccgtcgccaaggttgtaaagaacaacgccggatcggcgctcctcaaagacgccgctctcttcggcagaattgtggaggcgatggcccgctccgtccccatccccgtcacggtgaagatacgctccggatggaacacgcacgagtggatcgacacggagttcgccaaaatagcggaggagcgcggcgccgcggcggtgacgctgcaccccaggtcgcagaaaatgatgttcaccggccgctccttctgggagcgcatagcggaggtcaaaaaagccgtatcaatacccgtaataggcaacggagacataacaaacgccgccgacgcgatgaagatgttcgcggaaacatcctgcgacgccgtgatgataggccgcggcagcctagggaatccatgggattctccgagataa

SEQ ID NO: 66366 - protein, 233 aa, Unknown
  Obtained from environmental sample
  DOMAIN (9)...(233): Dihydrouridine synthase (Dus)
  misc_feature (1)..(233): Xaa is any amino acid
MFLKQNSILLAPLAGITDPVYRRVCRRLGADAVVTEMVSADGLHYKSENTAKLMEFDESERPIGVQFFGSDPERMADAARFAYERVNPDFVDLNAGCPVAKVVKNNAGSALLKDAALFGRIVEAMARSVPIPVTVKIRSGWNTHEWIDTEFAKIAEERGAAAVTLHPRSQKMMFTGRSFWERIAEVKKAVSIPVIGNGDITNAADAMKMFAETSCDAVMIGRGSLGNPWDSPR

SEQ ID NO: 66367 - DNA, 936 bp, Unknown
  Obtained from environmental sample
  misc_feature (1)..(936): n is a, c, g, or t
ttgtaccgtttcattgacacggcgcgttcgtttatgtcaagtaaggttttatggactgcgaatgcgacgattacgggaatagccgctaatatgacgctcggagcgttagtactttccggattcggcggctgccgggagagcggccaccgttgttttgcgatggcgacggaggcggcgttgctcttcgcgacggcgcggccgtcgccggcgcagtggcttcacgcggcgcccggcggcggcgcggcgtccgtcgcgccgagggtcgtgcgtgcggtgaagcacgatccctcggcgttcacccaggggttgcttttccaagactccctcctctacgagagcaccgggcttgtgggcttttcgagcctgcgccgcatagacccgcgcagcggcgcggcgcggagcaacgtcgcggtgggcggcgactacttcgccgagggtatcgcggtcttcggcggagagctcgtcttgctcacttggaagaacggcgcggcgttgcggtacgagttcccggcgttgcgccgaggggcgctccagccgttccgatacactggcgagggctgggggcttacctgcgacgccgagcgtttcataatgagcaacggctccgacacgctgtacttccgcaacaaaaagttcgaggtcacgcgtaccgtgccggtcacgctgaacggaaggccgctggtacacttgaacgaattggagtacgcgcgcggcttcgtctacgccaatgtgtggtacaagaatttcatagcggagatatcggcggaaagcggaatagtaaagagggtaatagactgctcggagcttttgctaatagagaacccgccggtaatcgaccacgtattaaacggcatagcctatgacgaacgtacggacgagtggtaccttacgggaaagaattggaaaaatatttttgtggtgaagatacctaagtaa

SEQ ID NO: 66368 - protein, 311 aa, Unknown
  Obtained from environmental sample
  DOMAIN (54)...(311): Glutamine cyclotransferase
  misc_feature (1)..(311): Xaa is any amino acid
MYRFIDTARSFMSSKVLWTANATITGIAANMTLGALVLSGFGGCRESGHRCFAMATEAALLFATARPSPAQWLHAAPGGGAASVAPRVVRAVKHDPSAFTQGLLFQDSLLYESTGLVGFSSLRRIDPRSGAARSNVAVGGDYFAEGIAVFGGELVLLTWKNGAALRYEFPALRRGALQPFRYTGEGWGLTCDAERFIMSNGSDTLYFRNKKFEVTRTVPVTLNGRPLVHLNELEYARGFVYANVWYKNFIAEISAESGIVKRVIDCSELLLIENPPVIDHVLNGIAYDERTDEWYLTGKNWKNIFVVKIPK

SEQ ID NO: 66369 - DNA, 714 bp, Unknown
  Obtained from environmental sample
  misc_feature (1)..(714): n is a, c, g, or t
ttgttttgcgatggcgacggaggcggcgttgctcttcgcgacggcgcggccgtcgccggcgcagtggcttcacgcggcgcccggcggcggcgcggcgtccgtcgcgccgagggtcgtgcgtgcggtgaagcacgatccctcggcgttcacccaggggttgcttttccaagactccctcctctacgagagcaccgggcttgtgggcttttcgagcctgcgccgcatagacccgcgcagcggcgcggcgcggagcaacgtcgcggtgggcggcgactacttcgccgagggtatcgcggtcttcggcggagagctcgtcttgctcacttggaagaacggcgcggcgttgcggtacgagttcccggcgttgcgccgaggggcgctccagccgttccgatacactggcgagggctgggggcttacctgcgacgccgagcgtttcataatgagcaacggctccgacacgctgtacttccgcaacaaaaagttcgaggtcacgcgtaccgtgccggtcacgctgaacggaaggccgctggtacacttgaacgaattggagtacgcgcgcggcttcgtctacgccaatgtgtggtacaagaatttcatagcggagatatcggcggaaagcggaatagtaaagagggtaatagactgctcggagcttttgctaatagagaacccgccggtaatcgaccacgtattaaacggcatagcctatga

SEQ ID NO: 66370 - protein, 237 aa, Unknown
  Obtained from environmental sample
  misc_feature (1)..(237): Xaa is any amino acid
MFCDGDGGGVALRDGAAVAGAVASRGARRRRGVRRAEGRACGEARSLGVHPGVAFPRLPPLREHRACGLFEPAPHRPAQRRGAEQRRGGRRLLRRGYRGLRRRARLAHLEERRGVAVRVPGVAPRGAPAVPIHWRGLGAYLRRRAFHNEQRLRHAVLPQQKVRGHAYRAGHAERKAAGTLERIGVRARLRLRQCVVQEFHSGDIGGKRNSKEGNRLLGAFANREPAGNRPRIKRHSL

SEQ ID NO: 66371 - DNA, 1131 bp, Unknown
  Obtained from environmental sample
  misc_feature (1)..(1131): n is a, c, g, or t
gtgcaggtaatgcttgaaatatatacttcattgggaggaagtgtagagccgcttgggcccaattcattccgcttgcagcttggcaatatcaccgcttccatggtgcctgtcgagcaggcaaagaaaatcagggcgtcaatactgttcgccggcccgcttctggcgcagaccggcaaggttatgctgccgccgccaggcggggacgttattggcaggcggaggctggatacccacttcctcgctcttacggagttgggagccaaggtaaaaacaaaagatacttttacctttagcgcaaaatcgctgaaaggcgccgatattttcctggacgaggcgtctgttaccggcactgaaaacgcaataatggcggcggtgcttgcggagggaaaaactatactgaccaacgcggccggagagccgcatgtgcaggatctctgccggatgcttgttatgatgggcgcgcagatcgagggcatcggttcaaacatactgactatcaacggggtaaaaaaactttccggctgcgattttacaataggggcggactacatggaggtcggctcctttatcgggcttgccgccgtcaccggaggggatctccatatcgaagggacatgcccgcaggatctgcgccctgcaaaaatagcatttggcaagctgggtatttcctgggcgcatgagggaacaactatccatgtcccccaaaaacagccaatggaggttaactgcgatattggcggtatgattcccaaaatcgacgacgcgccctggcccggctttccccccgaccttaccagcattatcaccgttgttgccacgcaggtaaaaggaacggtgttaatccacgaaaaaatgtttgaatcgcggatgttctttgtggacaagctcatcggcatgggcgcgcggatagtgttatgcgatccccaccgcgccgtggtttccggcccggcgaagctgcacggctcggaacttaccagccccgacgtacgcgccggtatggcaatgctcatcgcggccctctgcgccgagggcaggagcgttatacgcaacgtctaccagatcgagcgcggctacgagcgcctggtagaaagattgtccagcctgggagcacttattacgaaagaaaaatga

SEQ ID NO: 66372 - protein, 376 aa, Unknown
  Obtained from environmental sample
  DOMAIN (2)...(365): EPSP synthase (3-phosphoshikimate 1-carboxyvinyltransferase)
  misc_feature (1)..(376): Xaa is any amino acid
MQVMLEIYTSLGGSVEPLGPNSFRLQLGNITASMVPVEQAKKIRASILFAGPLLAQTGKVMLPPPGGDVIGRRRLDTHFLALTELGAKVKTKDTFTFSAKSLKGADIFLDEASVTGTENAIMAAVLAEGKTILTNAAGEPHVQDLCRMLVMMGAQIEGIGSNILTINGVKKLSGCDFTIGADYMEVGSFIGLAAVTGGDLHIEGTCPQDLRPAKIAFGKLGISWAHEGTTIHVPQKQPMEVNCDIGGMIPKIDDAPWPGFPPDLTSIITVVATQVKGTVLIHEKMFESRMFFVDKLIGMGARIVLCDPHRAVVSGPAKLHGSELTSPDVRAGMAMLIAALCAEGRSVIRNVYQIERGYERLVERLSSLGALITKEK

SEQ ID NO: 66373 - DNA, 408 bp, Unknown
  Obtained from environmental sample
  misc_feature (1)..(408): n is a, c, g, or t
atgggaggcgtctattcgatttcatccggcgtgtccgtctcgccggttccgcagggcgagctttccatgcaggtgtatttcagctgcgatccaaagcgggcagaggaacttcaaaccgccgttatcgcgttattgaaccaggcggcgggcggcgttattgacaatgacacatttacaaaggccatggaagccccaaagaaagaatgggaagtctctattcagagcaacgcctacatcgcccagagttacgccaattcgtcggtactgctgaaccttccgctgtcacggctggacaagcggccaaaattgtttgacgccgtgacccaggctgacattcagagggtatgcagacagctattacaaagcgatggacccgcgatagtggtactaatgccggataacaaatga

SEQ ID NO: 66374 - protein, 135 aa, Unknown
  Obtained from environmental sample
  misc_feature (1)..(135): Xaa is any amino acid
MGGVYSISSGVSVSPVPQGELSMQVYFSCDPKRAEELQTAVIALLNQAAGGVIDNDTFTKAMEAPKKEWEVSIQSNAYIAQSYANSSVLLNLPLSRLDKRPKLFDAVTQADIQRVCRQLLQSDGPAIVVLMPDNK

SEQ ID NO: 66375 - DNA, 2421 bp, Unknown
  Obtained from environmental sample
  misc_feature (1)..(2421): n is a, c, g, or t
gtggtcgccgttattttaatggcggtttttctgtatgtctttgccgcccttcccgattccgccgtgtgggggggcctgggcaagcccagcgatccggttcccgttatggagaacctcagaaccggcgttctgcccagcggcctgcgctactttatcattgagaattctatgccagaaaaccgcgcctatcttacgctggcggtgaaggccggctccgtgcttgaagaagatgacgagcggggacttgcccattttgtcgagcacatggcttttaacggtacggaacgtttccccgaatcaaaactggtaagttaccttcgttcgctggggatgcgttttggcccggaggtaaacgcctacacttactatgaccaaaccgtgtacggcattgaagtacccgttgaaatcgacgagcagaagacaaggcgtattcccgaaaccgcgcttgccgttattgacgactggacgcgggcggttactttcgcccccgcggatgtggacgaggaacgccctgtaataatggaagaataccgcatgcggcttggcgcgtgggagaggctcaggcagaaatggctgcccgtactatttaaaggatcgccttacgcgaaccgttcgcccataggcctgccggaaattatcgaaaacgcgccggcggaacggctggaaggcttttataaaaagtggtacaaggcagacaacatggccttgatccttgtgggcgattttgacggagccgcgcttgaggcctcgttaaccgatcattttaaaattgataaaccggccgcgcctacgaaccggcctttgtttgatctgccccctccccaaaaaggaaatgtggaagtccttacccttaccgactctgaattgacctccgcctttatcaacctttattttaaacgcagccagcaggcgcggagaaacgacctttcgtattaccgcggtgaaattatcgactaccttatcgacatcatgctgggtatgcgttttgaagaggcgctcctgaaacctgaagtccctcatgtaagcgttaacgccgggatagcaagttacgcggcatcctcgcggttttatgttttgatgtccacggcaaaaacaggcagcgccgaggcaagccttgaggatttgctgaaaataaaagagacgatgttccgttacggctttaccgattcggagatggagacagcggctgaaatgctgatctctgatttgcaaaaacttgttcaggaaaaggacaagcagcattcgcaaagatacattaactcgctgactgattattatcttaaaggcggaaattacgcggatgttgagtgggaactgaacgcggtcacgcgaatgctgccccatatcaaagcaagagacattaacgcggctgtaaaaagttatttttcgtcaacagatattcaggtgtttatctttgcgccggattcggaacaggacagtctgccggacgaggcgcgtatcaggcagatgatagcggacagcggaaaaatgaaaatcgcagcgcccaggtccaaagcagtcggaagcgggcttttgtcgtccatgcccgaacgcggttcaataacttccgaatctgttgaccctgaaacagaagctgttttctggggattgagtaacggggcgcggatgatcctcaaatcgaccaaaaacaaaaatgacgagattgttatgcaggcaatggccctcggcgggacaagcagcgccgcgccggaagacgacgtatccgcaagcctcgccatagaaatgacgcaggtttccggccttggcccctggccgcgccccgagctgacaaagaaactcgcaggaaaacaggtatccctttcgcagtacgtttacagttattaccggggtttcaggggttcttccaattcaaccgatctaaaaaccttctttgagctgctgcacctcaccttcacagaccagcgcatcgacaacgaggcggtacaggccatgatggatcagtacaagacatcactcgccctcaggagagaagatccgcatgaggttttttccgatgagatcagcaggacgatctacagcggccacccgcattttaaaccgcttgaactggctgatcttcccaaggtgaatattgaaacggcgcttgcctttatccgcaagggccacaaccccgccgattatacttttgtattcacgggaaatctggaattaaaagagatgcgggaatatgccgaaacataccttgcttcaatccctcgggggaaaagctggaatacatggacggatcttaatgttatacgcccgggaaaagttgaaaatatcgtttacaaaggaaaggaagaacaaagcacggtttacatggtatggttttccaaagccccattcagcgacgaactcagcgcgacatcccaggtgttaaacgaatatcttgacataaaacttgatgatgagatcccgtga

SEQ ID NO: 66376 - protein, 806 aa, Unknown
  Obtained from environmental sample
  SIGNAL (1)...(21)
  DOMAIN (215)...(399): Peptidase M16 inactive domain
  misc_feature (1)..(806): Xaa is any amino acid
MVAVILMAVFLYVFAALPDSAVWGGLGKPSDPVPVMENLRTGVLPSGLRYFIIENSMPENRAYLTLAVKAGSVLEEDDERGLAHFVEHMAFNGTERFPESKLVSYLRSLGMRFGPEVNAYTYYDQTVYGIEVPVEIDEQKTRRIPETALAVIDDWTRAVTFAPADVDEERPVIMEEYRMRLGAWERLRQKWLPVLFKGSPYANRSPIGLPEIIENAPAERLEGFYKKWYKADNMALILVGDFDGAALEASLTDHFKIDKPAAPTNRPLFDLPPPQKGNVEVLTLTDSELTSAFINLYFKRSQQARRNDLSYYRGEIIDYLIDIMLGMRFEEALLKPEVPHVSVNAGIASYAASSRFYVLMSTAKTGSAEASLEDLLKIKETMFRYGFTDSEMETAAEMLISDLQKLVQEKDKQHSQRYINSLTDYYLKGGNYADVEWELNAVTRMLPHIKARDINAAVKSYFSSTDIQVFIFAPDSEQDSLPDEARIRQMIADSGKMKIAAPRSKAVGSGLLSSMPERGSITSESVDPETEAVFWGLSNGARMILKSTKNKNDEIVMQAMALGGTSSAAPEDDVSASLAIEMTQVSGLGPWPRPELTKKLAGKQVSLSQYVYSYYRGFRGSSNSTDLKTFFELLHLTFTDQRIDNEAVQAMMDQYKTSLALRREDPHEVFSDEISRTIYSGHPHFKPLELADLPKVNIETALAFIRKGHNPADYTFVFTGNLELKEMREYAETYLASIPRGKSWNTWTDLNVIRPGKVENIVYKGKEEQSTVYMVWFSKAPFSDELSATSQVLNEYLDIKLDDEIP

SEQ ID NO: 66377 - DNA, 1014 bp, Unknown
  Obtained from environmental sample
  misc_feature (1)..(1014): n is a, c, g, or t
atgattgttgttatcaaaaaagatgcgaacgaaaagagtcttgaaaatctgatttcctggctggaaaaccagggattacgcgttaatgtgaataagggcgtttatcaaaccgtactgggactgataggcgacacgcacagccttaactcagaacttgtaagcggtatggacattgtggagcgcgtacaacggatcagcgaaccgtacaaaaacgccaaccgcaaatttcacgcggacgataccgttgttgatatggacgggtataaaatcggcggcggtcattttcagtttatcgccggtccctgctccgtggaatcggccgaacagatctgcggaatcgcgcggaatgtcaaagaggcgggagcgaatcttctgcgcggaggagctttcaaacccaggacttctccctattcgtttcaaggacttcgcgatgaaggcatagagtttttattaaaagcgaaggaacttaccggaatgccggttgtcagtgagataatgaacgctaaccacctgcccatgttcgagcaggttgacgttattcaggttggcgcgcgcaatatgcagaattttgaactgttaaaagaacttggcaggcaggaaaagccaatcctattaaaacgcgggcttgccaatactcttgaagaacttttaatgagcgccgagtacatcatgtctggcggaaacggaaatataattttgtgtgagcgcggtattcgtacctttgaaacttcaactcgtaatacccttgatatttccgccgtgccaatgttaaagcgtcttacccatctgcccgtcattatagaccccagccacgccgcgggcgacgctgcgcttgtgtaccctttgtctatggcttcagccgcagcgggcgctgacggattgatcatcgaagtacacaacgatcccgcccatgccatgtgcgacgggccgcagtcgattacgccggacgctttcaccaacttagcgtgtgatgttcaaaaaatattagacatagtgggaaaaaattataaataa

SEQ ID NO: 66378 - protein, 337 aa, Unknown
  Obtained from environmental sample
  DOMAIN (80)...(334): DAHP synthetase I family
  misc_feature (1)..(337): Xaa is any amino acid
MIVVIKKDANEKSLENLISWLENQGLRVNVNKGVYQTVLGLIGDTHSLNSELVSGMDIVERVQRISEPYKNANRKFHADDTVVDMDGYKIGGGHFQFIAGPCSVESAEQICGIARNVKEAGANLLRGGAFKPRTSPYSFQGLRDEGIEFLLKAKELTGMPVVSEIMNANHLPMFEQVDVIQVGARNMQNFELLKELGRQEKPILLKRGLANTLEELLMSAEYIMSGGNGNIILCERGIRTFETSTRNTLDISAVPMLKRLTHLPVIIDPSHAAGDAALVYPLSMASAAAGADGLIIEVHNDPAHAMCDGPQSITPDAFTNLACDVQKILDIVGKNYK

SEQ ID NO: 66379 - DNA, 420 bp, Unknown
  Obtained from environmental sample
  misc_feature (1)..(420): n is a, c, g, or t
ttggtgaaagcgtccggcgtaatcgactgcggcccgtcgcacatggcatgggcgggatcgttgtgtacttcgatgatcaatccgtcagcgcccgctgcggctgaagccatagacaaagggtacacaagcgcagcgtcgcccgcggcgtggctggggtctataatgacgggcagatgggtaagacgctttaacattggcacggcggaaatatcaagggtattacgagttgaagtttcaaaggtacgaataccgcgctcacacaaaattatatttccgtttccgccagacatgatgtactcggcgctcattaaaagttcttcaagagtattggcaagcccgcgttttaataggattggcttttcctgcctgccaagttcttttaacagttcaaaattctgcatattgcgcgcgccaacctga

SEQ ID NO: 66380 - protein, 139 aa, Unknown
  Obtained from environmental sample
  misc_feature (1)..(139): Xaa is any amino acid
MVKASGVIDCGPSHMAWAGSLCTSMINPSAPAAAEAIDKGYTSAASPAAWLGSIMTGRWVRRFNIGTAEISRVLRVEVSKVRIPRSHKIIFPFPPDMMYSALIKSSSRVLASPRFNRIGFSCLPSSFNSSKFCILRAPT

SEQ ID NO: 66381 - DNA, 1524 bp, Unknown
  Obtained from environmental sample
  misc_feature (1)..(1524): n is a, c, g, or t
atgagcgagttagtattggtattggattttggcgggcagtataaggaattaattgctggaacggtcaggggtttgtcggtttattcggaaataaagccgggcagtatgacagttgatgaaattttaaaattaaaaccaatcggcattattctgacaggcggacctaacagcgtttatctgccggattctcccaaatgcgatcctaaaattttctcgttgggtatccctatccttggcatatgttacggaatgcatcttatgtgctatacacttggaggcgaggtcgcctccggcgacaagggcgagtacggacgcgtaactgtaacgcccgccaaaaccgcatcaaaattatttgggaataagaaagagccctttaccgccctaatgagccacagagactccgtaactcgcctgcctaagggttttcgtaaaacggcaaaaacatcggtctatatcgccgcctgcgaaaacaaaacgaaaaaactttacgccgtgcagtttcaccctgagacaaaacataccaaaggcggagaaaaaattatccgcagatttttatacgatgtatgcggcgcgacgggaaattataaacttgatgattatattaaaacgcaaataaaacagatccaaaaaaaagtcggcgataataatgttctgctcgccttatccggcggtgttgattcgtccgtatgcgcgagtcttttatccaaggctataccgggacagcttgcgtgcatctttgtcgatcacggcttaatgcggttaaatgaaggtgatgaaatagagcgagtgttttcaaaagaaaaactcagtttcatccgcgttaatgtaaaagatcgcttcctagcgagattaaaaggtgtgacagaccctgaaacaaaacgcaagatcatcggcgaagagtttatccgcgtgtttgaagaagaagccgcaaagcttggaaatattccgtatctggcgcagggaacaatctaccccgatgtcgttgaatccggaggaaagcacggagccgttatcaagagtcatcacaatgtcggcggacttcccgaaggactcaactttacaggagtcgtggaacctctgtcccggctttttaaagacgaggtgcgcgttatgggtaaaaagctgggtctgccttcatttatcgtaaaccgacagccgtttcccggacctggacttgccatccgcgtcattggcgaagttacggaagaaaagcttgatcttttacgaaaggccgacgcgattctccgcaaagaacttgacggaattaaagacagacccgatcaatatttttgtgttcttaccaatagccgttcggtaggcgttaaaggggacgacaggacttatgattacgtaatcgcggtcagggctgtaaagacggatgattttatgacttgtgaatatgccccccttccccacaaattgttagaccgtatttcatcgcggataacggcggagatatcgtccgtaagccgtgttgtttacgatattacttcaaaacctccggcgacggttgaatgggaataa

SEQ ID NO: 66382 - protein, 507 aa, Unknown
  Obtained from environmental sample
  DOMAIN (4)...(170): Peptidase C26
  misc_feature (1)..(507): Xaa is any amino acid
MSELVLVLDFGGQYKELIAGTVRGLSVYSEIKPGSMTVDEILKLKPIGIILTGGPNSVYLPDSPKCDPKIFSLGIPILGICYGMHLMCYTLGGEVASGDKGEYGRVTVTPAKTASKLFGNKKEPFTALMSHRDSVTRLPKGFRKTAKTSVYIAACENKTKKLYAVQFHPETKHTKGGEKIIRRFLYDVCGATGNYKLDDYIKTQIKQIQKKVGDNNVLLALSGGVDSSVCASLLSKAIPGQLACIFVDHGLMRLNEGDEIERVFSKEKLSFIRVNVKDRFLARLKGVTDPETKRKIIGEEFIRVFEEEAAKLGNIPYLAQGTIYPDVVESGGKHGAVIKSHHNVGGLPEGLNFTGVVEPLSRLFKDEVRVMGKKLGLPSFIVNRQPFPGPGLAIRVIGEVTEEKLDLLRKADAILRKELDGIKDRPDQYFCVLTNSRSVGVKGDDRTYDYVIAVRAVKTDDFMTCEYAPLPHKLLDRISSRITAEISSVSRVVYDITSKPPATVEWE

SEQ ID NO: 66383 - DNA, 828 bp, Unknown
  Obtained from environmental sample
  misc_feature (1)..(828): n is a, c, g, or t
atgcaaagttgcggcaatgattttatttattttgattgttttataatggaagaaattaattctcccgaatcgctgtcagtgtttttatcaaacaggcacaagggcgtaggcggcgacggcgttgtactgatattgccgccggtctccgatacggccgacgcaaaaatgaggatgttcaatcttgacggcagtgaaggcggcatgagcggaaacgctattcgctgtgtggcgaaatacctgtacgataacggacttgtaaataagcgcgatatgaagattgaaacaaaaagcggcgtgaaggaactccatctttcaacgcgtaacggtgtggtgtcgtcagtaaaagtaaacatgggatgcgccgaattgcgcccggagaaaattcccgtcaacttaacaggcgataacgcaatcgcgcgaaaagtaactattggcggcgttgaatacgaaattacctgcgtatctatgggcaatcctcatgccgtagttttctgtgaaaaaatcgatgatcttaaattaaataaaataggccctctgtttgagaatgattcgctgtttcccgaccgcgtgaatgttgaatttgtcaaagttgtggacaagaaccatttaagaatccgcttatgggaacgcggtagcggagaaactcaggcgagcggaacagccgcctgcgcttccgcggtagccgcggcgttgaacggatactgcgataaggacgcggacattaaagtacgtcttcccggcggaaatttaatcattcgttacacggatgaagttgtatatatggcaggcgattgcgtaaaagtttttgaagggacggtggagatatga

SEQ ID NO: 66384 - protein, 275 aa, Unknown
  Obtained from environmental sample
  DOMAIN (1)...(124): Diaminopimelate epimerase
  misc_feature (1)..(275): Xaa is any amino acid
MQSCGNDFIYFDCFIMEEINSPESLSVFLSNRHKGVGGDGVVLILPPVSDTADAKMRMFNLDGSEGGMSGNAIRCVAKYLYDNGLVNKRDMKIETKSGVKELHLSTRNGVVSSVKVNMGCAELRPEKIPVNLTGDNAIARKVTIGGVEYEITCVSMGNPHAVVFCEKIDDLKLNKIGPLFENDSLFPDRVNVEFVKVVDKNHLRIRLWERGSGETQASGTAACASAVAAALNGYCDKDADIKVRLPGGNLIIRYTDEVVYMAGDCVKVFEGTVEI

SEQ ID NO: 66385 - DNA, 885 bp, Unknown
  Obtained from environmental sample
  misc_feature (1)..(885): n is a, c, g, or t
atgaaaactctttattttgaatgcaatatgggcgcggcgggagatatgcttatggcagctctgttggaattgcatagcaaccccgatgattttttgaacagattgaacaacgtgggtatcacgggcacaaacataaccgctgaaccatctataaaatgcggcataaaaggaacgcacataaatgtaacaattaatggagaaaaagaagatgaacaccatcatcaccacagcaactatcacactacccagcatataatagaacatttgaatatttcagaagcagttaaaaaaaacgcacttgcagtttacaaactgatagcagaagcggaaagtgaggttcacggcgtgcctgtcaatcaaattcattttcacgaagtaggggaaatggatgcagttgccgatatcgttggattttgcatgctgatagaggaactcgcacctgaactaattttggcttctccggtgaatgtaggcagcgggcaggttaaatgcgctcacggtattttgcccgttccggctccagcaaccgctctcattttgcaaaacattcccatatacagcgatgacacaaacggcgagctatgcacaccaacaggagcggccttgttaaaacattttgcaaaagaatttcgcaaaatgcccgtaatgaaagttgctggtcttggatatggcatgggaaaaaaagattttgaaaaagcaaattgcctaagggcttatatgggcgatgccgataatacaaacgaagaagttgtagagcttgtatgcaatctagacgatataactccagaagcccttgcctttgcgcagcagttattgctagataaaggtgcgcttgatgcttacataacgccgattattatgaaaaaagngccgtgctggatttag

SEQ ID NO: 66386 - protein, 294 aa, Unknown
  Obtained from environmental sample
  DOMAIN (4)...(294): Protein of unknown function DUF111
  misc_feature (1)..(294): Xaa is any amino acid
MKTLYFECNMGAAGDMLMAALLELHSNPDDFLNRLNNVGITGTNITAEPSIKCGIKGTHINVTINGEKEDEHHHHHSNYHTTQHIIEHLNISEAVKKNALAVYKLIAEAESEVHGVPVNQIHFHEVGEMDAVADIVGFCMLIEELAPELILASPVNVGSGQVKCAHGILPVPAPATALILQNIPIYSDDTNGELCTPTGAALLKHFAKEFRKMPVMKVAGLGYGMGKKDFEKANCLRAYMGDADNTNEEVVELVCNLDDITPEALAFAQQLLLDKGALDAYITPIIMKKXPCWI

SEQ ID NO: 66387 - DNA, 759 bp, Unknown
  Obtained from environmental sample
  misc_feature (1)..(759): n is a, c, g, or t
atgaacaaatccgaaacccttaacattctacaaaaaataaaaaacggcgacatttcgcccgaagatgctttatcaaaactctgtactcaaccttttgaggatttggggtatgcaaaactggaccaccaccgcgaattgcgaaagggaattcccgaagttatatacggcactggaaaatcatcggagcaaataaagggcatagcaaaagcaatgctcgctaaagggcaggagttgatactgataaccaggctgcagtcgaaaaaagccgaagtagttcaaaaaaacttgcccttgctatactacgaaacagcacagattggagtaataggcgatatacccaaaccaaatggcataggcaagattgtagtcgccacaggcggcacaagcgatatttctgtagcggaagaagccgctatcacagcagaggttctcggcaatgaggttgttcgtatatatgatgtgggtgttgcggggatgcacaggcttctctccaagctcagcgatattatggatgcgcaggttgttatttccattgccggaatggagggagctttaaccagcgttataggcggtcttgtcgattgtccagttatcggagttcccacaagcgtaggttatggggcatcattcaagggagtagctgccttgctgtctatgctcaattcctgtgcgagcggcgtgagcgtggttaatattgataacggattcggtgctggatatttagcgagtataataaaccatcaaaagggagttaaatga

SEQ ID NO: 66388 - protein, 252 aa, Unknown
  Obtained from environmental sample
  DOMAIN (119)...(251): AIR carboxylase
  misc_feature (1)..(252): Xaa is any amino acid
MNKSETLNILQKIKNGDISPEDALSKLCTQPFEDLGYAKLDHHRELRKGIPEVIYGTGKSSEQIKGIAKAMLAKGQELILITRLQSKKAEVVQKNLPLLYYETAQIGVIGDIPKPNGIGKIVVATGGTSDISVAEEAAITAEVLGNEVVRIYDVGVAGMHRLLSKLSDIMDAQVVISIAGMEGALTSVIGGLVDCPVIGVPTSVGYGASFKGVAALLSMLNSCASGVSVVNIDNGFGAGYLASIINHQKGVK

SEQ ID NO: 66389 - DNA, 1176 bp, Unknown
  Obtained from environmental sample
  misc_feature (1)..(1176): n is a, c, g, or t
atgggcatcactaatatagcaccaaaaattttagaccctttgccaggtggcaaatatattgtgaacataatggactgggttataaattgggcaaagtcaaactctttgtggcctctcacctacggtacaagttgttgtgccatagaaatgatgagtagttcaatggctcgctacgatatagcacgttttggaagcgaggtgttcagagcaagcccaaggcaagcagatttatttattatagctggaaccataaccaaaaaaatggctccggcaatgatcactctgtgggagcaaattccaggaccaaaatatgcaatagcaatgggagcctgcaccataagcggcggtccctttgtttataacaattacagcgtggttagaggcgcagaccaactaattcctgtggacgtatttatcccaggctgcccgccaagaccagaggctttgtttcagggaattttgaaattgagagaaaaaatttgctccacggaatctagcaggaacccttggaaagagggcaaaataagagaagaagatgatggcgaccgctggacagcggcggcacaggcttgggcagagcttgagaaaatcaaagacgaagaaatgaaagcggcaagagaagagttcaaggagaaaaatccagaatataaatccacattcaaaccaaagccgctcccaaaggaagatttgccattggtggggagaatgccagaatctcaaattgggcgttcaaaagaggatattttaaaaaaggttcaggaaaaatttccctacataacagacgaaaaagaattgtccgttaaaaaagaagactgggttgaattcgcaaagtttttgcagagcgaactgaattgcgattatctaatagatgtggtggcagcagactggactgagcattttgatgttattctgcaaactatgagtttgaaagaggggcataaaattttcgcaaaatgcagcctgccaaaaccagaagcccaagaagaattgccagcaattccaagcctcaccgaaatttatcccgcagcggaatggaaagaacgcgaagtttacgatatgtttggaatttcctttgaagggcatcccgatttgcgccgcattttcacagaagacggctttgagggctggcccctccgcaaggattttaagaactcaagtatgcttgttaaaccttaa

SEQ ID NO: 66390 - protein, 391 aa, Unknown
  Obtained from environmental sample
  DOMAIN (323)...(390): Respiratory-chain NADH dehydrogenase, 30 Kd subunit
  misc_feature (1)..(391): Xaa is any amino acid
MGITNIAPKILDPLPGGKYIVNIMDWVINWAKSNSLWPLTYGTSCCAIEMMSSSMARYDIARFGSEVFRASPRQADLFIIAGTITKKMAPAMITLWEQIPGPKYAIAMGACTISGGPFVYNNYSVVRGADQLIPVDVFIPGCPPRPEALFQGILKLREKICSTESSRNPWKEGKIREEDDGDRWTAAAQAWAELEKIKDEEMKAAREEFKEKNPEYKSTFKPKPLPKEDLPLVGRMPESQIGRSKEDILKKVQEKFPYITDEKELSVKKEDWVEFAKFLQSELNCDYLIDVVAADWTEHFDVILQTMSLKEGHKIFAKCSLPKPEAQEELPAIPSLTEIYPAAEWKEREVYDMFGISFEGHPDLRRIFTEDGFEGWPLRKDFKNSSMLVKP

SEQ ID NO: 66391 - DNA, 360 bp, Unknown
  Obtained from environmental sample
  misc_feature (1)..(360): n is a, c, g, or t
ttggtaatttatatggaaagcgatattagatgggttcaaagatttgatagctataaaaaagctcttgccacgttggaacgttctgttgaagctgcggagagcagaagtttaaacgaattggaagaacagggtttaattcagagttttgaatttacatttgagctttcttggaaattgttaaaagattatttggaatcaaaaggctttaaagattttcacggctcaaaagatacatttaaattagcttttcaagaggagttaatcagcgatggcgaactatggatggaaatgatagacagcagaaatcattcttcgcatacttatgatgtaaatggattaaggtttaacaagcatacttga

SEQ ID NO: 66392 - protein, 119 aa, Unknown
  Obtained from environmental sample
  misc_feature (1)..(119): Xaa is any amino acid
MVIYMESDIRWVQRFDSYKKALATLERSVEAAESRSLNELEEQGLIQSFEFTFELSWKLLKDYLESKGFKDFHGSKDTFKLAFQEELISDGELWMEMIDSRNHSSHTYDVNGLRFNKHT

SEQ ID NO: 66393 - DNA, 384 bp, Unknown
  Obtained from environmental sample
  misc_feature (1)..(384): n is a, c, g, or t
ttgaggtttattatgctggcagtcgtgaatcagccccgtattagaattgaagcagcgatcatacccgaccctctgctttcgttcctgaaaaaatcctatggaaaggttaccatagtcgctaatcgcatagaaaccgaagaaaaagcaattcctttcaccgaaactcgcctttacaaggaaaccaaatcgaaaatgacacctggcgagaaccttatgcttttacgcaaaaacagaagcctaacccaaaaagccctagcagaaaagagcggcatagctgtagctatcataagcgatatggaacgcaaacgcattccaatttgcaagaagtctgccagaaagctagcggaagcactgggaactagtgtaggcaatttgttttggtaa

SEQ ID NO: 66394 - protein, 127 aa, Unknown
  Obtained from environmental sample
  DOMAIN (71)...(125): Helix-turn-helix
  misc_feature (1)..(127): Xaa is any amino acid
MRFIMLAVVNQPRIRIEAAIIPDPLLSFLKKSYGKVTIVANRIETEEKAIPFTETRLYKETKSKMTPGENLMLLRKNRSLTQKALAEKSGIAVAIISDMERKRIPICKKSARKLAEALGTSVGNLFW

SEQ ID NO: 66395 - DNA, 1221 bp, Unknown
  Obtained from environmental sample
  misc_feature (1)..(1221): n is a, c, g, or t
ttgtcgtacatatcaatacaggataatattatggacaaacgcacgctaaaaaaccgtatagccgaaatcgcccccgagataatcgggatccgccgcgccttacataggaggccggagctctccggcagggagtttgggacggcgcgcgtcgtccgagaaacgcttagcgcttgggggataccggcgcagtaccacttggacaagaccgccgtgagcgccaagatcgtcggcggcaagggacccaccgtcgtcttacgcgccgacatggacgccctcccgattcaggaggagaacaacatcccgttcgcctcgataaccgccggcgtcatgcacgcctgcggtcacgacatgcacaccgccatactcctcggggcggccaagatactgcatgaatcaaagggactgtggaaggggacggcgctatgcctatttcaaccgtcggaggaggcggagcccggcggggcgtttgggctcatcaaagccggagttttcccaaccaaagcggcggcggtcttcggtctgcacgtctgcgccgaccacaagtgcgggcacatcggcataaaatccggcagcgactacgccggggcgctcaactttgacgtcacgataaccggccgcggcggacacggcgccactcccgaaaagacgatagacccgataaactgcgccgcgtccgtaatcacccaactgcaaacgctgataagccgcgaaaaacccgcgacggaaccggcggtgctgaccatagggcgcgttcacgccggcacggggcgcaacatcataccggatacggccgtcttggaggggacgctgcgcgcctactccgatgaattgcaggatatgctggcgaggcgtattaaagaactggcggcggcggcggccaagtcgttcggcgcgagcgcgcgcgtcgctttcgaaaaatcatacccgtcgggttacaactccccggagttggcggataagttcagggagaggatgaagtcgtttttgggcgaggggtgcgtgattgacataaccgcgcccacgatgtactcggaggattttgctagatatcaatcaatcgtgccgggtctggacgtctatttaggcgtcctttcgcagaaccagaaacttattgaagagatactcattccgagattcttgcccgacgagggggcgatagaaaccggaatcgcggcgcatattgtgtttgcgttggacatattggagggtgaatcgatatga

SEQ ID NO: 66396 - protein, 406 aa, Unknown
  Obtained from environmental sample
  DOMAIN (185)...(297): Peptidase dimerisation domain
  misc_feature (1)..(406): Xaa is any amino acid
MSYISIQDNIMDKRTLKNRIAEIAPEIIGIRRALHRRPELSGREFGTARVVRETLSAWGIPAQYHLDKTAVSAKIVGGKGPTVVLRADMDALPIQEENNIPFASITAGVMHACGHDMHTAILLGAAKILHESKGLWKGTALCLFQPSEEAEPGGAFGLIKAGVFPTKAAAVFGLHVCADHKCGHIGIKSGSDYAGALNFDVTITGRGGHGATPEKTIDPINCAASVITQLQTLISREKPATEPAVLTIGRVHAGTGRNIIPDTAVLEGTLRAYSDELQDMLARRIKELAAAAAKSFGASARVAFEKSYPSGYNSPELADKFRERMKSFLGEGCVIDITAPTMYSEDFARYQSIVPGLDVYLGVLSQNQKLIEEILIPRFLPDEGAIETGIAAHIVFALDILEGESI

SEQ ID NO: 66397 - DNA, 1377 bp, Unknown
  Obtained from environmental sample
  misc_feature (1)..(1377): n is a, c, g, or t
atgaagatgtgggacggtcgtttttccaaagacacggacgctcttatggaagcgttcaacaactctctgcctatcgacaaggcgctagtcaaggaggatatcgccggcagtatcgcgtgggccgacgccttagaaaaagtaggcgttcttacggttgatgaacgcgttaaaactgttgacgggttgagatccatacttgacgattacgaagacggacgtatatctttcgctccgtccgatgaggatatccacatggccgttgaacgcctgcttgtggagcgtataggcgctgtcggcgagaaactgcataccggacggtcgcgcaacgaccaagtaattaccgatacgcgcctctacacgaagagggcgcttgacgaagttggggagtgtttgctcaatcttcaacaagcggtcgttgaacgcgccaaatccgatttacaagtgattatccccggctacacgcatttgcaacaggcgcagcctgtattgctctcgcattattggatgtcgctattttctatccttgaacgggaaaagagccgcgtcaatcacgccggagtttccgccgacatcctgccgcttggttcgggcgcgattgccggcagcggtttttgcgttgacagagacgccatagccgccgaacttggtttctcgtccgtgtcagccaacagcatagacatggtggcctcacgcgacttcgtcatagaggccctctcgtccttagcgtctatcggcatacacctgagccgctacgccgaggacctaatcgtctggtcgtcgagggagttcggatttgtggagttggacgacgcgtggtcaaccggatcgagcatgatgccgcagaagaagaacccggattctctggaattgattaggggcaaaagcggaaggttaatcggtaattatgtacgttgcgccgcaacgctcaaaggtctgggactagcctactataaagatttgcaagaggacaaagaaccgctcttcgatagtgttaatacgatacgtatggtaataaaagtattcacaaacgttatcgccacgcttaaagtcaaagaggatagaatcaggcagggtttagacccgttcctgctggccacggacatggctgattacttagtccgaaaaggaatgccgttccgtcaagcgcataaagtcgttggtaggttagtcgggtattgcgcggagtcgggcgttgcgcttacggatgtgccgataggaaagctaaaggaattttcggagatgtttgaggaggatgttattgatttatactcatgggaacgagccgtaaatttccgcgcagtaaagggtgggacgagcctatcgagcgtagaggcgcaaatcatagcggcggagaagatattaaggacggggaattaa

SEQ ID NO: 66398 - protein, 458 aa, Unknown
  Obtained from environmental sample
  DOMAIN (6)...(300): Lyase
  misc_feature (1)..(458): Xaa is any amino acid
MKMWDGRFSKDTDALMEAFNNSLPIDKALVKEDIAGSIAWADALEKVGVLTVDERVKTVDGLRSILDDYEDGRISFAPSDEDIHMAVERLLVERIGAVGEKLHTGRSRNDQVITDTRLYTKRALDEVGECLLNLQQAVVERAKSDLQVIIPGYTHLQQAQPVLLSHYWMSLFSILEREKSRVNHAGVSADILPLGSGAIAGSGFCVDRDAIAAELGFSSVSANSIDMVASRDFVIEALSSLASIGIHLSRYAEDLIVWSSREFGFVELDDAWSTGSSMMPQKKNPDSLELIRGKSGRLIGNYVRCAATLKGLGLAYYKDLQEDKEPLFDSVNTIRMVIKVFTNVIATLKVKEDRIRQGLDPFLLATDMADYLVRKGMPFRQAHKVVGRLVGYCAESGVALTDVPIGKLKEFSEMFEEDVIDLYSWERAVNFRAVKGGTSLSSVEAQIIAAEKILRTGN

SEQ ID NO: 66399 - DNA, 420 bp, Unknown
  Obtained from environmental sample
  misc_feature (1)..(420): n is a, c, g, or t
atgaacgaatcatcgccgctccgaatagtagagcaagccggtacggtattataccgtataatcaataacggacaggtagaaatcctcaccgtccgctccaaaaccaatcccgcgcaacgcatcttcccaaaaggccatatagagtcgggcgagacaccggaacaaaccgcggcccgcgaacttctggaagagggcggcatggtcggcgaaatcggcgcctactgcggtttgcgtgagttcgtttacaacaacaagaagtaccgcgtcaaatactacgcggcgaagtatctctccaaagacaacgatggcgaacccaacagagagccgcaatggacaagcgtggaggagacgcgggcgatactgccgtacgacaacctgaaagaggtgctcgacaagtgcgtcgagttaattagcgcttga

SEQ ID NO: 66400 - protein, 139 aa, Unknown
  Obtained from environmental sample
  DOMAIN (9)...(136): NUDIX domain
  misc_feature (1)..(139): Xaa is any amino acid
MNESSPLRIVEQAGTVLYRIINNGQVEILTVRSKTNPAQRIFPKGHIESGETPEQTAARELLEEGGMVGEIGAYCGLREFVYNNKKYRVKYYAAKYLSKDNDGEPNREPQWTSVEETRAILPYDNLKEVLDKCVELISA

SEQ ID NO: 66401 - DNA, 1578 bp, Unknown
  Obtained from environmental sample
  misc_feature (1)..(1578): n is a, c, g, or t
atgagccggccttccgtttccctaagggaatataaagccctccttccttacatagcgcgttttcgtatccagtacattttcggccttgtctgccttattgtcgtagatgccgcccagatagccattccgcagtttatccgtgcggcggtagaccttatctcaagcggtaatttccaatggcggcaaataattatgctttccctgtacatggcgggcgttatggcggttgtgtcaggcggccgttttctgtggcgttatttcataagcggctcgtcaaggcggatagaggcgcagttacgcgaaaatctttacattcatttgcaaaaactttcgtgggatttttatcagaaaaataaaataggcgaccttatggcgcgctcaattacagaccttcaagccgtgagaatgtctgtcggcatgggcatagtagcgctgtttgattttgtttttatgtcaaccgcgattttaataattatatttatacaggatgcccgttccgcgctggtttcgattattcccctgccccttgtctccgttcttatccttcttttcggaaaccttgtcggcaagaaattccgtatcgcgcgcgaagcttattcaaggttaagcgataacgcgcaggaaacatttgcaggtatcagggtaataaaatcgtttgtaaaagagtggtggttcattaaaaaatttgccgactccaatgacgattaccgtgaggcgaacatgcagcttgtgcgccttttcggttttttctttccgtttattcagttcctatcaggccttacggtgctgatcatgctcatggtaggcggcatgcgcgttatcaacggtttaatgacgccgggaagccttgtggcgatgttccgttatctgaatatgctgatctggccgcttatgggggcgggttttatggttaacatgattcaaaggggagcggtatcgcttggcagggtaaatgaaatccttaatacagagccttcgataagagagtgtgaaagaccgaagactgtaaagcctgataatactgtacctgccattgaaatttcgggtttaagatttgcgtataacgatactgacaaagaacctgcgcttgacgggataaacctttgcgtaaaccggggagagtggctgggtataatgggaaggacaggttcggggaaatccacgcttattaaaacattcactcggacgcttgatcctccgcagggcagtgttcgcgtcttcggccttgatatccgcgaatggccgcttgaagaattgcgtaaactttttgctgtaagtccgcaggacagttatcttttttcggattcaatcgcgaataatattgcctacggtttttcaggtgaggataaagacgcagtgtcaaaagctgttaaattcgcatcacttgataaggatttaactcttttccggcacggaaaagatacgcttatcggagagcgcggtttaactctttcaggcggacaaaagcagcgtacggctattgcaagagcggcgattatggacagcgagtttttaatcctggatgattctttttccgctgttgacaatgagactgagttaaaaatacttgacgcttaa

SEQ ID NO: 66402 - protein, 525 aa, Unknown
  Obtained from environmental sample
  DOMAIN (373)...(525): ABC transporter
  misc_feature (1)..(525): Xaa is any amino acid
MSRPSVSLREYKALLPYIARFRIQYIFGLVCLIVVDAAQIAIPQFIRAAVDLISSGNFQWRQIIMLSLYMAGVMAVVSGGRFLWRYFISGSSRRIEAQLRENLYIHLQKLSWDFYQKNKIGDLMARSITDLQAVRMSVGMGIVALFDFVFMSTAILIIIFIQDARSALVSIIPLPLVSVLILLFGNLVGKKFRIAREAYSRLSDNAQETFAGIRVIKSFVKEWWFIKKFADSNDDYREANMQLVRLFGFFFPFIQFLSGLTVLIMLMVGGMRVINGLMTPGSLVAMFRYLNMLIWPLMGAGFMVNMIQRGAVSLGRVNEILNTEPSIRECERPKTVKPDNTVPAIEISGLRFAYNDTDKEPALDGINLCVNRGEWLGIMGRTGSGKSTLIKTFTRTLDPPQGSVRVFGLDIREWPLEELRKLFAVSPQDSYLFSDSIANNIAYGFSGEDKDAVSKAVKFASLDKDLTLFRHGKDTLIGERGLTLSGGQKQRTAIARAAIMDSEFLILDDSFSAVDNETELKILDA

SEQ ID NO: 66403 - DNA, 894 bp, Unknown
  Obtained from environmental sample
  misc_feature (1)..(894): n is a, c, g, or t
atgctcgccggggactcaggaagcgccgcgcttgcacatgcggacgatcttatgcaaaagtacggtaaacggagcggtgtaatggcaaaggttaacgaccagtctcggattcaatacaatgaaaaagtctcgtcttatgtatcaatgaccaagtcattgttggatatagaaaaaaaactcctggtggaaagcaaaaaagatacgcctgaagccgcccttcaaaaaatgactcttgccgatgaaatgcttaatcttacttccaattatatcgcaatcaatggggtttcacaggttattttaaaatcaaaaaacgaagaagtcctgaacgatgccagaaaatcgctgtataagtccgttatttatattgaagaagcggtcagtaattatattgacgttcctttttccgattatgaagaaaaaataaatttgcttgaatcttttgacgaaaaccagcgttacagtttgataagaaaaatggggcttgcaatagaccttttggaatacgcctacggagacaattcaaaatggagatggacgtttgttgaaatggaagggcgttttaccacagtagcaaaaaatatacttgaccttcgccgcgttatagaatactcgtcttttgagtccccgtattatgactctacaatttatcatcttaggttaataaaaagattgctgtcgcagtctgcggatcgttaccgcgaaaaatacgaactttctacaggacagatgtccgattttaaaaccggtatttcatatttaggcgcgttaagaagactgcatattcttcttgcggaaaatgaagatgccgaatccctaaagaaaaaaatggcgatttggaaaacaaaattggagtctgaccataagaggcaggaagaagccaaaaaaagagcatga

SEQ ID NO: 66404 - protein, 297 aa, Unknown
  Obtained from environmental sample
  misc_feature (1)..(297): Xaa is any amino acid
MLAGDSGSAALAHADDLMQKYGKRSGVMAKVNDQSRIQYNEKVSSYVSMTKSLLDIEKKLLVESKKDTPEAALQKMTLADEMLNLTSNYIAINGVSQVILKSKNEEVLNDARKSLYKSVIYIEEAVSNYIDVPFSDYEEKINLLESFDENQRYSLIRKMGLAIDLLEYAYGDNSKWRWTFVEMEGRFTTVAKNILDLRRVIEYSSFESPYYDSTIYHLRLIKRLLSQSADRYREKYELSTGQMSDFKTGISYLGALRRLHILLAENEDAESLKKKMAIWKTKLESDHKRQEEAKKRA

SEQ ID NO: 66405 - DNA, 1650 bp, Unknown
  Obtained from environmental sample
  misc_feature (1)..(1650): n is a, c, g, or t
ttgagttttttgctgggcggaaaggcggaaaccgacgttattcgcacaggctgcgaggaagcgagcgtatcggctgttatttccgttaaaaaaaacaacgcggaagttactgactggcttaaggggcgcgacattgaatgcgaggaagacaccgttatcgtaagaagaaatatcaagacatccggcagaggatccgtctatattcagaatgttcccgtaacaaggcaggacttgtccgaatttatggcgtttttgtttgatcttcacggacagcacaaccatgaatctcttttaaaaaaagaaaaccaccgccgctaccttgaccgttttgccggaatcgaggacgaggttctcgccttttacaaggtttttcttgaactgacggacaagcgcaaatctctggaagcttctttgaaaagcgaccgcgaaagggaagaaaggcttgaaattttaaactatgccgtagacgagataaccaaagccgctgttcacgcgggagaaatccgcgaactggagaacgaactgcaaaaactttccgattttgaaaaactcgccggtcttattaccgccgcttccgataatttttttgacggggaaaattcggtgttaagccttgcgcgtaaaactaaaaattccgtggacagcgcaagcgcggttgacgcgtctttgagtgaaatctacagaaggcttgaaaacctttactacgaagccgaagatatcgcangcgattttcgcgcctacagggacaatttaacctttgatccgcgccggctggaagaggtaaatgagcgcctcgccctgctttacaaacttaaaaaaaagtacgttaaaactgaaacgcaggcctcggtcgagaccggcggggaagaagacgcgatcttgtcttacatgagcgcggccaaggcggagattgaggctctttgcggcgcggaagaaaacagggagaaacttaaaaccgaaatttccgcgttggaaaaggacattaaggcaaaggcccagagcttgcgccaaaaaagaaccgccgcggcggaaaaacttggggctttgattacgggaatcttaaaaaatctgggaatgcctaacgcgggttttcaggtgaaaattatacccaaacagcaggacgggcagacttccatcggcccctggggagccgaagacgtggaatttctcatatccgcgaacacgggcgagccgctcaaagaccttgcccgtatcgcgtcggggggggagctttcccgcgtgatgcttgcgataaagacggcgctttttcggcagggcggaacgaagcagaaggctcagacaggatgtgggcaggcacgctgtctgcgggcagtatgtctgcagaaacattggtgtcgtacgagagtgatatcgggtataggaggggaagtcgccctcaaagtgggagagtatctttctaaaatcggtaaatttaagcaaatcttttgtgtaactcatctagcgagcatcgctgttcgttccgataatcgttttaaggtggaaaaaagaacggaaggcggcagaacttacaccggtatcgggcctttgagcgcggacgtccgcgaggaaagaaatcgcgaggatgctcgccggggactcaggaagcgccgcgcttgcacatgcggacgatcttatgcaaaagtacggtaa

SEQ ID NO: 66406 - protein, 549 aa, Unknown
  Obtained from environmental sample
  misc_feature (1)..(549): Xaa is any amino acid
MSFLLGGKAETDVIRTGCEEASVSAVISVKKNNAEVTDWLKGRDIECEEDTVIVRRNIKTSGRGSVYIQNVPVTRQDLSEFMAFLFDLHGQHNHESLLKKENHRRYLDRFAGIEDEVLAFYKVFLELTDKRKSLEASLKSDREREERLEILNYAVDEITKAAVHAGEIRELENELQKLSDFEKLAGLITAASDNFFDGENSVLSLARKTKNSVDSASAVDASLSEIYRRLENLYYEAEDIAXDFRAYRDNLTFDPRRLEEVNERLALLYKLKKKYVKTETQASVETGGEEDAILSYMSAAKAEIEALCGAEENREKLKTEISALEKDIKAKAQSLRQKRTAAAEKLGALITGILKNLGMPNAGFQVKIIPKQQDGQTSIGPWGAEDVEFLISANTGEPLKDLARIASGGELSRVMLAIKTALFRQGGTKQKAQTGCGQARCLRAVCLQKHWCRTRVISGIGGEVALKVGEYLSKIGKFKQIFCVTHLASIAVRSDNRFKVEKRTEGGRTYTGIGPLSADVREERNREDARRGLRKRRACTCGRSYAKVR

SEQ ID NO: 66407 - DNA, 393 bp, Unknown
  Obtained from environmental sample
  misc_feature (1)..(393): n is a, c, g, or t
atggtatttgaaaaaggatgcatagaagatcttgcgctcctgtttaaaaaacggggcaagaaagaaatggcggcgcatttaatgaatatacacggcaatataaaagaccttatgaaacctttcaaatcccgcgattactacagccttgaacttgacggctcttattcaataaaagttgtgcttcccgccctttgccccgatgatcctgagcttgattacaataaacttgatcttgtacataacggcgccgaagccccaagcgcctacgccgaattagcgggaaaaagccctgaggaacaggaacgcgtacgttccgccctcctggcatactgccgccttgatacccttgctatggttaaaattcttgaaaaattaagggaaatgagcgattaa

SEQ ID NO: 66408 - protein, 130 aa, Unknown
  Obtained from environmental sample
  misc_feature (1)..(130): Xaa is any amino acid
MVFEKGCIEDLALLFKKRGKKEMAAHLMNIHGNIKDLMKPFKSRDYYSLELDGSYSIKVVLPALCPDDPELDYNKLDLVHNGAEAPSAYAELAGKSPEEQERVRSALLAYCRLDTLAMVKILEKLREMSD

SEQ ID NO: 66409 - DNA, 774 bp, Unknown
  Obtained from environmental sample
  misc_feature (1)..(774): n is a, c, g, or t
atggttttcatactgaattctaacgcgccaaaggaaaagatcgataaatttatctcggattgggaaagtaaaggtttttctaccatatatagcgtcgggacagagcataccgccgtctgcctgattggaaatacagccgaagttgacatggaccatattgtgcagacaaatgacattgtgtcctacggcaagcgcattacggagcagtacaaggcagtcaacaggtcggtacacgaggccagcaccattatccgcgtgggtgacgcggtcgtaggcgaagggcattttaccgtcatttccggaccttgttcggttgagagcaatgagcagatttccgaaattgcccgcagcgtaaaagaaagcggggctaagattctgcgaggcggggcgtttaagcccaggacttcgccttacgcttttcagggcaaacaggaggaagggctggaaatgctgcgagccgcgaaaaaggaaaccggtcttcccgttgtttccgaaattatgaaccagacgcagattgatctgttcgaggatatagacattgtgcaggtgggcgcgaggaatatgcagaactttgatttgctgaaagccgtcggcgctctgaaaaaaccggttttgttgaaacgcggccttgccaatacaatagaagaacttttgatgagcgccgaatatattgtctccgccggaaacagccaggtaattttgtgcgagcgcggcatacgcacattcgagaccatgacgcgcaatactctggacttgtccgccgttgtattttga

SEQ ID NO: 66410 - protein, 257 aa, Unknown
  Obtained from environmental sample
  DOMAIN (81)...(257): DAHP synthetase I family
  misc_feature (1)..(257): Xaa is any amino acid
MVFILNSNAPKEKIDKFISDWESKGFSTIYSVGTEHTAVCLIGNTAEVDMDHIVQTNDIVSYGKRITEQYKAVNRSVHEASTIIRVGDAVVGEGHFTVISGPCSVESNEQISEIARSVKESGAKILRGGAFKPRTSPYAFQGKQEEGLEMLRAAKKETGLPVVSEIMNQTQIDLFEDIDIVQVGARNMQNFDLLKAVGALKKPVLLKRGLANTIEELLMSAEYIVSAGNSQVILCERGIRTFETMTRNTLDLSAVVF

SEQ ID NO: 66411 - DNA, 360 bp, Unknown
  Obtained from environmental sample
  misc_feature (1)..(360): n is a, c, g, or t
ttgtttcaaaatacaacggcggacaagtccagagtattgcgcgtcatggtctcgaatgtgcgtatgccgcgctcgcacaaaattacctggctgtttccggcggagacaatatattcggcgctcatcaaaagttcttctattgtattggcaaggccgcgtttcaacaaaaccggttttttcagagcgccgacggctttcagcaaatcaaagttctgcatattcctcgcgcccacctgcacaatgtctatatcctcgaacagatcaatctgcgtctggttcataatttcggaaacaacgggaagaccggtttcctttttcgcggctcgcagcatttccagcccttcctcctgtttgccctga

SEQ ID NO: 66412 - protein, 119 aa, Unknown
  Obtained from environmental sample
  misc_feature (1)..(119): Xaa is any amino acid
MFQNTTADKSRVLRVMVSNVRMPRSHKITWLFPAETIYSALIKSSSIVLARPRFNKTGFFRAPTAFSKSKFCIFLAPTCTMSISSNRSICVWFIISETTGRPVSFFAARSISSPSSCLP

SEQ ID NO: 66413 - DNA, 312 bp, Unknown
  Obtained from environmental sample
  misc_feature (1)..(312): n is a, c, g, or t
gtgcgagcgcggcatacgcacattcgagaccatgacgcgcaatactctggacttgtccgccgttgtattttgaaacaaaagtcacacctgccggttatagccgatccaagccacgcgtcgggaataaggagccttgtcgcccccctggcgaaagccgcgcttgccgtcggggcggacggccttatgatagagacgcataacaatcccgccaaggcgctttgcgacggcgcccagtcgcttgatctaaagcagtttcacgcgttaatggaagaactgaaaattcgcgcggctgtagaaaaaaaggaaatgtaa

SEQ ID NO: 66414 - protein, 103 aa, Unknown
  Obtained from environmental sample
  misc_feature (1)..(103): Xaa is any amino acid
MRARHTHIRDHDAQYSGLVRRCILKQKSHLPVIADPSHASGIRSLVAPLAKAALAVGADGLMIETHNNPAKALCDGAQSLDLKQFHALMEELKIRAAVEKKEM

SEQ ID NO: 66415 - DNA, 357 bp, Unknown
  Obtained from environmental sample
  misc_feature (1)..(357): n is a, c, g, or t
atgccgcgcttgttccgctccagttcattgatgatctgcatggcgcgtatcttgggcgctccggaaagagtgcccgcgggaagaatggcgtttattgcgtccaggccggttttcccttccttaatttctccgcttacggttgagcctatatgcataacatgggagaatcgcagaatggacatgtacttctctactttaaccgttccgaatttgctaatctttcccaaatcgtttctgccgaggtctaccagcatattgtgttcggcaagttctttctcgtccgcaagcagttctttttcaagcgttgaatcctcgtcgtcgtccttgcctctgggacgagtgcctgcaagcggatag

SEQ ID NO: 66416 - protein, 118 aa, Unknown
  Obtained from environmental sample
  SIGNAL (1)...(19)
  misc_feature (1)..(118): Xaa is any amino acid
MPRLFRSSSLMICMARILGAPERVPAGRMAFIASRPVFPSLISPLTVEPICITWENRRMDMYFSTLTVPNLLIFPKSFLPRSTSILCSASSFSSASSSFSSVESSSSSLPLGRVPASG

SEQ ID NO: 66417 - DNA, 654 bp, Unknown
  Obtained from environmental sample
  misc_feature (1)..(654): n is a, c, g, or t
gtggatacaaaaccatggaacgcttattatgaacgaccagcgacattatcattattaccggatataaaaaatttgaaaataatggatttaggctgcgccggaggctggtatacaaaatatttattagacaatggagcggatgtaatagcgactgatgttaataaaaatatggtagaaataaccaaaaaacgaacccaaaataagtgtcctgtaattcaagcagatataaacaatggatttgattttataaaagattgttctctggatatagtattggcttccttagtaatacattatataaaaaatatagggaatgcgtttaatgaaattaatagaatattaaaattgaatggagaaataataatttcaacacatcatccgttaatagagtttacaaatttcaaaagagaaaactatatggctgtagaattattggaagatgaatggaatatgggtgatgaaagaataaaagttcaattttacagaagaccattaagtaaattattacaaccattaattgacagtggtttttatatagaaaatatatttgagcctgaacctacaaaagaatttaaggataaattacctgaagcctatgaacgattgttaaaaagacctgaatttttatttataaaaagtagaaagattaaataa

SEQ ID NO: 66418 - protein, 217 aa, Unknown
  Obtained from environmental sample
  DOMAIN (28)...(120): Methyltransferase domain
  misc_feature (1)..(217): Xaa is any amino acid
MDTKPWNAYYERPATLSLLPDIKNLKIMDLGCAGGWYTKYLLDNGADVIATDVNKNMVEITKKRTQNKCPVIQADINNGFDFIKDCSLDIVLASLVIHYIKNIGNAFNEINRILKLNGEIIISTHHPLIEFTNFKRENYMAVELLEDEWNMGDERIKVQFYRRPLSKLLQPLIDSGFYIENIFEPEPTKEFKDKLPEAYERLLKRPEFLFIKSRKIK

SEQ ID NO: 66419 - DNA, 444 bp, Unknown
  Obtained from environmental sample
  misc_feature (1)..(444): n is a, c, g, or t
atgttgaaagatattgaacttgttccgattacaattaaagattatcaatttgggtatgaaataaaaaaaattacattaagagaatatacagaaaagacttggggtaattgggatgaagaagaacaaatgaatttttacaaaaaagagtttgtaatagataattgttttataattaaaaataataacacaaatattggttggttaaaaattattgaaactaaagaaacaatagatattaataatatattaattcttccggaatatcagggaaaaggcattggtagtaatattattaatgatataattaaaaatggtaaagataaaaataaaacaatatgtttacaggtattaaaatgcaacgaaaatgcgaaaaaattatatataaaattagggtttaaaaaatatgatgaaacaaaaacacattttttattgaatattaaatga

SEQ ID NO: 66420 - protein, 147 aa, Unknown
  Obtained from environmental sample
  DOMAIN (56)...(133): Acetyltransferase (GNAT) family
  misc_feature (1)..(147): Xaa is any amino acid
MLKDIELVPITIKDYQFGYEIKKITLREYTEKTWGNWDEEEQMNFYKKEFVIDNCFIIKNNNTNIGWLKIIETKETIDINNILILPEYQGKGIGSNIINDIIKNGKDKNKTICLQVLKCNENAKKLYIKLGFKKYDETKTHFLLNIK

SEQ ID NO: 66421 - DNA, 1491 bp, Unknown
  Obtained from environmental sample
  misc_feature (1)..(1491): n is a, c, g, or t
ttggatttgttcggttgtcttttggaaaaaaccaaggatttgcatttgcaagaacaaatagaagtaaatgtgaaagccgctgagaaaatggcaaagctccacgatgctctgaaagactgcggctatgctggaaatcatcttgaggtttatctggtgaggctgctgttttgcctttttgcggaagatactggaattttccccaagtactcatttctggaatatatagaacgcacaaaaaaagatggttctgatttgtcggaaaaaatagcaaggctttttcaagttttgaatatctcggataaagacaggagcaaaaagacgaatttatccagcgagctgcttgatttccagtatataaatggcggtttgttttctgataatttggatattgcggactttaccgagaaaatgcggaacactttgattgagtgtgccaaatttgattggagccatatttcgcctgcaattttcggtgcgatgtttcaaggcgttgtggataaggaacacaggcgcgaacttggcgtgcattacacgagcgaagagaatatattgaaactcataaatcctctctttatggatggcttgcgagaggaatttgagagcgtaaaaaattcaccgaaaaaacttgacgagtttcacaataaaattgcagctttgaaatttttagaccctgcctgtggctgtgggaattttttgattataagctacagggaattgcggaggttggagctagagattttgaaaaagaaaatcggcaaaaacaggcaacttacgcttgatattatgtggaatttgctccgcgttaatgttgagcaattttgcggtattgagcacgaggagtttccctgcgagattgcgaaagtcggtatgtggcttatagaccaccagatgaatttggaagcatcggacttgttcggttgctattacgcccgtctgccgcttacgcaaagtgcgaagattgtgtgtgggaacgccttgcgagttgattgggagagcgttgtaccgaaaagtgagttgagttatatactgggtaatccgccgtttgtgggcgcaaggcttatgtcctctgaacaaaaggaagatatgctgaatatatttgggacaaaattcaatggggttgggaatttggattatgttactgcttggtataaaagagccgctgattatgcttttggcacagatataaaatgtgcttttgtttccacgaattcaatatcacagggcgagcaagttgctctgttatggaagccgctttttgaggaatgcaatgtgaggataaattttgcctataaatcttttatttggaacaatgaggctaaaggcaaggcggcggttcattgcgtgattgtgggattttatgctccgccttcggcggcacaccccgtcagctacgctgccaccccgctaggagcggggaatttgctaatttggttccttttttgcaaaatatccctccctagaggggaattttcaaataaaatatttttttaa

SEQ ID NO: 66422 - protein, 496 aa, Unknown
  Obtained from environmental sample
  misc_feature (1)..(496): Xaa is any amino acid
MDLFGCLLEKTKDLHLQEQIEVNVKAAEKMAKLHDALKDCGYAGNHLEVYLVRLLFCLFAEDTGIFPKYSFLEYIERTKKDGSDLSEKIARLFQVLNISDKDRSKKTNLSSELLDFQYINGGLFSDNLDIADFTEKMRNTLIECAKFDWSHISPAIFGAMFQGVVDKEHRRELGVHYTSEENILKLINPLFMDGLREEFESVKNSPKKLDEFHNKIAALKFLDPACGCGNFLIISYRELRRLELEILKKKIGKNRQLTLDIMWNLLRVNVEQFCGIEHEEFPCEIAKVGMWLIDHQMNLEASDLFGCYYARLPLTQSAKIVCGNALRVDWESVVPKSELSYILGNPPFVGARLMSSEQKEDMLNIFGTKFNGVGNLDYVTAWYKRAADYAFGTDIKCAFVSTNSISQGEQVALLWKPLFEECNVRINFAYKSFIWNNEAKGKAAVHCVIVGFYAPPSAAHPVSYAATPLGAGNLLIWFLFCKISLPRGEFSNKIFF

SEQ ID NO: 66423 - DNA, 1056 bp, Unknown
  Obtained from environmental sample
  misc_feature (1)..(1056): n is a, c, g, or t
atgaaacgcatactggtagttgacgataacctttccattctcaaacagatatccgcccatctttcgggcgaatatgaggtttcgctggcaaagtccggcctgttggccctgcagatatgcaccaaagaaaaaccggatctgattctgctggacgttgagatgccggatatggacgggtttgatgtcattaccaggttaaagcagaatccttacctgaaccggataccggttatcttccttacggccagccatagccatgaagtcgagataaaggctctggaattgggcgcaagggattttatcatgaagccggcggaaaaaagcatactgctgcacaggatagaattacatctgcgctttgcttcctatcagctccagaccgaagagaaagtcacagccctttcggacaacatcgcaatctcatttgcggagatgattgaatgccgcgatgagaacacggggggccatgtggttcgtacgtcaaaatatgttgatatactgggtaaaaatctgattaataacggcgcttttccggatgaactcaatgattcggaattgcagatgatggtgcgcgccgccccgctgcatgatatcgggaaaatcgccatcagcgaccgcgtgctgctgaaagccggccggcttgatgatattgagttttccattattaaacgtcatgcggaaataggcgcccaaattgtggaaaggatgtaccagcggatgcccgctcagaggtatctttactatggcagccttattgcaggatcccatcatgaacgttatgacggcaagggttatccaaaaggactggaaaaggataatataccgctctgcgccagaattatggcggtggcggatgtttatgacgcgcttatggaaacacgcgtttaccgcaaggggctgggccatatccaggcaagcaatatcatttttgaaaacgaatggacgcagtttgatcccaaggttgttgaagcgttcagaaatgtcgaggagcagataaatgaagtggcaaacacatggaatgaagctgcaatgaacagcggcggtatatatgcttaa

SEQ ID NO: 66424 - protein, 351 aa, Unknown
  Obtained from environmental sample
  DOMAIN (153)...(290): HD domain
  misc_feature (1)..(351): Xaa is any amino acid
MKRILVVDDNLSILKQISAHLSGEYEVSLAKSGLLALQICTKEKPDLILLDVEMPDMDGFDVITRLKQNPYLNRIPVIFLTASHSHEVEIKALELGARDFIMKPAEKSILLHRIELHLRFASYQLQTEEKVTALSDNIAISFAEMIECRDENTGGHVVRTSKYVDILGKNLINNGAFPDELNDSELQMMVRAAPLHDIGKIAISDRVLLKAGRLDDIEFSIIKRHAEIGAQIVERMYQRMPAQRYLYYGSLIAGSHHERYDGKGYPKGLEKDNIPLCARIMAVADVYDALMETRVYRKGLGHIQASNIIFENEWTQFDPKVVEAFRNVEEQINEVANTWNEAAMNSGGIYA

SEQ ID NO: 66425 - DNA, 2523 bp, Unknown
  Obtained from environmental sample
  misc_feature (1)..(2523): n is a, c, g, or t
atgcctaaaaaacccgctatcgacacctccaaactcaaccaaatagacgcctacacctaccccgaacacgaccgcgccaacattccccctattggcatggctcaatatgacactgtagccagccccgaagttaaatatgaatatgaccctcacatagacccgtccctgcaatgggcaggaaaaaaagaaggaacaacttttgaagtgccaacatcatctatccatatacacgaaagcataaaaccccataaaataatccgctccgttcagacaatcggagacgattatgccgatgaacaaggctggttattcgaatcagacgcggaaagggcaaaacgccgcaatgactctattgagttttaccaacataaaaacaaatggacaaaccgcctcatagccggagacagcctcgtcataatgaattccatgcttgaaaaagaaggaatggcaggacaggtgcaaatggtctacatagacccgccctatggcataaaatacggctccaatttccagccctttgtgaataagcgggacgtaaaagacaaaaaagacgaagacctgacaacggaaccagaaatgataaaagcgttccgtgatacatgggaattgggcatacattcgtatttaacatatttgcgggacaggcttttgcttgcaaaggaattactatcagataccggtagcgtttttgtacagatcaatgatgaaaatatgcatttagtacgtaatttatgtgatgaagtatttggcgttgagaattttattgtaaccttaattgttaaaaaaaaaggtggtactactccaacagaccctgtaaatgattttattctttgggtaagtaaagataaaaataagcttaaattacatcaactttacgaaccaagaaaaaatcctggtcgttcatcaaaattcacaacgattattatgccggatggtcaacggaaaaatatttcatcacttagtgaaaaacagatagatgaactatgtgaaaacggaggacgttttgccagagtagattggcctgttgtaagccaagacccatcatcacgtagtattgattttatatggcaaggtaaaaactataaatgtgctgataatagacattggacattttcacctgatgttcaaatgataagacttgcggaagcaaatcgcttaaaccttgacgctaatagaatttcgggtattgttttttgggatgattgggcttttgaatcacgttcaaatttatgggatgataccggagctcaacaagacttaatatatgttgttcaaactgctacaaaaccaatccagcgctgtctcctcatgaccaccgaccccggcgacttggtactcgacatcacttgcggaagcggaaccaccgcctacgttgccgaacaatggggacgccgctgggtaacctgcgacacttcccgcattgccatcacccttgcaaaaaaacgcctaatgaccgcgacatttgattattacaaactggcgcaccctgaacagggagtatcaagcggctttgtgtataaaacagtcccacacatcacactcaaatccatagcaaataacgaaccgcctgaacaggaaacgctctacgaccagccggaaatcgaaaaaagaaaagtccgcatttcaggaccctttaccgtggaagcccttcccgctccggttgtaaaatcactcgacgatgatactcaccccgctccgtttttccatgaaaacgccgctaaaaaacaatccgactggatgcaggaattaaaagcgtcaggcatattagggcggcagggagaaaaaattcaattctccagagtagaaccattggaaggaacaaaatttctccacgcggaagccgagacaaaagaaacagacagaaaaaaagccgttatttgttttgcgggcgaaacccggccactcgatattcgcatggttacccaagcgttaaatgaggcggaaaccataaggccgaaacccgtttacatcgttttcgccgctttccaatttgacccaacagcggctaaacatattgacgatactaaatggcccggagtaactttgttaaaagtacaaatgaaccccgaccttatgaccgccgaccttaaaaagaattcatcctcaagccaaagtttctggcttgtcggacagcccgatgtagagcttatccatatcgaaaaaggagctgacaaaggcaagtataaaatcaaagtaaaaggctttgactattacgatataaaacaaggaatagtcaattcaggcggaaccgataaaatcgccatgtggatgcttgataccgattatgacggtatgtccatagaacccaaacaggtatttttcccgatggaagggaaaaacgaaggttgggataaactggcaaaaaccttaaaagcggaaatcaaccctgtccttatagaaaaatacaggggtactgaattcctgccatttacaatcaaagataatacccaaatagccgtcaagatagttgatgacaggggaattgaaagccttaaagtaatttcggtaggcgcaaatggctga

SEQ ID NO: 66426 - protein, 840 aa, Unknown
  Obtained from environmental sample
  DOMAIN (153)...(481): DNA methylase
  misc_feature (1)..(840): Xaa is any amino acid
MPKKPAIDTSKLNQIDAYTYPEHDRANIPPIGMAQYDTVASPEVKYEYDPHIDPSLQWAGKKEGTTFEVPTSSIHIHESIKPHKIIRSVQTIGDDYADEQGWLFESDAERAKRRNDSIEFYQHKNKWTNRLIAGDSLVIMNSMLEKEGMAGQVQMVYIDPPYGIKYGSNFQPFVNKRDVKDKKDEDLTTEPEMIKAFRDTWELGIHSYLTYLRDRLLLAKELLSDTGSVFVQINDENMHLVRNLCDEVFGVENFIVTLIVKKKGGTTPTDPVNDFILWVSKDKNKLKLHQLYEPRKNPGRSSKFTTIIMPDGQRKNISSLSEKQIDELCENGGRFARVDWPVVSQDPSSRSIDFIWQGKNYKCADNRHWTFSPDVQMIRLAEANRLNLDANRISGIVFWDDWAFESRSNLWDDTGAQQDLIYVVQTATKPIQRCLLMTTDPGDLVLDITCGSGTTAYVAEQWGRRWVTCDTSRIAITLAKKRLMTATFDYYKLAHPEQGVSSGFVYKTVPHITLKSIANNEPPEQETLYDQPEIEKRKVRISGPFTVEALPAPVVKSLDDDTHPAPFFHENAAKKQSDWMQELKASGILGRQGEKIQFSRVEPLEGTKFLHAEAETKETDRKKAVICFAGETRPLDIRMVTQALNEAETIRPKPVYIVFAAFQFDPTAAKHIDDTKWPGVTLLKVQMNPDLMTADLKKNSSSSQSFWLVGQPDVELIHIEKGADKGKYKIKVKGFDYYDIKQGIVNSGGTDKIAMWMLDTDYDGMSIEPKQVFFPMEGKNEGWDKLAKTLKAEINPVLIEKYRGTEFLPFTIKDNTQIAVKIVDDRGIESLKVISVGANG

SEQ ID NO: 66427 - DNA, 414 bp, Unknown
  Obtained from environmental sample
  misc_feature (1)..(414): n is a, c, g, or t
gtgacatctggggataccaaccccaatatgatgaaatgcgtttcaatccacacacccgcgcggggtgtgaccccagttattccagagaagtctataaggtacaaagtttcaatccacacacccgcgcggggtgtgaccaacaaaagaacactacatccggatggacgcaactgtttcaatccacacacccgcgcggggtgtgaccatttccttctggcatctcggacgacatttcagcgtttcaatccacacacccgcgcggggtgtgacatcttattaataggaggtctcaaaatgagatcaagtttcaatccacacacccgcgcggggtgtgacacgttccccgattttgacgcttttgtcagaaccgttgtttcaatccacacacccgcgcggggtgtgacaaggcgttga

SEQ ID NO: 66428 - protein, 137 aa, Unknown
  Obtained from environmental sample
  misc_feature (1)..(137): Xaa is any amino acid
MTSGDTNPNMMKCVSIHTPARGVTPVIPEKSIRYKVSIHTPARGVTNKRTLHPDGRNCFNPHTRAGCDHFLLASRTTFQRFNPHTRAGCDILLIGGLKMRSSFNPHTRAGCDTFPDFDAFVRTVVSIHTPARGVTRR

SEQ ID NO: 66429 - DNA, 327 bp, Unknown
  Obtained from environmental sample
  misc_feature (1)..(327): n is a, c, g, or t
ttgacaatattgcgcatcttttcgcctgtagtttcaatccacacacccgcgcggggtgtgactcggtataacgtcaaggctgttctttccaagccctgtttcaatccacacacccgcgcggggtgtgacatctggggataccaaccccaatatgatgaaatgcgtttcaatccacacacccgcgcggggtgtgaccccagttattccagagaagtctataaggtacaaagtttcaatccacacacccgcgcggggtgtgaccaacaaaagaacactacatccggatggacgcaactgtttcaatccacacacccgcgcggggtgtga

SEQ ID NO: 66430 - protein, 108 aa, Unknown
  Obtained from environmental sample
  misc_feature (1)..(108): Xaa is any amino acid
MTILRIFSPVVSIHTPARGVTRYNVKAVLSKPCFNPHTRAGCDIWGYQPQYDEMRFNPHTRAGCDPSYSREVYKVQSFNPHTRAGCDQQKNTTSGWTQLFQSTHPRGV

SEQ ID NO: 66431 - DNA, 1071 bp, Unknown
  Obtained from environmental sample
  misc_feature (1)..(1071): n is a, c, g, or t
gtgccgtttaagcgggattccgtggcggtcttgcttgaccgcgtttacgcaaactatgccagcctctttaagcccctggacaaaacgccccgccacagcctgttaaaagttttcgccgcggtcgacgccggtatacttcaccagaaccttggcgatttggatttcctcgccctgcagctgtttcccgacaccgccgaaggcggctacctgcggcagcactggtccagcagggtaacgccgctatacgcaattgcatcaagcggcgaagctttgctaaacgggctgccgaacaagcctgtccctgccggccttgtttttgcggccgcgtcaggagagcggtactataccgaaaaagcatacaagataggggccgacggcactgccgcggtaacgctcaaatcccagggaacaggtcttatcaccaaccttgccccaggcgaggaattgtcaatcgtttcttcaaagcctgccggtatcgaatcgaaagccatagttttggatgaaggtataaaagggggagcggacgcggaaagcgatcttgagtatctttcccgcgttttgctgtggctccgcaaccccgtgcgctacgggaaaaccggccacttcgccgcatgggcgcgcgacgcaagcccggaagtgtccaacgcatgggagtataaaaacttcggcgtgttcggcgccttaatgatacaggtcgtaagcggcaatcagttaaacggagtatttccggtcgacaatattgcggaagtaacaaattacatcaacgaagaagccccgcctgttatttttactgtccggacgccggaaatcattgaattgaatcccgtattgtcgctgctgcccttggaagacacgcaggcaaacagggaaatggcggtaagccgtatgaaagcttttttacagcttgtagcgatgcccggcgtgcgggttacggcgggggccctccggagcgcgataattgacggcgttgcaataaccaatgcaacggtaaagctcaacggcgatgcggcgggcatcgtcggcacaaccattttgcagtacccctaccttggggaggtgtcatgggagtag

SEQ ID NO: 66432 - protein, 356 aa, Unknown
  Obtained from environmental sample
  DOMAIN (66)...(318): Baseplate J-like protein
  misc_feature (1)..(356): Xaa is any amino acid
MPFKRDSVAVLLDRVYANYASLFKPLDKTPRHSLLKVFAAVDAGILHQNLGDLDFLALQLFPDTAEGGYLRQHWSSRVTPLYAIASSGEALLNGLPNKPVPAGLVFAAASGERYYTEKAYKIGADGTAAVTLKSQGTGLITNLAPGEELSIVSSKPAGIESKAIVLDEGIKGGADAESDLEYLSRVLLWLRNPVRYGKTGHFAAWARDASPEVSNAWEYKNFGVFGALMIQVVSGNQLNGVFPVDNIAEVTNYINEEAPPVIFTVRTPEIIELNPVLSLLPLEDTQANREMAVSRMKAFLQLVAMPGVRVTAGALRSAIIDGVAITNATVKLNGDAAGIVGTTILQYPYLGEVSWE

SEQ ID NO: 66433 - DNA, 333 bp, Unknown
  Obtained from environmental sample
  misc_feature (1)..(333): n is a, c, g, or t
ttggatacagtgcgcatagagcaatgggatgacacccgcgaattggcccttatgagcataggaaccgacaaaggcacgtggtgggccgatccgaacttcggcagcgaattgtggctgctgcggaaaaacggcaaagtggacggccagaccgcgggaacccttagaaggatggtgcttgagagcctgcaatggattgtccagggctcccttgccagaaaaatcgactgcactgccgagcgtacaggcaaaaatgaaatccgctatagcgtagttattttccgccctaacgggaacagcgtccccccgataacggaggtatggcgtgccgtttaa

SEQ ID NO: 66434 - protein, 110 aa, Unknown
  Obtained from environmental sample
  DOMAIN (10)...(107): Phage protein GP46
  misc_feature (1)..(110): Xaa is any amino acid
MDTVRIEQWDDTRELALMSIGTDKGTWWADPNFGSELWLLRKNGKVDGQTAGTLRRMVLESLQWIVQGSLARKIDCTAERTGKNEIRYSVVIFRPNGNSVPPITEVWRAV

SEQ ID NO: 66435 - DNA, 339 bp, Unknown
  Obtained from environmental sample
  misc_feature (1)..(339): n is a, c, g, or t
atgccggcagttacaaggcagggcgatacttgtacagggcacacttgttttccccctagggtaagtaccgggggaagcgggaacgtttttataaacggaataccggcgcaccgccagggcgacggctgggtgccgcatacctgcaccgatcccaaaacgccgcatgggacgcacgcgggcactcttgccgccggaagctcgagcgttttcgtaaacgggcaggcgcttggcagggtcggcgatcccgtgactgcggatccgccgtggcgtcaggcagcggaaatgtttttgccggagggtaatttttttggatacagtgcgcatagagcaatgggatga

SEQ ID NO: 66436 - protein, 112 aa, Unknown
  Obtained from environmental sample
  misc_feature (1)..(112): Xaa is any amino acid
MPAVTRQGDTCTGHTCFPPRVSTGGSGNVFINGIPAHRQGDGWVPHTCTDPKTPHGTHAGTLAAGSSSVFVNGQALGRVGDPVTADPPWRQAAEMFLPEGNFFGYSAHRAMG

SEQ ID NO: 66437 - DNA, 489 bp, Unknown
  Obtained from environmental sample
  misc_feature (1)..(489): n is a, c, g, or t
atggggcgcatattggacgctaatgtcaattccaaaaaacgcaaggatgaccgcgttccgttaactcccgacaaccttcgcaaattaaatatgacatcaactgaaacggtagtttttatagagaacgtcccccgcagatgtatattaagagacctttctttttcagggtcaaaagtaataatgctcggcgttcccaaatttcttctcgataaggaaggctctctgcgtttggattttaacgatccaagaatgtcatatacgattaagggaaaatttatccgcgccgaggcggtagaaggcaaaaaagaaatggtcgctctcggcataaactttgaagaaaactcggttcccatgggatttaaaatacgccttaatgatatgatcacgtcggtacgcgccgatctcataaccggcgcagaagcccatgccgctcccgctcccgctccggcggcgcacgctcccgcggcacagcgcagcgaacccaaatga

SEQ ID NO: 66438 - protein, 162 aa, Unknown
  Obtained from environmental sample
  misc_feature (1)..(162): Xaa is any amino acid
MGRILDANVNSKKRKDDRVPLTPDNLRKLNMTSTETVVFIENVPRRCILRDLSFSGSKVIMLGVPKFLLDKEGSLRLDFNDPRMSYTIKGKFIRAEAVEGKKEMVALGINFEENSVPMGFKIRLNDMITSVRADLITGAEAHAAPAPAPAAHAPAAQRSEPK

SEQ ID NO: 66439 - DNA, 1563 bp, Unknown
  Obtained from environmental sample
  misc_feature (1)..(1563): n is a, c, g, or t
ttgcgtattcaaaaaaagatacaaagagaaataaacgagaaaatagaaaaatcacagcgtgattatttcttaaaagaagaacttaaagcgataaaaaccgaattaggcatgacgacggacgcaaaaagttccgaccatcagcgttttaaggaaaaatttgacgcttttaagttcgagggcgaagtaaaagaagttgtcgaacaggaaatggaaaaattttcgcttatggagcctaattccgcagaatttaccgttacacgcaactacttggacgtaattgccgctctcccttggaatgatcccgctcccgaagaatttgagcttaaaaaagcgcaggagattttggaagaagatcattacggacttaaagatgtaaaattgcgaatagttgaatatttagcggtgcgaaaactgcgtaaagatacaaaaggctctattgtctgccttgtaggtccgcccggagtgggaaaaacttccgttggtaaatcaatcgcaagggcgcttggcaaacaatttttccgcttttctgtgggcggaatgagggatgaagctgaaattaaggggcacaggcgcacatatatcggagcgatgccggggaaaattattcagggactgaaaattgttaaaaccaaagaccctgtttttatgatagatgaaatcgataaaatgggagcgagttttcagggcgatcccgcaagcgctcttttggaagtgcttgatcccgaacaaaacagttcttttagagaccattaccttgatttgccctttgatatttccaatgtgttttttattgttacggcgaatacattggatacaatacccgttccgttaatggatcgtatggaaattattcagcttcccggttacatcgacactgaaaaactggaaatcgctaaccgttatcttttgccgaagagtcttgaaaaaaacggacttaaaaagaatcaagttaaatacacaaaagacagtttgttgcatatagcgaattgttacgcgcgggaggcgggtgttcgcaactttgaaaaaaatctcgacaagatacaccgcaaattggctaaacaaatcgtagacgcacaggaaaaaaacgaagaaaacactttgcgttttaacattgataaaaaactgatagaaaaacatttaggcaaacctattttccgcgaggacgacattaaaacagcggataaacccggtatgtcggtgggtcttgcctggacaagcatgggcggagacacgcttgtaattgaagcgacatcgcttcccggcaaagagggaataacgctgacaggcaaaatgggtgacacaatgaaagaaagcgccgaaatcgccatgactgtcgcgcgcaaaatggcggtggaaaaatacaacgtagaaaaagaatggtttgataaaaaccatattcatttgcacataccggaaggcgcgacgcccaaagacggtccttcagccggcattacaatggcagtggcgctactttcgcttatgagaaataaagtaatcacgcacaagctggtaatgacaggcgaactttcgctgacaggtcatgtactgccaatcggcggctaa

SEQ ID NO: 66440 - protein, 520 aa, Unknown
  Obtained from environmental sample
  DOMAIN (147)...(283): ATPase family associated with various cellular activities (AAA)
  misc_feature (1)..(520): Xaa is any amino acid
MRIQKKIQREINEKIEKSQRDYFLKEELKAIKTELGMTTDAKSSDHQRFKEKFDAFKFEGEVKEVVEQEMEKFSLMEPNSAEFTVTRNYLDVIAALPWNDPAPEEFELKKAQEILEEDHYGLKDVKLRIVEYLAVRKLRKDTKGSIVCLVGPPGVGKTSVGKSIARALGKQFFRFSVGGMRDEAEIKGHRRTYIGAMPGKIIQGLKIVKTKDPVFMIDEIDKMGASFQGDPASALLEVLDPEQNSSFRDHYLDLPFDISNVFFIVTANTLDTIPVPLMDRMEIIQLPGYIDTEKLEIANRYLLPKSLEKNGLKKNQVKYTKDSLLHIANCYAREAGVRNFEKNLDKIHRKLAKQIVDAQEKNEENTLRFNIDKKLIEKHLGKPIFREDDIKTADKPGMSVGLAWTSMGGDTLVIEATSLPGKEGITLTGKMGDTMKESAEIAMTVARKMAVEKYNVEKEWFDKNHIHLHIPEGATPKDGPSAGITMAVALLSLMRNKVITHKLVMTGELSLTGHVLPIGG

SEQ ID NO: 66441 - DNA, 561 bp, Unknown
  Obtained from environmental sample
  misc_feature (1)..(561): n is a, c, g, or t
atgattggcaaccccacagacgtgagagtcgtggaagacgctaatgcgggcgacgggcttatcggccttgtcatgctcttgaatgaaactgatacgccctcaattacagatttatacaccgtggggacggtcgctaaaatagtaaaaaaaatcaatctgccggatggcggcgttaatatttttatttctacattaaaacgttttgttgtaaaaaagacgcttcacccttctaacccgattgtcgccgcggttgagtatcttgaggaagaggaagacaatacaagggaagtaaaggcccttacccgcgctctcatttccgagatgaaacagataagcgaaaataatccgctgttttccgaggaaatgcggcttaacatgatcaatattgatcatccgggaaaaatagcggactttatagcgagcatactaaacattgacaaagcggaacagcaaaaaattcttgaaatactgaatgtgcggaagcgaatggaacaggttttggtttttataaaaaagaacaggaacttttgcgtattcaaaaaaagatacaaagagaaataa

SEQ ID NO: 66442 - protein, 186 aa, Unknown
  Obtained from environmental sample
  DOMAIN (1)...(172): ATP-dependent protease La (LON) domain
  misc_feature (1)..(186): Xaa is any amino acid
MIGNPTDVRVVEDANAGDGLIGLVMLLNETDTPSITDLYTVGTVAKIVKKINLPDGGVNIFISTLKRFVVKKTLHPSNPIVAAVEYLEEEEDNTREVKALTRALISEMKQISENNPLFSEEMRLNMINIDHPGKIADFIASILNIDKAEQQKILEILNVRKRMEQVLVFIKKNRNFCVFKKRYKEK

SEQ ID NO: 66443 - DNA, 459 bp, Unknown
  Obtained from environmental sample
  misc_feature (1)..(459): n is a, c, g, or t
atggaaaacaaagtaaaaatgagcattatggtgatcgtcattatggtggtcatagccgggggcattcccgtaatccagctgcgcaacgcgtccaaagtggcgctgaatctttccaaacagaaaaccatgtatctggctcgtcagcgcgcacagtactgggacggccgtatggagggctatatagacgttctgcagacactttcgaatataatgaacttttatgaaaaccttccggcggctgaacggcggcagacctatgaaaacacaatgatgtctgtttttgaggatatgcctgattttatcaggatgtttaccgtatggaaaccgaacgccattgacggtatggatgcaaaaaatataggcagaatgggctcaaccgccacaggacagttcgcctatgccctggcaagagataccggagagataaagcctttactgctgtggttgttgatgaagtaa

SEQ ID NO: 66444 - protein, 152 aa, Unknown
  Obtained from environmental sample
  misc_feature (1)..(152): Xaa is any amino acid
MENKVKMSIMVIVIMVVIAGGIPVIQLRNASKVALNLSKQKTMYLARQRAQYWDGRMEGYIDVLQTLSNIMNFYENLPAAERRQTYENTMMSVFEDMPDFIRMFTVWKPNAIDGMDAKNIGRMGSTATGQFAYALARDTGEIKPLLLWLLMK

SEQ ID NO: 66445 - DNA, 954 bp, Unknown
  Obtained from environmental sample
  misc_feature (1)..(954): n is a, c, g, or t
gtggttgttgatgaagtaatggctcaaattaccggacctaacgccagattagtcgaaatgagcgatcccgccccgtttaagaatatgggaaaagatacttatgcggtcagaattgcagtccccattctaaacaaacgcctcaatgaaatagtcggagctataggctgtcagttggatattagcatgatacaacccaaggtagagcagactatcaaagatttcgaagaagtcacttctatggtcatttactccgacaacggatttgttttggcaaattacctgccggaatttataggaaagcaaattgacacggaaacacaatacggaccttacttaaaagaagtcaaagatgttattaaaaactcgcaggaatggcaagggacagcttacgaccccgaactgcatacaaacatggtaatggctgtagccaatattcccataggggcttctcctacaacatggtcggtaatggtcggttcaaccgaagcttacattctgaaagatgtcaacgcgatgagaaattttgtcattatgctagcggctatagctcttgcggcggcggtggcgcttatatatcttgctttgaacagaactaccaggccaattgtcaagttagctgacacgctgaaagacatctctgaaggcgaaggcgacttaacgcggactattgccgtcaattccaaagatgagataggcgacctcgccctgtacttcaacaaaacgctggaaaaaatcaagaatatgatcattcatatcaaggatgaggcggatggtttgtcagagataggcaatgatcttgccggcaatatgaccgagacagccgccgcggtgaaccaaatcaccgccaacatccatagcatcaagggcaggattattaaccagaagcgccagcgtttcacagaccaatgcgactatggaacaggttatcaccaacatcaacaaactcaacggtaa

SEQ ID NO: 66446 - protein, 317 aa, Unknown
  Obtained from environmental sample
  DOMAIN (176)...(247): HAMP domain
  misc_feature (1)..(317): Xaa is any amino acid
MVVDEVMAQITGPNARLVEMSDPAPFKNMGKDTYAVRIAVPILNKRLNEIVGAIGCQLDISMIQPKVEQTIKDFEEVTSMVIYSDNGFVLANYLPEFIGKQIDTETQYGPYLKEVKDVIKNSQEWQGTAYDPELHTNMVMAVANIPIGASPTTWSVMVGSTEAYILKDVNAMRNFVIMLAAIALAAAVALIYLALNRTTRPIVKLADTLKDISEGEGDLTRTIAVNSKDEIGDLALYFNKTLEKIKNMIIHIKDEADGLSEIGNDLAGNMTETAAAVNQITANIHSIKGRIINQKRQRFTDQCDYGTGYHQHQQTQR

SEQ ID NO: 66447 - DNA, 969 bp, Unknown
  Obtained from environmental sample
  misc_feature (1)..(969): n is a, c, g, or t
atggaacaggttatcaccaacatcaacaaactcaacggtaatgtggaagaccagagcagcaatatctccaaggcttcatccgctattgagcagatggtagccaatgtcggttcagtaacccaaacgctggttaaaaacgccggtaatgtaaaaacactggaagaagcctctgaaattggacgcaacggattacgtgaagtcgctacggatattcaggaaatagccaacaaatctgaagatctattgaaaattaatgctgtaatgaaaaacatcgccagccagaccaacctgctttcgatgaacgctgctatagaagcggctcatgccggagaagcgggcaggggcttcgccgttgtcgccgatgaaatccgtaaactggcggaaggttccggcgagcagtccaagaccatcggcgccgtgcttaaaaacattaaaggttcaatcgacaagataatcagttctacagaaaacgtgcttaatgagtttgaagcgattgactcaagcgttaaaacagtagcggagcaggaggataatatccgtaatgcgatggaggaacaaggcgagggcagcagacagatactggacggtgtaagcaatgttaatgaaattacacggcaggtaaagggcggttcacttgaaatgcttgaaggcagcaaagaagtaataaatgaaagccataaccttgaaacagtaacgcaggaaataaccggcggcatgaacgagatggcttccggagcggaacaggtaaacgtagcggtacaccatgtcaatgagatatgcgtaaagaaccgcgagagaatcgaagttttaatgaggcaggtttcattgtttaaggtagcgtataaaaacgcttgcatgttttttccgggagtttcgtaccatagcggccgtttacagaacggcgacaagcgaaatgtacgaanncttccattttatatgattaaaaaattcaggctttgttttacttaa

SEQ ID NO: 66448 - protein, 322 aa, Unknown
  Obtained from environmental sample
  DOMAIN (2)...(245): Methyl-accepting chemotaxis protein (MCP) signaling domain
  misc_feature (1)..(322): Xaa is any amino acid
MEQVITNINKLNGNVEDQSSNISKASSAIEQMVANVGSVTQTLVKNAGNVKTLEEASEIGRNGLREVATDIQEIANKSEDLLKINAVMKNIASQTNLLSMNAAIEAAHAGEAGRGFAVVADEIRKLAEGSGEQSKTIGAVLKNIKGSIDKIISSTENVLNEFEAIDSSVKTVAEQEDNIRNAMEEQGEGSRQILDGVSNVNEITRQVKGGSLEMLEGSKEVINESHNLETVTQEITGGMNEMASGAEQVNVAVHHVNEICVKNRERIEVLMRQVSLFKVAYKNACMFFPGVSYHSGRLQNGDKRNVRXLPFYMIKKFRLCFT

SEQ ID NO: 66449 - DNA, 1638 bp, Unknown
  Obtained from environmental sample
  misc_feature (1)..(1638): n is a, c, g, or t
atgtgtgtcaaaaaatcaaaaatttccttaaagcgtccgttatatgtacaactggcgtttactttatttgcttttttgatgatgattgtattaagcttcaactttaccaacaaaatcgttcatactaatctggtacgcaatgtggaaagcgtactggattatatggaaacccaaatcggctccgagcttcttgaatcccgcaccgtactggacgattatgcgcaatcaatacaaagtttaatcttaagcggaaatgacgccgcaaaacttaccgtttataacacggatatatcaaatcatttactttcaaaaaacaatgattctttcagcccaaacggtcctttctgttatatagaaaaactttcggacggacctgagtttattaacggcattggctggaaagcgccggattcctggcggccgacggagcgtccatggtacaaggcggcgattgccgcaggcggtaagattgcggaaacagagccttttaaggatacggtaactggtgaaactgttttctcttactcacgttgtatttatgacaatgacggaaatcgtttaggcgttgccgctattgacgtacgggtaaatcctatcggagaaagagtcgcaaatacttctcttaccaaaggcggtttcggagtattggtcagtcaggatttaacaataataggccacctgaatcctgattttgtcggattgaaaatgtacgatcctgtagttcccctttcaattttaactgatgaattagtacgcacgggaaaaataacaggcaccgagtggattaactggaggggagaaccggtcgtcggttttttcaagactctttccaacggatggcgtttaggccttttgtcgccaagaattttatattatcaggcagtatacgaaatggcgttttttctttgtttattgggtattacgcttgcgacagtgctgattgtcgttttgatccgcgttgacgctgcaaaaaacagatcggacatggaaagcangcacaaaagcgcgtttctcgctaatatgagccacgaaataagaacgccgatgaacgctataatcggcatggtcaagataggcaagtccgcgccgaatatagaacgcaaggattactgtcttacgaaaatagaagacgcttcaaatcatctgctgggcgtaatcaacgacattctggacatgtcgaaaatcgaagccaacaaattcgaactttacccggtagaattcgagcttgaaaaaatgctcaggcgcgtagtgaatgtcgtcaatttccgcgtagacgaaaagcaccaaaaattctccgtgcataccgaccgctcaattccccacactctaataggggacgagcaacgactagcgcaggtcattaccaatttattgggaaacgcggtcaaattcacgccagaaaagggctccatttcacttgccgtgcgccttttggacaaagcaaacaacctctgtaccctgcaattttctgtaagcgataccggaattggcataacccccgaacaacaggaaaagattttccaatcttttgaacaggcggaatccagcacgactcgcaaatatggcggcacgggtcttgggcttacgatttccaaaagcatagtgaaacgatggtctgaacagagaaaatgggtttaa

SEQ ID NO: 66450 - protein, 545 aa, Unknown
  Obtained from environmental sample
  DOMAIN (160)...(239): Cache domain
  misc_feature (1)..(545): Xaa is any amino acid
MCVKKSKISLKRPLYVQLAFTLFAFLMMIVLSFNFTNKIVHTNLVRNVESVLDYMETQIGSELLESRTVLDDYAQSIQSLILSGNDAAKLTVYNTDISNHLLSKNNDSFSPNGPFCYIEKLSDGPEFINGIGWKAPDSWRPTERPWYKAAIAAGGKIAETEPFKDTVTGETVFSYSRCIYDNDGNRLGVAAIDVRVNPIGERVANTSLTKGGFGVLVSQDLTIIGHLNPDFVGLKMYDPVVPLSILTDELVRTGKITGTEWINWRGEPVVGFFKTLSNGWRLGLLSPRILYYQAVYEMAFFLCLLGITLATVLIVVLIRVDAAKNRSDMESXHKSAFLANMSHEIRTPMNAIIGMVKIGKSAPNIERKDYCLTKIEDASNHLLGVINDILDMSKIEANKFELYPVEFELEKMLRRVVNVVNFRVDEKHQKFSVHTDRSIPHTLIGDEQRLAQVITNLLGNAVKFTPEKGSISLAVRLLDKANNLCTLQFSVSDTGIGITPEQQEKIFQSFEQAESSTTRKYGGTGLGLTISKSIVKRWSEQRKWV

SEQ ID NO: 66451 - DNA, 1764 bp, Unknown
  Obtained from environmental sample
  misc_feature (1)..(1764): n is a, c, g, or t
atgagtgattatactgtagtaggcatagactttgggacgagtaccacagtcgttaaggtgagaaattattttgaagcgggaacaaccccggcggattgtcatgctttgcaatttaacaacagtaacagtcttccgacgttgatatatgaagccggtgacggtcgtttatattttgggaaggaagcgcagacaagaaaatccggcgaagaaagcggcagtgagggccagttatatgaaaattttaaaatgagactggttgatgaaaaccccgacacggcgaaaaaagccaaggagcttactcaaaaattttttgaacatatttattcaaggtttaatgaggagagggcaaatctgggcgtgctgcctgaagtgaggacttgtatcagttaccctgtaaagtgggaagccggcacaaaactttttatgatagagtgcgcggaaaaagccggctttacgaaagtggaaggagcagacgaggcaaccgcggccatatacgcgtctatacctaacaatcttgagaatctgcaaaaagcgggagtcatttaccttgataaacctgttaacgttatgatgctggatatgggcgccggaacatccgatatagcgatttttaatttcaaaataggcggcgacgggaaacttgtctccggagaaaaggtaacgtggccgccaataaacaaaaataattgcggcggaagagaaatagaagagtatatgtcgggtgaattggaaaattatatcaaaaaaatctcaaaaaaagacgagatcaaagaaaatataagaaatcaaataaaggattctgtaaaaggatggaaagaggatcacttatctccaaagttgaaagacagaggagacgttggcatacctaacaggctgttagaaacagtgaagataaggcaagatgacggaatttatgaaaatatacaatttgataaaatagacagacagcggtttgagtcgataacaggagagcattggaagcagttacgcgatcttattgacggagctctgcgcagcgcgatagcgtcgaaaaaattgagcgctttcaccggcgcggctgatatagatttaattattttaaccggcgggcacagcaagtggtacggcgtcagcgagtttattaagggagaaaaatttgccggctgcgagccgataaattttacaaaaatcaggaataatccgtcggcgcgaattttacaggaaccaagcccgcaggaaaccgtcgcgctgggattggttaaaatagatgaatttaaaataatcgggtttgatttaaagccccttatgggaaattcaatgtggattaaatatgattttctcaatcatcaatctgaacccatgaagatcgttgaccaaaatgatgtcttacctatttatgatcttaatcattcttatgaattcccggtagagctgaatatgtttaacatggaaaagctgccgtttctctgtcattgctattacggagaaaatatcgaatcagcaaagcattacgaaacgaagggtacggtgcagtttaaaaaccttcttttggagatattgaaaggatatattcccatatatggggctgttaaaaatattgtagatctcggtagaatggcgggtggaaaggaagccatgaaggatcaatatgtaataaaggtatcctcatccgtcaacataaataagtatggtacggtagaaataaaagtaacggtatcctttagaaaaaaatcttcaacagactggaaagcatgcgaaccgttcaagatagaacttgggagatga

SEQ ID NO: 66452 - protein, 587 aa, Unknown
  Obtained from environmental sample
  misc_feature (1)..(587): Xaa is any amino acid
MSDYTVVGIDFGTSTTVVKVRNYFEAGTTPADCHALQFNNSNSLPTLIYEAGDGRLYFGKEAQTRKSGEESGSEGQLYENFKMRLVDENPDTAKKAKELTQKFFEHIYSRFNEERANLGVLPEVRTCISYPVKWEAGTKLFMIECAEKAGFTKVEGADEATAAIYASIPNNLENLQKAGVIYLDKPVNVMMLDMGAGTSDIAIFNFKIGGDGKLVSGEKVTWPPINKNNCGGREIEEYMSGELENYIKKISKKDEIKENIRNQIKDSVKGWKEDHLSPKLKDRGDVGIPNRLLETVKIRQDDGIYENIQFDKIDRQRFESITGEHWKQLRDLIDGALRSAIASKKLSAFTGAADIDLIILTGGHSKWYGVSEFIKGEKFAGCEPINFTKIRNNPSARILQEPSPQETVALGLVKIDEFKIIGFDLKPLMGNSMWIKYDFLNHQSEPMKIVDQNDVLPIYDLNHSYEFPVELNMFNMEKLPFLCHCYYGENIESAKHYETKGTVQFKNLLLEILKGYIPIYGAVKNIVDLGRMAGGKEAMKDQYVIKVSSSVNINKYGTVEIKVTVSFRKKSSTDWKACEPFKIELGR

SEQ ID NO: 66453 - DNA, 1116 bp, Unknown
  Obtained from environmental sample
  misc_feature (1)..(1116): n is a, c, g, or t
atgcaaaaacgacccgtgtgcctgataatccgcgacggttgggggcgcggcaaccccgaacaatccaacgcgatctactccgccgacaccccgttcaccgacgcctacgagagcggttgcccgacgacgctggtcaagacctccggtcgaagcgtcggtctgccggacggctatcagggcaacagcgaggtcgggcacctaaatatcggcgcggggcgcaccgtctaccaaagcctcacgcgcatcgacaagagcgtggaagacggcgacttcttcactaacgccgccttcatcaaagcgatagacttcgccaagaaaaacggcggcaacctccacctgatcggcctgatccaagaggaaggcgtccacgccgtcacacgccacggcgtagccctcctgaagctatgccgtgacaagggtttcaagaacgtgctcatccacgccgtcaccgacggccgcgacaccccgcccaagtccgccctcgaacacatggctctgttgcaaaagggtatggatgatacgggcgtcggccaagtcgccaccgtcataggccgctactacgccatggaccgcgacaaccgcatggacagaaccgaactggcctaccgcgcaatcgtagagggcgagggcgcccccgcaaacagctggaaggaggccatagaatcctcatacgcggaaggcgttaacgacgagttcgtcaaaccgcacatactgacgcccgcaaattacaagggcgccacggacaaagacgccgtgatattcttcaacttccgcttcgaccgcacccgccagctcaccaaggcgatggtcgaacccaagttcgacgccttcaaccgcagaaacggcgcgcccgtcaagtgcttcgtcgccatgacgcactactacgacgacgggaatttcaccgaggcgtatccggaaatacataacgccaatatcctgggcgaggtgctctcaaaacgcggcctgaaacagttgcgttgcgccgaaacggagaagttcgcccacgtaacctttttcttcaacggccagcgcaacgacccctatgacggagaagaccgcatcctgatagacagccccaaagtcgccacctacgacctaaaccctcggccgatctga

SEQ ID NO: 66454 - protein, 371 aa, Unknown
  Obtained from environmental sample
  DOMAIN (2)...(359): BPG-independent PGAM N-terminus (iPGM_N)
  misc_feature (1)..(371): Xaa is any amino acid
MQKRPVCLIIRDGWGRGNPEQSNAIYSADTPFTDAYESGCPTTLVKTSGRSVGLPDGYQGNSEVGHLNIGAGRTVYQSLTRIDKSVEDGDFFTNAAFIKAIDFAKKNGGNLHLIGLIQEEGVHAVTRHGVALLKLCRDKGFKNVLIHAVTDGRDTPPKSALEHMALLQKGMDDTGVGQVATVIGRYYAMDRDNRMDRTELAYRAIVEGEGAPANSWKEAIESSYAEGVNDEFVKPHILTPANYKGATDKDAVIFFNFRFDRTRQLTKAMVEPKFDAFNRRNGAPVKCFVAMTHYYDDGNFTEAYPEIHNANILGEVLSKRGLKQLRCAETEKFAHVTFFFNGQRNDPYDGEDRILIDSPKVATYDLNPRPI

SEQ ID NO: 66455 - DNA, 648 bp, Unknown
  Obtained from environmental sample
  misc_feature (1)..(648): n is a, c, g, or t
gtgttgccgacgggacgcccttccccgaatagccgcacggtgagattgcgaggcttgtccggcgcgctgcgcccgaaggcgaggcggaacagctcttcgcgggacatcttgccgagctcctggcgtgtacgcgggcgtttaatcggcggcggcgccgccggcttcgggggcggtgtgtcgaacgcgtcggttttcgcctctgcggacgatgtatcaacggtgagagttttagcggacgatgtatcggcggcagcggtttttgcggattgtttggcggcggccgccttagccttcgccgtcgcggcgctgtcgatcggcggccactggaactgtagcgtgtcggccactattatccgcgctttttcggccgggacttcgggaacggctaagccggcggggacggcggacggaaccgggatgtcggtaccgggtatggtcacagccgccggaacgacgggagcggccttgacggcggtgccggctgcggcgggagcggctttagcggcggcggtgtcggcggcaacgggtacagcggccggagccgccgccgttacggcaaaaaacgccgacaacgcaagcgtcaatgttaaaatcgtccgaaaaatcaccgttcgctttgccgttcttacaggtttattgatacaataa

SEQ ID NO: 66456 - protein, 215 aa, Unknown
  Obtained from environmental sample
  misc_feature (1)..(215): Xaa is any amino acid
MLPTGRPSPNSRTVRLRGLSGALRPKARRNSSSRDILPSSWRVRGRLIGGGAAGFGGGVSNASVFASADDVSTVRVLADDVSAAAVFADCLAAAALAFAVAALSIGGHWNCSVSATIIRAFSAGTSGTAKPAGTADGTGMSVPGMVTAAGTTGAALTAVPAAAGAALAAAVSAATGTAAGAAAVTAKNADNASVNVKIVRKITVRFAVLTGLLIQ

SEQ ID NO: 66457 - DNA, 786 bp, Unknown
  Obtained from environmental sample
  misc_feature (1)..(786): n is a, c, g, or t
atgagtttgcaccagatatgcttttggctgcaaagaagcgcgcaaaaatccgaaatggagagttcgcttgttcgcgttcaccacgaagacatggcagaaattcccgcagattccatagactacgccgttatggaaaaatccaaaaaagttagcgttgtcccttgttcaatagggtggtcggatttgggtagctttgaaagcctttacaaggaactcccacacaatatagatggcaacaccgaagataaatttcatataccaatagattcaaaaaataatttggtgatgggttccaataggcaaatagccactatagacttagaaaatatgatggttgtggatacagcggatgccttgttagtcgctccgctttctagcagccaaaaagtgaaaaaattggttgaaagtttaaaaggaaaacacccggatttattgcatactccgcaaaccgttattcgcccgtggggaacatatacggtgctggacgagggttttcgttttaaaattaaatgtatttccgtaaacccaggtgcgcggctttctctgcaaaagcacatacatcgttcggagcattgggttgttgtgagcggaatggcaactgccactattggtactcaaactttttttgtgcgtccaaatgaatccacctacatcccttctggtacaaatcatcgcttgcaaaacgaaggcaaattgcctttgataattgttgaaatacaggttggcgaatataccggcgaagatgatattattcgcatggatgacgactacgaaaggcataagtaa

SEQ ID NO: 66458 - protein, 261 aa, Unknown
  Obtained from environmental sample
  DOMAIN (170)...(240): Cupin domain
  misc_feature (1)..(261): Xaa is any amino acid
MSLHQICFWLQRSAQKSEMESSLVRVHHEDMAEIPADSIDYAVMEKSKKVSVVPCSIGWSDLGSFESLYKELPHNIDGNTEDKFHIPIDSKNNLVMGSNRQIATIDLENMMVVDTADALLVAPLSSSQKVKKLVESLKGKHPDLLHTPQTVIRPWGTYTVLDEGFRFKIKCISVNPGARLSLQKHIHRSEHWVVVSGMATATIGTQTFFVRPNESTYIPSGTNHRLQNEGKLPLIIVEIQVGEYTGEDDIIRMDDDYERHK

SEQ ID NO: 66459 - DNA, 564 bp, Unknown
  Obtained from environmental sample
  misc_feature (1)..(564): n is a, c, g, or t
atggtaaacctaatcctctgcggtggtgctggcacgcggctttggcccataagccggacacttttgcccaagcaatttgtcaaattttttggcgaacattcgctgttccagcgtattgtgcttgtgaatggcgagttttgcttagaacaacacattgtgagcaatgcggaacaatattttttggcaagggaacaactgcagcagataggtgcaaataaaacatcttttatattggaacccgtaggcagaaacaccgctcctgccattgccctagcttgcttgggattaccagaagacgaaacggttttggtttctcccagcgaccatttgattaaggatgtggaaagttattccaaagcggtgaagcgtgcggccgagcttgcgaattcgggcaatcttgtgacattcggtttaaagccaacaggtccggagacgggctacggttatatagaggcagatggcgataaggttaaaagatttgttgaaaagnccggatttggaaacagccaaaaaatacattgcgagcgggaatttttattggaacagcggcatattctgttttaa

SEQ ID NO: 66460 - protein, 187 aa, Unknown
  Obtained from environmental sample
  DOMAIN (2)...(185): Nucleotidyl transferase
  misc_feature (1)..(187): Xaa is any amino acid
MVNLILCGGAGTRLWPISRTLLPKQFVKFFGEHSLFQRIVLVNGEFCLEQHIVSNAEQYFLAREQLQQIGANKTSFILEPVGRNTAPAIALACLGLPEDETVLVSPSDHLIKDVESYSKAVKRAAELANSGNLVTFGLKPTGPETGYGYIEADGDKVKRFVEKXGFGNSQKIHCEREFLLEQRHILF

SEQ ID NO: 66461 - DNA, 2475 bp, Unknown
  Obtained from environmental sample
  misc_feature (1)..(2475): n is a, c, g, or t
atgtattctggcgttgttttgcaaattgaacgagcaaatgaaaatcaacacgacccctttgaggtgataattgaggaagctcgcaacaaaagaggagtcaagcacgataaccagcttccagaagaggatttaaaatctataattgagaaattcaaaaaacttgttttggaaaaaacaggaaaaccttttccgagcgacccttacaagcaactggaaggtgcaataggggctgtatttgcaagctggatgaacgatcgtgctattctatatcgccgcaaatacaaaattcccgaagaatggggaaccgcagttaatgttcagtctatggtatttggcaatatgggtgatagctctggcactggagtagcctttacccgcaatcctgccactggcgaaaacgaattctacggagaatttttggtgaatgcccaaggtgaagatgtggtggctggcattcgcactccgcttaaaatttccgcaatggcaactactccgcatttggagaattgctacaaagaactctgcgaagttcgcaaacatcttgaaaaagaatttggcgatatgcaggattttgaattcacaatagaaaacgctaaattgtatatgcttcaaactcgcaatggcaaacgcacggcgagggcttatgtgaaaattgcccgcgaaatggtgaaccaaaaactgatgacacaagagcacgcaatagaaagcgcagacccggaagcccttgaacagttgcttgcccctgtgtttcataaagagtcttaccaaaaagcgattaacggaaatctattgctcacaaaaggtttgccggctggccccggtgctgctaccggaacgcttgcctttaccgcagaaaaagcggaacgttgggcaactcacgggcctgtggtcttagctcgcgtagaaaccagccctgaagatttgcgcggtatgctcgccgcaaaaggcatagtgaccgcaaaaggcggcgtgtctagccacgcggctgtggttgcaaggcaaatgggcaaagtttgcgttgtgggagcctcggatatagacatcaactacaacaccggagttttaacctgcggcgacaaatctattaaagaaggggaattcatatctataaatggttccactggcgaagttttgagcggcagaatagacaccgctccatccgagttaattcaagtgcttatagacaaaactttggctccaaaagattctgaattgttcacggactacgattttgttatgaaattagcagacaaatatcgtaaacttggtattcgcacaaatgcagaccagccggagcaggctataaacgcggtggcatttggagcagaaggcattggtctttgccgcacggaacacatgttctttaaaggcgaccgtattgactatgtacgcgaaatgataatttttgcagcggaatacgcagaatataaatccaagctggcgcagagaccaagtgatgcggttttgctggaaaatgaatatcacattcccataatgcattttaaagaagcattggaaaaacttttgccaattcagcaagcggactttgagggcttgttcaatgcaatgggggagagacctgttaccgtgcgttatttagacccacctttgcacgaatttttgccgcagaacaaagaccagatagatgaactgtcgcgcaaactggatgtgccttttgaaagggtttcgcaaacggttcattcgcttcacgaatccaacccaatgctggggcacagaggttgccgcttgggtattgtgtatccagaaatttctgaaatgcaaagtcgtgctttgttccgtgcagctctcgcagttgccgcaaaaaacaaaaaatctccaaaaaccggaattatgattcctctggtaggttttgagcgtgagcttgaattgcagcttgagcttgttaatagggtagccaaagaggaatttgccgctgccaagcgtacgctggaatacaaagttggaacgatgattgaagttccgcgagctgcaataacagcagagcaaatagctaaacacgcgcaattcttctcttttggaacaaacgatttaacccaaaccacgcttggaatgagccgagacgatgctgggcactttttgccattttatgaaaaagaagctggcattgttaaaagcaatccctttgccacccttgaccaaattggcgtgggcaagctcatggaagtagctgttcaatatggccgtaaaacccgcccagacatcaagctgggaatttgcggagagcacggcggagaccctgcttccatagaattttgcaacggtttgggacttagctatgttagttgttctccgttcagagtgccagttgctcgtattgcggcagctaaatctgcggtgaaagctatgcgaacggttgcaaaaccgctggaaaaaacaactgcaaaaacatcggctcgcactccagcagctaaaaagaaaaccgctacaaaaaaaaccgctaaaagcaggcgttag

SEQ ID NO: 66462 - protein, 824 aa, Unknown
  Obtained from environmental sample
  DOMAIN (275)...(375): PEP-utilising enzyme, mobile domain
  misc_feature (1)..(824): Xaa is any amino acid
MYSGVVLQIERANENQHDPFEVIIEEARNKRGVKHDNQLPEEDLKSIIEKFKKLVLEKTGKPFPSDPYKQLEGAIGAVFASWMNDRAILYRRKYKIPEEWGTAVNVQSMVFGNMGDSSGTGVAFTRNPATGENEFYGEFLVNAQGEDVVAGIRTPLKISAMATTPHLENCYKELCEVRKHLEKEFGDMQDFEFTIENAKLYMLQTRNGKRTARAYVKIAREMVNQKLMTQEHAIESADPEALEQLLAPVFHKESYQKAINGNLLLTKGLPAGPGAATGTLAFTAEKAERWATHGPVVLARVETSPEDLRGMLAAKGIVTAKGGVSSHAAVVARQMGKVCVVGASDIDINYNTGVLTCGDKSIKEGEFISINGSTGEVLSGRIDTAPSELIQVLIDKTLAPKDSELFTDYDFVMKLADKYRKLGIRTNADQPEQAINAVAFGAEGIGLCRTEHMFFKGDRIDYVREMIIFAAEYAEYKSKLAQRPSDAVLLENEYHIPIMHFKEALEKLLPIQQADFEGLFNAMGERPVTVRYLDPPLHEFLPQNKDQIDELSRKLDVPFERVSQTVHSLHESNPMLGHRGCRLGIVYPEISEMQSRALFRAALAVAAKNKKSPKTGIMIPLVGFERELELQLELVNRVAKEEFAAAKRTLEYKVGTMIEVPRAAITAEQIAKHAQFFSFGTNDLTQTTLGMSRDDAGHFLPFYEKEAGIVKSNPFATLDQIGVGKLMEVAVQYGRKTRPDIKLGICGEHGGDPASIEFCNGLGLSYVSCSPFRVPVARIAAAKSAVKAMRTVAKPLEKTTAKTSARTPAAKKKTATKKTAKSRR

SEQ ID NO: 66463 - DNA, 336 bp, Unknown
  Obtained from environmental sample
  misc_feature (1)..(336): n is a, c, g, or t
ttgtataattgggaaatggctaattggatttgtccaaaaggctggcatttgcctacaaaatacgaatggggaatattgacagaagcggttgattggaacagtggtttttctgccctgccgggcggtgtcggctattctgatggctttttcaacggtgtcggcaaattcggctactggtggacttcttccgagtacgggtacgataaaaaagcctactacgccatcgttattggcaacaacggtggcataagctaccaagacaattatatgtacgacttgctaagtgtccgctgcttgcaagacacccccgccccacccaaaggagaggcaaaatga

SEQ ID NO: 66464 - protein, 111 aa, Unknown
  Obtained from environmental sample
  misc_feature (1)..(111): Xaa is any amino acid
MYNWEMANWICPKGWHLPTKYEWGILTEAVDWNSGFSALPGGVGYSDGFFNGVGKFGYWWTSSEYGYDKKAYYAIVIGNNGGISYQDNYMYDLLSVRCLQDTPAPPKGEAK

SEQ ID NO: 66465 - DNA, 699 bp, Unknown
  Obtained from environmental sample
  misc_feature (1)..(699): n is a, c, g, or t
gtgcaaatatctaagcattttatttgcaagccaactttagatacttcattcagcattatattccgtgctaggataaccggagaatgtgagaatttgccgccattgagatggaatataggagccacagacaaagatagcgttatcgcagagctgatttctgatacaacactcgtcattagaggaaatgggaagatgatggattttaaaaaaagaccatgggatgaactatgcggaagagaaatttctaatgttgttattgagaatggagtgacttatattgggggggacgcgttttggagttgtaacttagattccataaccattcctagtagcgtgacttctacggctgattatgcgtttagtgaaagtgggctagatttctacttctacaatgttcccgatatcgtggcttatttcgggaaaagcacatttagcaagtacggatcattttccggatcaatcaccacaactattcctgatagcgtattttatattgacgaaaaactgctttctaatttcgaaagaactgcccccaccattaccatttcaaaccctattccgcctcggcttactggagatgtacctgggtggattaagctgttcaattacggaaccctatacgtgcccaaaggcagcattgatgcctatctcaaagcagaaggctggaaagaatgcaagaatataaaacctatagaatag

SEQ ID NO: 66466 - protein, 232 aa, Unknown
  Obtained from environmental sample
  misc_feature (1)..(232): Xaa is any amino acid
MQISKHFICKPTLDTSFSIIFRARITGECENLPPLRWNIGATDKDSVIAELISDTTLVIRGNGKMMDFKKRPWDELCGREISNVVIENGVTYIGGDAFWSCNLDSITIPSSVTSTADYAFSESGLDFYFYNVPDIVAYFGKSTFSKYGSFSGSITTTIPDSVFYIDEKLLSNFERTAPTITISNPIPPRLTGDVPGWIKLFNYGTLYVPKGSIDAYLKAEGWKECKNIKPIE

SEQ ID NO: 66467 - DNA, 1860 bp, Unknown
  Obtained from environmental sample
  misc_feature (1)..(1860): n is a, c, g, or t
atggcatactatgtcaacgcaggagcgaagctgaaattgtgcggcaagcctatggtgaacataaagcccttcggccagtgcagctcgttggccaatccagtagtagcggcggcaacagcggccaactacggcaggctgcagaaaatgccctgcattcccaacaccatgtccccttgggttaacggcaagatgagcgtgcttgtaaagggaagccccgcccttctgggcactagcaaatgcatgtgcgcctgggcaggcgtcatagaggttgcagaccccgggcaggacagcgtttttgacggcgagcccatggcggcatcggagcctgtggcaggaactcagcgagccttgggcaacggcttgcagccttcgcagcctgctggggctggcgtggcggcgcatggagccttgggtagcggcttacagtcttggcaagatggtgtggccaatagcagccaagctccgcaatgtttgtcatcggcaacgcaaaattcgacattggaattattcatagaggaagttaaaggagcagcagagacatatccgaggcagaaaatagtatataaagctgagtgtaacaaaaatagaggcgaaatgagcgatgaggaaaagaacaaggaaataaaatgggctataaaattagaagaagacggtaagaatacagaactgccatacaaaggggaaaagatcacacttgatatagataaggactgggagaacaaagatatatttgtaatggcatatattgaaaacactgaaaaaaagagctttaagacaaaggtacttttggatccttataaaggaaagttgattagaggcgttgtgggcggagatgaagcctttgtcgggcaagaggtaaaatatgaggcaactggttacaatgaagacggagaggcgggtaaagtaaacaacggcaatggaataaaatgggcgataaagataggcgaaactggcagtataaatagagaaatgctaaaaggtgaaacagggaagaaaataattactcttaaaatgaagcctgagtgggcagataaaggaatgattaccgtaatgccatatttgaattcaccaacggaaacagtgtcggtgaagacggaggtatatatgagcctaggtccaaaaatcacagaaatgctaatgcaaatgaatggagaaagacaaatctatacttttaaaagcaaaaaatttgttaaaagatttataaaggagatgaatacttatggcatggatacagaatggctgaaaaaaattgaagaaatagattgtgatatagaaattggaaatcaacttgaaattcctacccttatacaaggaacaaatgaattagaaatgagaaggctaagcgataaaactctaagtcaaatttttaaacaaaataggaatatttttattttaatcaatttaaaccatgagttttttagaaatcaggaatggatagacgttggaaatatgaaaaagttcgataaacagttgcaagttcttcttttccatgaatttgtgcatgtatggcaggtaagagatgatgactggaaggatagagtaaagaatatggaaagaaaaatagaagttcagttttcaatatttgctagaaagatagaaacaataaatatctacattgaagtggaagcctatgacattcaatttgaatatgaaaaaaaagcagatgttatatttaatattaaactaataaatgacataagaggaaaatttaatagtataggagggaactatcctagaagtcccgagtgtcgtagtttaacggaagaagcacaaggccttctgaaagaaaaaggagagtcattgcgtagaatatatataaataatgacaataatgcatattatttatacacaataccgtaa

SEQ ID NO: 66468 - protein, 619 aa, Unknown
  Obtained from environmental sample
  misc_feature (1)..(619): Xaa is any amino acid
MAYYVNAGAKLKLCGKPMVNIKPFGQCSSLANPVVAAATAANYGRLQKMPCIPNTMSPWVNGKMSVLVKGSPALLGTSKCMCAWAGVIEVADPGQDSVFDGEPMAASEPVAGTQRALGNGLQPSQPAGAGVAAHGALGSGLQSWQDGVANSSQAPQCLSSATQNSTLELFIEEVKGAAETYPRQKIVYKAECNKNRGEMSDEEKNKEIKWAIKLEEDGKNTELPYKGEKITLDIDKDWENKDIFVMAYIENTEKKSFKTKVLLDPYKGKLIRGVVGGDEAFVGQEVKYEATGYNEDGEAGKVNNGNGIKWAIKIGETGSINREMLKGETGKKIITLKMKPEWADKGMITVMPYLNSPTETVSVKTEVYMSLGPKITEMLMQMNGERQIYTFKSKKFVKRFIKEMNTYGMDTEWLKKIEEIDCDIEIGNQLEIPTLIQGTNELEMRRLSDKTLSQIFKQNRNIFILINLNHEFFRNQEWIDVGNMKKFDKQLQVLLFHEFVHVWQVRDDDWKDRVKNMERKIEVQFSIFARKIETINIYIEVEAYDIQFEYEKKADVIFNIKLINDIRGKFNSIGGNYPRSPECRSLTEEAQGLLKEKGESLRRIYINNDNNAYYLYTIP

SEQ ID NO: 66469 - DNA, 630 bp, Unknown
  Obtained from environmental sample
  misc_feature (1)..(630): n is a, c, g, or t
atggacagaatcggccgagggcatcttggctcggtcaccatcggcggcacggtcagccctgccggcggtaactttgaagaaccggtaacccaggccacgctgaaagtcgtcggcgccttccacggcctttcccgcgaacgctccgacgcccgcaaattccccgccatacacccgatggactcctggtcaaagtacaaaggcatcatcagcgaagaaaaggtcggttacgcccacgggtttatgcgccgcggaaccgaggtcgagcagatgatgaaagtcgtcggcgaggaaggaacaagcatagaagactatattatctacctgaaaggcgaccttatcgactccgtgtacttccagcaaaactccttcgacgaagttgacgcggcggtaaagccggaaaggcagatatacacgtttaacaaactgctggcgatcctcgcttcgcagttcagtttccccgacaaaaacgaagcccgtatctggttcaacaggctgaggcagaaattcctggactacaatggttcaaaatggcaggacgcccgctttaaggaactggagaaggaaatcgaagacgcggtgaaaaagcagtcaaaaggcctggacaaggccgcccagcatattttggcatag

SEQ ID NO: 66470 - protein, 209 aa, Unknown
  Obtained from environmental sample
  misc_feature (1)..(209): Xaa is any amino acid
MDRIGRGHLGSVTIGGTVSPAGGNFEEPVTQATLKVVGAFHGLSRERSDARKFPAIHPMDSWSKYKGIISEEKVGYAHGFMRRGTEVEQMMKVVGEEGTSIEDYIIYLKGDLIDSVYFQQNSFDEVDAAVKPERQIYTFNKLLAILASQFSFPDKNEARIWFNRLRQKFLDYNGSKWQDARFKELEKEIEDAVKKQSKGLDKAAQHILA

SEQ ID NO: 66471 - DNA, 579 bp, Unknown
  Obtained from environmental sample
  misc_feature (1)..(579): n is a, c, g, or t
gtgcaatgttcacgcggaatcacgggaatgcaagcggcagatcttttattaaaagtaaataaaatcaacgacgtgaagattgagcctgtaagaggctccctgtcggatcattattccccatccgacaagaaactgcgcctttcagaacctgtatacgcagtcccttcaatcgcggcggtaggagtggcggcgcatgagacggggcacgcgattcagcacgcagtccattggggccccctggttttaaggagcacgctcgtgcctgtcgcgaatataggctcgtcattgggtccgtggcttgcgattgcgggcctttttatttttccgccgctttatcttataggaataattcttttcagcgcctccgtgcttttttatgtggtaaccttgcctgtagagttcaacgcgtccgccagagcaatcgcgattttacgagcgaacaaagtcttaagcgaatctgagctgaaaggcgtgaaaaaagttttaactgccgcggctttaacttatgtcgcttcggctttaacggctattatgagcttgctgcggttgatactgatggctaacagaaggcgaagatag

SEQ ID NO: 66472 - protein, 192 aa, Unknown
  Obtained from environmental sample
  DOMAIN (2)...(191): Putative neutral zinc metallopeptidase
  misc_feature (1)..(192): Xaa is any amino acid
MQCSRGITGMQAADLLLKVNKINDVKIEPVRGSLSDHYSPSDKKLRLSEPVYAVPSIAAVGVAAHETGHAIQHAVHWGPLVLRSTLVPVANIGSSLGPWLAIAGLFIFPPLYLIGIILFSASVLFYVVTLPVEFNASARAIAILRANKVLSESELKGVKKVLTAAALTYVASALTAIMSLLRLILMANRRRR

SEQ ID NO: 66473 - DNA, 447 bp, Unknown
  Obtained from environmental sample
  misc_feature (1)..(447): n is a, c, g, or t
ttgagggcgggtggtcgcgagctgtctttatttgttcccggaaaattgtttttgtttcaccgtgagcttttccgcatggagcagggcaagcggaagaaaaaacatcatttttgcccgaccaatcctaagacgacggccgttattgcggaaaacgcgcaaaaaatatttgaatgttccatgcagtttgtaacccagcggcgcgtttttcacctgtggccggaagaaggtcatgaaaacacctggtgcgcttgtcccgcctgccgcgctttcagtcccgccgaacaatatattatcgcggtaaacaccgttgcggacgtgctcgctaagctggatcctaacgcccggctttcgtatcttgattacggagaagagcaggggaagacggggattgcgccgaggaagaatatgtttaaggttaaaagagagcaaataagaaataacaaataa

SEQ ID NO: 66474 - protein, 148 aa, Unknown
  Obtained from environmental sample
  misc_feature (1)..(148): Xaa is any amino acid
MRAGGRELSLFVPGKLFLFHRELFRMEQGKRKKKHHFCPTNPKTTAVIAENAQKIFECSMQFVTQRRVFHLWPEEGHENTWCACPACRAFSPAEQYIIAVNTVADVLAKLDPNARLSYLDYGEEQGKTGIAPRKNMFKVKREQIRNNK

SEQ ID NO: 66475 - DNA, 828 bp, Unknown
  Obtained from environmental sample
  misc_feature (1)..(828): n is a, c, g, or t
ttgaaatttaaatatctgataatcgtatttagcgtaataatcgtaattatcgtattaatcacatcattattgcctttaataatctcaggacacggaagcgcggtaacttttaagtacattactttaccgcttataatattcatggcggttctccttatctgcatgagtatatttttcttcattaattatcggctgttttcgcttctggaaagagaggattggcctgctttagcctattatttagagcaaaaaatctatgtaaaaggcaaatattccgaccgttatgtaaggcttttagccagttcttatatggtaatttcggatttttcggcggttttaaagcttgaaaacaaggttttgacggcaaaaccttctttaatcagtaaaaatgtgcttattttcggagccgcaaggatattaagcggagataaaaaagaagcggctgctttttttgaaacataccttgataaaattcggggaaaggataaacaatgggtacgatggttttacggtttttctcttctgttaagcggttcattcagtctcgcggagcctgaattttcaatccttaccgctacctcggatgatattttgataacaggactttcggcctattttttggggaactcaattgcaaaccgttctgtgaaaactgatgaatgtattgcaattgccggaaatggcagagaccgtgtagttaaagcggttaaaaacgcgttcggctgggttagagaggcagacagggtagggacggaaattcacatagccattataagaaaatatataaacgaagccggaaattggcttttttccggaaataaagaatga

SEQ ID NO: 66476 - protein, 275 aa, Unknown
  Obtained from environmental sample
  misc_feature (1)..(275): Xaa is any amino acid
MKFKYLIIVFSVIIVIIVLITSLLPLIISGHGSAVTFKYITLPLIIFMAVLLICMSIFFFINYRLFSLLEREDWPALAYYLEQKIYVKGKYSDRYVRLLASSYMVISDFSAVLKLENKVLTAKPSLISKNVLIFGAARILSGDKKEAAAFFETYLDKIRGKDKQWVRWFYGFSLLLSGSFSLAEPEFSILTATSDDILITGLSAYFLGNSIANRSVKTDECIAIAGNGRDRVVKAVKNAFGWVREADRVGTEIHIAIIRKYINEAGNWLFSGNKE

SEQ ID NO: 66477 - DNA, 1200 bp, Unknown
  Obtained from environmental sample
  misc_feature (1)..(1200): n is a, c, g, or t
atgccggatttgttatttattccgggggacaaaatgaataattttaacgtaaaagaaataagacacaactgttatttctcaaaaccggtttatcttgataaagcttttgtgcttaccgtacctgaaacccccttttcagatgatttattacaactgctggataaatggaattttaaggttgtatacagcgagggtgaaaccagcaatgaatacgctaaatcaggggaagccgtcagtactcatacttcggaagtctcaggagccggaataggaacggtagcggggatttctcagcaaacggattttgacaagttaaaaaaagcggaagaattttatactagttttcttttctatgtggaaaatatgtttgttaaagcgtctgtatccgatgagttagacgaaaaaaccgtgactgaaaaaatcaaagaaatagcagagtacataaaagaagatcgccgttttttaatgagggttttaaaaaacatcgaaccggcggaaggaaagaattatcttgccacacattcggtgcgtacgaccatactttcaatgataatcggcacgtaccttaaactgccaacctatcgtttgatagagcttggagtcgcagcccttatgcatgaagcaggaatgttaaaattaccgtcaaatatttatttaagccagagggctcttaatcctgtggaacagaaagcaatcgctacgcaccctattctgggttacactatgcttaaatcttttaactttccgcttcccgtttgtttagccgcgcttgaacaccatgaacgcggaaacggagcgggttatccgcgaagattgcccaacgaaaaaataagcctgtattcaaaaataatagccgttacgtgctcatacgaagcgttaagttccaagcgtccgcacaaagaagcaaaagacggttacacgggaatgttggagcttttaaagaatgaaggaaaacaatacgatgatacagtcgtaaaagcgcttgttttgtgtctgtctatttacccgatcggtctttatgtgcttttatcaaacggaaagaaagggcaggttgtggacgtaaaccccgaaaatccccgtttcccgattgtacaaatttttgatgagttcacacccgacggaaaaataaaaacggtacaaaccgctcccgacgtacttacaatcgtgcgtccgcttaaacgcaacgagataggcaactag

SEQ ID NO: 66478 - protein, 399 aa, Unknown
  Obtained from environmental sample
  DOMAIN (171)...(293): HD domain
  misc_feature (1)..(399): Xaa is any amino acid
MPDLLFIPGDKMNNFNVKEIRHNCYFSKPVYLDKAFVLTVPETPFSDDLLQLLDKWNFKVVYSEGETSNEYAKSGEAVSTHTSEVSGAGIGTVAGISQQTDFDKLKKAEEFYTSFLFYVENMFVKASVSDELDEKTVTEKIKEIAEYIKEDRRFLMRVLKNIEPAEGKNYLATHSVRTTILSMIIGTYLKLPTYRLIELGVAALMHEAGMLKLPSNIYLSQRALNPVEQKAIATHPILGYTMLKSFNFPLPVCLAALEHHERGNGAGYPRRLPNEKISLYSKIIAVTCSYEALSSKRPHKEAKDGYTGMLELLKNEGKQYDDTVVKALVLCLSIYPIGLYVLLSNGKKGQVVDVNPENPRFPIVQIFDEFTPDGKIKTVQTAPDVLTIVRPLKRNEIGN

SEQ ID NO: 66479 - DNA, 864 bp, Unknown
  Obtained from environmental sample
  misc_feature (1)..(864): n is a, c, g, or t
atgcgggggctcctcgggctggcgttttcgccaccttcgactgccgccctgctccctcaattaaaatcggcttgtcccgttaaggacgaggtgcttatcgccagtaacagcgagggaaaagccgctttcgatttattaatcgtaagggaattgacaggcggtctttacttcggcaaacgaggacgaattgacgaaccttccaacggacacactcccggagcggcttttgataccgaaacatattcatggatggaaattgaaagagtactccgagcaggttacgaagcggcggctgtacggcggaaaaaactctgcgtagtggacaaagccaacgtgcttgaatcgtcccgtttttggcgtgaagtggcggcggtagtttcaaaggactatcccgacatagagacaagttatctctatgttgacaacgccgccatgcagttgatccgcgctcccggacaattcgacgttatcgttacatcaaatctttttggagacatactttccgatgaggcgtccgtgcttacaggttcaatcggtatgctcgcctcggcaagtctcggcgctcttgtgcagggcggaacaagaccgggaatgtacgagcctattcacggctccgcccccgacatcgcggggaaagacttagcgaatccgctggcaacaattctttctgcggcgatgatgctccgctactccttcggtcttgaaaaggaagccgttgccattgaaacagcggtcaacaatgtgctggatcagggactgcggacaggagacatcgcaagccgaagcacggcaaacagcggtgaaaaaattgtagggacaaaagcaatgggcgaagctgtgctcaaagcgttggagaaattatga

SEQ ID NO: 66480 - protein, 287 aa, Unknown
  Obtained from environmental sample
  SIGNAL (1)...(15)
  DOMAIN (1)...(280): Isocitrate/isopropylmalate dehydrogenase
  misc_feature (1)..(287): Xaa is any amino acid
MRGLLGLAFSPPSTAALLPQLKSACPVKDEVLIASNSEGKAAFDLLIVRELTGGLYFGKRGRIDEPSNGHTPGAAFDTETYSWMEIERVLRAGYEAAAVRRKKLCVVDKANVLESSRFWREVAAVVSKDYPDIETSYLYVDNAAMQLIRAPGQFDVIVTSNLFGDILSDEASVLTGSIGMLASASLGALVQGGTRPGMYEPIHGSAPDIAGKDLANPLATILSAAMMLRYSFGLEKEAVAIETAVNNVLDQGLRTGDIASRSTANSGEKIVGTKAMGEAVLKALEKL

SEQ ID NO: 66481 - DNA, 1662 bp, Unknown
  Obtained from environmental sample
  misc_feature (1)..(1662): n is a, c, g, or t
atgaaaagcgattctgtaaacaagggtattgccaaagcgcctcatcgttcgctctttaaggcgttgggttttattgaagaagaattcaaaagaccgttaatagggattgcctgcgctaaaagcgaaatagtgccggggcatctgcacctcgataatatcgcgcgcgccgccgccgacggcgttcgcatggcaggcggtgtgcctgtaacatttcccgtaatcggcgtatgcgacggaatagcgatgggtcatgagggaatgagatactccctgccgacaagggaacttatcgccgactcgattgaatgtatggcgaccgctcacgcatttgacgctcttgtctttatcccaaattgcgacaagatagtgccgggtatgctcatggcgtcggctcggctcaaccttccgtccgtttttgtttcaggcggaccgatgctcgccgggcgcaaggacggaaaaccgctgacgcttaccaccatgtttgaggcggtaggcgctgttgccgcagggaagatcagcgaagcggaacttgaggaacttgaaaatctttcctgcccgggatgcggttcttgcgccggaatgtttacggcaaactcgatgaactgcgtaaccgaagcattgggaatggctctgccgggcaacggcactatccctgccgtaatggcggaacgtatccgtctggcgaaaaaaacaggaatgttaattttggacgtacttaaaaaagacctgcgtcctaaaagtatactcacagaaaaagcgtttatgaacgccctcgccctcgacatggcgctaggttgttctacaaataccgctcttcatcttcccgccattgcaggggaagcgggtttcaaactcgatctggaacttcttaacaaggtaagcgcggttacgcctaacctttgccgccttgcccctgcgggaaaagacgcaatcgaagacctgcacacggcaggcggaattcccgctgtctttaaggaactttcaaaaaagaaccttgtcgatcttaaagcagtcacagtgtacggctgcctcggcgacgcattgaacaaggcggaaaaccgcaacagcgatgtcgtaagaccgattgaaaatccctactcggcgacaggagggcttgccgccttgaaaggaaacatcgctcaggacggctgtgtcgtaaagcgaagcgctgtagcgccttccatgttgaaacacgaaggaccggcgagagttttcgattccgaggaaacggcatttgacgctatcatgggaaaaaaaataaacgctggggatgttatcgttatccgttacgaaggaccgaagggcggacccggcatgaaagaaatgctcgctcccacggcggctctcgcaggtatggggcttgacgataaagtcgccctgattacggacggacgattttcaggcgcatccaaaggagcgtccataggtcacgtctcacccgaagcggctttgggcggaaacatagggctcattaacgaaggcgacatcatagcgattgacattgacgggctttctataaacgtaaagataagcgatgaagaaattgagcggcggcggaaaaattggaagcctctttccaagaaccctgtcggttatcttgcccgatatgcggcgcaagtgggatcagccgcgtcaggagcggtttttacagagccaaagtaa

SEQ ID NO: 66482 - protein, 553 aa, Unknown
  Obtained from environmental sample
  DOMAIN (31)...(550): Dehydratase family
  misc_feature (1)..(553): Xaa is any amino acid
MKSDSVNKGIAKAPHRSLFKALGFIEEEFKRPLIGIACAKSEIVPGHLHLDNIARAAADGVRMAGGVPVTFPVIGVCDGIAMGHEGMRYSLPTRELIADSIECMATAHAFDALVFIPNCDKIVPGMLMASARLNLPSVFVSGGPMLAGRKDGKPLTLTTMFEAVGAVAAGKISEAELEELENLSCPGCGSCAGMFTANSMNCVTEALGMALPGNGTIPAVMAERIRLAKKTGMLILDVLKKDLRPKSILTEKAFMNALALDMALGCSTNTALHLPAIAGEAGFKLDLELLNKVSAVTPNLCRLAPAGKDAIEDLHTAGGIPAVFKELSKKNLVDLKAVTVYGCLGDALNKAENRNSDVVRPIENPYSATGGLAALKGNIAQDGCVVKRSAVAPSMLKHEGPARVFDSEETAFDAIMGKKINAGDVIVIRYEGPKGGPGMKEMLAPTAALAGMGLDDKVALITDGRFSGASKGASIGHVSPEAALGGNIGLINEGDIIAIDIDGLSINVKISDEEIERRRKNWKPLSKNPVGYLARYAAQVGSAASGAVFTEPK

SEQ ID NO: 66483 - DNA, 651 bp, Unknown
  Obtained from environmental sample
  misc_feature (1)..(651): n is a, c, g, or t
ttggaagcctctttccaagaaccctgtcggttatcttgcccgatatgcggcgcaagtgggatcagccgcgtcaggagcggtttttacagagccaaagtaaaggagattaaaatgcagtacacaggcgcgcaaatattggttgaatctttaattgagcagggagtagatacgattttcggttatcccggcggctcggtcttgaatatttacgatgaactctacaaacacagcgacaagattcgccacatccttgtcagccacgaacagcacgccgcccacgccgcagacggttatgcccgctccacaggaaaagtcggagtgtgcattgcaacttcgggaccgggagcgacaaatcttataacgggaatcgccacggcgtatatggattcaactccgttggtagcaattacaggcaacgtccctaccggtcttttgggcaaggacagttttcaggaagttgacattacaggtatttccatgccgatagtaaaacacaactggattgtaaaaaatgttgaagaccttgcggaagttatccgcgaagcgtttgagcttgctccgtcaggtcgtcccggacccgtacttatcgacataccgaaagatgttaccgctctgaccgccgaatggagtcctcaaaaaaaactgcgataa

SEQ ID NO: 66484 - protein, 216 aa, Unknown
  Obtained from environmental sample
  DOMAIN (40)...(211): Thiamine pyrophosphate enzyme, N-terminal TPP binding domain
  misc_feature (1)..(216): Xaa is any amino acid
MEASFQEPCRLSCPICGASGISRVRSGFYRAKVKEIKMQYTGAQILVESLIEQGVDTIFGYPGGSVLNIYDELYKHSDKIRHILVSHEQHAAHAADGYARSTGKVGVCIATSGPGATNLITGIATAYMDSTPLVAITGNVPTGLLGKDSFQEVDITGISMPIVKHNWIVKNVEDLAEVIREAFELAPSGRPGPVLIDIPKDVTALTAEWSPQKKLR

SEQ ID NO: 66485 - DNA, 543 bp, Unknown
  Obtained from environmental sample
  misc_feature (1)..(543): n is a, c, g, or t
gtggcaaatgatatgcgcaatttcgcgttacgctgctccatgacggcaaaaaatatcacagacatgattgaggaatcggcgaacgagatcgtagacgggatcaaaataaccgaggacgctttaggatatatcggcaaaactgttgaccgcgccgatgatttggacatccagatcgacaatatggtggaggtctcaagcaaacaggcccaaaacatacggcggttgaacgcagccttgtcgcggatgaacctgacgacccaacgcaacgccgcctatttcgacaacccgacgaacaccagcgagaaacccaaccgccgactccaagaactcgcgaaaccggcggacgattccacggcgaacacggacaacgaaccgtgcgccgacaacatatgtgaacagcgcggactgccaaaccgtaaaacgatgtacgcggctttcccctacaaaaaaactttttcggccgcgactttagcgttctgggcgcctgagagagtggaagcggaagaggcgttcacggtagacgattgcgagaagtggcggtag

SEQ ID NO: 66486 - protein, 180 aa, Unknown
  Obtained from environmental sample
  misc_feature (1)..(180): Xaa is any amino acid
MANDMRNFALRCSMTAKNITDMIEESANEIVDGIKITEDALGYIGKTVDRADDLDIQIDNMVEVSSKQAQNIRRLNAALSRMNLTTQRNAAYFDNPTNTSEKPNRRLQELAKPADDSTANTDNEPCADNICEQRGLPNRKTMYAAFPYKKTFSAATLAFWAPERVEAEEAFTVDDCEKWR

SEQ ID NO: 66487 - DNA, 1191 bp, Unknown
  Obtained from environmental sample
  misc_feature (1)..(1191): n is a, c, g, or t
atgaaaacgttaggaatctgtttcggcgccactacggtgcagtacgttaagttgaacgcctctaaaacctccgccgacggggcgatcgaggcgaccggacgcgtcgcgcacgagggcgaccccaagggcgtcgcgcttaagctgttgtcagacccggagttagcgagcgttgaccgcgtcgccgtcacggggcgggcctttcgctccagcgtcgatctttccgccatctccgagccggaggccgttgagtgcgctctgcgccgtacctactccggcggcggctacccgcacctcgtgataagctccggcggcgagacccagctcgtctacgtcatcaactccaaagggggggtaagctccgttcactccggcaacaagtgcgcctccgggacgggcgagttcttccttcagcagatacgccggatggacctgacgctagaagaggcggtcgagctagccaaacgcggcacgccccacaagatcgccgggcggtgcagcgttttctgcaaaagcgactgcacccacgccctcaacaagggcgagcctagggccaatatcgcggcggggctctgtctgatgatggcggacaagatatgcgatctagttaaggatatgaggggcggcaagtcgacgctcatcggcggcgggtcgctcaatacggcgatggtaaacatcctcaaagagcggttgggagagctggacgtccccgaaaccgccgcggcttttgaggcttacggggcggcgctctgggcggttgaaaatgagtgcgtcgcgcttccgaaagacctgtccgaggctatccaagacgcgccgacctccttcggggcgccacgcgccgcttgcggaggcgttgccgctcgtctcgttcaaggagatgaagaaggacaccgtgaaggcgggcgacgattgcgtgctggggttagacgtcgggtctacaaccaccaaggcggtgctgatgaggcgcggcgacaaggccgtagtcgcctccgtctacctgaggaccaacggcgaccctataggcgcctcgcgcaactgctacaaagccatccgcgagcaggtggggagcatgaagttcgacattaccggtctcggggtgacggggtcgggccgtcagatcgcggcgctccacgcgctcaccgacaatgtcataaacgagatcatagcccacgccacggcggcggcttattttga

SEQ ID NO: 66488 - protein, 396 aa, Unknown
  Obtained from environmental sample
  DOMAIN (4)...(251): BadF/BadG/BcrA/BcrD ATPase family
  misc_feature (1)..(396): Xaa is any amino acid
MKTLGICFGATTVQYVKLNASKTSADGAIEATGRVAHEGDPKGVALKLLSDPELASVDRVAVTGRAFRSSVDLSAISEPEAVECALRRTYSGGGYPHLVISSGGETQLVYVINSKGGVSSVHSGNKCASGTGEFFLQQIRRMDLTLEEAVELAKRGTPHKIAGRCSVFCKSDCTHALNKGEPRANIAAGLCLMMADKICDLVKDMRGGKSTLIGGGSLNTAMVNILKERLGELDVPETAAAFEAYGAALWAVENECVALPKDLSEAIQDAPTSFGAPRAACGGVAARLVQGDEEGHREGGRRLRAGVRRRVYNHQGGADEARRQGRSRLRLPEDQRRPYRRLAQLLQSHPRAGGEHEVRHYRSRGDGVGPSDRGAPRAHRQCHKRDHSPRHGGGLF

SEQ ID NO: 66489 - DNA, 1356 bp, Unknown
  Obtained from environmental sample
  misc_feature (1)..(1356): n is a, c, g, or t
ttgccccagccgtttctgccaaacgctgcaattcctgcaaatgctcctgtgcttgcgctggttttacgcgctgcgtggctattcctattaagatggctttttccatactttgggaaagttagtaaaatttactatattacccttgtgccctactttctattactatcaagcgtttttctgctcatttcgtgcgcagcccctagagtagtttacgagcctgacaactcaatagcttatgaagatgcagagatggtggcagaggcaggctattcccctgcaccagccagaaagggatatggatcgggtggcagacccagagctgcctcaatggaaattggaggctccggtgcgtttgcaagtggttttttaggggggcggattgcagattctaactatggtgctgacggcgatatggcagcagatgcttcatctacaagctaccaagcgagaatgattaattacaccggcagcatctctatgcaaagcgcagagccggaggtgcttatagatacggtggcagcttggacaaaggcaaaaggcggttccattagcaatcgcagaaatggctttatttccctgcaaattccagtggcagagttcaaaaactttttcaatcaaattttaaaacttggacgtgtaacaagcaaaaacatatccgcaagcgacatcacagaagcctacgcagacaatgccgctcgccttaaaatagcagaaagtacattggcaaggctgcaacatcttttagccgcagcaaaaaccgagaaagaaaaaattgccctcttaaaagaaatacaaagggtgagcgagcaaattgagcagagaaaactggaagaaaaagaactgctgcgccaagccgcattctccaccataaacctttttgtgagcaatatatctgaggttattccgtatagagcaaaaataagtgcctttggttggtttaaatatttgctcaataaaaatgcactttcaaataaagaaaaagcactcaaactttccgttccaaaagatttcatagaagtagaagattccaacaaaatgtggagcactgcttctgcacttaatgcaaaattcttcgctattgaaaggaaaaatgaaccccaaggcactcccagcttttgggcagaggcaatgcttgaatttttcaaaactcagtatgcagtagagcttaaaaccgaagaaaacttttccctagttcgcctgcaaaattttggcacagaacccgaagttcactatatagccttgttaaaaaaatccgatgaaaaaactttgagaatagccgttgcttattttccaaatgtagaagcagaaaaaaagaactccgaagctgtgctggaagttttgaggagggtaaaatga

SEQ ID NO: 66490 - protein, 451 aa, Unknown
  Obtained from environmental sample
  misc_feature (1)..(451): Xaa is any amino acid
MPQPFLPNAAIPANAPVLALVLRAAWLFLLRWLFPYFGKVSKIYYITLVPYFLLLSSVFLLISCAAPRVVYEPDNSIAYEDAEMVAEAGYSPAPARKGYGSGGRPRAASMEIGGSGAFASGFLGGRIADSNYGADGDMAADASSTSYQARMINYTGSISMQSAEPEVLIDTVAAWTKAKGGSISNRRNGFISLQIPVAEFKNFFNQILKLGRVTSKNISASDITEAYADNAARLKIAESTLARLQHLLAAAKTEKEKIALLKEIQRVSEQIEQRKLEEKELLRQAAFSTINLFVSNISEVIPYRAKISAFGWFKYLLNKNALSNKEKALKLSVPKDFIEVEDSNKMWSTASALNAKFFAIERKNEPQGTPSFWAEAMLEFFKTQYAVELKTEENFSLVRLQNFGTEPEVHYIALLKKSDEKTLRIAVAYFPNVEAEKKNSEAVLEVLRRVK

SEQ ID NO: 66491 - DNA, 819 bp, Unknown
  Obtained from environmental sample
  misc_feature (1)..(819): n is a, c, g, or t
ttgagcggctcgcaggtgcgaaatttagaaaaacgtttgccagagataaaagtgctggatagaacagggcttatacttgatatttntgcgcatcacgccaaaactgcggaaagccgccttatggtggaagtggcgcaaatgcagtatttgatgccacgcctcacccgtgcttgggttcatctttcaaggcaggttggcacgggcggagcaagccccggaattggaatgcgaggacccggcgaaactcagttggaagtggataggcgtttggtacgcaaacgaattcaggaactcaaagccaagttgaaaaaaatagagcgtgacagggaaaaccaagaaaggcgaagggaaaatacatttcacgttggcttggtaggctacacaaatgctgggaaaagtacacttgcaaatcgcttaacaggtgcaaacgtatatgtggaagataaactgtttgcaaccttggacagcacaacccgcaaatttcatttagcagacggtcaagatattatattgagcgatacagtcggctttattcgcaaattgccacaccacttggtggaaacattcaaaagcacccttggagttgccgccaacgcagactgcattcttgaagttatagattctgccgctgccgattacaaagaacatattgaggtaagcaaaaaaattctagacgaattggttgatccatctattccacgtttttgcgtgttcaataaaaccgatgccgcccccgatgaacgcagagaagaaatactcgcaaattaccctgatgccattttaataagtgcactgaaaatatcggtatggaaatgctaa

SEQ ID NO: 66492 - protein, 272 aa, Unknown
  Obtained from environmental sample
  DOMAIN (120)...(242): GTPase of unknown function
  misc_feature (1)..(272): Xaa is any amino acid
MSGSQVRNLEKRLPEIKVLDRTGLILDIXAHHAKTAESRLMVEVAQMQYLMPRLTRAWVHLSRQVGTGGASPGIGMRGPGETQLEVDRRLVRKRIQELKAKLKKIERDRENQERRRENTFHVGLVGYTNAGKSTLANRLTGANVYVEDKLFATLDSTTRKFHLADGQDIILSDTVGFIRKLPHHLVETFKSTLGVAANADCILEVIDSAAADYKEHIEVSKKILDELVDPSIPRFCVFNKTDAAPDERREEILANYPDAILISALKISVWKC

SEQ ID NO: 66493 - DNA, 612 bp, Unknown
  Obtained from environmental sample
  misc_feature (1)..(612): n is a, c, g, or t
atggcgttaacattgcaatgtgagcacactaagggggggattatggcggtagcattaccagaaagacgacatcgaaaaagttgtgtcgacgaaaatcattcggctatactcaaggaacagcttgcgcagcgcgtagctgtcatcaaacggtttaaggaacttcttgttcaacagcgcgatcgtttccgcagttaccttgccgtgctggacaagcagcagcttctcatcggttatggcagcgcggatgagataacagcccatgtcgaactggaagagcagatagtcgcggatattttttccatccagaaagtcattgatcccatggaagttatgtataacgccgcaggcgccgccgtaggcgctgactcatgtgacttaagtgacttaggcacttttattacaatcaatgatgttcctgagttaaaagcaacgctggaagacttaaaaacccaagccgtaatcagatcagggcaaaaccgggacctgctttccagacgcatggaagaaatcaatacaaatatacaaacaattaaaaataacccgtttttatcaaaggcacgtaatgcattgtatcagaacgtctccccttcattagtcgatgttatgggttga

SEQ ID NO: 66494 - protein, 203 aa, Unknown
  Obtained from environmental sample
  misc_feature (1)..(203): Xaa is any amino acid
MALTLQCEHTKGGIMAVALPERRHRKSCVDENHSAILKEQLAQRVAVIKRFKELLVQQRDRFRSYLAVLDKQQLLIGYGSADEITAHVELEEQIVADIFSIQKVIDPMEVMYNAAGAAVGADSCDLSDLGTFITINDVPELKATLEDLKTQAVIRSGQNRDLLSRRMEEINTNIQTIKNNPFLSKARNALYQNVSPSLVDVMG

SEQ ID NO: 66495 - DNA, 609 bp, Unknown
  Obtained from environmental sample
  misc_feature (1)..(609): n is a, c, g, or t
atgttatgggttgaacaaaatatggaaaatgtattgtccttgctcagagactccggggcgatgcttgaagggcatttcctcctgagttcgggacgccattcagacaaatactttcaatgcgcaaagttactgcaataccctgacaaggccgccgtggcgctagccggcgcagcggaaaaaatcaaaaaggacatgcaggccggtaaactggaaatacatgccgttgtcgggcccgcaatggggggaattgttgttgcctacgaactgggcaggcagttggggcttcccgctttttttaccgagcgcgatgataccggaaaaatgacgctgcgccgcggttttgaaattgagcccgggcaaaaaatcctgattaccgaggatgtggtaactaccggcaaatcttccggcgagtgcgccgccgtccttgaggaacacggagccaaaattaccgcccttgcctgcctggttgacagacgcggcgccggcattgatatcccatggccgttttatccctgttgtaaggttgatgccttaaactgggaagccggcgcctgcgagctgtgcaaaaaaggaatacccgctgtaaaacccggctcaagaaaaacttaa

SEQ ID NO: 66496 - protein, 202 aa, Unknown
  Obtained from environmental sample
  DOMAIN (39)...(166): Phosphoribosyl transferase domain
  misc_feature (1)..(202): Xaa is any amino acid
MLWVEQNMENVLSLLRDSGAMLEGHFLLSSGRHSDKYFQCAKLLQYPDKAAVALAGAAEKIKKDMQAGKLEIHAVVGPAMGGIVVAYELGRQLGLPAFFTERDDTGKMTLRRGFEIEPGQKILITEDVVTTGKSSGECAAVLEEHGAKITALACLVDRRGAGIDIPWPFYPCCKVDALNWEAGACELCKKGIPAVKPGSRKT

SEQ ID NO: 66497 - DNA, 747 bp, Unknown
  Obtained from environmental sample
  misc_feature (1)..(747): n is a, c, g, or t
atgaaggcaattccgccgtttaccgttatttatgaagacgacaatatcatagcagtcaataaagccgccggaatttcggtgggcggcgaccggtgggacgaatccaaagaacggttagacaaactggtcgctgaaattattaaccctccatcaaagatttttactgtccaccgtatagactgtgatacttccgggctagtagtattcgcgaaaaacgaagaaacccaccgccgtctttcaatcgcctttgaaggacgtgatgtctcaaagcggtacatcgccattgtccacggccgcccttgttggcaggaaaccgtctgcgatcttcccctgattcccaatggcaataaactccaccagactataattgacaaataccagggcaaaaaatcccttacccgctttattctgtcgggcagcgcgggaaattacagcgttgttgaagctctgccggaaacaggcagaacccaccagatacgcgttcatgccgccgctttgggccatcccgttgtatgcgactcaatgtacggaaagggcaagccggttatgctttcggaaataaaaagaaactggcatggcgacccttatgaagaaaaacccctattggcgcggctgggccttcatgccgccgaattaatattaccaatggagtcaattaatctccatgccccgcttcccagggatatgaccgcgctaatcaatcagatggagaagatcggggactggggatcggggactagggactag

SEQ ID NO: 66498 - protein, 248 aa, Unknown
  Obtained from environmental sample
  DOMAIN (15)...(165): RNA pseudouridylate synthase
  misc_feature (1)..(248): Xaa is any amino acid
MKAIPPFTVIYEDDNIIAVNKAAGISVGGDRWDESKERLDKLVAEIINPPSKIFTVHRIDCDTSGLVVFAKNEETHRRLSIAFEGRDVSKRYIAIVHGRPCWQETVCDLPLIPNGNKLHQTIIDKYQGKKSLTRFILSGSAGNYSVVEALPETGRTHQIRVHAAALGHPVVCDSMYGKGKPVMLSEIKRNWHGDPYEEKPLLARLGLHAAELILPMESINLHAPLPRDMTALINQMEKIGDWGSGTRD

SEQ ID NO: 66499 - DNA, 1500 bp, Unknown
  Obtained from environmental sample
  misc_feature (1)..(1500): n is a, c, g, or t
atgacagattcggccgagaggctggattatagatggctgtatgccagatttctacttacggcatcggagcagcgcgccgaacgtataaaacaggatgctataaaagaggctgaagctaaaaagaaggaaatacttcttgaagcaaaagatcaagtaatccgagacagaaaccagcaggaaagagagacccgggagcgtaaggctgaactacagcgctatgagcgacgtgtatttcagaaagaagaaagcatagataaaaaaaccgctcatttggagcgaattgaacaggccctggcggataaagaaaagatctgccaggagcgggaagacgcgctgaccagggaggaagaacgctaccgttccgaattggaacgtgtttccggcctcagctcggaagaagccaagcgcctcatcatccagaacctggaaagcgaggccaagcatgacgcccaggtgttgatcaacaaaatcgagcaggaagcgaaccttgccggggagaaaaaggccagggacatactccttagcaccatccagcgccttgcaactgaggttacaggggaggtaaccgtagccactgttacccttcccaacgacgagatgaaggggcggataataggccgggaaggccgtaatatccgtaccctggaaaccctcaccggggtggacatcatcatcgacgacacgccggaagcggtagttatctcctgtttcgaccctgtccgcagggaaatagccaaggtaagcctggaaaggcttatcgccgacgggcgcatacacccggccaggattgaagaaatcgttaccaaggtaacaaaggacatctcccagaagatctttgaagagggcgaaaagatccttttcgaccttggaattcacaacatcaagcaggatgccattcgtacccttggcaggctttatttccgcacgagttacgggcagaacgtgcttcaccattcaaaagaagtggcgataattgcgggtatgcttgcggcggaagtcggctgcaaccgagaccttgccaaacgagccgccttgttacacgacatcggcaaaggtacggaaacaaattccgatcttaaccacgctgaaatcggcatggatatggctcgcaaaatgggcgaagacccaagaattatcaacgctatcggaagccatcacaacgacattgagccgacctgcatagaggcggttcttgtacaaatagccgacgcaatttcggcggcaagacccggagcgagaaaagagactctggacaactacatcaagcgtcttgaaaaccttgaaaacatcgccacaggctttagtggcgtagataaatcgttcgccattcaggcgggtcgtgagcttcgcatacttgtaaacaacgaaacggtcaacgacgagcaaaccagagagatggcaaaagaaatcgctaaaaagattgagaacgatctgcgctacccgggacgtattaaagttacgatgatccgtgagacgagaattacagagtatgctagataa

SEQ ID NO: 66500 - protein, 499 aa, Unknown
  Obtained from environmental sample
  DOMAIN (190)...(249): KH domain
  misc_feature (1)..(499): Xaa is any amino acid
MTDSAERLDYRWLYARFLLTASEQRAERIKQDAIKEAEAKKKEILLEAKDQVIRDRNQQERETRERKAELQRYERRVFQKEESIDKKTAHLERIEQALADKEKICQEREDALTREEERYRSELERVSGLSSEEAKRLIIQNLESEAKHDAQVLINKIEQEANLAGEKKARDILLSTIQRLATEVTGEVTVATVTLPNDEMKGRIIGREGRNIRTLETLTGVDIIIDDTPEAVVISCFDPVRREIAKVSLERLIADGRIHPARIEEIVTKVTKDISQKIFEEGEKILFDLGIHNIKQDAIRTLGRLYFRTSYGQNVLHHSKEVAIIAGMLAAEVGCNRDLAKRAALLHDIGKGTETNSDLNHAEIGMDMARKMGEDPRIINAIGSHHNDIEPTCIEAVLVQIADAISAARPGARKETLDNYIKRLENLENIATGFSGVDKSFAIQAGRELRILVNNETVNDEQTREMAKEIAKKIENDLRYPGRIKVTMIRETRITEYAR

SEQ ID NO: 66501 - DNA, 930 bp, Unknown
  Obtained from environmental sample
  misc_feature (1)..(930): n is a, c, g, or t
atgatacctgaaatgattaagcgcgaagcaatatacctttggtactacttttctattttactcgggcaaatagggccgtactggatcttgggtatggcgcttggctcggtcatatcggtatttggcaaggaacggatacacaggctatttgactcattgcagaacaagcacctcggggtgtttggcttaatccccgcaagccttatcgggattgcatcccccctttgcatgtacggaacaatcccgatagcggcgtcattcgccgaaaagggaatggaagaggactggctcgccgccttcatgatgagttcaattttgttaaaccctcagctgcttttttacagcgccgctcttggggcggacgcgctggttatacgttttgttgtctgttttttgtgcggaattgccgcgggggcggtcataagactctttttcaaaaacaaacaattttttaatttctccggtcttaccgcccccgcaaacagggacaccgacccaaaccccgtattacgctttctaaaaaatttcgcccgcaatgtaaaagccaccgccgtatattttctaatcggcgtattactatccgctctctttcagcgctacgttccgcaagaaggctttgcaagacttttcggcggcagtacccccgcaggtaggggcttcgccgtattaatgtccgctaccataggcgtccccctgtacatgtgcgggggcggaaccataccgctcctccaaacatggctgcgaaacggcatgagcatgggcagcgccgccgcatttatgattacaggacccgccaccaaaataacaaaccttggagcgttaaaaatcgtcctaggcgtaaaacacttttttttctaccttttatttacggtagtgtttgcgtttgtcagcggcgttgtagttgatctgatttacggggtaattcgttag

SEQ ID NO: 66502 - protein, 309 aa, Unknown
  Obtained from environmental sample
  DOMAIN (9)...(303): Predicted permease
  misc_feature (1)..(309): Xaa is any amino acid
MIPEMIKREAIYLWYYFSILLGQIGPYWILGMALGSVISVFGKERIHRLFDSLQNKHLGVFGLIPASLIGIASPLCMYGTIPIAASFAEKGMEEDWLAAFMMSSILLNPQLLFYSAALGADALVIRFVVCFLCGIAAGAVIRLFFKNKQFFNFSGLTAPANRDTDPNPVLRFLKNFARNVKATAVYFLIGVLLSALFQRYVPQEGFARLFGGSTPAGRGFAVLMSATIGVPLYMCGGGTIPLLQTWLRNGMSMGSAAAFMITGPATKITNLGALKIVLGVKHFFFYLLFTVVFAFVSGVVVDLIYGVIR

SEQ ID NO: 66503 - DNA, 579 bp, Unknown
  Obtained from environmental sample
  misc_feature (1)..(579): n is a, c, g, or t
ttgccctgctggagcggcaatttgccgaacgccgccctaagccgccgggtttttttccccaccaaagagccaagcgacggcgttattggccggataatccgctccgccctgaagaacgaccccgctttacggcctgatacccttgcccggctctttgccgccgaccgcggcgaacatttgtacgcttccggtggtatatttgaacgctgtgggcgagacgaactggtagtctgcgaccgctatgttctttcctcgctggtctatcagggcatagagtgcggtgatgaacttcccggcagtctgaacgcccccttccctgtcccggaattactattgttctttgacattgacccccaaatcgccatggaacgcctgcaaagccgcccatccctggaaatttatgagcatcttgccttccagcgcaaagtccgaaaacgctatcattccctgcttgacggctgccggactgccggggtccgggtagaaatcatcgacgcgtcgcaaaacgtggaaacagtcgccgcggcagtatggagtcacctgtcaaaaatgccgataatgaacaataatggggaataa

SEQ ID NO: 66504 - protein, 192 aa, Unknown
  Obtained from environmental sample
  DOMAIN (6)...(177): Thymidylate kinase
  misc_feature (1)..(192): Xaa is any amino acid
MPCWSGNLPNAALSRRVFFPTKEPSDGVIGRIIRSALKNDPALRPDTLARLFAADRGEHLYASGGIFERCGRDELVVCDRYVLSSLVYQGIECGDELPGSLNAPFPVPELLLFFDIDPQIAMERLQSRPSLEIYEHLAFQRKVRKRYHSLLDGCRTAGVRVEIIDASQNVETVAAAVWSHLSKMPIMNNNGE

SEQ ID NO: 66505 - DNA, 639 bp, Unknown
  Obtained from environmental sample
  misc_feature (1)..(639): n is a, c, g, or t
atgaaggggttacgaaccataaccgcgttcattgcgggtattgttctgttttccgcggttacgccgctgaacgcgtattatgtcacctacaaggaacagtactaccgtctgtaccacctgcaccttatccagtaccccgatgacactatggaaaatatttactggctggagaaagcgatgcaagccgatttttgcaatcctctctacgctcttgccctgattgaaaacgaaacccaatgggaaaaataccgttatctgtttaatatgcacatcaatctcaagctgatcgagcagtacctctttttgggaaacaagtggaaacagcgccgggcctatttttacaacgccccctggcgggatcaaaatatcgaaagtcttgaaacggctgagacctgttaccgcaccgctctttattactgggatgaagctcttttatggtggaagaaagccaacgacagaaagttcaggtggattgaccttcctaaagttcaattttggcaggatgaggcgttcaggattgaaaacggcacgttgaactacgcaagaacaattaaccgcgagcttgagtctttgcaaaaagtgcgtgagcaatttaaggctatggaaaaatattatacgatacaggactcgttgcagtaa

SEQ ID NO: 66506 - protein, 212 aa, Unknown
  Obtained from environmental sample
  SIGNAL (1)...(25)
  misc_feature (1)..(212): Xaa is any amino acid
MKGLRTITAFIAGIVLFSAVTPLNAYYVTYKEQYYRLYHLHLIQYPDDTMENIYWLEKAMQADFCNPLYALALIENETQWEKYRYLFNMHINLKLIEQYLFLGNKWKQRRAYFYNAPWRDQNIESLETAETCYRTALYYWDEALLWWKKANDRKFRWIDLPKVQFWQDEAFRIENGTLNYARTINRELESLQKVREQFKAMEKYYTIQDSLQ

SEQ ID NO: 66507 - DNA, 1365 bp, Unknown
  Obtained from environmental sample
  misc_feature (1)..(1365): n is a, c, g, or t
ttgaattgtaagaggggagaaatgcttaaatcaattatcaaaagagacggggtgaaacagccttttcatgaggctaagataaccgacgctatttataagtgtctggaagcgtccgggaatcccgacaggcatctggcgatgaaattgtcgatggatgtcatagacaaaataaaacaacattataccgaagataattttactgtcgaaaatgtgcaggatttggttgaagatgttttgggcgagaagggttttcaaaaagaagccaagtcttatattctttaccgcgccaaccgttccagaataagggacgcgcgcagcgaattaatgaacgatgtttcggaaattctgcaggagacaaaccgcgacaacgccnatgtaagcaattcgccctcggcgaaggttctgcaaatttcggaggcagcctcgaaaaattattacttaaagcgcgtaatcccggaaaaagaggcaagagcgcatatagagggcgatatttatattcacgatttgtcatggtacggaaaaacaatgacttgccttcaaattcctcttgacaaactgttacgcgaaggttttaacaacgggcatggctacattcgcccgcccaaaggaataaaaaccgccgcttcgctcgcggcgattattttgcagagcaatcaaaacgacatgcacggcgggcagtcctttgcctatttcgacagggatatggcggcttatgtcgagattgaaaaaaagaggcaggagaagcaaatacgcggcaacctgaaggaacttggattgtccgagcttgttaacgaagaaaaaataaaagcgcttgtttacggacttaccaaagaagaaacctttcaggcgatggaagggtttatttacaatttgaatacaatgcactcaagggcgggggcgcaggttcctttttccagcatcaatctgggtacggacacaagcgacgcgggcagaatggttacggagtgttttttgctcgcttacgaaaaaggattgggaaggggagagtcgccgctgtttcccaatgtgtgctttaaactgaaggaagacgttaattttgaggaaggcgacccaaactacgatttgtttcagttgagcatgcgtgtcgcctgcaagcggctttttccggcttattcgtttcaggattcaagttttaacaaaccgtaccgcgatgaggaagtggcctacatgggctgcagaacacgcgttatgtcaaactgtaacggggcggaaattaccaattcaagggggaatctgtcttttactaccattaatttgccgcgcttagggcttcgcgccgaaagagatttagccctgttctggagattgctggacgagcttatcgatcttaccgttgacaattga

SEQ ID NO: 66508 - protein, 454 aa, Unknown
  Obtained from environmental sample
  DOMAIN (10)...(102): ATP cone domain
  misc_feature (1)..(454): Xaa is any amino acid
MNCKRGEMLKSIIKRDGVKQPFHEAKITDAIYKCLEASGNPDRHLAMKLSMDVIDKIKQHYTEDNFTVENVQDLVEDVLGEKGFQKEAKSYILYRANRSRIRDARSELMNDVSEILQETNRDNAXVSNSPSAKVLQISEAASKNYYLKRVIPEKEARAHIEGDIYIHDLSWYGKTMTCLQIPLDKLLREGFNNGHGYIRPPKGIKTAASLAAIILQSNQNDMHGGQSFAYFDRDMAAYVEIEKKRQEKQIRGNLKELGLSELVNEEKIKALVYGLTKEETFQAMEGFIYNLNTMHSRAGAQVPFSSINLGTDTSDAGRMVTECFLLAYEKGLGRGESPLFPNVCFKLKEDVNFEEGDPNYDLFQLSMRVACKRLFPAYSFQDSSFNKPYRDEEVAYMGCRTRVMSNCNGAEITNSRGNLSFTTINLPRLGLRAERDLALFWRLLDELIDLTVDN

SEQ ID NO: 66509 - DNA, 783 bp, Unknown
  Obtained from environmental sample
  misc_feature (1)..(783): n is a, c, g, or t
ttgataacaaggtacaatgtgcagaagaatcttaaagtaagggattttccgtttttaatggggcagaaattgtatcttgacagcgaagaattgtcagctaacgatacgattgaaaaggcaatccgccacggaacgctgagcataggttttatcgggctggcggaatgtcttaccgcgctgattggaaagcatcacggggagggcgccgacgctcaggctctgggccttgccattgtaagccacatgaggcgcaggtgcgatgaggcgacaaagaaacacaaactgaacttctcgcttctcgcgacgccggcggaacagttaagcggcaaatttaccaaacttgatgttaaacaatacggagtgattccgggagtaacggacaaggaatggtacacaaattcatttcatgtccccgtagagtttcagattaccgctcaggaaaaaatcgagaaagaaggggtttatcacaaatactgcaacgcggggcatatttcatacgttgagcttgccgccgcgcccgaggacaacatcgaagcgtatgaatcgctgataaaggctatggcggaggcggacatgggttacgccgcgataaatttccctattgacatctgccataaatgcggaatgaacggagtaattccgggcgacacatgtcccaagtgcggcggaaaagaaataacccgtgtgcgcaggataaccggatacctttctacgattgaccgttttaacaacagcaagctggcggaagtaaaaaaccggaagattcacataaactttaactag

SEQ ID NO: 66510 - protein, 260 aa, Unknown
  Obtained from environmental sample
  DOMAIN (139)...(240): Glycine radical
  misc_feature (1)..(260): Xaa is any amino acid
MITRYNVQKNLKVRDFPFLMGQKLYLDSEELSANDTIEKAIRHGTLSIGFIGLAECLTALIGKHHGEGADAQALGLAIVSHMRRRCDEATKKHKLNFSLLATPAEQLSGKFTKLDVKQYGVIPGVTDKEWYTNSFHVPVEFQITAQEKIEKEGVYHKYCNAGHISYVELAAAPEDNIEAYESLIKAMAEADMGYAAINFPIDICHKCGMNGVIPGDTCPKCGGKEITRVRRITGYLSTIDRFNNSKLAEVKNRKIHINFN

SEQ ID NO: 66511 - DNA, 1077 bp, Unknown
  Obtained from environmental sample
  misc_feature (1)..(1077): n is a, c, g, or t
atgatggaaataggaatggacgtttcaactcttgaagaaacagaacgactgggcggtaaattttatgaaaacggaaaagaagccccgctttacgacattcttaaaagacacggtgttacgagtatccgtttgcgcctctggaacaacccatttaatgaaaaaggcgaaacctacggcgcgggcggctgtgatatagaaactgttttacgcggcgcgcggcgcgctgtagaaaacggaatgagttggattttggattttcactattcggatttttgggcagatccagcaaaacagtttatcccgaaagcatggcagggttttacaccggaacagacggaaaaggccgtttatgagtatacgaaagagattcttgcccgctgtaaaaaagaggcgctttatcccgattatgtgcagataggaaatgagattaccaacggtatgctttggccggtcggcaaggtggaatatgataaggttacaggcgagccaatctgttacgataaaatgatccgcctgttaaaagcgggggttgcggcggcgcgtgaaagcggaaacgtaaaaataattcttcacctggaaaagtcctgcgataacgtaagataccggcaatggtttgacgcggtaacggcggcggtcattgattacgatattatcggagtttcgtactatccgcattggcacggaacgatgcagaagttcaaggataatttggaggatatttccgcgcgttacaataaagacgtaatgattgtggaaaccgcttatccgtttaccaatgagcattatacggttactcccggcgtttcacttgttattaacgacagtataaaattacaggacggcagtcttccgccgtatccgcatagcaaagaaggacaatgtaactttttgcgcgatcttgtgaaaatggtaaagagcgtcaaacgctgcaaaggcctgtactattgggaacctggatggcttccggtggagggttcgacatgggcaaccggagcagcgcgcaaatacataggagaggaacacaagaccggagggaacgaatgggcgaatcaatgcctgtttgattataaagagtaa

SEQ ID NO: 66512 - protein, 358 aa, Unknown
  Obtained from environmental sample
  DOMAIN (5)...(355): Glycosyl hydrolase family 53
  misc_feature (1)..(358): Xaa is any amino acid
MMEIGMDVSTLEETERLGGKFYENGKEAPLYDILKRHGVTSIRLRLWNNPFNEKGETYGAGGCDIETVLRGARRAVENGMSWILDFHYSDFWADPAKQFIPKAWQGFTPEQTEKAVYEYTKEILARCKKEALYPDYVQIGNEITNGMLWPVGKVEYDKVTGEPICYDKMIRLLKAGVAAARESGNVKIILHLEKSCDNVRYRQWFDAVTAAVIDYDIIGVSYYPHWHGTMQKFKDNLEDISARYNKDVMIVETAYPFTNEHYTVTPGVSLVINDSIKLQDGSLPPYPHSKEGQCNFLRDLVKMVKSVKRCKGLYYWEPGWLPVEGSTWATGAARKYIGEEHKTGGNEWANQCLFDYKE

SEQ ID NO: 66513 - DNA, 348 bp, Unknown
  Obtained from environmental sample
  misc_feature (1)..(348): n is a, c, g, or t
atgacacgtggtgaattatggtgggccgattttggcataccttttggcagtgaaccggggtataaacgtcctgttctaataatgcaaaatgattttttcaataacagtaaaataaatacaacaatagtaatcccattaacaacaaacctgatattggcggatgcgcccggaaatatacttattaccaaacatgaatcaaaattgaaaaaggattccgtaataacaatatcgcaaattgaagtaatagatcggcaaaggcttattgaaaaaattacaaaaattgataagacaataattgaaaagatagaaaataatatcctgttcgttttaggaataagaaaagcataa

SEQ ID NO: 66514 - protein, 115 aa, Unknown
  Obtained from environmental sample
  DOMAIN (2)...(111): PemK-like protein
  misc_feature (1)..(115): Xaa is any amino acid
MTRGELWWADFGIPFGSEPGYKRPVLIMQNDFFNNSKINTTIVIPLTTNLILADAPGNILITKHESKLKKDSVITISQIEVIDRQRLIEKITKIDKTIIEKIENNILFVLGIRKA

SEQ ID NO: 66515 - DNA, 642 bp, Unknown
  Obtained from environmental sample
  misc_feature (1)..(642): n is a, c, g, or t
atgaagggggggaaatcggctaatacaacatacagcgcaagaaccgttacgccaacgccaacggtgaacgctccggcgcagacagcgacaacgccagcgaagccgccggttacgacttacaaaatcggcgacacggggccggcgggcggattggtattttacgacaagggaaacaatataggcggctggcgttacctcgaagccgccccttccgatttagggccaaataaatttattacggaagacccggggtcgttacccaaaaacttatatgacctatgggaaaaaaccgacggcgacaaagggcgaggagtaggcaaaggcaaatacaacacggaatttttaatgggaatagcgcaagcaagaggcggttttaattgggcgatacgtttatgcgacgaatacgaactcaacggctataatgattggttcatgccaagcagagacgaactcaattttatgtacggcaacctgcacatgaaagggcgaggcaatttccgacttgaaccatactggtcgtcaacaggctggcaggacacatggggttcttacagcgcatggtatataaattttgaagatggtacgcatgattataaaggcgcaagccagccacgccgctttagacctgtcaggcagttttaa

SEQ ID NO: 66516 - protein, 213 aa, Unknown
  Obtained from environmental sample
  misc_feature (1)..(213): Xaa is any amino acid
MKGGKSANTTYSARTVTPTPTVNAPAQTATTPAKPPVTTYKIGDTGPAGGLVFYDKGNNIGGWRYLEAAPSDLGPNKFITEDPGSLPKNLYDLWEKTDGDKGRGVGKGKYNTEFLMGIAQARGGFNWAIRLCDEYELNGYNDWFMPSRDELNFMYGNLHMKGRGNFRLEPYWSSTGWQDTWGSYSAWYINFEDGTHDYKGASQPRRFRPVRQF

SEQ ID NO: 66517 - DNA, 585 bp, Unknown
  Obtained from environmental sample
  misc_feature (1)..(585): n is a, c, g, or t
gtgcggtttacgataatggcaatgacgttgtttgaaaaatcaccgccgttcacagatacccgaaacggcaaaagatacaatactgtacggataggcggtatgaagtggatggcggagaacctgaattatcaaccgccgaaaggctattcgtggtgttacgacgacgataattccaattgcaacaaatacggcaggttatacgattggaacaccgcgatgacggtctgtccggtgggatggcatttgccgtcgcgtggtgagtgggggactttggcggttatcgcaggcggtaccggtgcttatggtaacgaaggtactggggggaagatgttgaaagcgagaagcggttgggagaaaaacggtaacggtacggatgattttggattttcggccctgccgggcggccgcctccacaactccgatggcagtttctacaatgccggctacagcggcttctggtggacggccacggagaatagtagcggcaacgcctactaccggaacatgtactacaactacgacttcgtggacgagctcagcaacggcaagagccgcggcgtctcggcccgttgcgttgagaattaa

SEQ ID NO: 66518 - protein, 194 aa, Unknown
  Obtained from environmental sample
  misc_feature (1)..(194): Xaa is any amino acid
MRFTIMAMTLFEKSPPFTDTRNGKRYNTVRIGGMKWMAENLNYQPPKGYSWCYDDDNSNCNKYGRLYDWNTAMTVCPVGWHLPSRGEWGTLAVIAGGTGAYGNEGTGGKMLKARSGWEKNGNGTDDFGFSALPGGRLHNSDGSFYNAGYSGFWWTATENSSGNAYYRNMYYNYDFVDELSNGKSRGVSARCVEN

SEQ ID NO: 66519 - DNA, 1017 bp, Unknown
  Obtained from environmental sample
  misc_feature (1)..(1017): n is a, c, g, or t
atgcagggaacgccagacatggccgcgacaaacgacgaaacccagccccaagacgcaggggggcaagaccaacggcacgacgagggctacaagtacatactgtccaaagcgtctaacttcttgcactttttgaaaaaatacttccatgcgccgtggatggccgacatctccgtcgacgatatagagccggtcaataagagttatatcactaaggaatacagacgcgtggactcagacctgatatataagttgaaaaggggcgatgccgatatatatttttacgtattgcttgaattacagtctaaagtcgatcatacaatggtgttcagactgctgagatacatggtcgaactgttgaacgacgtattcaaaaatgcggataagaacgtaagaagacgcaaagacttccggcttccggccatcgtgccgatagtgttgtatgacggagacaaccgttggacggcggtcaagtcgtttaaggagtatacgaaagactatggaatgttcggaaataacatcatagacttcgaatatctcctgcttgacctgaaccggactgacgacagcctgatattgccggtgagtaaattgttggacgcggccttttcgttggccaaaatgcgttttgaaaagaaactgtcgcccgaagaagtcaatatctggtgggctgaacaagcgccgcatttgtcaaaagacgatatattagagttagccgattggatgtcgctcgctttcagagcgccaccggaaataaagcaaacgcttaaagatactttaatgaaaggagacggggtcgccatgaaaacaggatttgaattgtgggcggacgagtatagggggtcgctcgtacttgagggtaagcgcgagggtaagcgcgagggtaagcgcgagggtgagcgcgagggtgagcgcaagaaggctctgaaaatcgcggcggggatgaaagccgaaggtatggacgtgtataccatatcacggctcaccgaactcaccattgatgaaatcctgccgttgtaa

SEQ ID NO: 66520 - protein, 338 aa, Unknown
  Obtained from environmental sample
  DOMAIN (35)...(318): Putative transposase, YhgA-like
  misc_feature (1)..(338): Xaa is any amino acid
MQGTPDMAATNDETQPQDAGGQDQRHDEGYKYILSKASNFLHFLKKYFHAPWMADISVDDIEPVNKSYITKEYRRVDSDLIYKLKRGDADIYFYVLLELQSKVDHTMVFRLLRYMVELLNDVFKNADKNVRRRKDFRLPAIVPIVLYDGDNRWTAVKSFKEYTKDYGMFGNNIIDFEYLLLDLNRTDDSLILPVSKLLDAAFSLAKMRFEKKLSPEEVNIWWAEQAPHLSKDDILELADWMSLAFRAPPEIKQTLKDTLMKGDGVAMKTGFELWADEYRGSLVLEGKREGKREGKREGEREGERKKALKIAAGMKAEGMDVYTISRLTELTIDEILPL

SEQ ID NO: 66521 - DNA, 597 bp, Unknown
  Obtained from environmental sample
  misc_feature (1)..(597): n is a, c, g, or t
ttgaaaaagtacggattcggcccggcgattcagacaaaatcaaatttgatacttcgcgatctggaacttttgaaaagcataaaccgtaaggcaaaatgtgtggttgaaatgacccttaccacatttgacgagaatctctgcaaaatcgttgagccaaatgtctgcacaagccttgaacgctttgaaacgcttaaaatcttgcgggacaacggtattaaaactgtggtctggttctgtcccctccttccgttcataaatgacactgcggaaaatctgcggggaattcttggctactgcgttgaagctgaagtgtacggcatcctctgctttggaatgggtatgaccctgcgggaaggtgatcgcgagtattattacaaaatgctggacaggcacttcccgggattgcgtagcaagtatgaaagaaaatacgggaacagctatgttatttcaagcgataataacggggaacttatgaagatttttctggagagttgtcgagaaaatgatatagtctgcgataatgaaaaaatatttgagtttatgtccagtcttgatactcagaacagaaccacccaggcggaattggatttgttctga

SEQ ID NO: 66522 - protein, 198 aa, Unknown
  Obtained from environmental sample
  misc_feature (1)..(198): Xaa is any amino acid
MKKYGFGPAIQTKSNLILRDLELLKSINRKAKCVVEMTLTTFDENLCKIVEPNVCTSLERFETLKILRDNGIKTVVWFCPLLPFINDTAENLRGILGYCVEAEVYGILCFGMGMTLREGDREYYYKMLDRHFPGLRSKYERKYGNSYVISSDNNGELMKIFLESCRENDIVCDNEKIFEFMSSLDTQNRTTQAELDLF

SEQ ID NO: 66523 - DNA, 2346 bp, Unknown
  Obtained from environmental sample
  misc_feature (1)..(2346): n is a, c, g, or t
gtggaacttatccgggaagaatggaggcgcgtacagcagcggggggtgaacggttatatttatgacgaatattcccctgaacaggtaatcgacagcgttcaaaatatagcgattagaaacggcggcggttcaatcaagataaccccaagcggcgcggggtatcatatcttacgggtttcagcgcgggacagggaaggcagaacggccctgacggaactggatttttatgtcaccggttcgggcggctactggaacatgagcaaccccagcgaattacgactaacaccggatcaggagatgtataaccccggcgacacggcgaaggttctgctgcagagtactcttcccgaaggccggtatttaatcacggtggagcgggaaggcatattcaccgaggaagtccgccattttaccgagccggttacggtaattgatattcccatcgcgcgtaactatgtgccggtggtctatgtggcggtctcgtcctattctgtgcgctccggccctcccacccatgaatacggcagccccgacctggacaagcccaaaggttatttcggcgtaacaaagctccatgtgaatccccgcgcgcgggccttttcggtaaaggcggaaagcgacaagaaaacctaccgtcccggcgatgaagttaccatgacccttatcgcgaccaaggacggcaaagccctgcccaacgcggagcttacactgatggcggtagacaggggagtattggaccttatcaattatcatgtgccggacccgatacagtatttttataatgaaaaccgctttcccctcatggcagcgggcggcgattcccgttcatggcttatggatccggtcacttacagcgttaaaaatctcgcgggcggcgatgccgatggcggcagtaaaattgaggaacgcaaggattttaatcccactgcggtatttgagccgatgctgataaccgataattcaggcaaggtgatatgccggttcaaacttcccgataaccttactacatatcgcataacagtttttggagtacggggggatatttttgcccttaaagaaagcgagattgccgcccaaaacaaaataaatgtgcgggaagttttgccccggcgcacgcgggaacgggataccgccgaagcgggggtactcatcaccaatcttgattcatcgtctcatactttgtcggtcaggcttgatataggcccgcccctgcccaatgatgattcaagcggaatgaaaaaaatttccggacaggcttttgttgacggaattgttgaacgccgcataacggtaaaaagcggcgagaacgccgtggtgtattttgacgtggcggcggtaaaggaagggaatgttacgcttaactttaccgtcaatgcggatattctcaatgaaaggctgatacgggaactggtgatcgaacacccctatgttatggagacggtgaccacaaccggctccgtggacaaagattcgggaagcgaaggcattgtcattccctcatttgcggataacggagtgggcagtctttcggtgactctggacgccacgcgcctgagtcttttggattcagctatcacctaccttttccgctatccttacggatgtatggaacagcgcagcgcggcgatcatgccgctggtaattttcggcgaataccttgacgccctgggcctgaagagcgaggtcgacaatccgcggaaggtggtggaaaatgagcttaaatcatgggcgaaggtacagctttccggcggcggctttccctactggccatccggtacaagagccgacttctacgtaagcctgcgtatagcccatattatcgccatcgcgaaatcaaagaaaatgaacgttccttcctcgctgaatatcgcggatctcaattcttaccttggccgtgaatatcaggaaatgcagaagtggcgcaataattcgtcatcatattattatcagtcgtatttacagtcgtacatgctgtatgtccagtccctgctcggcgaaaaagtcgatccgtcccggttagctgaaattttaagccgcgataacgtagacccgtcggtgcttgccttcgtgggcatgacttaccgcgctctgcgtcagaacaccgacgccgcgaataccgcgcagcgccttcgcaaccttgtccgcatgagcgcgaggggcgcggacattaccgatcccctggacaaacaccgctacggttattatggcggcatggttgaacagcttgctctgacccgcaaatttttgtggatcagtatccgggcgatgatattaactacgcggctgctcttttcactgctgaaagcaaacgttccggcaggggaatattggaaagcacagcggtaa

SEQ ID NO: 66524 - protein, 781 aa, Unknown
  Obtained from environmental sample
  DOMAIN (88)...(250): Alpha-2-macroglobulin family N-terminal region
  misc_feature (1)..(781): Xaa is any amino acid
MELIREEWRRVQQRGVNGYIYDEYSPEQVIDSVQNIAIRNGGGSIKITPSGAGYHILRVSARDREGRTALTELDFYVTGSGGYWNMSNPSELRLTPDQEMYNPGDTAKVLLQSTLPEGRYLITVEREGIFTEEVRHFTEPVTVIDIPIARNYVPVVYVAVSSYSVRSGPPTHEYGSPDLDKPKGYFGVTKLHVNPRARAFSVKAESDKKTYRPGDEVTMTLIATKDGKALPNAELTLMAVDRGVLDLINYHVPDPIQYFYNENRFPLMAAGGDSRSWLMDPVTYSVKNLAGGDADGGSKIEERKDFNPTAVFEPMLITDNSGKVICRFKLPDNLTTYRITVFGVRGDIFALKESEIAAQNKINVREVLPRRTRERDTAEAGVLITNLDSSSHTLSVRLDIGPPLPNDDSSGMKKISGQAFVDGIVERRITVKSGENAVVYFDVAAVKEGNVTLNFTVNADILNERLIRELVIEHPYVMETVTTTGSVDKDSGSEGIVIPSFADNGVGSLSVTLDATRLSLLDSAITYLFRYPYGCMEQRSAAIMPLVIFGEYLDALGLKSEVDNPRKVVENELKSWAKVQLSGGGFPYWPSGTRADFYVSLRIAHIIAIAKSKKMNVPSSLNIADLNSYLGREYQEMQKWRNNSSSYYYQSYLQSYMLYVQSLLGEKVDPSRLAEILSRDNVDPSVLAFVGMTYRALRQNTDAANTAQRLRNLVRMSARGADITDPLDKHRYGYYGGMVEQLALTRKFLWISIRAMILTTRLLFSLLKANVPAGEYWKAQR

SEQ ID NO: 66525 - DNA, 345 bp, Unknown
  Obtained from environmental sample
  misc_feature (1)..(345): n is a, c, g, or t
atggtaaacaatgtcccgatgcagggcgacatcataaaaatcaaccttgacccaaaacagggacatgaacaaaaaggttatcgcccttatatttgtttaagccaccaccttgtaagtgattatgccaatattgcggtgttcgcgccgatttcaaacacgtctcggcagtatcctctttatgttcctttagaaaaaaacaaatcgacaggggttgttttgcttgatcaattagtcacaattgattataacgcccgacaatggaattatgttgaaacagttgataatgactttttgaattatttgttgaaaaaggttgtcgttgtttttcagagtaataataattaa

SEQ ID NO: 66526 - protein, 114 aa, Unknown
  Obtained from environmental sample
  DOMAIN (7)...(110): PemK-like protein
  misc_feature (1)..(114): Xaa is any amino acid
MVNNVPMQGDIIKINLDPKQGHEQKGYRPYICLSHHLVSDYANIAVFAPISNTSRQYPLYVPLEKNKSTGVVLLDQLVTIDYNARQWNYVETVDNDFLNYLLKKVVVVFQSNNN

SEQ ID NO: 66527 - DNA, 687 bp, Unknown
  Obtained from environmental sample
  misc_feature (1)..(687): n is a, c, g, or t
atgttaacgagaaatagcggtatattaattcctagcgacgctgaaagagtaaactttcgtgaaatccgcatggggaatattgcgcctaacacattgtaccgcagcagccatcccataaaggacaatgaacaagaaaaaattatctcgctgttggcggcgcaaaaaaagattaaaacaataataaatttgagcgacacaatcagcgaaattaagttaaagtcgatttttgcgccttggtacgataaactgcttaaaaataaccgtgtagccgctcttggcatggacttaaataataacagtgaaagtttcagtaaaaaattaaagaaaggcttacaatttattattaatactgaaggaccttggctgattcattgccacgccggagtagaccgcaccggttttgtttctatagtgctggaaacccttatgggagcgaagttagccgatattatcgacgattaccttaaatcatttaacagtatgtttgattcaagcatttacggcaatctaaacaaagaagaggtgcttcagcttatatccgctatgggtgataatatgccggtgaacgataaaaatttagagactattgcggaatactatctgcttaaaagggttaaattgtccgccgtagagatagggctgctaaagagtaaattgtcggggaaacatgatttatctcttacttaa

SEQ ID NO: 66528 - protein, 228 aa, Unknown
  Obtained from environmental sample
  DOMAIN (21)...(181): Tyrosine phosphatase family
  misc_feature (1)..(228): Xaa is any amino acid
MLTRNSGILIPSDAERVNFREIRMGNIAPNTLYRSSHPIKDNEQEKIISLLAAQKKIKTIINLSDTISEIKLKSIFAPWYDKLLKNNRVAALGMDLNNNSESFSKKLKKGLQFIINTEGPWLIHCHAGVDRTGFVSIVLETLMGAKLADIIDDYLKSFNSMFDSSIYGNLNKEEVLQLISAMGDNMPVNDKNLETIAEYYLLKRVKLSAVEIGLLKSKLSGKHDLSLT

SEQ ID NO: 66529 - DNA, 1365 bp, Unknown
  Obtained from environmental sample
  misc_feature (1)..(1365): n is a, c, g, or t
ttgatcagatcggccgagacctttgttccggtaggccgctggtcggaaaataccgacattgtaaacttaatggcggcaggcaccgcgccggatctttgttatacatacaattatgacatgatagcggatttcagggataaaggcggtatttttgacgtaggaccttatattgaatcttacttgccggattttaagaaattacagggcatggatacttcgattcccggtaaatatctggtttaccgcgatcaggatcctaacactttaaaagtttattcgcttcgcaattatgtagtagctcttgccagaagaaatgtattcatccgcaaagactggcttgataaacttaaaatgcccgttcccaaaaacatgggtgaattttacaccgcgttaaaagcgtttcgcgataaagatcccggtaacgtaggaaaaaacaaggttgtgcctcttggtattaattcagatgtccgttggggccttgcggattttatcaaccatttctatgatacaagatctatcgaaagagatctctgggttaattacataggggatcgttatatcacgatgccgggttttaaaagaggcgttcaggaaatgaacaaatggtacaacgaaggcctcatttttaaggatttcccgttaatggtaaccgccgatgatttttacaatcaaataaagagcggcgttgtaggcgctctttgccaaaactgggatttcatttacagaacagatataaatattcttgtagaccttcgcaagaatgtgccggacgcggattttattccgattagcattactaacaataaagaaatatccgataaagccggacttaggatttttattcctcaatcttccccgaataaagacgccgctttaaaatatcttaactggctttccaagcctgaaaattacaattttttgcaggttggacaggaaggcgtgaaccacagaaaggtaaacggcattccccagattatcacaatgccccctctgcacacatggtttatgaattcaccaaacaacattgatatgacattaccaatgaacggcgttgaattgggaagcgacgagcaaaacgctaaaattttggctttaaattacggcactatacctcccgatgttatttcaaacgcgtttgttacatccttaaaaaacgcccgaggacctgcggtatggcaggcgaccacaaaaataaatcaatattcaggcgatttgcgtgaaaaagccgacgacttgctcgcgcaggcaattagggtaaaaacttcagaattcagcaaaacgtgggataatggaataaaagaatggatgaaagccggcggggaagaagtcttaaatgaaagaaacgccctgtatccaaagaaataa

SEQ ID NO: 66530 - protein, 454 aa, Unknown
  Obtained from environmental sample
  misc_feature (1)..(454): Xaa is any amino acid
MIRSAETFVPVGRWSENTDIVNLMAAGTAPDLCYTYNYDMIADFRDKGGIFDVGPYIESYLPDFKKLQGMDTSIPGKYLVYRDQDPNTLKVYSLRNYVVALARRNVFIRKDWLDKLKMPVPKNMGEFYTALKAFRDKDPGNVGKNKVVPLGINSDVRWGLADFINHFYDTRSIERDLWVNYIGDRYITMPGFKRGVQEMNKWYNEGLIFKDFPLMVTADDFYNQIKSGVVGALCQNWDFIYRTDINILVDLRKNVPDADFIPISITNNKEISDKAGLRIFIPQSSPNKDAALKYLNWLSKPENYNFLQVGQEGVNHRKVNGIPQIITMPPLHTWFMNSPNNIDMTLPMNGVELGSDEQNAKILALNYGTIPPDVISNAFVTSLKNARGPAVWQATTKINQYSGDLREKADDLLAQAIRVKTSEFSKTWDNGIKEWMKAGGEEVLNERNALYPKK

SEQ ID NO: 66531 - DNA, 456 bp, Unknown
  Obtained from environmental sample
  misc_feature (1)..(456): n is a, c, g, or t
gtgcctgtcataggcaggcttaaagaaggcaagaagatgaactgctactggtgctccacgcagagacggacggaactgttaaagtacgcggtggaaaacggctttaataaaatcgcgttaggtcatcatctggacgatattatcgaaactttttttatgaatatgtgcgccaaaggcgccttgctcgcaatgcctgtactgcttaattacagaaaatatcctgtaagccttatccgtccgcttgccctgctggaagaaaaacaggtgattgcctgcgccgcacagcaaaatatcctaaaaaacgcctgcacctgcccctacggacaaaattcaaaacgccgcgacatccgtaaacgcataggcgaatttacaaccggcaaagattccggtgatatcaaacggcgcattttacaagccttgggcggcggagaaatagattatttgaaagaagaataa

SEQ ID NO: 66532 - protein, 151 aa, Unknown
  Obtained from environmental sample
  misc_feature (1)..(151): Xaa is any amino acid
MPVIGRLKEGKKMNCYWCSTQRRTELLKYAVENGFNKIALGHHLDDIIETFFMNMCAKGALLAMPVLLNYRKYPVSLIRPLALLEEKQVIACAAQQNILKNACTCPYGQNSKRRDIRKRIGEFTTGKDSGDIKRRILQALGGGEIDYLKEE

SEQ ID NO: 66533 - DNA, 618 bp, Unknown
  Obtained from environmental sample
  misc_feature (1)..(618): n is a, c, g, or t
gtgcgcattgacgcggttgtcgtttctcaccagcatgatccggatatctcatataaagaaatcgaggaaaccgttatagaaaaaatcatcaatcccgttcttgcgcctacgggactgcttgataaaaaaacaaaatactttgtaaaccccacgggacggtttgtagtcggcggtcctttcggagacacggggcttacagggcggaaaattatcgtagacacttacggcggcatgggtcgccacggcggcggcgctttctccggcaaagaccccaccaaagttgaccgttccgcagcctacgccgctcgttacgtcgccaaaaacattgtcgccgccaaacttgccgaccgctgtgaaatccagcttgcctacgcgattggcgttcctttccctgtctcaataatggtagatacattcggaaccgcgaaggtcgaagaaaaacaaatagagaaagccgtggaaaaagttttcgatttaagcccctcgggaattatcaagatgcttgatctgcgccgcccgatttatgaaaagaccgcttcttacggtcatttcggcagatcggaattctcatgggaaaagaccgataaagttgaggaactaaagaaagctattaaatag

SEQ ID NO: 66534 - protein, 205 aa, Unknown
  Obtained from environmental sample
  DOMAIN (1)...(54): S-adenosylmethionine synthetase, central domain
  misc_feature (1)..(205): Xaa is any amino acid
MRIDAVVVSHQHDPDISYKEIEETVIEKIINPVLAPTGLLDKKTKYFVNPTGRFVVGGPFGDTGLTGRKIIVDTYGGMGRHGGGAFSGKDPTKVDRSAAYAARYVAKNIVAAKLADRCEIQLAYAIGVPFPVSIMVDTFGTAKVEEKQIEKAVEKVFDLSPSGIIKMLDLRRPIYEKTASYGHFGRSEFSWEKTDKVEELKKAIK

SEQ ID NO: 66535 - DNA, 1092 bp, Unknown
  Obtained from environmental sample
  misc_feature (1)..(1092): n is a, c, g, or t
ttgttaacgggagggggaatgaacattgacactgaaaaggcaaggctcttttgtgtaaatttgtttcaagcttacgggttttccaaagacgaaagtgaaattataaccgacgttcttcttcgcgccgatctttacggtattgaatctcacggtattcacaggctttcccgctaccatgaagaaataacatcggggcaggtggatgtaaaagcgaaaattgacattgtacacgaaacgggaatttccgcctgccttgaagcgaacaaagcgatgggtcagcttgcaagcgtacacgccatgaatttggcaatccaaaaagcgcgtaacagcgggtgcggcatggtaacggttcgcaattccaaccattacggcatcgcaagttactacacggaaatggcgtcggatcaggatttaatgggcgtctgcatgacaaatactgaggcgatctgcgttcccactttcggctgtgaggcgatgacgggtacaaacgccatcgcccttgctatgcccgccgatccttaccatttttcctatgacgcgtctacaaccgtcgtcccgcgcggaaaactcgaagtttacagaaaaaacggtcagccgttacctgaacattgggcgcttgacgcgaacggacatccgtgcacagacgcggctgtcgtagttgacaatataatcgcgaaagccggcggaggcattaccccgcttggaggaatgggtacgctgaacggcgggcacaagggttacgggttaagcataattgtcgatcttttttccgccgtaatttcaggcggacttacatcgaaccatgtaaacagaaaacccggacacacgggcatttgccactacttcatggcggttgattacggtattttcggcgataagaccgcgataaaagcgggtatgtctaaatttttgcaggaattacgcgacagtaaaaaggcggaaggacagacgaggatttatacacatggggaaaaatcgacgcagttaatggcgcagcgtaagaacgggagtattcccgtcaacgaaaaaactttggaagagatgaggaatattgctaagtcgctgaaaatccttgagcagtttattatttag

SEQ ID NO: 66536 - protein, 363 aa, Unknown
  Obtained from environmental sample
  DOMAIN (7)...(351): Malate/L-lactate dehydrogenase
  misc_feature (1)..(363): Xaa is any amino acid
MLTGGGMNIDTEKARLFCVNLFQAYGFSKDESEIITDVLLRADLYGIESHGIHRLSRYHEEITSGQVDVKAKIDIVHETGISACLEANKAMGQLASVHAMNLAIQKARNSGCGMVTVRNSNHYGIASYYTEMASDQDLMGVCMTNTEAICVPTFGCEAMTGTNAIALAMPADPYHFSYDASTTVVPRGKLEVYRKNGQPLPEHWALDANGHPCTDAAVVVDNIIAKAGGGITPLGGMGTLNGGHKGYGLSIIVDLFSAVISGGLTSNHVNRKPGHTGICHYFMAVDYGIFGDKTAIKAGMSKFLQELRDSKKAEGQTRIYTHGEKSTQLMAQRKNGSIPVNEKTLEEMRNIAKSLKILEQFII

SEQ ID NO: 66537 - DNA, 1476 bp, Unknown
  Obtained from environmental sample
  misc_feature (1)..(1476): n is a, c, g, or t
ttgctcctttcttcttcgacggttacatctgtcgccggctatcagacggcggacggcgttttgggaaaatattcctctttgtcggaacatgcccttgatctggctatttcatttgacgagaaaacaccggcgctttttagggacagcacgggcaattacagtcttactattccgccgcaagttgaaaccgtagaccgcgttcttgcgagagccggagcgggcgcggcgtattttgtccacggagggcatgactcgctttccacgccaattgttattcacccgcaaagccgtaacgcgctttttacgtccggcaatcgtattaaggattttacgattgaattttggatgtatccgcttaatatggaaaacggcgagcagatatttacatgggtttccactcttcccgacaacgtaagccgcgtacagcgaattgattgttttgtggcaaaaaataaaatgagctggtcttttaccaacttttttacttccgtaaacgattcaaaaaggcataatattgaattttcaaatttaactccgattattccgaaaacatggagtcatcatcttatccgtttcgacgcgacaacgggaatgttagagtatattgtagacggcagaagcgaggcgattgtttacgctacgtccacagggcgcgaaaacagcgaggtacataatccggtactcggcgttaacggcagattcttgcttggcgagcgtttttccggtcttattgatgaatttaagattcacagcatttgcgcgggacgttcttctattcaaagatactctgcacgcggcggaaggattgagacaagagccattgatctgggagcaaacgcaagcggcgttgtaagaattaacgcgtcgggcggcagaacaagcatcaagggcgcgagagtacagaacgaataccgcgagaacggaagatttaaattttccgacgacggggaaatgaatttctttatccgcgccggagaaaatccctatcttttaagaaataacccctgggtcatgtttacgccgggaagcgatataaaaggcatcagcggacgttacgcgcaaattgccgtagatttttacccttccgctgacggcgagtgcagtccctaccttgaacagatacacattgtttttaatcagggggaaccggctcagcctccccgcaatttaacagccgtcgcctatgacggcggagttcagttaaaatggaggcaaagtatcaccgccggtatggcagggtatcttgtctattacagccccgtccgcggagaactttttggaactgactcaacttccggcgcgtctccgatagatgtcggcttaacaaatagtttttatgttgacgggttaaaaaacggaacgctttattatttcagagtcgccgcttatgatttgataacaggggatataaaccccaatgtaggggaattttccgccgaggttacagcgcgtccgcttttggggttgagcagataa

SEQ ID NO: 66538 - protein, 491 aa, Unknown
  Obtained from environmental sample
  DOMAIN (383)...(478): Fibronectin type III domain
  misc_feature (1)..(491): Xaa is any amino acid
MLLSSSTVTSVAGYQTADGVLGKYSSLSEHALDLAISFDEKTPALFRDSTGNYSLTIPPQVETVDRVLARAGAGAAYFVHGGHDSLSTPIVIHPQSRNALFTSGNRIKDFTIEFWMYPLNMENGEQIFTWVSTLPDNVSRVQRIDCFVAKNKMSWSFTNFFTSVNDSKRHNIEFSNLTPIIPKTWSHHLIRFDATTGMLEYIVDGRSEAIVYATSTGRENSEVHNPVLGVNGRFLLGERFSGLIDEFKIHSICAGRSSIQRYSARGGRIETRAIDLGANASGVVRINASGGRTSIKGARVQNEYRENGRFKFSDDGEMNFFIRAGENPYLLRNNPWVMFTPGSDIKGISGRYAQIAVDFYPSADGECSPYLEQIHIVFNQGEPAQPPRNLTAVAYDGGVQLKWRQSITAGMAGYLVYYSPVRGELFGTDSTSGASPIDVGLTNSFYVDGLKNGTLYYFRVAAYDLITGDINPNVGEFSAEVTARPLLGLSR

SEQ ID NO: 66539 - DNA, 2265 bp, Unknown
  Obtained from environmental sample
  misc_feature (1)..(2265): n is a, c, g, or t
atggggtatacaggatactttcttattgtagcggattttataaactacgcaaaagagcgggatatccccgtcggtcctgggcgaggttccggagcgggttctattgtcgcttattccctgcgtattaccgatattgatcctttaaaatacggtcttttatttgagcgctttttaaaccctgagcgtatttccatgccggattttgacattgattttgcgaatgaggggcgcgaggaagtaataaactatgttacgcgcaaatacggcaaggaaagagtggcgcagataatcacattcggaacattgggcgcgaaagcggttattaaggatgtggcaagagttttgggaatatcgatccctgaatcagaaatgataacaaaacttatctcatttgaccctgaaatgactttggataaggcaaaggaagaggaaccccgcctgcgtgaattggaaagcgattcgcgttttacggaattatttactatcgcgcataaattagaggggcttaaccgtcattcaagcatacacgccgcgggtattgttatcggaaaaaaaccgctgattgaattagtgcccctctttcaggaaagagaggaaaagggcggcaatattgccacgcagtacagcatgaattttcttgaaggatgcggtcttgttaaaatggattttctcggccttaaaaaccttgacatcattaaacattcaaaagagttaatccgccggcgcgggggcaagtattcaaattttaatatagaagatattcccgaagacgacaaaaaaacttttaagatgttgggggaaggaaaaagccacgctgtttttcagtttgcctccgacggtatgcaggatattttaaggcagacaaagcccacatccatagaagacttaacggccttaaacgcgatgtatagaccgggacccatgcagtttattccccgctttgtggattgtaaaaacggaaaagcgacgataacgtatcccgatccaagcctggaaggaatccttaaagaaacctacggcgttattgtctatcaggaacaagttatggaggtggcaagaataatagcgggttacagcatgggaaaagccgatctcctccgccgcgccatgggaaaaaagaaaaaagaaattattgacgaagaaaaaaccccgttcctggaaggcgcggtaaaacagggatactccgagcagaaggccggcgcaatttacgacatgcttgttccttttgcgggctatgggtttaataaaagccacgccgccgggtatgcggtattggcgtaccagaccgcttaccttaaagcgaatttccccgcggaatatatggcggcaacgttgatagtcgaaataaaaagcacggacaggcttttatccagcatcgtcgaaacccgtaaaatgggaataagcgtcgatcctcccaatattaattattccaataaactttttaccgtagtggacggcaggatagtatacggtttcctgggcataaaaggcgtaggcgacgccccggcggaagaaattgtacggggcaggcaggacggccattataaaaattttatggattttctggacagggtggacataaaagccgtaagtaaaaaagttatagaactgcttattcacacgggcgcgtttgatgattttaaggtgtcacgcgaaacgctcgcgggcaatatggaaaaggcgatagaatacgcgcaaaaaatgaaggaagacaaacagcttggacagtcaagcctgtttggcgattcaggcgaatccggcatgcccgattttaaatttacggaatttccacctgtaagcagggccgaaaggctgaatcttgaaaaaaaattaatcggtttttatttttcaggccacccgttagatgaataccggcaattatgggaaaaggcggtaaaggccgatctcgcccaccctgacaccatacagccgggaaaccatattctgattggaattattaaaaacattaaacgtattgattccaaaagcgggaaaatggcctacgccgcgctggaagactacaacggggaaattgaagttacattcttttcaagaacgtgggaagcctgcgaggacaaggcacaggatgacaaagttgcaatattaaagggaaaaattgaataccagaggaacaaagacaagtacggcttcatcgccgacagttggattgacgtccgtgaagcgcaaacggcgatagaagaggaaaaagccttacaaaaaaagcgggaaaaattccgtaatgtctggctttacatggcggattaa

SEQ ID NO: 66540 - protein, 754 aa, Unknown
  Obtained from environmental sample
  DOMAIN (647)...(725): OB-fold nucleic acid binding domain
  misc_feature (1)..(754): Xaa is any amino acid
MGYTGYFLIVADFINYAKERDIPVGPGRGSGAGSIVAYSLRITDIDPLKYGLLFERFLNPERISMPDFDIDFANEGREEVINYVTRKYGKERVAQIITFGTLGAKAVIKDVARVLGISIPESEMITKLISFDPEMTLDKAKEEEPRLRELESDSRFTELFTIAHKLEGLNRHSSIHAAGIVIGKKPLIELVPLFQEREEKGGNIATQYSMNFLEGCGLVKMDFLGLKNLDIIKHSKELIRRRGGKYSNFNIEDIPEDDKKTFKMLGEGKSHAVFQFASDGMQDILRQTKPTSIEDLTALNAMYRPGPMQFIPRFVDCKNGKATITYPDPSLEGILKETYGVIVYQEQVMEVARIIAGYSMGKADLLRRAMGKKKKEIIDEEKTPFLEGAVKQGYSEQKAGAIYDMLVPFAGYGFNKSHAAGYAVLAYQTAYLKANFPAEYMAATLIVEIKSTDRLLSSIVETRKMGISVDPPNINYSNKLFTVVDGRIVYGFLGIKGVGDAPAEEIVRGRQDGHYKNFMDFLDRVDIKAVSKKVIELLIHTGAFDDFKVSRETLAGNMEKAIEYAQKMKEDKQLGQSSLFGDSGESGMPDFKFTEFPPVSRAERLNLEKKLIGFYFSGHPLDEYRQLWEKAVKADLAHPDTIQPGNHILIGIIKNIKRIDSKSGKMAYAALEDYNGEIEVTFFSRTWEACEDKAQDDKVAILKGKIEYQRNKDKYGFIADSWIDVREAQTAIEEEKALQKKREKFRNVWLYMAD

SEQ ID NO: 66541 - DNA, 606 bp, Unknown
  Obtained from environmental sample
  misc_feature (1)..(606): n is a, c, g, or t
gtgaacaaccccgaagacccagccgcgggttcccggcgcataagtttttcccgcgagctgtggattgaaagggaggattttgaggaaaccccgccgcccaagtatttccggcttttccccggcaataccgtgcgcctgcgttatgcgtatatcgtcacctgcaccggctttgacaaggacgcggccgggaatattattgccgtgcgttgtaccgcggacatggctaccaaaggcggtaacgcgaacgccaatgccggcgctgtcaaagtaaaaggcacgattcactgggtttccgccgccgacgcaataccgctggagacccgcctgtacgattacctgttcagcgtcgagcggccaatggaagccgccgcccggcctgacggcagtgccggcgaattcaccgacaaccttaatcccgattcacttgaggtaatttccaatgcctttggagagccctgccttgccaaagccggggcgggcgatgtttttcagtttgaacggcttggttactttgcccgcgatccggatgccgggaacggcgggcgccccgtgttcaacaagactataggtttgagggacacatgggccaagataaagagcaaatag

SEQ ID NO: 66542 - protein, 201 aa, Unknown
  Obtained from environmental sample
  DOMAIN (1)...(174): tRNA synthetases class I (E and Q), anti-codon binding domain
  misc_feature (1)..(201): Xaa is any amino acid
MNNPEDPAAGSRRISFSRELWIEREDFEETPPPKYFRLFPGNTVRLRYAYIVTCTGFDKDAAGNIIAVRCTADMATKGGNANANAGAVKVKGTIHWVSAADAIPLETRLYDYLFSVERPMEAAARPDGSAGEFTDNLNPDSLEVISNAFGEPCLAKAGAGDVFQFERLGYFARDPDAGNGGRPVFNKTIGLRDTWAKIKSK

SEQ ID NO: 66543 - DNA, 360 bp, Unknown
  Obtained from environmental sample
  misc_feature (1)..(360): n is a, c, g, or t
atgaccgtagcggatgcagttacattacttgaaggacaaattttcacaggcgaggagcagaccagtttggaaatagcttctgcctgcggagccgacttgatgagcgatgttatagcctttgtaaaagacagagtggttcttttgacaggattggtaaacccccaggtaatccgtacagctactctgcttgatatacatgcagttatttttgtacgcggcaaggtaccttctcgtgacatgatcgacatggcgaaagaggctgaaataatactgggcggtaccaagcttcccatgtttcttgcctgcggcaagctttacgaggctggtttaaaagctggcggtaccagggcaatcccgtaa

SEQ ID NO: 66544 - protein, 119 aa, Unknown
  Obtained from environmental sample
  misc_feature (1)..(119): Xaa is any amino acid
MTVADAVTLLEGQIFTGEEQTSLEIASACGADLMSDVIAFVKDRVVLLTGLVNPQVIRTATLLDIHAVIFVRGKVPSRDMIDMAKEAEIILGGTKLPMFLACGKLYEAGLKAGGTRAIP

SEQ ID NO: 66545 - DNA, 909 bp, Unknown
  Obtained from environmental sample
  misc_feature (1)..(909): n is a, c, g, or t
atgccctacgatctttacaaaaattgccggctttgcccgcgcgtctgcggagttgaccgccttgccggttcccgcgggtattgcggggaaagctcccatctaaggcttgcgttcgcggggcttcattcaggcgaggaaccgccattgagcgggaactgcggatccggtacgatttttgtttcaggctgtaatctgggctgcggcttttgccagaaccggcaaatttcaaaccataataccgacgaacatctgggacgcgttgtttccatcgaagaatttaccgctatctgccttgagctgcaaaaaagaaatgctcaaaatattaatatcgttacaggcagccatgcggttccggctataatccgggggcttgatgccgctcaagccgcagacttgcacattcccgcgctttggaactcatccggctatgaaagcattgaaacgcttgagcttcttggagacagaattaaaacatggcttcccgatctaaaaaccctggatgccaaactggccggcatattcttaaacgcgcaggattatcctcgggccgccgtcagcgcgattcaatggatgatgaaaaaaaggccgggcgatgtcattatccgtcatcttattcttccgggataccttgaatcaacgcgttccgtattgcgctggtttgccgataacgccggcggcaaggctcagctttcattgatgagccagtatacgccgatgaatgacggaaccggcgcgccgaagcgttatgtaagcaagcgggaatatgaaaccgttcttggctggcttggggaattcgggattgaagacggtttttgccaggaacttgttaccggtagcgactggctgcccgatttcaaccgcgccaatccgttctcatccgggctttcagtcccggtatggcatttctaa

SEQ ID NO: 66546 - protein, 302 aa, Unknown
  Obtained from environmental sample
  DOMAIN (57)...(220): Radical SAM superfamily
  misc_feature (1)..(302): Xaa is any amino acid
MPYDLYKNCRLCPRVCGVDRLAGSRGYCGESSHLRLAFAGLHSGEEPPLSGNCGSGTIFVSGCNLGCGFCQNRQISNHNTDEHLGRVVSIEEFTAICLELQKRNAQNINIVTGSHAVPAIIRGLDAAQAADLHIPALWNSSGYESIETLELLGDRIKTWLPDLKTLDAKLAGIFLNAQDYPRAAVSAIQWMMKKRPGDVIIRHLILPGYLESTRSVLRWFADNAGGKAQLSLMSQYTPMNDGTGAPKRYVSKREYETVLGWLGEFGIEDGFCQELVTGSDWLPDFNRANPFSSGLSVPVWHF

SEQ ID NO: 66547 - DNA, 681 bp, Unknown
  Obtained from environmental sample
  misc_feature (1)..(681): n is a, c, g, or t
ttgaaccttttaagcccgattgattttaacacagaaacgctggggatcatcggcgtcaccctcagaatgtccctggcgtcgacctttattgcctccgtactgggattatctctgggtttgcttctggagaaaggccgtttccccggaaagcgcattgcggtaagaatctgccgcacccttatggggatgccgtccgtcgtggccggcctcatcgtgtaccttctgctcatgcggaagggaccctttggttcctggaaccttctttttacggtcaaggcaatggtgatagcccaggtgcttatcatcacccccattatcaccggcatggtgcatgcctacgcggcgcgttccgccccggcgatccgggcctttgccaggaccatgggggcgaaccgtttccagacgcatttccttttcgtaagggagatgtcaggcgaaatttatttcgcggtcattaccgccttcagccggtcaataagcgaggtgggggcggtgatgatcgtcggggggaatatccagcataaaacccggaccatgaccaccgccatttccatgctcaggaatttggggaatttcaggcaaggggtcatcttgggggttttgctgcttctcatggcttttatcctccagtcgctttcggatttactccacaaggnggaaatacccgtggaaaatttttaa

SEQ ID NO: 66548 - protein, 226 aa, Unknown
  Obtained from environmental sample
  DOMAIN (17)...(222): Binding-protein-dependent transport system inner membrane component
  misc_feature (1)..(226): Xaa is any amino acid
MNLLSPIDFNTETLGIIGVTLRMSLASTFIASVLGLSLGLLLEKGRFPGKRIAVRICRTLMGMPSVVAGLIVYLLLMRKGPFGSWNLLFTVKAMVIAQVLIITPIITGMVHAYAARSAPAIRAFARTMGANRFQTHFLFVREMSGEIYFAVITAFSRSISEVGAVMIVGGNIQHKTRTMTTAISMLRNLGNFRQGVILGVLLLLMAFILQSLSDLLHKXEIPVENF

SEQ ID NO: 66549 - DNA, 414 bp, Unknown
  Obtained from environmental sample
  misc_feature (1)..(414): n is a, c, g, or t
ttgggctgcggctttcgcttcttccatttcgtaaatgcgcgccctaaggatacgcatggcttttgccttgttttttatctggctcttttcatcctggcaatggacagtaacgcccgtgggaaggtgcgttatgcgcacagcggaatcggtggtgttaacgcactggcctcccgggccgccggcgcgcattacgtctatgcgcaagtcttcggtttttatgtctatttcggtttcatccgcctcgggcaaaacggccaccgttaccgccgaggtgtgaattcttcccgacgcttccgtcgcgggaactctctgcaccctgtggacgcccgactcatagcgcatgttttcgtatacgttgtttccggttatggaaaacacaatttccttaatgccgcccagttcggtgtcatttga

SEQ ID NO: 66550 - protein, 137 aa, Unknown
  Obtained from environmental sample
  misc_feature (1)..(137): Xaa is any amino acid
MGCGFRFFHFVNARPKDTHGFCLVFYLALFILAMDSNARGKVRYAHSGIGGVNALASRAAGAHYVYAQVFGFYVYFGFIRLGQNGHRYRRGVNSSRRFRRGNSLHPVDARLIAHVFVYVVSGYGKHNFLNAAQFGVI

SEQ ID NO: 66551 - DNA, 1638 bp, Unknown
  Obtained from environmental sample
  misc_feature (1)..(1638): n is a, c, g, or t
atgaaaaagatttatttgttatttttaatatttattgttttttcctgcaaaagcgcgccgaaaaataaaatcaccgatgatccaggtttatcgcagttggacttaacaaaggaaaaaactcaagccgcacaaagccccgggttttcagacgaaccgccgttaaacatgactcaagacacatccgcagacgattcatttttagaggaaagcgcgcttgttcaggacggcattccggacggctccgctgttgccgatacctctgaaacaaaaactgatgatttggcggacgcgcaaaataatgaacagaataaaagcgccgaagctgttgaagaaaaaaaatcttccgcaggtgaagtaaaacctcccgcttctttaacggcggtccagcctccttccgcgccgccggcaagacctgttcagccgccgcctgctgcggtcaaagaagaacctcccccggcaaaaactcaagaagaagcgccggcggctgaaaagcccgctgatgaaaaacaggaagcccaaagcgaaagcgaggagcctcctccgcctccgcccgccagatatcagccgtggataacgccgccgcccgccgtttcggcggtgaaagatgacgcgcctgttccgaacaagcaggtgttaattcctccaaaagaagaaaatgttttttctcgtattgtgcgcgcggcggtagggcagttggtggaaattcctttccggggaaacaactggtcgtatttggaagatattgtttcccgccgaggtattgcctatatgtcgcgccgcgttgattctgaaggaatgacatttacctttagagccgaagaaacgggaatttttactttaaggttttacaggcgtgattatatcagggattatattttatatgattatgttcaggttattgtagaagaacagccggataaaggaagcgcgggagcggttaatccttccattgaccgcggcaaggtaacggcggaaccccgctggccgtccgcgcttgaggaagcggaaatgctcaggggcggcgcaagacctgcttcagccgcggagccttctacaagtaataaaaatagttctccttcatcgcaggtatcgtcagctaacagagatttaactgccgctccgtcgcaaagaacgacgtctcaggcatcgtcagctaacagagattcagctcctgctcaggggacgacagcgccgccgcagaccgcgtcttcaaacagggaaactcaaacacagggaaccggcgccgcgccgcaggcagcaacgccgcaagttgtaacgccatcggccttaacgcagcaacctgtgacgacgccggcagatgccgcgcctcccgccgaaaaaaaagagaaacttcctccggaagaaatattaaaaaaggcgcaggatgcttttaacggcggaaacgccgccgaagcgatagcgttactcgatcaatatacggaattttatcccggcggcaatgatgaattatattggctgtacggtcagttttacgaagccaatactccgtccagaaacattctgctttctctggattattaccgccgtcttgtaaatgaatatccgcaaagccggcattacagcgacgcgcgcagaagaatctcgtatttggaaaggttttatattaatatacaatag

SEQ ID NO: 66552 - protein, 545 aa, Unknown
  Obtained from environmental sample
  SIGNAL (1)...(18)
  misc_feature (1)..(545): Xaa is any amino acid
MKKIYLLFLIFIVFSCKSAPKNKITDDPGLSQLDLTKEKTQAAQSPGFSDEPPLNMTQDTSADDSFLEESALVQDGIPDGSAVADTSETKTDDLADAQNNEQNKSAEAVEEKKSSAGEVKPPASLTAVQPPSAPPARPVQPPPAAVKEEPPPAKTQEEAPAAEKPADEKQEAQSESEEPPPPPPARYQPWITPPPAVSAVKDDAPVPNKQVLIPPKEENVFSRIVRAAVGQLVEIPFRGNNWSYLEDIVSRRGIAYMSRRVDSEGMTFTFRAEETGIFTLRFYRRDYIRDYILYDYVQVIVEEQPDKGSAGAVNPSIDRGKVTAEPRWPSALEEAEMLRGGARPASAAEPSTSNKNSSPSSQVSSANRDLTAAPSQRTTSQASSANRDSAPAQGTTAPPQTASSNRETQTQGTGAAPQAATPQVVTPSALTQQPVTTPADAAPPAEKKEKLPPEEILKKAQDAFNGGNAAEAIALLDQYTEFYPGGNDELYWLYGQFYEANTPSRNILLSLDYYRRLVNEYPQSRHYSDARRRISYLERFYINIQ

SEQ ID NO: 66553 - DNA, 1185 bp, Unknown
  Obtained from environmental sample
  misc_feature (1)..(1185): n is a, c, g, or t
atgctcaagtgcttttttgaggatacgaagccgataggcggcaaggatacgcgggcgctgtttcacgggctgaagatagaggaagccggagagcggtatatggagtatcaggggaagcatccggtgatatttctgagtttcaaagaggggaagctcgacagttttgacggatcgtatgatgtgttgagggattgcatagcccaagaatttgagcggcacgcctacgctatggaaaagatatctagtgattatgacaaagatttgtttaagaaactgtcaacccgtgccgtatctatcggtgattacactcgatcgctcaagtttttgagcaagtgcctagagcattatcacggtaaaaaggccgtaatcctaatcgacgagtatgacgtcccgctggagaatgcgtggtctcgcggtttttatcagaaaatgatcgatttcttccgtccgcttctgagcagcgcgctcaaggacaacccgcaccttcaattagcggtgatgacagggtgtctgcgggttttcaaggaaagcttatttacaggactgaacaatttggaagttgtatcagtattcagcgattcttatagcgagcatttcggttttacacagattgaagtggacgccatgcttagatattatgaattagaaagcaaaacacagatactcaaggattggtataacggctatttgtttggaaatactgaggtatacaaccccctaagcaccgtccgtgtagttaaggcatggacgcaaaacatagacagaaatccggagccgtattgggtaaacacaagcggcaatgacatcattcgcgagatgatagacaagatgagtctcgaaacgaaggtcggtttggagatgaagacaggacttgaaaccctgatgtcaaacaaaacaatttctgcggtagttcacgaagacgtgacgtatggcgaaatatataataacgccgataatctttggaactttctgtttttcaccggctatctcaaaaaagtcggagatgaacgtatggaaggcctaaaaaaggttctagaattgtctattccgaatttggaattactgtacatttatgaaactaaaatacaagaatggtttaaagaaaacgtccacccgaaagattttactccccttaataatgcgcttttcgacggtaacgcagaagttgtgcaaaagactgggtga

SEQ ID NO: 66554 - protein, 394 aa, Unknown
  Obtained from environmental sample
  DOMAIN (1)...(393): Protein of unknown function (DUF1703)
  misc_feature (1)..(394): Xaa is any amino acid
MLKCFFEDTKPIGGKDTRALFHGLKIEEAGERYMEYQGKHPVIFLSFKEGKLDSFDGSYDVLRDCIAQEFERHAYAMEKISSDYDKDLFKKLSTRAVSIGDYTRSLKFLSKCLEHYHGKKAVILIDEYDVPLENAWSRGFYQKMIDFFRPLLSSALKDNPHLQLAVMTGCLRVFKESLFTGLNNLEVVSVFSDSYSEHFGFTQIEVDAMLRYYELESKTQILKDWYNGYLFGNTEVYNPLSTVRVVKAWTQNIDRNPEPYWVNTSGNDIIREMIDKMSLETKVGLEMKTGLETLMSNKTISAVVHEDVTYGEIYNNADNLWNFLFFTGYLKKVGDERMEGLKKVLELSIPNLELLYIYETKIQEWFKENVHPKDFTPLNNALFDGNAEVVQKTG

SEQ ID NO: 66555 - DNA, 873 bp, Unknown
  Obtained from environmental sample
  misc_feature (1)..(873): n is a, c, g, or t
atggcgaaataccgaactaccgatgcagcagccgggcagggattatttttatcagtaaatttacgagagcagttattaccagacagtttcgaatatatgcttaacgaaataatcggaacaaagatagacctgagcgtatttgacaagaagtataggaatgacctgactggcgcaagcgcggttccgccgtcggtgttattaaaactgatattctacggatattataacggatgtataagttcccgaaagatatatgaactaaacaataaaaacatcatagcgaaagcattaaccggagacatggaaatccactggacgacaatagcggattttatatcaggaaacaaagaagaggtaaaagaaacatttatccaagtactaatgtattgtaatgaactgggcttgataggcggagaaaatttcgcacttgacggattacgcctgccgtcgaacgcgtcaatggagatgagcgggacaaggaagcaactgaagaaacggctggccgtgtaccaaaagatggcggcgaagcatatagagcggcatgcaaggaaagacgggcaagggataaacgacgttgaaacggaagaacgttttgagaaacggcagaagagtttaaagcagcggatggaaaagatagaaaattttctggaaaacatgaatgagaaaaaagggcgaaatgaaaaagaaatccagtcaaatgttacggacaatgaaagcgcgatgatccaaagctccaaggggtttatccagggatatatagggattgcggtagctgaccagaaaagccaagtgataacaagtgcgcaggcgttggcagcgcgaatgagaccgaacatttccctgaaatgcttgataaaaacgcggaaaacctga

SEQ ID NO: 66556 - protein, 290 aa, Unknown
  Obtained from environmental sample
  misc_feature (1)..(290): Xaa is any amino acid
MAKYRTTDAAAGQGLFLSVNLREQLLPDSFEYMLNEIIGTKIDLSVFDKKYRNDLTGASAVPPSVLLKLIFYGYYNGCISSRKIYELNNKNIIAKALTGDMEIHWTTIADFISGNKEEVKETFIQVLMYCNELGLIGGENFALDGLRLPSNASMEMSGTRKQLKKRLAVYQKMAAKHIERHARKDGQGINDVETEERFEKRQKSLKQRMEKIENFLENMNEKKGRNEKEIQSNVTDNESAMIQSSKGFIQGYIGIAVADQKSQVITSAQALAARMRPNISLKCLIKTRKT

SEQ ID NO: 66557 - DNA, 1059 bp, Unknown
  Obtained from environmental sample
  misc_feature (1)..(1059): n is a, c, g, or t
gtggaagtttttgaccgtggtactgacgggggaagaaccctagcgactgataacaattataccaaatggatacacgacaaagtcctgaaggatattaacgttgatgttactttccaggcggtaggacgctggtcggaaaatacggacatcgtgaatctgttggcttcaaacagcgctccagatctgtgcattacttataatttggaagcgataaacagtttcgcgaggcagggcggtatcctggaattgacgccatacatcgacaggcttttacccgattttaaaaatctgctgggaaaggatccccaatacccgggtcaggactttatttaccgtgacaggggcagtgttgaagctaataaaatgtactcgttagctacctacgttatcgatgtacgcggtgcgcaaagaaacatctttatccgcaaggactggcttgataaactcggtctccccttgcctaaaacaacccaggaattccatgacgcgcttgttgctttcaaaaacagggacccgggtggagtgggagcgaacaacgtgattccgttcggccaggactctgatgcccgctggggtttcgcaccaataatatacgcttactttgatcctaaaattagtgccagagacgaatggatatacggcatcaccgacaggcccatcagcatgcccggttacaaggatggcgtacggttaatcaaccagtggtacaacgagggccttatttacaaggatttcccacttctgaaggttgcggaagactactantaccttattaaaacaggcagggtaggcgcttttgccggtaactgggaccttccttggagacaggattacaaaattcangatgacctcgccagaacgtacctggcgctcattttgtggctgttgactgcatacaggccccagacgggactacccgcaaatttatgtctgacaagcctgaccgccgggttttcgtacccgccgcctccaaaaatccagaagcggcccttaggtaccttaactggctttccatatttgaaaatttcaacttcctgcaacttggaaacgtgggcgtaa

SEQ ID NO: 66558 - protein, 352 aa, Unknown
  Obtained from environmental sample
  misc_feature (1)..(352): Xaa is any amino acid
MEVFDRGTDGGRTLATDNNYTKWIHDKVLKDINVDVTFQAVGRWSENTDIVNLLASNSAPDLCITYNLEAINSFARQGGILELTPYIDRLLPDFKNLLGKDPQYPGQDFIYRDRGSVEANKMYSLATYVIDVRGAQRNIFIRKDWLDKLGLPLPKTTQEFHDALVAFKNRDPGGVGANNVIPFGQDSDARWGFAPIIYAYFDPKISARDEWIYGITDRPISMPGYKDGVRLINQWYNEGLIYKDFPLLKVAEDYXYLIKTGRVGAFAGNWDLPWRQDYKIXDDLARTYLALILWLLTAYRPQTGLPANLCLTSLTAGFSYPPPPKIQKRPLGTLTGFPYLKISTSCNLETWA

SEQ ID NO: 66559 - DNA, 2085 bp, Unknown
  Obtained from environmental sample
  misc_feature (1)..(2085): n is a, c, g, or t
gtgaaagacgaatacgcccggcttataaaccgtgactggaaatttctactgggcaatccaaaaggcgccgaanaagaggattactgcgaccgtacctggaaacgcgttgatttgccgcatgactgggttatccatcagccttttgacaagggcgagggaacaggctggacaagcgaagtaatgcagggttttttcgtctggaagagcacgggatggtacaggaaagagctcattctgcccgacacctcagataaagaaatttttctttacttcggctgcgcttacagaaacgctactatttatgtgaacggcaaaaaagcaggttctcacgcttacggttataccagctttgagctttgcgtcagtttattggtcaagccaggcaaaaacctccttgccatcaggctggatcacggttcttcggtgcctgaccgttggtactctggtgccgggctttttcgggatatttaccttagagttacaccaaagcttcacttcaccacctggggccttggggtaaaggccgtcgttcagagtgaagcaaagggtaacgccctaataaaagttacagcggaaatagccaataccgcgactgaaggcggggattcattcctgcgcctggcagtaaaggatccattaacggatccaaaggctaactatgttacgacggtggaaatacctttcaaattttcacctaaatcaaaaacgcttgtggagcatagcttccaaatcaaaaaccccagtctctggagcgacaagaatccaaagctttaccgccttagcgcgtccataggccgggagaatgtcggagtaagggaactaagcttcggtattcgcgatatcaagatgattgcgaaaaagggcttttttgttaacggcgagaacgtcaaattgaagggcgtctgccttcaccacgactgcggtattttgggcgctgctttttacagcgaagcatggcgcaggcggctcctgattctgaaagggcttggctgtaacgccataagaaccagccataacccaccagcggaagaattcctggatctttgcgatgaattgggtttctatgtgattgacgagtgttttgacaaatggaagtccctgtcctacggggaaatatttgaaaagaactggaagaaggatttaaccgattttatcaatagggacagaaaccatccgtcggttttttgctggagtgtcggcaacgaactggaaaaacagggcacgcccgaaatgatcgagaccggaaaaacgctctgtaaatttgtcaggactctggatgaccgtcctgttaccctggctttgtcgccccatgttacagagcttacgccccgtgatttagtcggagcgcctcctgaaaaacacgttgaaatcaccgcgcgtatagcggaatttgttgacgtactcggccttaactatcacgagccctggtatccttactataccaaggcaatcgacaagcccattatcggtacggaatgttatgaatactattccgggacgcttcattcctacgaggattatgacaggaaaaatccctggcgttatgtgctggaagacgacaacgtgcttggtcagtttatatgggccgggattgattaccttggcgaagccaactggccctcaaaagggtgggccggttcaagcctggacatctgcggcttttacaaagacgaggcgtggctccgcaagagctattggtcagaagagccggtagcgcatatatgtttttacgacaataccttacccaacaactacgcccgcggccgctggaattttccctataccgcttcccaccttaatctggacagcctccagcgccgtgtcgttagcgccgccgtgtataccaactgcgaagaggtagaactctggattaacgataaaaaagtaggccgcagaaagcttgaagatttccgaaataatattattgactggcctttcgattacacgccgggcgaaataaaactgattggttttcgtaacggaaaagaggttgttgtacaggaaatcaaaacctctggccctcccgcgattatcagccttaaagcggataaaaccacgctaaagccaggctcttggcccacatag

SEQ ID NO: 66560 - protein, 694 aa, Unknown
  Obtained from environmental sample
  DOMAIN (284)...(576): Glycosyl hydrolases family 2, TIM barrel domain
  misc_feature (1)..(694): Xaa is any amino acid
MKDEYARLINRDWKFLLGNPKGAEXEDYCDRTWKRVDLPHDWVIHQPFDKGEGTGWTSEVMQGFFVWKSTGWYRKELILPDTSDKEIFLYFGCAYRNATIYVNGKKAGSHAYGYTSFELCVSLLVKPGKNLLAIRLDHGSSVPDRWYSGAGLFRDIYLRVTPKLHFTTWGLGVKAVVQSEAKGNALIKVTAEIANTATEGGDSFLRLAVKDPLTDPKANYVTTVEIPFKFSPKSKTLVEHSFQIKNPSLWSDKNPKLYRLSASIGRENVGVRELSFGIRDIKMIAKKGFFVNGENVKLKGVCLHHDCGILGAAFYSEAWRRRLLILKGLGCNAIRTSHNPPAEEFLDLCDELGFYVIDECFDKWKSLSYGEIFEKNWKKDLTDFINRDRNHPSVFCWSVGNELEKQGTPEMIETGKTLCKFVRTLDDRPVTLALSPHVTELTPRDLVGAPPEKHVEITARIAEFVDVLGLNYHEPWYPYYTKAIDKPIIGTECYEYYSGTLHSYEDYDRKNPWRYVLEDDNVLGQFIWAGIDYLGEANWPSKGWAGSSLDICGFYKDEAWLRKSYWSEEPVAHICFYDNTLPNNYARGRWNFPYTASHLNLDSLQRRVVSAAVYTNCEEVELWINDKKVGRRKLEDFRNNIIDWPFDYTPGEIKLIGFRNGKEVVVQEIKTSGPPAIISLKADKTTLKPGSWPT

SEQ ID NO: 66561 - DNA, 1524 bp, Unknown
  Obtained from environmental sample
  misc_feature (1)..(1524): n is a, c, g, or t
atgagcgaaatggcgctggttctggattttggcggtcagtataaggagcttatcgcgggaacggtcaggaacctgtccgtatactcgcagataatgccgggcaataccccgcttgatgaaatcaaaaagctgaacccaatcggcattatcctgacaggcgggccgaacagcgtatacctgccggactcgcccaaatgcgacccggaaattttttcattgggcattccaatcctcggtatctgctacggaatgcatttaatgtgttatacgctgggtggcaaagtcgcgtccggcaaagcaggcgaatacgggcgcgtcaaggtaacacccgtaaaaacttcgtcaaaattattcaaaagtaaaaaggatccctttaccgcgctgatgagccacggagacgctgtaacaaacctgccggaaggatttcgcataacggcgaaaagcgcaatctgtacggcggcctgtgaggacaaggcgagaaaactttacgccgtgcagttccacccggaaacaaaacacaccaaaggcgggcgcgaaataataaaacggtttttgtatgatatttgcggcgccaaaggtgattataagcttggcgattatatagatacacaaatcaaacaaatacgaaaaacggttgaagataaaaaggttctgctcgccttatcaggcggcgttgattcgtccgtatgcgcgggacttttatcaaaggcgatacccgggcagcttacctgcatatttgtcgatcacggccttatgcgcttaaacgaaggcgatgaaatagagaaggcgttttcaaaacgaaacctcaattttatccgcgtgaacgcgcaaaaacgctttcttgccaaactggaaggcgtaaccgagcctgagaaaaaacgcaagataatcggcgaggaatttatccgcgtgtttgaggaagaatccgcaaagttaggcgacattccatttctggcgcagggaacgatataccccgatgtcgttgaatccggcggcaaacacggcgctgttatcaagagtcatcacaatgtgggcgggcttcccgaaaaccttaaatttacgggtatcgttgagccattgtcgcggcttttcaaggatgaggtgcgcgcgctcggtaaaaaacttaaactgccgaggtctcttgttaaccgtcagccatttccggggcctgggcttgccattcgcgtcatgggcgaagtgacggaagaaaaactggatgttttacgccgtgccgacgcaatactccgtgaggaactggacgccatgaaacgcagacccaatcaatacttctgcgtcatgaccggtacgcgctccgtgggcgttaaaggagacgacagaacctacgattttgtaatcgccgtcagagccgtaacgaccgatgactttatgacctgcgagtacaccccgttgccgcataatctattaagccggatatcctcacggataacaagcgagataccgcgggtgagccgcgttgtttacgatattacatcaaagcccccggcgacggtggaatgggagtag

SEQ ID NO: 66562 - protein, 507 aa, Unknown
  Obtained from environmental sample
  DOMAIN (17)...(170): Peptidase C26
  misc_feature (1)..(507): Xaa is any amino acid
MSEMALVLDFGGQYKELIAGTVRNLSVYSQIMPGNTPLDEIKKLNPIGIILTGGPNSVYLPDSPKCDPEIFSLGIPILGICYGMHLMCYTLGGKVASGKAGEYGRVKVTPVKTSSKLFKSKKDPFTALMSHGDAVTNLPEGFRITAKSAICTAACEDKARKLYAVQFHPETKHTKGGREIIKRFLYDICGAKGDYKLGDYIDTQIKQIRKTVEDKKVLLALSGGVDSSVCAGLLSKAIPGQLTCIFVDHGLMRLNEGDEIEKAFSKRNLNFIRVNAQKRFLAKLEGVTEPEKKRKIIGEEFIRVFEEESAKLGDIPFLAQGTIYPDVVESGGKHGAVIKSHHNVGGLPENLKFTGIVEPLSRLFKDEVRALGKKLKLPRSLVNRQPFPGPGLAIRVMGEVTEEKLDVLRRADAILREELDAMKRRPNQYFCVMTGTRSVGVKGDDRTYDFVIAVRAVTTDDFMTCEYTPLPHNLLSRISSRITSEIPRVSRVVYDITSKPPATVEWE

SEQ ID NO: 66563 - DNA, 546 bp, Unknown
  Obtained from environmental sample
  misc_feature (1)..(546): n is a, c, g, or t
ttgtttacgatattacatcaaagcccccggcgacggtggaatgggagtaggattatgaccaaatatgtttttgttacaggcggcgttgtatcgggacttggcaaggggatcaccgccgcgtcattgggcaggctgctcaaacagcggggcttaaaggtcgcggcgcagaaactcgatccgtatatgaacgtcgatccgggaacaatgagcccgttccagcacggcgaggtttttgttacggacgacggagcggaaaccgatcttgacctggggcattacgagcgttttatagatgaaaacctgacgaagctcagtaatctgacatccggccaggtgtaccgtaacgtacttgatcgggagcgcgccggcggctatctgggcagtaccgtgcaggttattccccatgttaccactgaaataaaaagttttatttatgccggcgcggaaaaaagccgcgccgatgttttgattaccgagatcggcggcacgacgggcgacattgaaagccagccctttttggaggctatccggcagatttccccttga

SEQ ID NO: 66564 - protein, 181 aa, Unknown
  Obtained from environmental sample
  DOMAIN (20)...(180): CTP synthase N-terminus
  misc_feature (1)..(181): Xaa is any amino acid
MFTILHQSPRRRWNGSRIMTKYVFVTGGVVSGLGKGITAASLGRLLKQRGLKVAAQKLDPYMNVDPGTMSPFQHGEVFVTDDGAETDLDLGHYERFIDENLTKLSNLTSGQVYRNVLDRERAGGYLGSTVQVIPHVTTEIKSFIYAGAEKSRADVLITEIGGTTGDIESQPFLEAIRQISP

SEQ ID NO: 66565 - DNA, 426 bp, Unknown
  Obtained from environmental sample
  misc_feature (1)..(426): n is a, c, g, or t
atggataaacaggcagttttcgcggccttttcaaggggaaatctgccggatagcctccaaaaagggctggctttcaatgtcgcccgtcgtgccgccgatctcggtaatcaaaacatcggcgcggcttttttccgcgccggcataaataaaactttttatttcagtggtaacatggggaataacctgcacggtactgcccagatagccgccggcgcgctcccgatcaagtacgttacggtacacctggccggatgtcagattactgagcttcgtcaggttttcatctataaaacgctcgtaatgccccaggtcaagatcggtttccgctccgtcgtccgtaacaaaaacctcgccgtgctggaacgggctcattgttcccggatcgacgttcatatacggatcgagtttctgcgccgcgacctttaa

SEQ ID NO: 66566 - protein, 141 aa, Unknown
  Obtained from environmental sample
  misc_feature (1)..(141): Xaa is any amino acid
MDKQAVFAAFSRGNLPDSLQKGLAFNVARRAADLGNQNIGAAFFRAGINKTFYFSGNMGNNLHGTAQIAAGALPIKYVTVHLAGCQITELRQVFIYKTLVMPQVKIGFRSVVRNKNLAVLERAHCSRIDVHIRIEFLRRDL

SEQ ID NO: 66567 - DNA, 1071 bp, Unknown
  Obtained from environmental sample
  misc_feature (1)..(1071): n is a, c, g, or t
gtgacattgatcccgtatttaaaagcctcgggagagcacaaatcgaagcccacacagcactcggtcanagagttgcgcgctattggtatttcacctaacatcatcatcgcgcgggctgacgaaccaataaacgacggtattacggataaaattgcgctcttttgcaatgtaaaacccgattgcgtcattgaaaattacaccattccttccctgtacgcggctccgattctgctccatgaaaacggcctggacaaggtcgtatgccgcgaacttgggattaacgcgcctgagcctgatttgaatgagtggggcaacatggttaaaaaaatcggggagagaaagcgggaagtcaatatcgcgattgtcggaaaatatgttcaattacacgacgcgtatctttccattattgaaagccttaaccacgcgggcattgaagctggagcgggagtaaacatccagtggattgacagcgaagaggtaacaaacgaaagcgtgggcgaactgttacgcgaaactgacggcatgatcattcccggaggcttcggcgagaggggaattgagggaaaaatcgctgcctgccgttacgcgagggaaaacgatgtaccgtatctgggaatctgccttggaatgcagattgccgtgattgaatttgcgcgtaacgtctgcgggctgaagcacgcccattcaagtgaatttgacgaaatttctccacatcgcgtcatcgatctgatgcccgatcaggccggcatggtcggctctggcggcaccatgcggttgggcgcgtatccttgtaaaatcacgcagggcacgctgctgcacaggctgtacaacgcggaagaaataagcgaaagacaccgccaccgctttgaattcaacaataactaccgggaggctctgacgggcaagggaatggttatctgtggtgtgtcgcctaacggaagccttgtcgaggcaattgagcttccggatcgccgttttttcaccggggttcagttccatcccgagttcaagagccgaccaaataaaccgcacccgctgtttttagggttggtaaaagcggcgattaaataa

SEQ ID NO: 66568 - protein, 356 aa, Unknown
  Obtained from environmental sample
  DOMAIN (119)...(335): Peptidase C26
  misc_feature (1)..(356): Xaa is any amino acid
MTLIPYLKASGEHKSKPTQHSVXELRAIGISPNIIIARADEPINDGITDKIALFCNVKPDCVIENYTIPSLYAAPILLHENGLDKVVCRELGINAPEPDLNEWGNMVKKIGERKREVNIAIVGKYVQLHDAYLSIIESLNHAGIEAGAGVNIQWIDSEEVTNESVGELLRETDGMIIPGGFGERGIEGKIAACRYARENDVPYLGICLGMQIAVIEFARNVCGLKHAHSSEFDEISPHRVIDLMPDQAGMVGSGGTMRLGAYPCKITQGTLLHRLYNAEEISERHRHRFEFNNNYREALTGKGMVICGVSPNGSLVEAIELPDRRFFTGVQFHPEFKSRPNKPHPLFLGLVKAAIK

SEQ ID NO: 66569 - DNA, 774 bp, Unknown
  Obtained from environmental sample
  misc_feature (1)..(774): n is a, c, g, or t
gtgtcccattccgtgcgggccagtattgttgctgtaattattggaacatatttgaaacttccaagacaccagctaattgaattgggaattgcgggcttgctgtgtaaaataagcgtactcaatctgtcaggacgaatatacacaagtaaagagggcgggcttaacctgttgaaatttggcacagatatggaaaaaaaattattgtatgtacatactatacacgccaacaggaagctcaaagcgttaaattttcccttgtcaatttgcgaagcggtgcttcagcatcatgaactggaagacggatcgggttttccccaacaacttaaaggaaacgctatcggcttgtatgggaaaattttggcggttgccggattttacgagaccttttcgactgaacatgttgatgggacaaagtgcagtcacagcgggatagtgcaaatacttaaaaacggcgggagttttgatgtgtcggttatccgggctttagtgaactcaatttctatttaccctgttgggatatatgttttattgtccaacgggaaatgcgggcaggtgtcggatatagaccgggaaaatccgcgttttcccattgtaaagatttttggaaaacaatcgcacaatgaaaatgtgaaaacttccgatgagctttttatagtccgtcctcttaccgtcgaagaagtcgaagcttctgttaaagagatcgaaaattctgctaaaaaaaacagggatcgtaatctaaagtcgttatttaatcgccgcttttaccaaccctaa

SEQ ID NO: 66570 - protein, 257 aa, Unknown
  Obtained from environmental sample
  misc_feature (1)..(257): Xaa is any amino acid
MSHSVRASIVAVIIGTYLKLPRHQLIELGIAGLLCKISVLNLSGRIYTSKEGGLNLLKFGTDMEKKLLYVHTIHANRKLKALNFPLSICEAVLQHHELEDGSGFPQQLKGNAIGLYGKILAVAGFYETFSTEHVDGTKCSHSGIVQILKNGGSFDVSVIRALVNSISIYPVGIYVLLSNGKCGQVSDIDRENPRFPIVKIFGKQSHNENVKTSDELFIVRPLTVEEVEASVKEIENSAKKNRDRNLKSLFNRRFYQP

SEQ ID NO: 66571 - DNA, 1230 bp, Unknown
  Obtained from environmental sample
  misc_feature (1)..(1230): n is a, c, g, or t
atgaaaaaggttaaatctaatgtgggaagttttgcgacagcaaaacttcaagctaaaatgcgaagcattttagccattatcgctattgttgcggtgattggcttttcaatggcatgcggtggcggcggatatgataacggcggtacaccgggaggtggcactggtggcactgcaccaacaataacaacaacgtcattacaagacgaattagttggtacagcatacagtcaaacattaaccgcgacaggagatacgccaattacatggagcgttgaaagcggaacattgccaaacggcttaacgctttctgacgaaggagtaatttcaggaaagccgacaacatttggagtatctagtttcaccgtcaaagcaactaattccgcaggtaacaacacaaaatcgctaagtattacaattcggcttgttgaaatggtttctatatctgccggaacatttcagatgggaagtccaacaactgaaacgaatcgacagagcggtgaaacgcaacattctgtaacgcttagtggttttaaaatgggtaagtatctggtaacacaggaacagtatcaggcggtaatgggaagtaatccgagtaattttaatggtagtacaggcaaagaacctgcaaccggcgaaacacagggaaaacgaccggtggatggtgtaagctggtattacgcattgatattttgcaacaagttgagcataaaggaaggattaactccagcgtacagcattagcggaaatactgatcctacagcatggggaacagttccaacggaatacaacgatcctaacataactacatggaatgtagtaataatcgttgccggttctaccggatatcgtttgccgacagaagcgcagtgggaatatgcgtgccgagcgggaacaacaacagcgtataacacaggggatacgattagcgaaaatacagggtggtatgacagtaacagcggaaataagacacatgaggttggaaaaaaatccgcaaacgcatgggggctgtacgacatgcatgggaacgtgtgggaatggtgttgggactggtatggcggttactcaagcggtgcgcagaccgaccctatgggcgcgtcctcggggtctgaccgcgtgggtcgcggcgggggctgggtcaatttggctgggggcctgcgttccgctcgccggggctacgacggcccgaacggccggggctccgacatcggcttccggctcgtccgcccctag

SEQ ID NO: 66572 - protein, 409 aa, Unknown
  Obtained from environmental sample
  DOMAIN (88)...(129): Putative Ig domain
  misc_feature (1)..(409): Xaa is any amino acid
MKKVKSNVGSFATAKLQAKMRSILAIIAIVAVIGFSMACGGGGYDNGGTPGGGTGGTAPTITTTSLQDELVGTAYSQTLTATGDTPITWSVESGTLPNGLTLSDEGVISGKPTTFGVSSFTVKATNSAGNNTKSLSITIRLVEMVSISAGTFQMGSPTTETNRQSGETQHSVTLSGFKMGKYLVTQEQYQAVMGSNPSNFNGSTGKEPATGETQGKRPVDGVSWYYALIFCNKLSIKEGLTPAYSISGNTDPTAWGTVPTEYNDPNITTWNVVIIVAGSTGYRLPTEAQWEYACRAGTTTAYNTGDTISENTGWYDSNSGNKTHEVGKKSANAWGLYDMHGNVWEWCWDWYGGYSSGAQTDPMGASSGSDRVGRGGGWVNLAGGLRSARRGYDGPNGRGSDIGFRLVRP

SEQ ID NO: 66573 - DNA, 1773 bp, Unknown
  Obtained from environmental sample
  misc_feature (1)..(1773): n is a, c, g, or t
atgacccccgatgcggtggaagtttgcgacggctcacaggctgagtacgacaaaatgctgaaaatccttgtggactcagggcttggcacgccgcttaaaaaacggccgaacagctacttgttccgttccgatccttcggatgtggcgagggtggaaaaccgcacatttattgccagtaaaaacgaaagcgacgcagggcctaccaatcactggatcaacccggacgaattgaaaaaaacaatgaccggcctgtacaagggctgtatgaaaggccgcacaatgtatgtaattcccttctctatggggcctgtcggctcgaacatagccaaaatcggcgttcaaattacagacagcgcctatgtagtcgttaatatgcacattatgaccagagtgggaacaaaggttctggacgtgcttggaagcgacggtttttatgtgccttgtttccattctataggcaagcctcttgccgccggagaaagcgacaacggcaaatggccctgcgccccgcttgaacacaaatacatcagccacttccccgaaacaagggaaatctggtcttacggttccggctacggcggaaacgccctgctcggcaaaaagtgcctcgcgctgcgcatagcgtcggtacttgcccgcgacgaaggctggctcgccgaacacatgctcatcttaaaattaaccaaccccaagggcgaggttaaatatgttacaggcgcccttccctcggcatgcggcaagacaaaccttgccatgttacagcccacccttcccggctggaaagtcgagaccgtaggcgacgatatcgcctggatgaaattcggagcggacggcagactgtacgcgatcaaccctgaagcgggattcttcggcgtcgcgcccggaacaagcgatcaatcaaactacaacgcgatgagggcaatagagaaaaactctatctttacaaactgcggccttaccgaagacggagatatctggtgggaacagatcggacacggtgctcccggcaaaactatcatcgactggaagggaaatgaaaaacccgctccccagaacgacaaggccgtgaagggcgaagagatcgcccatcccaacgcccgctttacggcgccggcaaaacaatgccccgtaatcgcttccgagtgggaagacccgaaaggcgtgccaatcagcgcattccttttcggcggacgccgcgcgtcaactatccctcttgtaaaccagagcaaaaactgggtacacggtgttttcatgggatcgatcaccggctctgaaatcacggccgcggctctcgatcttaaagaagggtcagtacgccgcgacccgtttgccatgcttcccttctgcggctaccacatgggcgattatttcagccactggctcaaactcggcaagaaagcgcaggacgaaggacacggcgacaaactgccgaaaattttcttcaccaactggttccgcaaagacaaagacggtcatttcatgtggcccggttacggcgaaaactcccgcgtactcgcgtgggtattcgaccgctgcgacggtaaagacaactgtgtagaaaccgcgattggcctgttgcccaaacccggcgcgattgagcctcccgccggagtcagcgctgatacaatggcgcagttaatcgccgcggacaaagaaggctggaagaaagaaatttccgacgtgcgcgagaatcattacgcgaaattcggggataagatgccgaaagagctttatgatcatttgtcggagatggagaagaatcttaacgcttaa

SEQ ID NO: 66574 - protein, 590 aa, Unknown
  Obtained from environmental sample
  DOMAIN (1)...(588): Phosphoenolpyruvate carboxykinase
  misc_feature (1)..(590): Xaa is any amino acid
MTPDAVEVCDGSQAEYDKMLKILVDSGLGTPLKKRPNSYLFRSDPSDVARVENRTFIASKNESDAGPTNHWINPDELKKTMTGLYKGCMKGRTMYVIPFSMGPVGSNIAKIGVQITDSAYVVVNMHIMTRVGTKVLDVLGSDGFYVPCFHSIGKPLAAGESDNGKWPCAPLEHKYISHFPETREIWSYGSGYGGNALLGKKCLALRIASVLARDEGWLAEHMLILKLTNPKGEVKYVTGALPSACGKTNLAMLQPTLPGWKVETVGDDIAWMKFGADGRLYAINPEAGFFGVAPGTSDQSNYNAMRAIEKNSIFTNCGLTEDGDIWWEQIGHGAPGKTIIDWKGNEKPAPQNDKAVKGEEIAHPNARFTAPAKQCPVIASEWEDPKGVPISAFLFGGRRASTIPLVNQSKNWVHGVFMGSITGSEITAAALDLKEGSVRRDPFAMLPFCGYHMGDYFSHWLKLGKKAQDEGHGDKLPKIFFTNWFRKDKDGHFMWPGYGENSRVLAWVFDRCDGKDNCVETAIGLLPKPGAIEPPAGVSADTMAQLIAADKEGWKKEISDVRENHYAKFGDKMPKELYDHLSEMEKNLNA

SEQ ID NO: 66575 - DNA, 588 bp, Unknown
  Obtained from environmental sample
  misc_feature (1)..(588): n is a, c, g, or t
gtgttcggcgagccagccttcgtcgcgggcaagtaccgacgctatgcgcagcgcgaggcactttttgccgagcagggcgtttccgccgtagccggaaccgtaagaccagatttcccttgtttcggggaagtggctgatgtatttgtgttcaagcggggcgcagggccatttgccgttgtcgctttctccggcggcaagaggcttgcctatagaatggaaacaaggcacataaaaaccgtcgcttccaagcacgtccagaacctttgttcccactctggtcataatgtgcatattaacgactacataggcgctgtctgtaatttgaacgccgattttggctatgttcgagccgacaggccccatagagaagggaattacatacattgtgcggcctttcatacagcccttgtacaggccggtcattgtttttttcaattcgtccgggttgatccagtgattggtaggccctgcgtcgctttcgtttttactggcaataaatgtgcggttttccaccctcgccacatccgaaggatcggaacggaacaagtagctgttcggccgttttttaagcggcgtgccaagccctga

SEQ ID NO: 66576 - protein, 195 aa, Unknown
  Obtained from environmental sample
  misc_feature (1)..(195): Xaa is any amino acid
MFGEPAFVAGKYRRYAQREALFAEQGVSAVAGTVRPDFPCFGEVADVFVFKRGAGPFAVVAFSGGKRLAYRMETRHIKTVASKHVQNLCSHSGHNVHINDYIGAVCNLNADFGYVRADRPHREGNYIHCAAFHTALVQAGHCFFQFVRVDPVIGRPCVAFVFTGNKCAVFHPRHIRRIGTEQVAVRPFFKRRAKP

SEQ ID NO: 66577 - DNA, 498 bp, Unknown
  Obtained from environmental sample
  misc_feature (1)..(498): n is a, c, g, or t
atggaaaataacgataacgacattagtaaatatattgatcccatactgcatttttgcataaaacgactgaataatcgtcaggacgccgaggacttggcgggcgaaataatggttcacatattaagcggcatcaggaaatacaaaatagaatcgcttgaaaactggatatggagcatcgcccataatcgttacgcgaagtacatagacaaaagaaataaaaccaataataaggagacagacgcagactacgcggaaatcgcggacacttatgattttatcgatcaattaataatttcaaacaggtatcaaaatgtgtttaaggcccttcatgcgctttccggcgagtatcgcgatattttggttgattactatgtaaacgggttttctgtaaaacaaatcgctgaaaaatacaaactgcctgaaactacggttaaatggcggcttaacgtgggaagggagaagattaaggaagagataaaagatactaaaggaggataa

SEQ ID NO: 66578 - protein, 165 aa, Unknown
  Obtained from environmental sample
  DOMAIN (102)...(155): Sigma-70, region 4
  misc_feature (1)..(165): Xaa is any amino acid
MENNDNDISKYIDPILHFCIKRLNNRQDAEDLAGEIMVHILSGIRKYKIESLENWIWSIAHNRYAKYIDKRNKTNNKETDADYAEIADTYDFIDQLIISNRYQNVFKALHALSGEYRDILVDYYVNGFSVKQIAEKYKLPETTVKWRLNVGREKIKEEIKDTKGG

SEQ ID NO: 66579 - DNA, 990 bp, Unknown
  Obtained from environmental sample
  misc_feature (1)..(990): n is a, c, g, or t
ttgtaccttaattatgacagccgggcagaccgggaaattatagaaaaggaagcctggcttgattctacggatttgattatttttgacgagattcacaagatgcccggctggaaaacatatataaaaggggtttttgacaccaagccggaaaaacttgagattctcgtaaccggcagcgcccggctggagtatttcagacaaacaggagactctctttcggggcgttttttttcccaccggctttttcctttttcggcgggggaacttgccgcggcgggtcttacgcctgaccttgaccgcctgatgatcaggggcggattccctgagccttttctggcggatgaagagacctttgcaatgcgctggcgcaaacagtatgtggacggccttgtccgggaggatgttcttgattttgagaaattcagcgatttcaagtccctcaagctgtgcctggagcttctgcgaagccgtgtcggctctccggtttcatattcatccatggccagggatattgggattgcacctaacaccgtaaaaaaatacatccaggttttccaggaattgtacatcatttttccggtcagccctttttcggaaaatatcgcgcgttcccttttgaaagagccgaaaatctacttttttgatactgctcttgtagacggtgatgaaggaatcaaatttgaaaatcttgccgctctggcgctggcaaaacaagccgcggccgaggaggatataagcgggtgttccgccgccctgcattacatacggacaaaagacggcagggaagttgatttttgttatgtccgcgacggaaaaccgcagtaccttatggaggtaaaacttttcgaattcagtatcagcaaaaaccttcattatttttgcggccgctacaatattcccggcatacagttggttaagaatcttaaactggaacggcaggaaggcattgaggtacgctccgcctccgcctggcttgcggaacttgaatag

SEQ ID NO: 66580 - protein, 329 aa, Unknown
  Obtained from environmental sample
  misc_feature (1)..(329): Xaa is any amino acid
MYLNYDSRADREIIEKEAWLDSTDLIIFDEIHKMPGWKTYIKGVFDTKPEKLEILVTGSARLEYFRQTGDSLSGRFFSHRLFPFSAGELAAAGLTPDLDRLMIRGGFPEPFLADEETFAMRWRKQYVDGLVREDVLDFEKFSDFKSLKLCLELLRSRVGSPVSYSSMARDIGIAPNTVKKYIQVFQELYIIFPVSPFSENIARSLLKEPKIYFFDTALVDGDEGIKFENLAALALAKQAAAEEDISGCSAALHYIRTKDGREVDFCYVRDGKPQYLMEVKLFEFSISKNLHYFCGRYNIPGIQLVKNLKLERQEGIEVRSASAWLAELE

SEQ ID NO: 66581 - DNA, 831 bp, Unknown
  Obtained from environmental sample
  misc_feature (1)..(831): n is a, c, g, or t
atggattacgcaactgaatcgcttaggaaacactatgaatggcggggcaagctggaaactattcccaagatgcctgtaaacacgcgggaggatctttcgctggcctacacgcccggcgtcgcgcagccctgtcttgaaatacagaaataccctgaaaaaagctgggaacttaccgggcgctggaacaccgtggctgtcgtcacagacggcaccgcggtgctggggttaggcgacatcggaccggaagcgggaatgcccgtaatggaaggaaaatgcgtcctgttcaaggccttcggcggcatagacgcgatccccctgtgcatacgctcaaaggaagttgacgtcattgtagaaacaaccgccctgctcgccggcagtttcgggggtattaaccttgaagatatctccgccccgcgctgttttgaaatcgagcgcaagttgaaagcaagatgcgacatacccattttccatgacgaccagcacggcacggctgtagtgacaacggcggccctgcttaacgcgctcaagatcaccggaaaaaaactggnaaacataaacgcggtcatacttggcgcgggcgcggcggggatagccgtaatcaggctgttacagaccgccggtttaaacgacgttgtactatgcgaccgtcagggggcaatttacaagggcagacaagggcttaacagcgaaaaggcggagatggcggaaatatcaaacaaacaaatgaagaagggaagccttacagacgtcctgcgggggagccgatgtatttatcggcgtttcagcgcccggcatggtaactcaggaaatggtaaaatctatggctcctaa

SEQ ID NO: 66582 - protein, 276 aa, Unknown
  Obtained from environmental sample
  DOMAIN (160)...(276): Malic enzyme, NAD binding domain
  misc_feature (1)..(276): Xaa is any amino acid
MDYATESLRKHYEWRGKLETIPKMPVNTREDLSLAYTPGVAQPCLEIQKYPEKSWELTGRWNTVAVVTDGTAVLGLGDIGPEAGMPVMEGKCVLFKAFGGIDAIPLCIRSKEVDVIVETTALLAGSFGGINLEDISAPRCFEIERKLKARCDIPIFHDDQHGTAVVTTAALLNALKITGKKLXNINAVILGAGAAGIAVIRLLQTAGLNDVVLCDRQGAIYKGRQGLNSEKAEMAEISNKQMKKGSLTDVLRGSRCIYRRFSARHGNSGNGKIYGS

SEQ ID NO: 66583 - DNA, 462 bp, Unknown
  Obtained from environmental sample
  misc_feature (1)..(462): n is a, c, g, or t
atgaccgcgtttatgtttnccagtttttttccggtgatcttgagcgcgttaagcagggccgccgttgtcactacagccgtgccgtgctggtcgtcatggaaaatgggtatgtcgcatcttgctttcaacttgcgctcgatttcaaaacagcgcggggcggagatatcttcaaggttaatacccccgaaactgccggcgagcagggcggttgtttctacaatgacgtcaacttcctttgagcgtatgcacagggggatcgcgtctatgccgccgaaggccttgaacaggacgcattttccttccattacgggcattcccgcttccggtccgatgtcgcctaaccccagcaccgcggtgccgtctgtgacgacagccacggtgttccagcgcccggtaagttcccagcttttttcagggtatttctgtatttcaagacagggctgcgcgacgccgggcgtgtag

SEQ ID NO: 66584 - protein, 153 aa, Unknown
  Obtained from environmental sample
  SIGNAL (1)...(20)
  misc_feature (1)..(153): Xaa is any amino acid
MTAFMFXSFFPVILSALSRAAVVTTAVPCWSSWKMGMSHLAFNLRSISKQRGAEISSRLIPPKLPASRAVVSTMTSTSFERMHRGIASMPPKALNRTHFPSITGIPASGPMSPNPSTAVPSVTTATVFQRPVSSQLFSGYFCISRQGCATPGV

SEQ ID NO: 66585 - DNA, 381 bp, Unknown
  Obtained from environmental sample
  misc_feature (1)..(381): n is a, c, g, or t
atggtaactcaggaaatggtaaaatctatggctcctaacgcgattttgtttccaatgtctaacccgacgccggaaatcatgccggatgaagctcttgccgcgggagccgcggtagtgggaacaggacgcagcgattttgccaaccaaataaacaatgttcttgccttccccggcattttccgcggagcactggacgtgcgcgcaagcgacattaacgatgaaatgaaaattgcgtcggcatacgcgcttgccggtcttgtgagtgaaaacgaattacgcagcgattacattattcccgcggcttttgatccaagaataaaagatacagtagctaacgccgcggcgcaggcggcgaaaaaaagcggcgtggcaagagtataa

SEQ ID NO: 66586 - protein, 126 aa, Unknown
  Obtained from environmental sample
  DOMAIN (1)...(119): Malic enzyme, NAD binding domain
  misc_feature (1)..(126): Xaa is any amino acid
MVTQEMVKSMAPNAILFPMSNPTPEIMPDEALAAGAAVVGTGRSDFANQINNVLAFPGIFRGALDVRASDINDEMKIASAYALAGLVSENELRSDYIIPAAFDPRIKDTVANAAAQAAKKSGVARV

SEQ ID NO: 66587 - DNA, 720 bp, Unknown
  Obtained from environmental sample
  misc_feature (1)..(720): n is a, c, g, or t
ttgttggagggaaatatggcggaaaatcagccaagtaaagaagtaattgatttgtataacaaaggaaatgccgcgggaatgctttgcaattttgttgaagcgtttgaatgttatctgtccgcggcggataagggatacgctcccgctcaatgtaatcttgccttttgttatgagaaaggacacggcgtcgccttaaattatcaaaaggcgcttgaatattaccaaaaagccgcaaagcagggatatttgccggctttatgtaatctgggatggtgttatgaaagcggctgcggagtagagcaggatttagaaaaagctgtcgcatattacagtaaagccgcgaaagaaggatatgcgccggctcaaagtaattttggtttttgctgtgaaaacggcagcggtacagccaaagatattaatcaagcttttgaattgtacaaagcagccgcggctcaaggtaacgtttccgctcaattcagtttgggcggatgttatgaattcggcaaaggaacagaaaaggacttagcaaaagcttttgaatggtacaaaaaatcagcggagcatggatacgcgcccgcgcagaattgtcttggtatttgttatgagaatggcaaaggaacggcaaagaatctgatactcgcttctgaatggtatactgttgcttcgaatcaaggatacataacggcgaaaaaaaatctggatagccttaaggaaaaataa

SEQ ID NO: 66588 - protein, 239 aa, Unknown
  Obtained from environmental sample
  DOMAIN (191)...(226): Sel1 repeat
  misc_feature (1)..(239): Xaa is any amino acid
MLEGNMAENQPSKEVIDLYNKGNAAGMLCNFVEAFECYLSAADKGYAPAQCNLAFCYEKGHGVALNYQKALEYYQKAAKQGYLPALCNLGWCYESGCGVEQDLEKAVAYYSKAAKEGYAPAQSNFGFCCENGSGTAKDINQAFELYKAAAAQGNVSAQFSLGGCYEFGKGTEKDLAKAFEWYKKSAEHGYAPAQNCLGICYENGKGTAKNLILASEWYTVASNQGYITAKKNLDSLKEK

SEQ ID NO: 66589 - DNA, 1077 bp, Unknown
  Obtained from environmental sample
  misc_feature (1)..(1077): n is a, c, g, or t
atgccacaaccacaacccagaaaagaaattcaaagtatttcggattatgttccgggcaagtccattgacgaaatcaaggaaaaacacaaactttcccgcgttataaaacttgcttccaacgaaaacccgcttggaccaagcccgctggcaatggcggcatataaagaatgtgctcaaaaattgcatttatacccaaggggttctgcacccgaacttgttaaaaaacttgctttgaaatggaaggttaagccagaaaatttgattgtgggcaatggctcagacgagattttggatttggcggcaagggcttatttgaataaaagcgattatgcggttggggcaaaatccacattttctgtttatgccttggcgactctgcaaacaggggcaaaatacaaagggcttgcgcttgaaaatttttgctacccgctgaacggcctgctcaaattcccaaaagcgaaaatcatttttgtttgcaacccaaataatccaaccggaactttttatcccaataaaattatttataaatttttgcaaaaagtccccaaaaacattcttgttgtattagacatggcttatgcagaatatactggcgaaagcgaaccgccctttgacaaatggataaagcaattcccaaatcttttatgcacacgtacgttcagtaaactctatgggcttgctgggcttagaataggttatggaatagcatctaaagagattataggtacacttaaaaaaataaaattgccttttaattcaagctaccccgctcaaatagccgcagcggcagcacttgaagatacagattttattgaaaaatccttgaagatgaatgcagaagggcgagagcatttaatgcggcgtttgcaggattttggctttgaggttttaccttcggctgcaaattttgtttgcgcaaaaataggacagcgagcggcggagcttgtggcttggcttgagagcaaaggcgtgatagtccggcagttgagcagttttggtatgccagaatatgtacgcatcactgtgggaacaaaaaaagaaaattctacattgcttgctttatttactatattttag

SEQ ID NO: 66590 - protein, 358 aa, Unknown
  Obtained from environmental sample
  DOMAIN (32)...(355): Aminotransferase class I and II
  misc_feature (1)..(358): Xaa is any amino acid
MPQPQPRKEIQSISDYVPGKSIDEIKEKHKLSRVIKLASNENPLGPSPLAMAAYKECAQKLHLYPRGSAPELVKKLALKWKVKPENLIVGNGSDEILDLAARAYLNKSDYAVGAKSTFSVYALATLQTGAKYKGLALENFCYPLNGLLKFPKAKIIFVCNPNNPTGTFYPNKIIYKFLQKVPKNILVVLDMAYAEYTGESEPPFDKWIKQFPNLLCTRTFSKLYGLAGLRIGYGIASKEIIGTLKKIKLPFNSSYPAQIAAAAALEDTDFIEKSLKMNAEGREHLMRRLQDFGFEVLPSAANFVCAKIGQRAAELVAWLESKGVIVRQLSSFGMPEYVRITVGTKKENSTLLALFTIF

SEQ ID NO: 66591 - DNA, 780 bp, Unknown
  Obtained from environmental sample
  misc_feature (1)..(780): n is a, c, g, or t
atgcaggaaggtccagaggaattgctcaaaagcacagatacacacaacccngctctttatgtttgctcttgtatggcaatggaacttttaaagagcaaaaatgtgtcttttgattatgcggcagggcattcgcttggcgagtattccgcgatttatgcagcgggcggtttttcttttgaagacgggcttcgtttggtgcgtgttcgcggcgagcttatggcaaaagctggcgagctaaagccgggtgcaatggcggctgtgctcaaattatccgaagcagatttaaatgccgctcttgcagaagctcaagatgcgggcgttgtggttgcggcaaatttcaattcgcccgggcaaatagttatcagcggttcaaaagaaggcgttgcaaaagcctctgaaattgcaaaagcaaagggtgcaaaaagagtggttccgcttcctgtttccggtgcattccacagccctttaatggaatatgctttaacgggcttaaaagaagctattgaaaaaacaacattcagcgattccaaagttcctgtgatagcgaatgtgacttctcagccggttagcaaaggtgcggagttcaaagaccttttggcaaagcagcttatttcgccagttcgttggcagcagagtatggaaactgcggtttctctcggtattgaaaggggaattgaagttggggctggcaaagttttggcaggcttaatgggcgttataaacagcaacgttaaggtttattctgttgaaacagaggagcagctaaactcaattgggtga

SEQ ID NO: 66592 - protein, 259 aa, Unknown
  Obtained from environmental sample
  DOMAIN (1)...(259): Acyl transferase domain
  misc_feature (1)..(259): Xaa is any amino acid
MQEGPEELLKSTDTHNPALYVCSCMAMELLKSKNVSFDYAAGHSLGEYSAIYAAGGFSFEDGLRLVRVRGELMAKAGELKPGAMAAVLKLSEADLNAALAEAQDAGVVVAANFNSPGQIVISGSKEGVAKASEIAKAKGAKRVVPLPVSGAFHSPLMEYALTGLKEAIEKTTFSDSKVPVIANVTSQPVSKGAEFKDLLAKQLISPVRWQQSMETAVSLGIERGIEVGAGKVLAGLMGVINSNVKVYSVETEEQLNSIG

SEQ ID NO: 66593 - DNA, 1443 bp, Unknown
  Obtained from environmental sample
  misc_feature (1)..(1443): n is a, c, g, or t
atggtggcggcgtggcttgccgatcctgaacggaataactatacgcttgattcgcttgccgaatatacctttgattacacgccgataaagtaccatgacatcgtgccaaagggcagatctttcgacgcggttcccctggaaacggcggcccgttactcggcggaagacgccgatctctgtatgagggtgatgcgccatcttgaacccctgcttgaaaaaaacggcgcgatggggctttttgataacctggaaatgcccctgctgcccgtgcttgctgaaatggaaggcgtcggcataatgatagagcctgaggtcttaacaagttatggaaaggagcttgaagtcgaactggggaatctccagcgtgatacctggaaaatggcaggacatgaattcaatttggcatctaccaaacaattacaggaggtactttttaccgagcgcaggctgaagccggtaaaaaagctcaagacaggttattccacggacgcggcgactctggaagagcttgcccgcgaggatccgcttcccgccttgatactccgccaccgtactctcgctaaactgaaatccacatatgttgacaccctggcgggcatggcggacagcaaaagaaggctgcatacaaactttgaccagtgcggaacggcaacaggccgcctttccagccgggaaccaaatctgcaaaacatacccatacgcgccgaggaaggccgccgaatccgcgaagcctttattgcggggcccggcagccttttattgtccgttgactacagccagatagaacttgtggtattggcccacctttcacaggatgagaacctccttacggctttcagggacggcacagatgtccatgcccgcacagccgcgttgatattcggcgtcggcgaagacaaagtaaatcccgaacagcggcgaatggcaaagacaatcaatttcggcgtgatgtacggcatgagcgcgttcaggctttcaaacgaattggggattagcagaaccgacgcgacgaattttataacagcgtattttaacacatattcaggcgttaggtgttttattgaggagcttatcaaaaaaaccgagggctgcggttatgtctcgacaatccttggacgcagaaggtatattcctaccattaactcgcggaacaagaccgagaaagccgccgccgaacgtattgcggttaacacacccattcagggttcggcagcggatattgttaaaaccgctatgctccgcctggacaaacgccttgccgaagaaaaaagtaaagcccgcattttgttgcaggttcatgacgaattgatccttgaatgtcccaaagatacagccgctaaaacagtggaactggttaaaacagaaatggaacaggctgtaaccttaagcgttccgctgagggtaagcattgaaacaggaagccgctggggcagttttcattga

SEQ ID NO: 66594 - protein, 480 aa, Unknown
  Obtained from environmental sample
  DOMAIN (101)...(479): DNA polymerase family A
  misc_feature (1)..(480): Xaa is any amino acid
MVAAWLADPERNNYTLDSLAEYTFDYTPIKYHDIVPKGRSFDAVPLETAARYSAEDADLCMRVMRHLEPLLEKNGAMGLFDNLEMPLLPVLAEMEGVGIMIEPEVLTSYGKELEVELGNLQRDTWKMAGHEFNLASTKQLQEVLFTERRLKPVKKLKTGYSTDAATLEELAREDPLPALILRHRTLAKLKSTYVDTLAGMADSKRRLHTNFDQCGTATGRLSSREPNLQNIPIRAEEGRRIREAFIAGPGSLLLSVDYSQIELVVLAHLSQDENLLTAFRDGTDVHARTAALIFGVGEDKVNPEQRRMAKTINFGVMYGMSAFRLSNELGISRTDATNFITAYFNTYSGVRCFIEELIKKTEGCGYVSTILGRRRYIPTINSRNKTEKAAAERIAVNTPIQGSAADIVKTAMLRLDKRLAEEKSKARILLQVHDELILECPKDTAAKTVELVKTEMEQAVTLSVPLRVSIETGSRWGSFH

SEQ ID NO: 66595 - DNA, 1023 bp, Unknown
  Obtained from environmental sample
  misc_feature (1)..(1023): n is a, c, g, or t
gtgaaggacatggacaagcacgcaagttacccttatgcaagtatcgatccgtcgggcaggctgatcgtaggggcggctgtatcaccgcaggattacacgcaaaggatacccctgttaaaaaacgccaaagttgattttgtcgtgcttgacacggcgcacggcgattcaaaaaacgtcatggacgcgatccgcgggataaaaaaagattttaacatccccgtaatcggcggaaatgtcgcgtccaaagaagggacgcgccgcctgatcgaagcgggggcggacgctgtaaaagtgggcatcggcccgggatccatctgcacgacgcggataattgcgggcatcggaatgccgcagtttaccgcggttctggactgcgccgaggaagcgtcgaaatcgaatattcccgttatcgccgacggaggcataaaattttccggggatattaccaaggccataggcgcgggcgccggcgtggtaatgataggcaacctctttgcggggctcaaggaggcgccgggcagggagataatttttgacggcagaatcttcaaggagtaccgcggcatgggcagcatgggggcgattgccgacggcgcgggcgaccgttaccagatgggcaaggacgaggaaccggttcccgaaggcattgaaggccgcgttccatacaagggcgaactgagcaggtatataagccagcttgtcgcggggcttagaaaaggaatgggctattgcggctgccataatatagaagaattaagaaaataccgcaagtttgtgcggattaccgccgccgggctcaggaaagccacgcgcatgatattacaatcacccaggaagccccgaattattcgcgctcatgaagggcttcgcccttcgatgtcctcactcgctcggtcatgtccgtgcaagcacggccgcgacctcactccgttcgtcaatgaaaactgccccagcggcttcctgtttcaatgcttaccctcagcggaacgcttaaggttacagcctgttccatttctgttttaa

SEQ ID NO: 66596 - protein, 340 aa, Unknown
  Obtained from environmental sample
  DOMAIN (1)...(272): IMP dehydrogenase / GMP reductase domain
  misc_feature (1)..(340): Xaa is any amino acid
MKDMDKHASYPYASIDPSGRLIVGAAVSPQDYTQRIPLLKNAKVDFVVLDTAHGDSKNVMDAIRGIKKDFNIPVIGGNVASKEGTRRLIEAGADAVKVGIGPGSICTTRIIAGIGMPQFTAVLDCAEEASKSNIPVIADGGIKFSGDITKAIGAGAGVVMIGNLFAGLKEAPGREIIFDGRIFKEYRGMGSMGAIADGAGDRYQMGKDEEPVPEGIEGRVPYKGELSRYISQLVAGLRKGMGYCGCHNIEELRKYRKFVRITAAGLRKATRMILQSPRKPRIIRAHEGLRPSMSSLARSCPCKHGRDLTPFVNENCPSGFLFQCLPSAERLRLQPVPFLF

SEQ ID NO: 66597 - DNA, 483 bp, Unknown
  Obtained from environmental sample
  misc_feature (1)..(483): n is a, c, g, or t
atgctgcccatgccgcggtactccttgaagattctgccgtcaaaaattatctccctgcccggcgcctccttgagccccgcaaagaggttgcctatcattaccacgccggcgcccgcgcctatggccttggtaatatccccggaaaattttatgcctccgtcggcgataacgggaatattcgatttcgacgcttcctcggcgcagtccagaaccgcggtaaactgcggcattccgatgcccgcaattatccgcgtcgtgcagatggatcccgggccgatgcccacttttacagcgtccgcccccgcttcgatcaggcggcgcgtcccttctttggacgcgacatttccgccgattacggggatgttaaaatctttttttatcccgcggatcgcgtccatgacgttttttgaatcgccgtgcgccgtgtcaagcacgacaaaatcaactttggcgttttttaacaggggtatcctttgcgtgtaa

SEQ ID NO: 66598 - protein, 160 aa, Unknown
  Obtained from environmental sample
  misc_feature (1)..(160): Xaa is any amino acid
MLPMPRYSLKILPSKIISLPGASLSPAKRLPIITTPAPAPMALVISPENFMPPSAITGIFDFDASSAQSRTAVNCGIPMPAIIRVVQMDPGPMPTFTASAPASIRRRVPSLDATFPPITGMLKSFFIPRIASMTFFESPCAVSSTTKSTLAFFNRGILCV

SEQ ID NO: 66599 - DNA, 861 bp, Unknown
  Obtained from environmental sample
  misc_feature (1)..(861): n is a, c, g, or t
gtgccggcgctgattttttccaaagaaaaggaacttgaaatttcaagtccgtttaccataggttttgaagaaataaaaaaattaagcgtcgcttacaacatattgaataaaggctcttatacgcgcatgggtttttcccctctttggaacgatgattttctgatgattacggcggtactgttcgattcatcgttcaaggaggcgtccccgctggcgtggaataacgccgctttgaaccgttccatggattttgtcaacgactggactattttgataaacaccgacaatcaggcggaagaagattttacatttaaatattttattgaacctcaggaaaaattaattcaatccgggcggattcttttttcatatatggaaagcagcgaactttttattttaagcgaagagagcaagaatattcttgatttccgctggattatggaagacgagaaaattcccatagccgaagacgcggtatttttgggcattccgaaaaaagggaaagccccgggtgcggcaaaggcgtttgttcaatggttttttaagattgaaaaccagcgcctgcttttggaattcagcaaagcaaacaggataagcgaaacggttttcggcatctgcggcggcttttcctccataggggcggttacagaacaaattttcccccgctactatcccagtttgttgggacgcatgccgccctccgaatttcttgccgccccgaacattcttcccggaaactgggcgataattcgcaagcgcgtggttcttccctaccttcacgaccgcgcccgcagcaggcagatagaagaaacgctgcctttggaaaaacgtttggctgagtggcaacgggttaataggtaa

SEQ ID NO: 66600 - protein, 286 aa, Unknown
  Obtained from environmental sample
  misc_feature (1)..(286): Xaa is any amino acid
MPALIFSKEKELEISSPFTIGFEEIKKLSVAYNILNKGSYTRMGFSPLWNDDFLMITAVLFDSSFKEASPLAWNNAALNRSMDFVNDWTILINTDNQAEEDFTFKYFIEPQEKLIQSGRILFSYMESSELFILSEESKNILDFRWIMEDEKIPIAEDAVFLGIPKKGKAPGAAKAFVQWFFKIENQRLLLEFSKANRISETVFGICGGFSSIGAVTEQIFPRYYPSLLGRMPPSEFLAAPNILPGNWAIIRKRVVLPYLHDRARSRQIEETLPLEKRLAEWQRVNR

SEQ ID NO: 66601 - DNA, 549 bp, Unknown
  Obtained from environmental sample
  misc_feature (1)..(549): n is a, c, g, or t
atgcttaggctttttatttctgtaaattgcgataacgatgttaaaaaccgactgcttgatgttcaggaaaagattagaacacagtctgtaaaggggaatttttcgttgccggaaaatttgcacctgacgcttgtttttattggggaaactccggcggataatgttcagattatatcttccgcgattgataaggcgcttaagccgaatatcgcacccttttcgcttgttttctcagcaacgggctgttttaagcacagtaataaagaactttggtggatagggacggagcgtgatgatattaatcttgatactttgaaaacaatcaggcgacggattactgaagagcttctttctcaaggcatttcttttgataacaggccttttagcccgcatattacccttggcagagaaataaagcatgaaacgcccattttaattccaaaacaagagattatttaccctgtaaataagataagtttgatgaaatcggagcgtattcgcggaaaattaacatatacggaaatatttgggcggaatttgacgaattaa

SEQ ID NO: 66602 - protein, 182 aa, Unknown
  Obtained from environmental sample
  DOMAIN (8)...(92): 2',5' RNA ligase family
  misc_feature (1)..(182): Xaa is any amino acid
MLRLFISVNCDNDVKNRLLDVQEKIRTQSVKGNFSLPENLHLTLVFIGETPADNVQIISSAIDKALKPNIAPFSLVFSATGCFKHSNKELWWIGTERDDINLDTLKTIRRRITEELLSQGISFDNRPFSPHITLGREIKHETPILIPKQEIIYPVNKISLMKSERIRGKLTYTEIFGRNLTN

SEQ ID NO: 66603 - DNA, 648 bp, Unknown
  Obtained from environmental sample
  misc_feature (1)..(648): n is a, c, g, or t
gtgttaaaagaagcgaatgtaaagataccgattaccataggcacgatgatcgaagtgcccagggcggctcttcgttccgagcatatcgccagatacgcggatttcttcagttttggaacaaacgatcttacgcagatgacattcgccttcagccgcgacgacgccgcttcgttcctgcctttctatttgaagaaaaacgttttagaagtagaccccttcaactctgttgacgaagacggagtcggcactttggtaaaatttgccatcaaagaaggcagagccgtaaaaccggacatgaagatgggagtctgcggagagcacggcggagatcccgcgtccatagatttcttctacagggcggggttaagttatgtttcgtgttcaccattccgggttccgttagctcgtcttgccggagcgcaagcggttataaagaactcgggtgtgaatataaagggaggggtatcagctaagtctggtaaaccaaccactgccaaggttaagggcagtaaaaaatctctaaagggggacaaaaagatggcagcagcagcaggaaaaaagcccgctaagaaagcggcaaagaaaccggcagcgaagaaggctgtaaagaagacagcgaagaaaccggctaagaaagcgaagaagtaa

SEQ ID NO: 66604 - protein, 215 aa, Unknown
  Obtained from environmental sample
  DOMAIN (1)...(144): PEP-utilising enzyme, TIM barrel domain
  misc_feature (1)..(215): Xaa is any amino acid
MLKEANVKIPITIGTMIEVPRAALRSEHIARYADFFSFGTNDLTQMTFAFSRDDAASFLPFYLKKNVLEVDPFNSVDEDGVGTLVKFAIKEGRAVKPDMKMGVCGEHGGDPASIDFFYRAGLSYVSCSPFRVPLARLAGAQAVIKNSGVNIKGGVSAKSGKPTTAKVKGSKKSLKGDKKMAAAAGKKPAKKAAKKPAAKKAVKKTAKKPAKKAKK

SEQ ID NO: 66605 - DNA, 1407 bp, Unknown
  Obtained from environmental sample
  misc_feature (1)..(1407): n is a, c, g, or t
atgtttccattaatcaaagaacttcttaattccgagccggacagccaaccgataaacgtaaggggctgggtcagaaccaaacgcgagatgaaaaacctcgtctttgtggaagtgaacgacggctcctgctttaagggcatccagtgtaccttcgatacctcctccaccggcctggacgccggaacaaaagccgccctcgcggagcttagcacaggggcggcggtggaaatctcaggcaagctcgttccgtccccggcggaagggcaggcggtggaagcggcggccgcttcgcttttgattgtgggcgcggccccgccggaaacttacccgctccaaaaaaagcggcactcgcttgagtttctccgcgaaatagcgcacctgcgcgcgaggacaaacactttcggcgcggtcgccagagtaagaaacagattggctatcgctgttcatgagttttttcagagcaaccatttccaatatgttcacacgccaatcatcacgggcagcgacgccgagggcgccggagcgctgtttcaggttacgaccttggacctcgcggctctggcaaaatccggcaaggcgccagattactcanaggattttttcggcaagtggacgggccttgccgtaacaggccagcttgaagcggaaacttacgcgacggctctttcgcgggtctacactttcggaccgacattcagggcggaaaattccaacaccgcccgccaccttgcggaattttggatggtagagcccgaagtcgcgtttgccgagcttgaggacgacatggctcttgccgaggattttcttaaaaacatttttaacgctgtgcttaaagagtgcgcggacgagcttgccttttttgacgctcatgttgaaaagggaattatcgaaaatcttgggcaggtagcgaacgcgaaatttgcgcatatcacctataccgacgccgtaaaagaacttgaaaaagcgtctgcgggaaaagacatttttgattttaagccgcactggggctgtgatttgcagagcgaacatgagaaatttttgacggaaaaagtcgccggcggtccagtaatcgttaccgattatccgaaagagataaaagctttttatatgaaactaaacgatgacgagaaaaccgtgcgggcaatggacgttcttgtcccccgccttggtgaaataatcggcggctcacagcgcgaggacaatctggagaaactggtacggcgcataaaagaacttaacatgaaaccggaagattatcactggtatctcgatctccgccgttacgggtcggttccccattcgggcttcggtcttggttttgagcggcttattcaatatgtttcaggtatggctaacatacgcgatgtgattccgtatccgagggcagtagggcaggcggaattttaa

SEQ ID NO: 66606 - protein, 468 aa, Unknown
  Obtained from environmental sample
  DOMAIN (18)...(101): OB-fold nucleic acid binding domain
  misc_feature (1)..(468): Xaa is any amino acid
MFPLIKELLNSEPDSQPINVRGWVRTKREMKNLVFVEVNDGSCFKGIQCTFDTSSTGLDAGTKAALAELSTGAAVEISGKLVPSPAEGQAVEAAAASLLIVGAAPPETYPLQKKRHSLEFLREIAHLRARTNTFGAVARVRNRLAIAVHEFFQSNHFQYVHTPIITGSDAEGAGALFQVTTLDLAALAKSGKAPDYSXDFFGKWTGLAVTGQLEAETYATALSRVYTFGPTFRAENSNTARHLAEFWMVEPEVAFAELEDDMALAEDFLKNIFNAVLKECADELAFFDAHVEKGIIENLGQVANAKFAHITYTDAVKELEKASAGKDIFDFKPHWGCDLQSEHEKFLTEKVAGGPVIVTDYPKEIKAFYMKLNDDEKTVRAMDVLVPRLGEIIGGSQREDNLEKLVRRIKELNMKPEDYHWYLDLRRYGSVPHSGFGLGFERLIQYVSGMANIRDVIPYPRAVGQAEF

SEQ ID NO: 66607 - DNA, 1227 bp, Unknown
  Obtained from environmental sample
  misc_feature (1)..(1227): n is a, c, g, or t
atgagcaaaaaaccatttttttctttctggcttgttttttgcctgccgtttatcgtcttcgcccaatatttcaccacgccgtccctgcttgttccctatacgtcaaatgcgcctgatattgtttccaccagcgcggtcttaatcgacgcgcaaacaggcgcgctcctttattcaaaaaattctgacgaagaaatatctcccgcatcccttaccaaacttatgacaatgcacctattgatgaaagagattgattcgggtaaagcgtcctatgatgaaataatcccgattacaaaagaaagctgggcgcaaagccagcccccgcgttccagtttgatgttcctagctcccggtcagattgtaacgttacgtgaaattatgcttggacttgccattccttccgggaatgacgccgcagtcgccgccgctcttcgtctcgcgcctactatggatgattttgccgccttaatgactgcggaggcaaggcgcatgggacttaccgttacgcgctttacggaagcgtccggtatttcggaatttaacatgacaaccgccgacgagttcgcgttcttttgccgtcagtatgtaaaacttcatccgcaaagtttaaaagattttcattccgtgcctgttttttcctatcctattgcagataacgttccgcaggcttaccgcgccaatgttcaaacaattactcagtacaaccgtaataatcttttaagaacttttcccggcgtagacggacttaaaaccggatatattgacgagtccggctacagcatcgcccttaccgcgcagagggacaacactcgttttatcgctacaatcttcggcgcgccggcggaatcggggggaagccgtatccgcgacgaggacagtacgcgccttcttacttgggcttttgaaaatttcaggacagtccgccccgcaataacgggtattgaaaatatccgcttgtggaagggcagggcaaacacggcggaaattcaacttgcccaaagcgcggattttaccgccccttccaatcgcgggaataatcttagatttgaaattttcattaatagaaagttatccgccccgcttcctgccggagcgacagcgggatattatgtcatctacgatgactatggcgaagtaaatcgcgtgccgcttgtaacgcagcgcccttacgaaaagggaaatatttttaaaaggttctggcactcaattatgctgttatttgttaagtaa

SEQ ID NO: 66608 - protein, 408 aa, Unknown
  Obtained from environmental sample
  SIGNAL (1)...(21)
  DOMAIN (303)...(391): Penicillin-binding protein 5, C-terminal domain
  misc_feature (1)..(408): Xaa is any amino acid
MSKKPFFSFWLVFCLPFIVFAQYFTTPSLLVPYTSNAPDIVSTSAVLIDAQTGALLYSKNSDEEISPASLTKLMTMHLLMKEIDSGKASYDEIIPITKESWAQSQPPRSSLMFLAPGQIVTLREIMLGLAIPSGNDAAVAAALRLAPTMDDFAALMTAEARRMGLTVTRFTEASGISEFNMTTADEFAFFCRQYVKLHPQSLKDFHSVPVFSYPIADNVPQAYRANVQTITQYNRNNLLRTFPGVDGLKTGYIDESGYSIALTAQRDNTRFIATIFGAPAESGGSRIRDEDSTRLLTWAFENFRTVRPAITGIENIRLWKGRANTAEIQLAQSADFTAPSNRGNNLRFEIFINRKLSAPLPAGATAGYYVIYDDYGEVNRVPLVTQRPYEKGNIFKRFWHSIMLLFVK

SEQ ID NO: 66609 - DNA, 906 bp, Unknown
  Obtained from environmental sample
  misc_feature (1)..(906): n is a, c, g, or t
ttgttaagtaagatgaaaatactcaaaccctatgatttattgaagaagacactaattgatattgaagacggcataaaaaacaatatcaatgtgtttaatctttccaaaaaatacggtttttcggaaggtcatttgcgcagactgttcagctttgcctttaaacagtccatcgccgcttatatacgttcccgcacgttagcggcaagtttgaacgatatactgaagacgaataccaacattattgatattgcggtcgaatacggttttgaatatgaacagtcatatatcagggcttttaagcgcgaatttggcataacacccggcgacttgcgaaaaacaaggcagattattaaaatcaaaccgcctcttcatctttttgacggaaacaagttgggcgacagcgttttctttggacccgacattgtgatggttccgcagtttcatgttataggaaaatatcataaggtgtcgctaagcgattcaaggaacgttattgcaagacaattctggaatgatgaacgtatgctgattaaatcggctgtaaatcctcaagtatttatcggtcttacgcgaaactttaacagaaaaacaggaatatctgaatatttgccgtcggtgcaggtaaaaaattttaagaatattccgcaaggacttagcaaagacacttttgatacttcgttatgcgcaagattccgttatatcggacagcatcattattctgatattgatcgtaatgtggcggggtcaatgtatagtgcgataaatacgacaacattttcatataataatctgattagatatgaattattaactgataaggtttgttttgaaaagatagacacaaaactttatgacggaaccttttgccaaatggaatggtatactcctgtttcagaaaaacattaa

SEQ ID NO: 66610 - protein, 301 aa, Unknown
  Obtained from environmental sample
  DOMAIN (16)...(62): Bacterial regulatory helix-turn-helix proteins, AraC family
  misc_feature (1)..(301): Xaa is any amino acid
MLSKMKILKPYDLLKKTLIDIEDGIKNNINVFNLSKKYGFSEGHLRRLFSFAFKQSIAAYIRSRTLAASLNDILKTNTNIIDIAVEYGFEYEQSYIRAFKREFGITPGDLRKTRQIIKIKPPLHLFDGNKLGDSVFFGPDIVMVPQFHVIGKYHKVSLSDSRNVIARQFWNDERMLIKSAVNPQVFIGLTRNFNRKTGISEYLPSVQVKNFKNIPQGLSKDTFDTSLCARFRYIGQHHYSDIDRNVAGSMYSAINTTTFSYNNLIRYELLTDKVCFEKIDTKLYDGTFCQMEWYTPVSEKH

SEQ ID NO: 66611 - DNA, 1386 bp, Unknown
  Obtained from environmental sample
  misc_feature (1)..(1386): n is a, c, g, or t
atgcgtgaacctatcgaagatgagtctgttcttttacggattttggaattcaaaaacgggttgctccagtttactgattccactaacgctatgcggcttattaatcagcatgggcgggatattcggtataatgccgcctggaaaaaatgggtggtctggaacggccaattttgggaaatggacgagggcagcgtcttaatccatgaaaaagggcttgaaatggtgcgtaatatttacgatgaccttttgaaaactgccgattatcgggagcggatggacattgaaaaagcggcgataatgagtgaaagtgtcaggcggcgtaaggcgtttgtagaggcggcaacatgggtttcctctttacgaattaaaaccggcgaacttgacactaatccgtggctattgaacgttaaaaacgggactgtgaatatgtcaagcggcgaattcagggagcacaggcaggaggatatgattacgaaaatcgccaatgtggaatatgaccctaacgctgactgcccaatgtggaagcagtttgtccgtgaaattatggggtataaagccgatttgataaagtttgtccagactgccgccggctggtctttatccggcgatatttcggaacaaacaatgttcattttgtacggtacaggggcgaacggaaaatccacgtttctcaatacaattatgtacctgttaggcgattatgctttagctacgccgactgaaacttttatgaaaaagaacggagataattattctaatgacgtggcccgtctgcggggtacccggtttgttactactacggaggtggaacaagggcggcggctgtccgaaccattaataaaaaaaatcacgggcaatgatgaaatgacagcgcggtttttgtacggggagttctttaattttatgccgactttcaagatttttatggctactaaccataagccggttatcaagggaactgaccacggaatttggcggcggataaagctaattccttttaatgtaaggataccggaagaaaagcaggacaaacatcttgaacaaaaactgtgggaagaggcaagcggtattcttaattggctgttggaagggatagcggtttggcagcgggaaaaattaataccgccgaaggctgtttcatttgctactgatgaatacagggaagaaatggacgttatcggtaatttcataaaagaaaaatgcgcccagaaagaaaatgcgtctatcacgattaagaagtttatacaggcttattccgactggtgcgaggaaaacaacgaacacgctgtaagcgagaggttttttacactgcggctaaaagagatggggtttgagcagggcaggacttctgcggaaaggttttgggtggggattgggcttggttaa

SEQ ID NO: 66612 - protein, 461 aa, Unknown
  Obtained from environmental sample
  DOMAIN (134)...(445): Poxvirus D5 protein-like
  misc_feature (1)..(461): Xaa is any amino acid
MREPIEDESVLLRILEFKNGLLQFTDSTNAMRLINQHGRDIRYNAAWKKWVVWNGQFWEMDEGSVLIHEKGLEMVRNIYDDLLKTADYRERMDIEKAAIMSESVRRRKAFVEAATWVSSLRIKTGELDTNPWLLNVKNGTVNMSSGEFREHRQEDMITKIANVEYDPNADCPMWKQFVREIMGYKADLIKFVQTAAGWSLSGDISEQTMFILYGTGANGKSTFLNTIMYLLGDYALATPTETFMKKNGDNYSNDVARLRGTRFVTTTEVEQGRRLSEPLIKKITGNDEMTARFLYGEFFNFMPTFKIFMATNHKPVIKGTDHGIWRRIKLIPFNVRIPEEKQDKHLEQKLWEEASGILNWLLEGIAVWQREKLIPPKAVSFATDEYREEMDVIGNFIKEKCAQKENASITIKKFIQAYSDWCEENNEHAVSERFFTLRLKEMGFEQGRTSAERFWVGIGLG

SEQ ID NO: 66613 - DNA, 1983 bp, Unknown
  Obtained from environmental sample
  misc_feature (1)..(1983): n is a, c, g, or t
atgatcttttacgccctgctctgcgtaatgatcacatggacaggggaatctgacggggcgaattttctttttatctatatatacccctcgcttacgattatgctgctggggacaacttacggcataacattgtcggttatactcggaatattaatttcccttgaaatgtttattccgggtgtggcgcgttttaactacaatattgagctggcaatccgtatgctggtaaattattttctggtttttttcgtgatggttgttatagaaagcacgcgtaaaaccaaagaccggctgatagaaaaccagaaccgccgccttcaggaacttaaaggagaagcagaggcggctaaccgaacaaagagtaattttcttgcaagcatgagccacgagatacgcactcccatgaacgccattaccggcatggcggaacttttactgcgctcagaactttcaggcgaagcccgcggttacgcgcaagacatcaagcaggcgggaaataaccttatttcgattatcaacgatattcttgacttttcaaaaattgaggcgggcaagctggaaataatcccggtaaaatatttgtttccgtcactgatcaatgactctgtcaatattatccgtatgcgaatcggggaaaaacctttgcgtttttttaccaacatagacagtacaatacctaacggccttttcggggacgaaatacggctgaggcaaattattcttaacctcctgtccaacgcggtaaagtatacggaaaaagggcatttcagtttatccataacggttgacaggcggacggaaaaacaaatatggcttaaggtcgccgttacagacacaggtaaaggcattaagccggatgatctggaaaaacttttcggggattttgtccaggtggactcaaagaaaaaccgcggcatagaggggaccggcctcgggcttgctataacaaaacggctctgcgttgttatgggcgggagtattaccgtggaaagcgaatacggcaaaggcagcgtgtttacggcgataatccctcaggatattgattccgatattccttttgcctcggtacacgaaccggaaaaaaagaaggtgctggtttatgaaagcagggtagtctatgcaaaatcggtatgctggtctttggaaaatatgaaagttccctataccatggtaacaaataaagaagattttgccgccgccctgtaccgggaagaatggacttatgtgttttcaggctacggtctttatgaaaatattaaaccgcttatggaaaaaagcgattcatttttccgcggagataaaaagccgcctatggctttgatggtagaatggggaacggaagcctacatacccggcgtacgttttctgtccataccggtacagtcccttgccattgccaatattttaaacggtcgtgaagacatcaaaggatacaataaaagttccggcgctgtccgattcacctttccccgcgcgcggattcttgttgttgacgacatcgcgactaaccttaaagtagccgagggtcttcttgctccataccgcacaacagtagatacaagccttaccggtttgcagtccttagaaatggtaaaacgaaacgaatacgacatagtattcatggatcacatgatgcccggaatggacggagttgaaaccacagccgctatccgcgcgtgggaaaaagaacaacatgaaaaacacaagcgggttccgataattgctttgaccgctaacgccgtcgtcggtatgagagaaatgtttttagaaaacggctttgatgattttatctccaaacccatagatatttccaagttagatgaaatgcttgatcgctggataccgaaagaaaaaagagaaaagaactccgttcaacctattttcacagatcagggggcggattcagaaccatctcagaaagaagaagcaaaacgcgccgatcgagtccgccgaaacgaacgacttttacattncccgcgttga

SEQ ID NO: 66614 - protein, 660 aa, Unknown
  Obtained from environmental sample
  DOMAIN (119)...(184): His Kinase A (phosphoacceptor) domain
  misc_feature (1)..(660): Xaa is any amino acid
MIFYALLCVMITWTGESDGANFLFIYIYPSLTIMLLGTTYGITLSVILGILISLEMFIPGVARFNYNIELAIRMLVNYFLVFFVMVVIESTRKTKDRLIENQNRRLQELKGEAEAANRTKSNFLASMSHEIRTPMNAITGMAELLLRSELSGEARGYAQDIKQAGNNLISIINDILDFSKIEAGKLEIIPVKYLFPSLINDSVNIIRMRIGEKPLRFFTNIDSTIPNGLFGDEIRLRQIILNLLSNAVKYTEKGHFSLSITVDRRTEKQIWLKVAVTDTGKGIKPDDLEKLFGDFVQVDSKKNRGIEGTGLGLAITKRLCVVMGGSITVESEYGKGSVFTAIIPQDIDSDIPFASVHEPEKKKVLVYESRVVYAKSVCWSLENMKVPYTMVTNKEDFAAALYREEWTYVFSGYGLYENIKPLMEKSDSFFRGDKKPPMALMVEWGTEAYIPGVRFLSIPVQSLAIANILNGREDIKGYNKSSGAVRFTFPRARILVVDDIATNLKVAEGLLAPYRTTVDTSLTGLQSLEMVKRNEYDIVFMDHMMPGMDGVETTAAIRAWEKEQHEKHKRVPIIALTANAVVGMREMFLENGFDDFISKPIDISKLDEMLDRWIPKEKREKNSVQPIFTDQGADSEPSQKEEAKRADRVRRNERLLHXPR

SEQ ID NO: 66615 - DNA, 990 bp, Unknown
  Obtained from environmental sample
  misc_feature (1)..(990): n is a, c, g, or t
atggaagcaggactagagaaagcggttaaacgctccagaaaaccgatagaaaaagctcataaaaaagtaaaagcgcagaaggaatcagaccctttggcgctgtacttcaggcaaatttcaaggtttcctcttttaactttgcaggaagaacaaataatcggcgaaaagataataagcctgcgcgcaaaacttaaacaactggaatccgacaaaaataaaaacaaaaataccgactacagcaaagaaaaaacagcccttgacagcgcgcttcttcactacaaaaattccatgataaacgccaacctgcgtcttgtcgtctctatcgccaaaaattaccagcatcgcggtttgtcacttttagatttaatcgacgaaggaaatatcggtcttattgaggcggttgagcgttttgattacacaagaggctgccgtttctccacctacggtacttggtggattaggcaggctattatcaagagcataggggataaggggcgcgttatccgcataccgattcacatgcttaacacgattaagaaatgttactatgtagccaaacaacttacgcaggatttgggacgcgaccccaacgaagaagaattgtccgaatacttggatgttcctgtttccaaagttaaagaaatagtgaagctgtctcaggaaactacaagtttggacaccattgttgacgacgggaatcttacgcgccttgccgatttaatcaaagacgacgccagagccgaaccgtttgaaatggttttctccatgacattacaggaaaccatcggcgggatactttcccagttgtcagaaagagagatgaagataatccaactgcgttttggtttaacaggagaaaatccgcttactttggaagagaccggaaaatatttaggcatcacccgcgagcgcgtccgtcaaattcaggaaaaagccgtttggaaacttcgcacccttcatgaactgcgcgaattaagagaaacttcgtaa

SEQ ID NO: 66616 - protein, 329 aa, Unknown
  Obtained from environmental sample
  DOMAIN (29)...(65): Sigma-70 factor, region 1.2
  misc_feature (1)..(329): Xaa is any amino acid
MEAGLEKAVKRSRKPIEKAHKKVKAQKESDPLALYFRQISRFPLLTLQEEQIIGEKIISLRAKLKQLESDKNKNKNTDYSKEKTALDSALLHYKNSMINANLRLVVSIAKNYQHRGLSLLDLIDEGNIGLIEAVERFDYTRGCRFSTYGTWWIRQAIIKSIGDKGRVIRIPIHMLNTIKKCYYVAKQLTQDLGRDPNEEELSEYLDVPVSKVKEIVKLSQETTSLDTIVDDGNLTRLADLIKDDARAEPFEMVFSMTLQETIGGILSQLSEREMKIIQLRFGLTGENPLTLEETGKYLGITRERVRQIQEKAVWKLRTLHELRELRETS

SEQ ID NO: 66617 - DNA, 927 bp, Unknown
  Obtained from environmental sample
  misc_feature (1)..(927): n is a, c, g, or t
gtgaaatttctaaaaagtttttcattattaattgtattggtcggcgtccttaactcaggagcgcttgccgcggacgagttgatccatgttgtcggaaagggagataccatttattctctttcccgtttttatcatgtaacagcggaagaactcatgagagccaacggtatttcagacccttccaaaataagcgtcgggaaaaaattgataataccggtttcaggcgacggctccgctttgccgggaactgcggtaaatgttcctgtcgcggctgcaagtaacacaatgacgctggtcaattacaaagcggtaaaaggcgacacgctttacagcatagcgcgcagtaataacattaccttgcagaaattacaggaaataaacaacttttcttccggtcatgtgcttaaagtaggcgatgtaatcaaagtgccgggaaaagtttcttccgaagcgcaaataaccattacaaatacagcgtcggtaaaaccggctgtgccggctaagtcaacggcatcagctaagtcaacgcagccggcaaagcccgcggcggggatttattccttacgctggcccgtgacgccgaaagatatttcttatatgacggggcagatgggcgttgttgtagagggcgaacagcttgaatcagtgaaaagtttaacacaggggaatgtggtatccgctggtccctggcggaagtttggcagagttgtaattgtagaaacccaaggcgggtattactacatgtacggcggctgtgaaactataactgtaaatgtaggcgacagaataacgccgggaatggaattgggaaaattaggcgtcaacgccgtttcggtgaaacctcagctctttttcatggttttccgaaatgacaatcccatggacccggctttagctccgagagcgggaaataatcaaaggacatag

SEQ ID NO: 66618 - protein, 308 aa, Unknown
  Obtained from environmental sample
  SIGNAL (1)...(23)
  DOMAIN (201)...(296): Peptidase family M23
  misc_feature (1)..(308): Xaa is any amino acid
MKFLKSFSLLIVLVGVLNSGALAADELIHVVGKGDTIYSLSRFYHVTAEELMRANGISDPSKISVGKKLIIPVSGDGSALPGTAVNVPVAAASNTMTLVNYKAVKGDTLYSIARSNNITLQKLQEINNFSSGHVLKVGDVIKVPGKVSSEAQITITNTASVKPAVPAKSTASAKSTQPAKPAAGIYSLRWPVTPKDISYMTGQMGVVVEGEQLESVKSLTQGNVVSAGPWRKFGRVVIVETQGGYYYMYGGCETITVNVGDRITPGMELGKLGVNAVSVKPQLFFMVFRNDNPMDPALAPRAGNNQRT

SEQ ID NO: 66619 - DNA, 1926 bp, Unknown
  Obtained from environmental sample
  misc_feature (1)..(1926): n is a, c, g, or t
atggcgagaacagggcggtccgcatttccgtttggcggtccgaattttcccgattttaaaccgtccggcgggtggaaatacctccttatctacattgtcgttatatttatcgggattagcctttttaattatgtgtttcttaacaagtcgaattccgccattgatttttccgaatttaaggcgcgtatcgcttccggcgaaattaaacgcgtggaattaaccgacgcttactttactggatataccagcgcttcaaagcgcgattcctcgctgtcgcgtctggcgaagtcttcatacgccgccgcccaggacagagtttaccgcacagtgtccatctatgatcaggattttattaaattgatggatgaaaaaaatgtcgcgtacggcgctgtcccgcacgaggggaacgccatactcagttttattatcagttgggttttaccgattgctttttttattattatctggcgctttgtcttaaaacgaatcggcaacatcggcggcaatgttctttccgtcgggcagaaccgcgccgtgattgtggcggaaggggacattgttacgcgtttcagcgatgtcgcgggcgttgacgaggcaaaagaggaacttgtcgaggttgtcgattttttgaaaaatccgcagaagtacaaggatataggcggcaagattcccaagggcgtgctccttgtggggccgccgggaaccggaaaaaccctgcttgcgcgggctgttgcgggagaagcgggagtttctttcttccgcatgagcggggcggactttgtggaaatgtttgtaggcgtaggcgccgcccgcgtaagggatttgttcaaacaggcaagaaccaaagcgccctgtattgtttttattgatgagttagacgcaataggcaagagcaggataaacagcatttccggcggcaacgacgagcgcgaacagacgcttaaccagttgttagttgaaatggacggttttgacaacaccggcgggcttatcgtccttgcggcgacaaaccgccccgacgtgctggatcccgcgcttctgcgccccggccgcttcgacaggcaggtgcttgttgacaaacccgatgtaaagggcagggaagcgattttaaagattcattcaaaaaatatttcgggtatctccactattgatcttgaagttgtcgccagaattacatccggtttttccggggccgaccttgcaaacattgtaaacgaagccgcgcttttggcggtcagggcggggcggaaaatggttgcgcagcgtgattttgacgaggctatagaaaaaaccgtagccggcctgcagaaaaaaaccagagttatcaaggaagaggaaagacggcttaccgcctaccacgaagccggccacgcgatggtcgccgcctttacacctaacgccgaccctgttcagaaaatttcgattattccgcgcggattcgcgcttggttacacgatgcagcttcccatggaagaccgctatacggttacaagatccgaccttttgggaaggatagacatactcctgggcgggcgcattgccgaagaaatgatttcaggcgaatattccaccggagcggcaagcgatcttaccaaggcgacagacattgcccgcaagatgattaccgactacggtatgagcgaccgtttccgcaatgtcgcgcttacttcgcgcggcatgagcatgaccgggcaggaacgcagcgagccgtcttttcagcgcgaatacgcggaaagcacacagcagtatattgatgaggaagtcgcgcggattattgatattgaatactcaaaggcaaggaagatactgacggaaaggcgcgatattttggacagtgtttccgccgcgcttctggaaaaagaaaccctggacgaaaaagaatttaagagtttactggggcttacttccgccaatatactcgcgtaa

SEQ ID NO: 66620 - protein, 641 aa, Unknown
  Obtained from environmental sample
  DOMAIN (226)...(360): ATPase family associated with various cellular activities (AAA)
  misc_feature (1)..(641): Xaa is any amino acid
MARTGRSAFPFGGPNFPDFKPSGGWKYLLIYIVVIFIGISLFNYVFLNKSNSAIDFSEFKARIASGEIKRVELTDAYFTGYTSASKRDSSLSRLAKSSYAAAQDRVYRTVSIYDQDFIKLMDEKNVAYGAVPHEGNAILSFIISWVLPIAFFIIIWRFVLKRIGNIGGNVLSVGQNRAVIVAEGDIVTRFSDVAGVDEAKEELVEVVDFLKNPQKYKDIGGKIPKGVLLVGPPGTGKTLLARAVAGEAGVSFFRMSGADFVEMFVGVGAARVRDLFKQARTKAPCIVFIDELDAIGKSRINSISGGNDEREQTLNQLLVEMDGFDNTGGLIVLAATNRPDVLDPALLRPGRFDRQVLVDKPDVKGREAILKIHSKNISGISTIDLEVVARITSGFSGADLANIVNEAALLAVRAGRKMVAQRDFDEAIEKTVAGLQKKTRVIKEEERRLTAYHEAGHAMVAAFTPNADPVQKISIIPRGFALGYTMQLPMEDRYTVTRSDLLGRIDILLGGRIAEEMISGEYSTGAASDLTKATDIARKMITDYGMSDRFRNVALTSRGMSMTGQERSEPSFQREYAESTQQYIDEEVARIIDIEYSKARKILTERRDILDSVSAALLEKETLDEKEFKSLLGLTSANILA

SEQ ID NO: 66621 - DNA, 738 bp, Unknown
  Obtained from environmental sample
  misc_feature (1)..(738): n is a, c, g, or t
ttgtcaacaagcacctgcctgtcgaagcggccggggcgcagaagcgcgggatccagcacgtcggggcggtttgtcgccgcaaggacgataagcccgccggtgttgtcaaaaccgtccatttcaactaacaactggttaagcgtctgttcgcgctcgtcgttgccgccggaaatgctgtttatcctgctcttgcctattgcgtctaactcatcaataaaaacaatacagggcgctttggttcttgcctgtttgaacaaatcccttacgcgggcggcgcctacgcctacaaacatttccacaaagtccgccccgctcatgcggaagaaagaaactcccgcttctcccgcaacagcccgcgcaagcagggtttttccggttcccggcggccccacaaggagcacgcccttgggaatcttgccgcctatatccttgtacttctgcggatttttcaaaaaatcgacaacctcgacaagttcctcttttgcctcgtcaacgcccgcgacatcgctgaaacgcgtaacaatgtccccttccgccacaatcacggcgcggttctgcccgacggaaagaacattgccgccgatgttgccgattcgttttaagacaaagcgccagataataataaaaaaagcaatcggtaaaacccaactgataataaaactgagtatggcgttcccctcgtgcgggacagcgccgtacgcgacatttttttcatccatcaatttaataaaatcctga

SEQ ID NO: 66622 - protein, 245 aa, Unknown
  Obtained from environmental sample
  misc_feature (1)..(245): Xaa is any amino acid
MSTSTCLSKRPGRRSAGSSTSGRFVAARTISPPVLSKPSISTNNWLSVCSRSSLPPEMLFILLLPIASNSSIKTIQGALVLACLNKSLTRAAPTPTNISTKSAPLMRKKETPASPATARASRVFPVPGGPTRSTPLGILPPISLYFCGFFKKSTTSTSSSFASSTPATSLKRVTMSPSATITARFCPTERTLPPMLPIRFKTKRQIIIKKAIGKTQLIIKLSMAFPSCGTAPYATFFSSINLIKS

SEQ ID NO: 66623 - DNA, 1464 bp, Unknown
  Obtained from environmental sample
  misc_feature (1)..(1464): n is a, c, g, or t
atgataaaaccgcaaaaaagccaaaataaattttttatccttgtccggcttttactggccattctcggctttattcccgtaataatgattttcccgttaatcatggctatagtttccggcgaagaaagaatgattacttcttttgcgttggtaatgcttgtaatgatgattctcgcgttaataagttttttatccctgcaaaagaaaaaactcaacttaaacgcgagggacggctttttgattgtctttgcggtatgggttttggcaagttttgccggagcggttccattttatctttggggtttaaattttacggattctttttttgagagcgcgtgtactttcgccactacgggcgcgacaacaatagccaacatcgaagctttgccccgttctcttttactttggcgaagcatagcccattggttcggcggcatagggataattcttgtctctgtggcattgctacccctcctcggtgtcggcggttttcaactgatcaaagcggaggaaacaggaccggaaaaagaaaaaataaccccaaaaattacagttacggcaaaacttctgtttttggtttacagtgtcttaacatttttgctttttattctttatcttatcggaggaatgaattggtttgaagccgtctgccaaagtttgacagcccttgctacaggcggaataaatgtcaggaacacggggatcgaggcgtggaattcgccgtttattgacggcgttactacggtattcctgctccttgccgggattaacttcaacctttactgccgtattttacaaagaaaattttcggaaattaaaaataatatagagcttaaagcctatcttggcattttcgccgctgccgcggtaattatcaccgtttcgcttgttccttattacggttctgtttcaagcgctatccgtcacgcgtcatttcagagcgcgtctgtcctgtccaccgccggcaatacaaccgtaaattatgaacaatggccttcattggcaagaatggttctttttattctgatgtttgccggaggctgttcgggctcaacagcgggaggcataaaagttatacgccatgtcattctttggaaacagataaaaaatgaaacgcagcgtatgctttacccgcagggaattttcaggatacagataaacaaccgcgtagggcgcaacgacatagtatacggagtatcgggctttatattcatgtatcttttcgtaattatgatagttacgctcattaccgcagcctcgggaatcgaccttttttcttcgttaagcgccgccctttcaattaccggaaacataggggtaggcttcggggcaataggacccggacataattacagtttttttgccgatcatatcaagtggcttttttcatttgtaatgctcgccggccgtcttgagatgtggaccgtgtttattttgtttacgcgagtatattggcggaagtaa

SEQ ID NO: 66624 - protein, 487 aa, Unknown
  Obtained from environmental sample
  DOMAIN (158)...(485): Cation transport protein
  misc_feature (1)..(487): Xaa is any amino acid
MIKPQKSQNKFFILVRLLLAILGFIPVIMIFPLIMAIVSGEERMITSFALVMLVMMILALISFLSLQKKKLNLNARDGFLIVFAVWVLASFAGAVPFYLWGLNFTDSFFESACTFATTGATTIANIEALPRSLLLWRSIAHWFGGIGIILVSVALLPLLGVGGFQLIKAEETGPEKEKITPKITVTAKLLFLVYSVLTFLLFILYLIGGMNWFEAVCQSLTALATGGINVRNTGIEAWNSPFIDGVTTVFLLLAGINFNLYCRILQRKFSEIKNNIELKAYLGIFAAAAVIITVSLVPYYGSVSSAIRHASFQSASVLSTAGNTTVNYEQWPSLARMVLFILMFAGGCSGSTAGGIKVIRHVILWKQIKNETQRMLYPQGIFRIQINNRVGRNDIVYGVSGFIFMYLFVIMIVTLITAASGIDLFSSLSAALSITGNIGVGFGAIGPGHNYSFFADHIKWLFSFVMLAGRLEMWTVFILFTRVYWRK

SEQ ID NO: 66625 - DNA, 1206 bp, Unknown
  Obtained from environmental sample
  misc_feature (1)..(1206): n is a, c, g, or t
atgagaaaacagttttcacttgttttttttatattacttgctgtttgttttttgggcgcgcttcctttttatttntcaggttctatcccaaactttacaaacgctgtttttgaaagtatatccggttttacaaccacgggcgcgacaattttaaaagatatcgaagctctgccaaatgtacttttattttggcgctcgctgatccagtggctgggcggcatgggaatattgcttcttgtctcaggcagttttcgcgtgcaaaaaaaagaaattatccgcatccttttgtcattctatgccgctcttaccgcgcttcaattcattttgctagtaatcttcggtatgaactggtttgacgctttaactcactcaatgtctacaatttccacgggcgggttcagtatcaggaatagcggtatcgcgtattacaacaatgcggcggcggagtggatttgcgttttcttcatgtttctttccggaattaatttctttcttatctggcggcttttattcagaaaatcggatgacattattcgtaatacggaaataaaggtatatgcgggaattatattgatcgcggcggcgattgttacagcctcgctattttttcaaggttctttggacgcatcgtcttttgacaaagccgagtctttttacaaagccgtgcctttcccaatagcaattcggcgggctttttttcatgttacttcaacaatcagcacctgcggattttttaacgcggattacaactactggccttccgccgcgcagggggtaatatttttccttttgtttataggcggctgttcaggttccgcggcgggagggatcaagatattccgccatgcggtgctttccaaacaaacagcaaacgaaatgaagagatttatctacccgcgcggcatatttgacattccgcttgacggcaaaagcggaaataaaaaagcggttcagaaagcggcgggttttattttcctttattttctaataatttttttaacggccatgctggtaagtataagcggtacggatatttttgactcgtttaagactgcgctggtctgtctgggaaataccggacttggactgcccgccgcggattttccggtttatgttaaatggggtctatgctttgtgatgataatgggcagattggaattatgggcgctgcttgttattatttcgggagtatttaatcgaagatga

SEQ ID NO: 66626 - protein, 401 aa, Unknown
  Obtained from environmental sample
  SIGNAL (1)...(25)
  DOMAIN (79)...(399): Cation transport protein
  misc_feature (1)..(401): Xaa is any amino acid
MRKQFSLVFFILLAVCFLGALPFYXSGSIPNFTNAVFESISGFTTTGATILKDIEALPNVLLFWRSLIQWLGGMGILLLVSGSFRVQKKEIIRILLSFYAALTALQFILLVIFGMNWFDALTHSMSTISTGGFSIRNSGIAYYNNAAAEWICVFFMFLSGINFFLIWRLLFRKSDDIIRNTEIKVYAGIILIAAAIVTASLFFQGSLDASSFDKAESFYKAVPFPIAIRRAFFHVTSTISTCGFFNADYNYWPSAAQGVIFFLLFIGGCSGSAAGGIKIFRHAVLSKQTANEMKRFIYPRGIFDIPLDGKSGNKKAVQKAAGFIFLYFLIIFLTAMLVSISGTDIFDSFKTALVCLGNTGLGLPAADFPVYVKWGLCFVMIMGRLELWALLVIISGVFNRR

SEQ ID NO: 66627 - DNA, 1848 bp, Unknown
  Obtained from environmental sample
  misc_feature (1)..(1848): n is a, c, g, or t
atgatagtatatagacaaaggagattattcaaaatgataaataaaagaaaaactaaaattgtatgttctttaggtcccgcgtcatcctctgattccgttgtacgcgatcttatacttgccggaatgaatgtggcgcgtcttaatttttctcatggggatcaaaaatcgcatcttgcttcaatagatcaggtcaggcgtatatcagccgaactgggaatacccattgcgcttcttctggacactaaaggacctgagatacgaacgggcatggtggagaatgacggcactgttacgataaataaaggtgacgatgttgttattgttaccgatgattcttttactacggcggtggaaaacggaaagcccgcgcgtatttcattatcgtggaaagaagccggagaaaaattgcaaaacggacatcgtgttcttattgcggacgggcttcttgagcttgaagtgatagatacagcgggaggcatcaagtgccgcgcgaacaataccgccgtcattgggagcaaaaaaaacgtcaaccttatcggcgtacacgccggacttcccattatgggcgagcaggataagaaggacttggaattcggcgtatcaatggaacttgattatgtcgccgcgagttttttgagttttccccacgaggtaactgagataagaaaattccttgaaagccactcttcccgcatgaaaatcatagctaaaattgaaagcggtgaaggcttggaaaatataaaagaaattgccaatcttgcggacggcgtaatggtagcgcgcggcgaccttggcgtacaacttccaaccgagcaaattcctctggcgcaaaaacatattatcaatacgagccgcagggcgggcaaacccgtcattaccgcgacccaaatgctggactcgatgatacataatccgcgtcccacacgcgcggaactgaccgatgttgcaaacgcgatacttgacgggaccgacgcgatcatgctctcgggcgagaccgcgcagggagcgtatccggtggaatcggtaaaaacgatggacaaaatagcgtgcaccattgagcagtctgatgaattccgcatacgcatgagaaattttcacgaagaatgtcactccgaagcgcataacccgaaagaaaatctgggtatcatcatgtcgagatcgggagttgaaatagcgacggcggtaaaggcaaaagccatagtaacgccgacccaaagcggcaatacagcgcgaattctcagtgtattcagaccggatgagccgattcttgccgtaaccacagaagcgcgcactgaacgccttatgcagttatattggggcgttaacaccagtatcaggtcgaaagttgaagattcggaagccatgatacacaacaccatgaaagttgtttcggagaccggggtagcgggaatatcggataagatagttctcattgccggcttgccgcttgaaagcccaaacatgataaacaatatccgcgttgtaattatagggacagttctcgcccgcgcaagcgccggcggtcacgcaaatcctgagattattcgcgcacagggcaagatagtccacgccgcaacccccgatgaagcccgcaaaaaaatcatgtcagcaggcaaaggcagtatactcatttgcaaagagcttaccgatgactacatatccgttataagcatggtaagcggaataatttgcgaaggggtctcggtaatcggtgaagaaaaactgcgcctctttaaccccaatcttgtctggcttacccacatcagagacgccgcaaaaaaactggaacacggattaacggtaacaatagacggaaaagaactgcttgtttacgagggcgcgatttaa

SEQ ID NO: 66628 - protein, 615 aa, Unknown
  Obtained from environmental sample
  DOMAIN (384)...(496): Pyruvate kinase, alpha/beta domain
  misc_feature (1)..(615): Xaa is any amino acid
MIVYRQRRLFKMINKRKTKIVCSLGPASSSDSVVRDLILAGMNVARLNFSHGDQKSHLASIDQVRRISAELGIPIALLLDTKGPEIRTGMVENDGTVTINKGDDVVIVTDDSFTTAVENGKPARISLSWKEAGEKLQNGHRVLIADGLLELEVIDTAGGIKCRANNTAVIGSKKNVNLIGVHAGLPIMGEQDKKDLEFGVSMELDYVAASFLSFPHEVTEIRKFLESHSSRMKIIAKIESGEGLENIKEIANLADGVMVARGDLGVQLPTEQIPLAQKHIINTSRRAGKPVITATQMLDSMIHNPRPTRAELTDVANAILDGTDAIMLSGETAQGAYPVESVKTMDKIACTIEQSDEFRIRMRNFHEECHSEAHNPKENLGIIMSRSGVEIATAVKAKAIVTPTQSGNTARILSVFRPDEPILAVTTEARTERLMQLYWGVNTSIRSKVEDSEAMIHNTMKVVSETGVAGISDKIVLIAGLPLESPNMINNIRVVIIGTVLARASAGGHANPEIIRAQGKIVHAATPDEARKKIMSAGKGSILICKELTDDYISVISMVSGIICEGVSVIGEEKLRLFNPNLVWLTHIRDAAKKLEHGLTVTIDGKELLVYEGAI

SEQ ID NO: 66629 - DNA, 471 bp, Unknown
  Obtained from environmental sample
  misc_feature (1)..(471): n is a, c, g, or t
atgcgtatgcggaattcatcagactgctcaatggtgcacgctattttgtccatcgtttttaccgattccaccggatacgctccctgcgcggtctcgcccgagagcatgatcgcgtcggtcccgtcaagtatcgcgtttgcaacatcggtcagttccgcgcgtgtgggacgcggattatgtatcatcgagtccagcatttgggtcgcggtaatgacgggtttgcccgccctgcggctcgtattgataatatgtttttgcgccagaggaatttgctcggttggaagttgtacgccaaggtcgccgcgcgctaccattacgccgtccgcaagattggcaatttcttttatattttccaagccttcaccgctttcaattttagctatgattttcatgcgggaagagtggctttcaaggaattttcttatctcagttacctcgtggggaaaactcaaaaaactcgcggcgacataa

SEQ ID NO: 66630 - protein, 156 aa, Unknown
  Obtained from environmental sample
  misc_feature (1)..(156): Xaa is any amino acid
MRMRNSSDCSMVHAILSIVFTDSTGYAPCAVSPESMIASVPSSIAFATSVSSARVGRGLCIIESSIWVAVMTGLPALRLVLIICFCARGICSVGSCTPRSPRATITPSARLAISFIFSKPSPLSILAMIFMREEWLSRNFLISVTSWGKLKKLAAT

SEQ ID NO: 66631 - DNA, 753 bp, Unknown
  Obtained from environmental sample
  misc_feature (1)..(753): n is a, c, g, or t
ttgagcgagaatgctattgagataaaggatttgcataaaacttatcgctgcggtttttggctggccaaaaagaagtcgctttttggaatatctttagaggttaaaaaaggcgaaatttttggattcataggaccaaacggagcgggcaaaagcaccactataaaagtgctaactggacttttgcgcaaagatagcggagatgtttttattttgggcaaatcgcccagcgaaaccaaaagcagaataaatttgggatacctaccagagcaaccttatttttacgattctctaagcggctacgaacttttgaaattctacggaggcttgagcggcttgagtggcaagctcttggaagagcgtttgcattgggcgctaacactcgtaaatgcaaacgcagactggatttaccgccgtttgcgcacatattccaaagggatgcaacaacgcattggacttgcgcaggcaattttgcacaaacccgaacttttgattttagacgaaccgatgagcgggctagacccccttggcaggcgtgatgtgcgagaggcaattttggaactcaataggggaggctcaacaatcttctattcaagccacgttctctccgatgtggaagccataagccatagggttgccatgattatagacgggaaaatttcacatacgggaacagtagaagaaataacaaaagacacaggcagaaacagcctagaagaagtccttgcaaaggaggtttcgcgtgttgttccttag

SEQ ID NO: 66632 - protein, 250 aa, Unknown
  Obtained from environmental sample
  DOMAIN (37)...(217): ABC transporter
  misc_feature (1)..(250): Xaa is any amino acid
MSENAIEIKDLHKTYRCGFWLAKKKSLFGISLEVKKGEIFGFIGPNGAGKSTTIKVLTGLLRKDSGDVFILGKSPSETKSRINLGYLPEQPYFYDSLSGYELLKFYGGLSGLSGKLLEERLHWALTLVNANADWIYRRLRTYSKGMQQRIGLAQAILHKPELLILDEPMSGLDPLGRRDVREAILELNRGGSTIFYSSHVLSDVEAISHRVAMIIDGKISHTGTVEEITKDTGRNSLEEVLAKEVSRVVP

SEQ ID NO: 66633 - DNA, 855 bp, Unknown
  Obtained from environmental sample
  misc_feature (1)..(855): n is a, c, g, or t
atgcaaatcaaccataacattcgtgctatggttactcaacatgcgttgtttcaaaacgacaactcaatgacaaagtcactggaaaagctctcaacaggcttaaggataaatcgtgcccaagacgatgccgcaggtcttgcgatgagtgaacaaatgcgaacgcaaattcgtgggttgggtaaagccaaacgaaattcccaagacggtcaggcagctctgcaaatagcagaaggtgctctgggcgaaatcaccaacatgatgcaaaggcagaaggaattggcggtgcaatccgccaacgatactctgacaagcaccgagcgtatgtaccttaacgatgagtttcaagctctgactaaggagatagaccgtatagccaagaacactgattataacggcaaaaacgtgctgctctttgatgttgaccccaacaagagttttggtgccacaaaactagacccctataacaaggaagtcgcctttttggaaggagcaaacgttatccgcaaggtattcggggagaacctggatggaggtctgtcagtattgacaggcacaagcgccgctgttcaagtgataaacaaggctatagtctctatcaacgctgtggtaaaagacctgaatggaattctcaccgatagcaatataaaggatgctttgggatctataagagccttttatactgcagttgatccaggtgggtatgctcttggcggcgattctttgagcactgatatttccgcctatatgaattctcagctgcctcttgttggctaccggccgcagaatcatactttaatgatagcgaaaaaaccgctagcaatgcgaaggctctcaaaacggttaatgagcttttga

SEQ ID NO: 66634 - protein, 284 aa, Unknown
  Obtained from environmental sample
  DOMAIN (27)...(166): Bacterial flagellin N-terminus
  misc_feature (1)..(284): Xaa is any amino acid
MQINHNIRAMVTQHALFQNDNSMTKSLEKLSTGLRINRAQDDAAGLAMSEQMRTQIRGLGKAKRNSQDGQAALQIAEGALGEITNMMQRQKELAVQSANDTLTSTERMYLNDEFQALTKEIDRIAKNTDYNGKNVLLFDVDPNKSFGATKLDPYNKEVAFLEGANVIRKVFGENLDGGLSVLTGTSAAVQVINKAIVSINAVVKDLNGILTDSNIKDALGSIRAFYTAVDPGGYALGGDSLSTDISAYMNSQLPLVGYRPQNHTLMIAKKPLAMRRLSKRLMSF

SEQ ID NO: 66635 - DNA, 888 bp, Unknown
  Obtained from environmental sample
  misc_feature (1)..(888): n is a, c, g, or t
ttgaggagtgtagacgatgctttgagaaactatatagcagccaatagaggagagcttgatgcccaaaagggtgcggattttgctatagattttatattcggcagtatcataacctctggtttgattgcttcgccaggagatggttttcgcggcgatacaggtatcggttcccttgacaggatcataaatcagttaaagggagcattcacagatcctattcctgccaatattgccgctattactggtagcgatacgatctcttacatgggtgcaggggtattatctggtgtctttggcgcaaatgcttctgcacagacgcaagatgaccttaaggctgtaatgggacttgatgccgataaaatggtacctggtaggacaaaggcaatagtgcaaacttggcagaaacgtcttggcgacttgaaggatgcctacaaagtctataacgaaagaaacatcgctacaggttctgcggcttctgaggttctgcacgttggtcctaactactcaacaggcttgggtggcgcaacttccaaccagataaaggtaaattacgttgccattgacgtcaaaggtctcggtttgcaagcacagcaaatagaaacccgcgaaggtgcccaaagagctattgacaagcttcaggaaaccatcaaggtaacaagcagcaaccgtgcagccataggtacatacataaaccgccttgactacacaatcaacaacattgcatctatggagtacaacatccaagacgcagaaagccgcatacgtgataccgactttgccgcggaaaccacgaacttcaccagaaatcagattatggtacagtccgccacgagcatgttggctcaggcgaacagcttaccacaaggagtgttaaatctgataggataa

SEQ ID NO: 66636 - protein, 295 aa, Unknown
  Obtained from environmental sample
  DOMAIN (202)...(273): Bacterial flagellin C-terminus
  misc_feature (1)..(295): Xaa is any amino acid
MRSVDDALRNYIAANRGELDAQKGADFAIDFIFGSIITSGLIASPGDGFRGDTGIGSLDRIINQLKGAFTDPIPANIAAITGSDTISYMGAGVLSGVFGANASAQTQDDLKAVMGLDADKMVPGRTKAIVQTWQKRLGDLKDAYKVYNERNIATGSAASEVLHVGPNYSTGLGGATSNQIKVNYVAIDVKGLGLQAQQIETREGAQRAIDKLQETIKVTSSNRAAIGTYINRLDYTINNIASMEYNIQDAESRIRDTDFAAETTNFTRNQIMVQSATSMLAQANSLPQGVLNLIG

SEQ ID NO: 66637 - DNA, 1698 bp, Unknown
  Obtained from environmental sample
  misc_feature (1)..(1698): n is a, c, g, or t
atggaggttagctttatgcaaatcaaccacaatatccgcgcaatggtgacacaacatgcgttgttccaaaacgacaatgcaatgaccaagtcactcgaaaaactctcaacaggcttaaggataaatcgtgcccaagacgatgccgcaggcttagcgatgagcgaacaaatgagaactcaaattcgcggcttagccaaagcgaaaaggaattctcaagatggtcaggcagcactgcaaatagcagaaggggctctggctgaaatcaccaacatgatgcaaaggcagaaggagttggctgttcagtccgccaacgatactctaactagcaccgagcgtatgtaccttaacgacgagttccaagctctgactaaggaaattgaccgcatagccaagaacactgactataacggtaaaaacgtgctgctctttgatgttgaccccaacaagagctttggtgcaacaaaattagacccctataacaaggaagtcgcctttttggaagcagcaaacgttgtccgcaaagtctttggcgagaacttggaaggtggtttgtcaatattgactacttcacatggtgctactagtactaaaattgatgatataaatgccgctataggcaagataaacgctgtgatagtaagcctgaacggaattctcaccgatagcaatatagagatagctttaaaatctcttataactgctgcgaatgtgtctgtaactggtctcggtaatgatgagttgaataccacaactatctcctatatgcagaacaggagctttactgatccagagatatcccagagcaacgctaaagctctcaaagcggtaaatgaccttttgagaaatgttagcgacgctttgagaaactatcaggcggctagtgcaggagagcttgatgtcaaaaagggcgcaattgcatctataagttacacattcaacacgaccattaaaggctcggatctggatgacgttaagagctttgggcacacaggcataggttctcttgacagaatcttggatcagctaagtgcagcatacagtgctactggcggtcctggcggcactgatgggcttggtttattggctggtatctttggcgcaaatgcttccgcacagatgcaagacgaccttagggctttcatgggacttgatttcaataagatggttccaaatacagcaaagcagacaaaggaagtggtgcagacttggcagaaaaacattgccgatttgcaagcagccttcaaagtctataacgaaagaaacatcgctactggcacggcaagctctgaaattctgcacgttggtcctaactactcaacaggcttgggtggcggaacttccaaccagataaaggtaaactacgttgctattgatgtaaaaggtctcggtttgcaagcacagcaaatagaaacccgcgaaggtgcccaaagagccatagataggcttcaggaaaccatcaaggttactagcagcaatcgtgcagccataggtacatacataaaccgccttgactacacaatcaacaacattgcatctatggagtacaacatccaagacgcagagagccgcatacgcgacaccgactttgcgaaagagaccacggacttcaccagaaatcagattatggtacaggctgccacgagcatgttgtcgcaggcaaacagcttgcccgcaggagtgttaaatctgataggataa

SEQ ID NO: 66638 - protein, 565 aa, Unknown
  Obtained from environmental sample
  DOMAIN (472)...(543): Bacterial flagellin C-terminus
  misc_feature (1)..(565): Xaa is any amino acid
MEVSFMQINHNIRAMVTQHALFQNDNAMTKSLEKLSTGLRINRAQDDAAGLAMSEQMRTQIRGLAKAKRNSQDGQAALQIAEGALAEITNMMQRQKELAVQSANDTLTSTERMYLNDEFQALTKEIDRIAKNTDYNGKNVLLFDVDPNKSFGATKLDPYNKEVAFLEAANVVRKVFGENLEGGLSILTTSHGATSTKIDDINAAIGKINAVIVSLNGILTDSNIEIALKSLITAANVSVTGLGNDELNTTTISYMQNRSFTDPEISQSNAKALKAVNDLLRNVSDALRNYQAASAGELDVKKGAIASISYTFNTTIKGSDLDDVKSFGHTGIGSLDRILDQLSAAYSATGGPGGTDGLGLLAGIFGANASAQMQDDLRAFMGLDFNKMVPNTAKQTKEVVQTWQKNIADLQAAFKVYNERNIATGTASSEILHVGPNYSTGLGGGTSNQIKVNYVAIDVKGLGLQAQQIETREGAQRAIDRLQETIKVTSSNRAAIGTYINRLDYTINNIASMEYNIQDAESRIRDTDFAKETTDFTRNQIMVQAATSMLSQANSLPAGVLNLIG

SEQ ID NO: 66639 - DNA, 1104 bp, Unknown
  Obtained from environmental sample
  misc_feature (1)..(1104): n is a, c, g, or t
gtgtcgggagttgtaaaggatattcgtccgcatttaaccgtagtgggaacgattgtcgaatcaatcattatagaaaatgacggagaattaaaagaacacgaaagcattaaattacgcgacagttacgatgatctttcgggcgcggaaattgtaaaaattatacgcgaagccggaatagtggggcttggcggcgcgggatttcccacacatgtaaaactttctccgccgcctgagaaaaaaatagacactgttcttgtaaacggctgtgaatgcgagccgtaccttacaaccgacaacagggttatgatagaagaatcttcccgtattattactggcttaaaaataattttaaaagtaattcagggcgcaaagggaattatcgtcgtagaagataacaaaccggaagctattgaatcgctcaggaaagcctgcgaaagtctttccgatataaaagtcgccgtggttaagacaaagtatcctcaagggtgcgaaaaacaacttgttacggcgattacaggcagggaagtgccctccggcggtataccaatcgacgttggctgtgttgtaaataatgttgataccgttattgccatacaccgcgctgttttacgcggacgaccgcttatgcgaaaaatagtcacccttacgggcggagcgataaaaaatcccggaaattataaagtgcgtatcgggacgaagttaaacgatcttgtcgagcttgccggcggttttaaatccaatcccgaaaaaatagtggtaggcggaccgatgatgggcgtcgctatttttgacaccgacgttcccattgttaaaacaacgtcgggagttttgttctttaccgaagaagaagcgcatattccgccggaaagaaattgtatacgctgcggaagctgtgtcgagcattgtcctacggggcttataccgacagagttgaacgctgatattttaaaagaagacggcgaggcgtttgtccagcacaacggactcgattgtattgaatgcggcagttgctcttacatctgtccggctaaacggcgtttggctcaggcgattagaacaatcagaagggttgagcttgccaaacaaaaaaataaaggcaaataa

SEQ ID NO: 66640 - protein, 367 aa, Unknown
  Obtained from environmental sample
  DOMAIN (2)...(363): Na(+)-translocating NADH-quinone reductase subunit A (NQRA)
  misc_feature (1)..(367): Xaa is any amino acid
MSGVVKDIRPHLTVVGTIVESIIIENDGELKEHESIKLRDSYDDLSGAEIVKIIREAGIVGLGGAGFPTHVKLSPPPEKKIDTVLVNGCECEPYLTTDNRVMIEESSRIITGLKIILKVIQGAKGIIVVEDNKPEAIESLRKACESLSDIKVAVVKTKYPQGCEKQLVTAITGREVPSGGIPIDVGCVVNNVDTVIAIHRAVLRGRPLMRKIVTLTGGAIKNPGNYKVRIGTKLNDLVELAGGFKSNPEKIVVGGPMMGVAIFDTDVPIVKTTSGVLFFTEEEAHIPPERNCIRCGSCVEHCPTGLIPTELNADILKEDGEAFVQHNGLDCIECGSCSYICPAKRRLAQAIRTIRRVELAKQKNKGK

SEQ ID NO: 66641 - DNA, 963 bp, Unknown
  Obtained from environmental sample
  misc_feature (1)..(963): n is a, c, g, or t
gtgaaaatagaaataaaccaaataatgaccgtttcagctcctcctcatatttacggcactgatacaatcgaagcgcgtatgcgcgatgtggtaatcgctcttgttcccgctatattaatgtcaatgtaccattacggcaaagaagcgttttatgtaacggtaatcgccgttttatccgcgctccttgccgaatacctgtatcagaggatcatgggtaagactgttacaataaacgacttcagcgcggcaattacgggtatacttctttcctttaatcttcctccgcatgttccgctgtggcttcccgctgtgggaagttttttcgctattatcgttgttaaacaattattcggcggattaggctcaaactttgtaaaccccgctcttgcggcaagagcgttccttctcgtttcctttcccgtgcttatgacaaaatggacattcgcgccggatgccgtaacaagcgccacatatcttgcaatcgtaaaacagaatccgtcttttgttccgcaaatgtcagattacatggctcttcttttcgggaaagtaggcggctgtatcggcgagacaagcgcggtagccctgttaatcgggggagtgtatctgcttgtaaaaagaattatcagctggagaatacctgttttttacatagggacatttgcgttattcgcttttgttttcggaagaacgggctttttcagcgggaacgtgctgtttgaagttttgaacggcggtttaataatgggcgctttcttcatggcgacggattacgcgacatctcccattacgccgcgaggcaagatcgttatgggaataggctgtggaattttaacattccttatacgcttccacggcggttatcccgaaggtgtaagttactcaataatcataatgaatctttttgtgccgcttatcgataaatacataaaaccgcgcgtatacggcaaaggaaagaaaaaatga

SEQ ID NO: 66642 - protein, 320 aa, Unknown
  Obtained from environmental sample
  DOMAIN (8)...(317): NQR2, RnfD, RnfE family
  misc_feature (1)..(320): Xaa is any amino acid
MKIEINQIMTVSAPPHIYGTDTIEARMRDVVIALVPAILMSMYHYGKEAFYVTVIAVLSALLAEYLYQRIMGKTVTINDFSAAITGILLSFNLPPHVPLWLPAVGSFFAIIVVKQLFGGLGSNFVNPALAARAFLLVSFPVLMTKWTFAPDAVTSATYLAIVKQNPSFVPQMSDYMALLFGKVGGCIGETSAVALLIGGVYLLVKRIISWRIPVFYIGTFALFAFVFGRTGFFSGNVLFEVLNGGLIMGAFFMATDYATSPITPRGKIVMGIGCGILTFLIRFHGGYPEGVSYSIIIMNLFVPLIDKYIKPRVYGKGKKK

SEQ ID NO: 66643 - DNA, 684 bp, Unknown
  Obtained from environmental sample
  misc_feature (1)..(684): n is a, c, g, or t
atgaattatataatcaaacctgcggcttcgctttttatcgccgccgcaataaccgtcgcggctttaagttttgtgtataacaaaacctatgaagctatcgaaaaacaaaaaaataaagctcaggaagaggcgatgaaggagcttctgccgaaagccgataacttcaaagaattgcaagcggaattcacgggaagcattagagccgtatacgaaggttattatgaaactgagagattggataaccgtattatggtcggctatattttaaaactttccccgtcaggctacagcggcgagatcgattttcttgccggtgtttccattctggacgataaacaaattaccggtatacgcatattgcgccacagcgaaacgccgggtcttggagcgcttgcggttaaagaagatttttacgggcagttcagcggacgcgctctttcgccgcttagagtttcaaaatcttctcccggcagggatgaaattcaggcgattacaagcgcgacaattacttcaagggcgattacaaacgccgtgaacgaagcggtagagtggtgtctggctaatgaaaaacattctgaagaaaatgttttggacgaaaatgatatacgtgaatatattatagatattgatgaagtttttatttccggttggaccggtgttggttttcaagggagtgaagaatga

SEQ ID NO: 66644 - protein, 227 aa, Unknown
  Obtained from environmental sample
  SIGNAL (1)...(25)
  DOMAIN (95)...(185): FMN-binding domain
  misc_feature (1)..(227): Xaa is any amino acid
MNYIIKPAASLFIAAAITVAALSFVYNKTYEAIEKQKNKAQEEAMKELLPKADNFKELQAEFTGSIRAVYEGYYETERLDNRIMVGYILKLSPSGYSGEIDFLAGVSILDDKQITGIRILRHSETPGLGALAVKEDFYGQFSGRALSPLRVSKSSPGRDEIQAITSATITSRAITNAVNEAVEWCLANEKHSEENVLDENDIREYIIDIDEVFISGWTGVGFQGSEE

SEQ ID NO: 66645 - DNA, 624 bp, Unknown
  Obtained from environmental sample
  misc_feature (1)..(624): n is a, c, g, or t
atgagatattacattcaactttttaaagacggtatttacaataaaaaccccgtgcttgtgcaggttttggcgttatgccctcttcttgccgttacaacttccgcgactaacgcgattaccatggggctttcaactacagcggtaatgatctgcgccagttcggctatttctcttatacgaaaacttatgccgagcgagattcgcattgcgacatcggttgttgtagttgccggttttgttactattcttcaattgttattggaagcatacgcgccgcaaaatgtaagcgaagcgcttggtatttacattccccttattaccgttaactgcatagttttcgcgcgcgttgaggcgtttgcgtcaaaaaataaacttttcccctcgatgattgacgccctcggcatgggattgggttttactttggggctttttatcgtcggcgttatccgtgaatttttcggcagcggttcaatcttcgggtttgagcttatacacgatcctacggcgcatgtgcttatcatgattatgcctccgggagcgttctttacgcttggagttgtaatcatggtgcgcaattacatacaatggaaatcgcttcacttaaaaaaaggcggtaaaaaatga

SEQ ID NO: 66646 - protein, 207 aa, Unknown
  Obtained from environmental sample
  DOMAIN (1)...(189): Rnf-Nqr subunit, membrane protein
  misc_feature (1)..(207): Xaa is any amino acid
MRYYIQLFKDGIYNKNPVLVQVLALCPLLAVTTSATNAITMGLSTTAVMICASSAISLIRKLMPSEIRIATSVVVVAGFVTILQLLLEAYAPQNVSEALGIYIPLITVNCIVFARVEAFASKNKLFPSMIDALGMGLGFTLGLFIVGVIREFFGSGSIFGFELIHDPTAHVLIMIMPPGAFFTLGVVIMVRNYIQWKSLHLKKGGKK

SEQ ID NO: 66647 - DNA, 441 bp, Unknown
  Obtained from environmental sample
  misc_feature (1)..(441): n is a, c, g, or t
atgacattattttttgtattagtcggcgcgattttaattaacaattatgttcttgttcaattcctgggaatgtgtccattcttcggcgtttccaaaaaaatagaaaccgccgtcggtatgggattatccgttatctttgtaatgacgatagcgtccgccattacttatactttttataaatttgttttggttccgttcaatattacatatcttcttacagtcgcttttattttgataatcgcttctattgtgcaatttgtagaagtgtttatgaaaaaaatgtttaaggcgctgtatacaatgttgggcgtgtatcttccgctgattacgacaaactgcgcgatattcggcgtaactattatcaatattaaaaatgaatttacgtttgtcggctcaatcgtaaacgctgtggagcgggcatgggttttactcttgccatag

SEQ ID NO: 66648 - protein, 146 aa, Unknown
  Obtained from environmental sample
  DOMAIN (1)...(145): Rnf-Nqr subunit, membrane protein
  misc_feature (1)..(146): Xaa is any amino acid
MTLFFVLVGAILINNYVLVQFLGMCPFFGVSKKIETAVGMGLSVIFVMTIASAITYTFYKFVLVPFNITYLLTVAFILIIASIVQFVEVFMKKMFKALYTMLGVYLPLITTNCAIFGVTIINIKNEFTFVGSIVNAVERAWVLLLP

SEQ ID NO: 66649 - DNA, 516 bp, Unknown
  Obtained from environmental sample
  misc_feature (1)..(516): n is a, c, g, or t
atggaacgcggactcgataaaggcgaacgccggcgcgaccgcgctgctgacgacgaaggcgaggccgttcagccagcccacgaggttggcgcctatcggcaacatcagcgtgtacggcggcgtgatcaggtcgaacagcggccccgcgatcgtcgcgacgggcgatgtcactattcacaaagacaacccgggtatggctatcgtcgggcaggaaacggtcaacggcgtgaacgcggaggttccgcgcaaggacgtcgtggtctcctccggctctacgacgagctcctacgcctacaacagcacgatcaccaccgagggtcaaaacgaggtgaatatcggttgggcgcgcgtagaggcgaccggagcgaccggcgccgcgaccgcgatcaagaacacgaacggcaacgtcacggtttccggaacgctggacaacggcgtgacgatggtcgtgtcggcgtccggttccgcgatcaacgtggccaagggcaacgtacgggtcaacggcggcgaggttaa

SEQ ID NO: 66650 - protein, 171 aa, Unknown
  Obtained from environmental sample
  misc_feature (1)..(171): Xaa is any amino acid
MERGLDKGERRRDRAADDEGEAVQPAHEVGAYRQHQRVRRRDQVEQRPRDRRDGRCHYSQRQPGYGYRRAGNGQRRERGGSAQGRRGLLRLYDELLRLQQHDHHRGSKRGEYRLGARRGDRSDRRRDRDQEHERQRHGFRNAGQRRDDGRVGVRFRDQRGQGQRTGQRRRG

SEQ ID NO: 66651 - DNA, 1260 bp, Unknown
  Obtained from environmental sample
  misc_feature (1)..(1260): n is a, c, g, or t
atgacaagtaaactattttattgtcatggatttatttttttcttcttatattactttattcttttttttatgacaattaattcattaaaaaaagaaaaaggaaataataaaagattatatagggactttccgaattcgtcatttagacttgtcataagtcataaattaagaaaggacggctatcattggtcattgatttttcatgaggccgcttgccgtaagcgaatattttccaggtttgaggttgaaggaaattgggagggttttttatttacgtcagccgtggagcataccacgctaatcttgaaggttaattggctctgggtgggcgtagtacgcccctctgtagttgattatgattctgacgctgattgtccgatatggaaaaaattcataatggaaattatgaactacaatgcggagctaattcactttatgcaaaacgccgctggttgggctattacaggtaatacttcggagcaaaccatgtttattttatttgggacaggggcgaatggaaaaagcacctttcttaataccattatgaacctgttaggcgattacgccattgctacgcctacggaaacttttatgcggaaaattggagattatatcaccaatgatatagcccgattgaggggtactcggtntgttacaacaaccgaagcggagcatgggcggcggctgtctgaaccgctgataaaacagataaccggaaatgacaagatgacggctcgcttcctgtacggcgaattttttaattttataccgactttcaagatttttatggctaccaaccataagcctgtgattaaaggtactgaccacggaatatggcgaaggattaaacttgtgccgttcattactcggattgaggaagataaacaggacaaacaccttgaacaaaaattgatgcaggaaagcgcgggtatattgaattggcttattgagggttcaattcggtggtgcgcggaagggttaaaaacgccgaatatcattttaagggctaccgatgaataccgcgcggaaatggacgttatcgggaactttataaaagagcgatgtgtccagggagagtgttattctgtaaaggcaagggaactttttaagtgctatcaagactggtgtgatgaccataacgaaaacgctgttagtgagcgatttttcggattgaggctgaaggaaatcgggcttgaacaaaaacggctgaccgatggccggtactggcaggggattgggtttcccccgtgccccctttag

SEQ ID NO: 66652 - protein, 419 aa, Unknown
  Obtained from environmental sample
  DOMAIN (107)...(399): Poxvirus D5 protein-like
  misc_feature (1)..(419): Xaa is any amino acid
MTSKLFYCHGFIFFFLYYFILFFMTINSLKKEKGNNKRLYRDFPNSSFRLVISHKLRKDGYHWSLIFHEAACRKRIFSRFEVEGNWEGFLFTSAVEHTTLILKVNWLWVGVVRPSVVDYDSDADCPIWKKFIMEIMNYNAELIHFMQNAAGWAITGNTSEQTMFILFGTGANGKSTFLNTIMNLLGDYAIATPTETFMRKIGDYITNDIARLRGTRXVTTTEAEHGRRLSEPLIKQITGNDKMTARFLYGEFFNFIPTFKIFMATNHKPVIKGTDHGIWRRIKLVPFITRIEEDKQDKHLEQKLMQESAGILNWLIEGSIRWCAEGLKTPNIILRATDEYRAEMDVIGNFIKERCVQGECYSVKARELFKCYQDWCDDHNENAVSERFFGLRLKEIGLEQKRLTDGRYWQGIGFPPCPL

SEQ ID NO: 66653 - DNA, 903 bp, Unknown
  Obtained from environmental sample
  misc_feature (1)..(903): n is a, c, g, or t
ttggccgagatcgtggctgcccgtaaagaaaccaaaaccagaagaacggcaaaggcttcatcatcttcaaccaggagaacccggggggaaaaaagttacggcagaagcgccaaagttccctggggagtcctgttctggcttgtttttgcgattttcatctttggcctttttatttttaaccgcgaagcgatagaatccagccttcaaattgttaagaacgccttttcatcaagggagatagctggtgagaatgagccagaagaacctaaggatgagaatcctccggtaacgcaggtacctaacaggcaacagcctgttatacagccagagacacagatgcctgcacaaccggttatcgccccttcggacgccgaaacggtaaagcagcctgattccgcaaccccgcctgtggcgcagtcgcctgtccagcaaagctctcaaaaccagacagggcaaaaccagcagagcgcacagcccccgcctgaaacgcgtgaaagggctctgtattttatccaggtggacaggagcgggcaaatcaaccgggtgcagtcgaaccggaagcttccggtttccgattcccccctgaccgacgtaattcaggccctcattgccgggcctagcgcaggggaaaaaagctccggcttaatttcgctgatccccccggcgaccaaactgctttcggcaagcgtcagggggagcacagcgtacataagttttaacgaagagtttcaatataacacctacggggtggaaggatacgccggccaattgcggcaggttgtctttaccgctacggagttccccaatatcgccgatgtgcagattttaatcgaagggcgacgcattgattaccttggcgaaggcgtatgggttggcagcccggtaagcagggatatgctgtga

SEQ ID NO: 66654 - protein, 300 aa, Unknown
  Obtained from environmental sample
  misc_feature (1)..(300): Xaa is any amino acid
MAEIVAARKETKTRRTAKASSSSTRRTRGEKSYGRSAKVPWGVLFWLVFAIFIFGLFIFNREAIESSLQIVKNAFSSREIAGENEPEEPKDENPPVTQVPNRQQPVIQPETQMPAQPVIAPSDAETVKQPDSATPPVAQSPVQQSSQNQTGQNQQSAQPPPETRERALYFIQVDRSGQINRVQSNRKLPVSDSPLTDVIQALIAGPSAGEKSSGLISLIPPATKLLSASVRGSTAYISFNEEFQYNTYGVEGYAGQLRQVVFTATEFPNIADVQILIEGRRIDYLGEGVWVGSPVSRDML

SEQ ID NO: 66655 - DNA, 723 bp, Unknown
  Obtained from environmental sample
  misc_feature (1)..(723): n is a, c, g, or t
ttgatacaagcgcaccgtggggcctcggcttactgcccggaaaatacgctggaggcgttttccagggcaatagaaatgggcgccgacggcattgagcttgacgtacatcttagcaaagacggtgaaatcgtcgttgcccatgacgccaggctggaacgtgtttcaaatggaaatggttacattaacgaccatacgcttaaagagcttaagtcgctggattttggcaagctgtcttccgacagccatatatgccgtatcccaacgctttccgaggttttctcgctggttaagctttcggtccttaccgtgaatgtcgagctaaaaaccaccgagcgcctttacccggagcttccccggaagctcctcgccctggcggatgaatacgcgatgggggatcgcgttatctactcatcattcaaccattattctctaaaggaaataaaaacgctcgatccctcagccaggatagggctgttgtatgaattgggtatggttgatccctgggtttacgcgaattatgtgggcgcggacgcgatccacccgcattactttgttatcgcggcgttgcctgatacggtagcgctctgccatgaacacggcgttaaggtaaacgtgtggacggtggatgatcctgacgcgattaaattgatgctcaagtgcgcggtagacgggatcattacaaacaagccggatattgccgttgcctgccgcgacagtttatag

SEQ ID NO: 66656 - protein, 240 aa, Unknown
  Obtained from environmental sample
  DOMAIN (5)...(232): Glycerophosphoryl diester phosphodiesterase family
  misc_feature (1)..(240): Xaa is any amino acid
MIQAHRGASAYCPENTLEAFSRAIEMGADGIELDVHLSKDGEIVVAHDARLERVSNGNGYINDHTLKELKSLDFGKLSSDSHICRIPTLSEVFSLVKLSVLTVNVELKTTERLYPELPRKLLALADEYAMGDRVIYSSFNHYSLKEIKTLDPSARIGLLYELGMVDPWVYANYVGADAIHPHYFVIAALPDTVALCHEHGVKVNVWTVDDPDAIKLMLKCAVDGIITNKPDIAVACRDSL

SEQ ID NO: 66657 - DNA, 1299 bp, Unknown
  Obtained from environmental sample
  misc_feature (1)..(1299): n is a, c, g, or t
ttgccgttgcctgccgcgacagtttatagtaaagaaaaggaaaagcaaatgcaggaaaacaaactggacataaaaaagacccttcttttatccttcggatttttcgcctcgtcaattgcgtggagtgtctacaattcatttgtgccgcagatcctcgaaggcttcataaaaagcaccgcgctgattgggtttataatgaccttcgacaatatattcggcgttatttttcagccgctgttcggaagtcttagcgacaaaacccgtacccgttttggccggaggatgccctatatctttatcggcctgccgatctgcgccgtggcttttacgctgattccgcacatggacagcctttggtcgcttatggctngtataattgtnttcacctttgtgatgtcngcgtggcgctcgcctgtggtagcgctaatgccagacattacgcccggcccgcttcgcagccaggccaacggcatcgttaacctcctgggcggaatcggcagcctgattgctttctttgtcggcggtatcctctttagggcgggcggcttcccgctcccgtttttgatgagcgcgattatgatgctgctcgctctcgcggtgctggctctttttgtgcgcgagcctaaacaggcctatatcaataacgagccggaaggtgaaagcaaaaaagccgagataaagcagctcagtaaggatgagaagaagagcttacttttgattctcttcggagtttttttctggtttaccggttacaatgccgtggaaacgttctttaccctgtacgcaacgaataccctgggcatggacgcaggcggcgcgtcgatgacgctttcaattttctcgctcacttttttggctttcgcggttccggctggctacattgccgttaaaaccgggcggcgcaaggcgatcctgataggattgtccggccttgtcattctgtttctgccgatggtatttcttgccaatgcctgggttgcccgcgcctgcctttttttgggagggtttttctgggcaatggtcaacatcaattcgcttccgatggtggtgcagctttcgggcgaagaaaaagtaggcgcttttgtagggtattactacttcttttcttttagctcgcagattgtttccccgattttattcggcgttatccgcgacctggtaggccattacagggttttgtttctgtacgcctgcgttgcttttgtgcttgccgcctttagccttttgttcgtgcgccacggcgaagacaagccggctcaggtaagcgcctcgcaggttcttgatgggcttgaggattaa

SEQ ID NO: 66658 - protein, 432 aa, Unknown
  Obtained from environmental sample
  DOMAIN (60)...(417): PUCC protein
  misc_feature (1)..(432): Xaa is any amino acid
MPLPAATVYSKEKEKQMQENKLDIKKTLLLSFGFFASSIAWSVYNSFVPQILEGFIKSTALIGFIMTFDNIFGVIFQPLFGSLSDKTRTRFGRRMPYIFIGLPICAVAFTLIPHMDSLWSLMAXIIVFTFVMSAWRSPVVALMPDITPGPLRSQANGIVNLLGGIGSLIAFFVGGILFRAGGFPLPFLMSAIMMLLALAVLALFVREPKQAYINNEPEGESKKAEIKQLSKDEKKSLLLILFGVFFWFTGYNAVETFFTLYATNTLGMDAGGASMTLSIFSLTFLAFAVPAGYIAVKTGRRKAILIGLSGLVILFLPMVFLANAWVARACLFLGGFFWAMVNINSLPMVVQLSGEEKVGAFVGYYYFFSFSSQIVSPILFGVIRDLVGHYRVLFLYACVAFVLAAFSLLFVRHGEDKPAQVSASQVLDGLED

SEQ ID NO: 66659 - DNA, 1179 bp, Unknown
  Obtained from environmental sample
  misc_feature (1)..(1179): n is a, c, g, or t
atgatcccaagaattgcggaagagaccctgtacaggtattcaaggggttttccggtaatctgcattacagggccaaggcaatcagggaagactacccttgccaagcttgcttttcccaaaaagcagtatttctctctcgaagacccggatacacaattattggcccgttcagacccgcgagggtttttagaccaatggccggacgggtttatactggatgaagcgcagtatttgccggaaatatttaaatatatgaaagcaaaggtggataatgacccaaagccaggcaagtacattatcataggttcgcagcaattcagcctgatggaaaaaattaccgaatcgttggccggaagggcttcttttttaaccttgctgcctttctcaatcgccgaacttgcttcggtacctgaacttgcctcagctcctgaagcagactctccggtttacgcggaaaatccatgggaattgatgatacagggcttatatccgcccatttacgatcgggatctcaacccacaggatttttatgccgcttatattgccagctacgttgaaagggatctcaggcagcttgtcaacgtgaaggatttaggcacgtttcaaagcttcataaaattctgcgctgcccgtaccggcggagtactaaatttaagctctctcgcttcggattgcggcattacccataataccgctaaagcctggatttccgttctgtcgatttcaggtattatttacctgctcaggccgtactacaaaaacttcgggaagaggcttgtaaaatctccaaaactctattttaccgatcccggcctggcctgcaggctccttggcatccaaacagcggaacagctttttctaaaccctctgcggggcagcctgtttgagggctttataatttcagaattgctaaagaaccggcttaatcggggagaaacacctgaactttggttctggagaaataacaatggcatggagattgactgcctcattggcggggctgaaaaactcgccgcgctggaaattaaatcgggcaagacatttaacgatgagatgacaagcggccttaagcgttggtcaaaaataaatgctgaaggcggggatcgttatcttgtttacgctggtttgcaaaaatcagtttataaaggaatacccttataccctggaaagacattgtga

SEQ ID NO: 66660 - protein, 392 aa, Unknown
  Obtained from environmental sample
  misc_feature (1)..(392): Xaa is any amino acid
MIPRIAEETLYRYSRGFPVICITGPRQSGKTTLAKLAFPKKQYFSLEDPDTQLLARSDPRGFLDQWPDGFILDEAQYLPEIFKYMKAKVDNDPKPGKYIIIGSQQFSLMEKITESLAGRASFLTLLPFSIAELASVPELASAPEADSPVYAENPWELMIQGLYPPIYDRDLNPQDFYAAYIASYVERDLRQLVNVKDLGTFQSFIKFCAARTGGVLNLSSLASDCGITHNTAKAWISVLSISGIIYLLRPYYKNFGKRLVKSPKLYFTDPGLACRLLGIQTAEQLFLNPLRGSLFEGFIISELLKNRLNRGETPELWFWRNNNGMEIDCLIGGAEKLAALEIKSGKTFNDEMTSGLKRWSKINAEGGDRYLVYAGLQKSVYKGIPLYPGKTL

SEQ ID NO: 66661 - DNA, 2469 bp, Unknown
  Obtained from environmental sample
  misc_feature (1)..(2469): n is a, c, g, or t
gtgctgaacgtcaacaccggttcgtcgcagtcgcgtagcatacagataataaacggcaggattgagcagaaaaacgagatcacatataggtacatctacaccatagcctcaaagacggacggtcaattcacctttccggcgctgacagtggtcattgacggaagcgactacagtacccggcccgtacacttcaatgtcggcggcggcgcgggcggcgctgtcagcggcggcggaggcggtaccggcgccgatccggcccctgcccgcaatcccgacataagggtcactctcagcatgccgaaaaaggttctatacgccggcgaacagaccgtgctcacgctcaaggttgcgcagagggcgggtacgccgatactgacgcaacgcgggtaccccggagcgctcgaacagatagagaaagctttcagcaacggcttttcgctcaaccgcctcttcataaaccaagtcacgcaggggcaggagcgtataggcaacgaggcgtacaatactttcacgctcaatttcgcggtctttgggttgacggcgggggagtaccgtataggggcgatagactttgactacgacgagatcatacagtcgcgcagccggcagatcaatccgttctttcaggacttcttcgacatggacttcttcggcggacgccaaacggtgcagcagaagacgcgctccgcgcctttcagcgtgacggtgaaaccgcgtcccggcggcgcgccggaaaatttcggcggttccgttgggaaatttagcctgtcggcctccgtggaaccgcagtcggtcgccgccggagaggcgctgaccgtcaaggtagcgctaaagggcagcacgcgcgcctcaaatgtcggcgacccgattctgccggagcttgcgaattgcgacgtatttacaccggagcggcagacggccgtcgacaccggcgccggcgggctctccacacggaagacctaccgatacctcgtaatcccgaagcaggaggggacgttgaccatagaacccataacgtatcactacttagaccctgagagcggaacctacaaggccgcccgttccgacacgctgcgcgtatccgtcgcaaaaggcttgggcgtgacaaaggagcagacgcgttacctcacgcaggaggaaattaggcaggtgggcagcgatatccgctacatcaagacgccgtccaaaatatcgaaccaagaggagcgcccgtaccgcgcgccgtattggtacctgctctttccgacgccgtttctgctctttatattcgcgttaatctataagacgcagacaagaaagagcggcgaaaatcagatcaaggctatccgccaaaaggcgcttggcagcgcgatcaaagagctcaacaaggccggcaagtccgccgcggacggcgagttcctcggtaaggtagtgagcgtcatagagaaatacatctcgcgcaaattcgcctttcccgctaccggacggacgcttgaggagttgaaagacgaattgctttcacgcaaaatagacgagcggacggtcacaggcctcaccgcgcttatcgaaggcatagacgagtaccgtttcggcggcaaaacgttcaacgcccaaagcaggggggaaatcatcaaacagactgtgtcgttcttgggcagtatggaaaaagtagcgcaaaaatcaaaaggcccggcgccgtcgtccgcgacgcagtcggtattgataatgttgacagcgggaatgattgcgcttataacgcccgcgacggtaagcgccgccaccaacgcggcaagttgcaacgagtggttccaaaacgcaaacgccttctacgaggccggcgtccacgatagcgcgcttgcctactacgcgaagatactcgacgccggaatgaagaacagcgccgtatactacaatatcggaaattgctactaccgcctgatgatgcccggcatggcgcgtctatactacgagaaagcggcggcgctctcccccaacgacccggacatagaggccaacatcaacttcatcacgtctataatagttgacagacaagcaggcggcgacaataaagaatcggacttcctgacatcggtgttctacggcatccacaccctattgccgctgaacacccagcttatagcggtgtgcggcttactcttcatattatcggtaatcgcctccgctatgctgatgaaacgcggcctggcccgtctatggttagcctacggcgcgtcgctatgcgcgttgctgataatagcggtaggtatatccgcaggctacaaaatctacgcccttgaaaataaccaatacgcggtaatcctatccgcgtcgatagacgccaagaaccaaccctccggcaaccaaaccctatttaccgcgcacgaagggacaaaactgcaaatccgcaaaaccgtaggcgagtggagcctggtgagtctgtcaaacggcgcaagcgggtgggtgttaacgaataccttggggaagatataa

SEQ ID NO: 66662 - protein, 822 aa, Unknown
  Obtained from environmental sample
  DOMAIN (626)...(659): Tetratricopeptide repeat
  misc_feature (1)..(822): Xaa is any amino acid
MLNVNTGSSQSRSIQIINGRIEQKNEITYRYIYTIASKTDGQFTFPALTVVIDGSDYSTRPVHFNVGGGAGGAVSGGGGGTGADPAPARNPDIRVTLSMPKKVLYAGEQTVLTLKVAQRAGTPILTQRGYPGALEQIEKAFSNGFSLNRLFINQVTQGQERIGNEAYNTFTLNFAVFGLTAGEYRIGAIDFDYDEIIQSRSRQINPFFQDFFDMDFFGGRQTVQQKTRSAPFSVTVKPRPGGAPENFGGSVGKFSLSASVEPQSVAAGEALTVKVALKGSTRASNVGDPILPELANCDVFTPERQTAVDTGAGGLSTRKTYRYLVIPKQEGTLTIEPITYHYLDPESGTYKAARSDTLRVSVAKGLGVTKEQTRYLTQEEIRQVGSDIRYIKTPSKISNQEERPYRAPYWYLLFPTPFLLFIFALIYKTQTRKSGENQIKAIRQKALGSAIKELNKAGKSAADGEFLGKVVSVIEKYISRKFAFPATGRTLEELKDELLSRKIDERTVTGLTALIEGIDEYRFGGKTFNAQSRGEIIKQTVSFLGSMEKVAQKSKGPAPSSATQSVLIMLTAGMIALITPATVSAATNAASCNEWFQNANAFYEAGVHDSALAYYAKILDAGMKNSAVYYNIGNCYYRLMMPGMARLYYEKAAALSPNDPDIEANINFITSIIVDRQAGGDNKESDFLTSVFYGIHTLLPLNTQLIAVCGLLFILSVIASAMLMKRGLARLWLAYGASLCALLIIAVGISAGYKIYALENNQYAVILSASIDAKNQPSGNQTLFTAHEGTKLQIRKTVGEWSLVSLSNGASGWVLTNTLGKI

SEQ ID NO: 66663 - DNA, 372 bp, Unknown
  Obtained from environmental sample
  misc_feature (1)..(372): n is a, c, g, or t
ttggggggattggttaatatttgtagagactcgngtgctcacatctcatattggacaactgcgacaccgccacaaatcggcacgtacggcgtggcgatagctgccgcctaccacaagataccgttctacgtagccgccccgtcgtcgacgttcgacctcaaaatcagggacggctcggacataccgatagagcggcggaacagagaagaggtgtctatgtccggtggcgtgaaaaagagcgttcccgacggggcggaagtgttcaatccggctttcgacgttaccccggcggagttgattaccgctattatcaccgaggcgggtgttatttatccgccttatgttacgaatattgagggaataattcattaa

SEQ ID NO: 66664 - protein, 123 aa, Unknown
  Obtained from environmental sample
  misc_feature (1)..(123): Xaa is any amino acid
MGGLVNICRDSXAHISYWTTATPPQIGTYGVAIAAAYHKIPFYVAAPSSTFDLKIRDGSDIPIERRNREEVSMSGGVKKSVPDGAEVFNPAFDVTPAELITAIITEAGVIYPPYVTNIEGIIH

SEQ ID NO: 66665 - DNA, 462 bp, Unknown
  Obtained from environmental sample
  misc_feature (1)..(462): n is a, c, g, or t
gtgtgtattgtaggatatagccataacggagcgaatgatatgaaaatttcaaccaaaggcaggtacgccctgcgcatgctgcttgacctggcggagcacaaagacgacggcttcgtatccctcaaagagatagccgagaggcagaacatatccaagctgtacctggaacagatcgtctctctgctgcatacgtcgaacatactgcgcgccaacagggggaagctgggcgggtatatgctggccaaggatccctctaagtgcacggtcgggcaggtgctgcgcatcacggagggcaatttggcgccggtgtcttgcctcgaaagcgagatcaatgtttgcgacaggatcgagttctgcaagacgcttcctatgtggatggggcttaatcgggttataaacgattaccttaacggggttactttgcaggatatattggagcagcatgaatatcaggggggctga

SEQ ID NO: 66666 - protein, 153 aa, Unknown
  Obtained from environmental sample
  DOMAIN (14)...(136): Transcriptional regulator
  misc_feature (1)..(153): Xaa is any amino acid
MCIVGYSHNGANDMKISTKGRYALRMLLDLAEHKDDGFVSLKEIAERQNISKLYLEQIVSLLHTSNILRANRGKLGGYMLAKDPSKCTVGQVLRITEGNLAPVSCLESEINVCDRIEFCKTLPMWMGLNRVINDYLNGVTLQDILEQHEYQGG

SEQ ID NO: 66667 - DNA, 687 bp, Unknown
  Obtained from environmental sample
  misc_feature (1)..(687): n is a, c, g, or t
gtgacagccctggttgtgcaggcacgcctggattccagccgccttagcgacaaggccttgcttccccttggggacagacccatcgtcttccgcgtgatggaagcgcttgcttttctcccctgcgaaaaaaagatactggcctgcccggaagacagcgtttccgcttttgctcccctggcggaggaggccggctttgttctggttcccggcccgaaagaagacgtgcttgcgcgttactgccttgcgattcgcaggtcgggcgccgacagggttatccgtgcaaccgccgataacccctttgttttcgttgatgccgctgtctctattaacatggaagcggctgagttgggcgcggattactcaggctatttcggcctgccttacggcgctggggtggagtccatcgcgtcggaggcgcttttacgcgccgaaagggaagccgaggcgactgatgaacgggagcatgtatgcccctacctttacaagcatccagagcttttccgccttcacaggccgtttgccccacggcgctggcagggcccggaatacaggatcaccgtggacacaagggaagattacgagcgcgccgtttcgctttacggtcgcctttcttccctgcccctcaaagagcgaaacctgggcgaaaacgtcattttccagtgcgaacgtttatggaagggcgaatga

SEQ ID NO: 66668 - protein, 228 aa, Unknown
  Obtained from environmental sample
  DOMAIN (3)...(213): Cytidylyltransferase
  misc_feature (1)..(228): Xaa is any amino acid
MTALVVQARLDSSRLSDKALLPLGDRPIVFRVMEALAFLPCEKKILACPEDSVSAFAPLAEEAGFVLVPGPKEDVLARYCLAIRRSGADRVIRATADNPFVFVDAAVSINMEAAELGADYSGYFGLPYGAGVESIASEALLRAEREAEATDEREHVCPYLYKHPELFRLHRPFAPRRWQGPEYRITVDTREDYERAVSLYGRLSSLPLKERNLGENVIFQCERLWKGE

SEQ ID NO: 66669 - DNA, 573 bp, Unknown
  Obtained from environmental sample
  misc_feature (1)..(573): n is a, c, g, or t
atgcccacccttattgcccccgctattatttccgaaaaaaaaaccggaaagtccataaaaacaattccgttcattccgcggaaggaagggcaattaaccctgtacccttttgacggcgtcggtatttacgacagggagcggtttatccgcctgaacggtttcgatccttacataaaaaacttccactggcagttaatggactttggttttcgttcaagcctttggggggaagaaattgccgctacccagttgataaaactttcgtacgaagcccatgtccccgaggaagacattacggcaggtcagggatttcttaggttttacctgaaaaacctggcgccggttttcaagggcgatcacgcgcacatccccttgcgtcgttttcccggatacctaaaaaggcggggcgatctttttaccgcctgggaagaattttcttccgcacgcgcctgggtaaaaaccaaccgctttcgttttagctcagacgccggaataatggcggagcttttcgcttcgatagaaaccgaggtggaaacaggggacaatcatgatgagccaaggggggaaatgtga

SEQ ID NO: 66670 - protein, 190 aa, Unknown
  Obtained from environmental sample
  misc_feature (1)..(190): Xaa is any amino acid
MPTLIAPAIISEKKTGKSIKTIPFIPRKEGQLTLYPFDGVGIYDRERFIRLNGFDPYIKNFHWQLMDFGFRSSLWGEEIAATQLIKLSYEAHVPEEDITAGQGFLRFYLKNLAPVFKGDHAHIPLRRFPGYLKRRGDLFTAWEEFSSARAWVKTNRFRFSSDAGIMAELFASIETEVETGDNHDEPRGEM

SEQ ID NO: 66671 - DNA, 537 bp, Unknown
  Obtained from environmental sample
  misc_feature (1)..(537): n is a, c, g, or t
ttgtctgggagaaaggcgcggctttgtacaacgggcactgtaaagccgaatatccgggtatttgcgcgctctgcgatgaatactatacctataacttttaacgaaaacctccccgcttataccgcggtgggaggcaatgagcgaagggcttccacagggctttcggctgttatcctgaacaggggaggcaggtatccccgctacacttttttcgaggagctggagaagcttggatttgactatgtcctttcaatagaaagttccgccgccaattacgatttggaatccctttcatccggttttccttttgtccgctttattcttccccaggggcagatcaatcggggggaagagatcaaccttgccgcgtccgaattgtccagccccctgttttttgtcctctggaacgatttgaagtttctccgaagcggcggggccgatcgtatggcggagcgcctccttacggcggagcgggtagaaaaaaatacctataaaaggctttgtaccacgccctttaatccaggacgcgcgttctga

SEQ ID NO: 66672 - protein, 178 aa, Unknown
  Obtained from environmental sample
  misc_feature (1)..(178): Xaa is any amino acid
MSGRKARLCTTGTVKPNIRVFARSAMNTIPITFNENLPAYTAVGGNERRASTGLSAVILNRGGRYPRYTFFEELEKLGFDYVLSIESSAANYDLESLSSGFPFVRFILPQGQINRGEEINLAASELSSPLFFVLWNDLKFLRSGGADRMAERLLTAERVEKNTYKRLCTTPFNPGRAF

SEQ ID NO: 66673 - DNA, 300 bp, Unknown
  Obtained from environmental sample
  misc_feature (1)..(300): n is a, c, g, or t
ttgatcggcgagctcgtgcccgctcgtgcgaaaatgcaggccgccgatctttcaccggtgaagcgctgcccatgctggcatattcagcgggatatgaatatacttttggacggcagggtgccgtactgcagggagaacctggcggctcttaaaggaggcgcggaggttttgggaaacgctttttccgacgatctttcgcttgtctgggagaaaggcgcggctttgtacaacgggcactgtaaagccgaatatccgggtatttgcgcgctctgcgatgaatactatacctataacttttaa

SEQ ID NO: 66674 - protein, 99 aa, Unknown
  Obtained from environmental sample
  misc_feature (1)..(99): Xaa is any amino acid
MIGELVPARAKMQAADLSPVKRCPCWHIQRDMNILLDGRVPYCRENLAALKGGAEVLGNAFSDDLSLVWEKGAALYNGHCKAEYPGICALCDEYYTYNF

SEQ ID NO: 66675 - DNA, 525 bp, Unknown
  Obtained from environmental sample
  misc_feature (1)..(525): n is a, c, g, or t
atggaagcagtacagacagcaaatccccccagttttgagtccatttgggcaattttggataggattagcgaaaagcaagaagaaaacgcccgtcaaattggcaaactcggtagccgtataggcgaaattattgaacatctgattgcgcccaatcttagagagaaatttagagaattaggatatgatttcccaaaagctaatcctaattctgatgttacagatcgtacaaacaatatacaccttgaaattgatgttatgcttgaaaatggcgataaagccttgcttgtcgaagtaaaaaccaaacccaccaccgaagatgtgcaggatcatattaaacgtcttaaaaaaatgcgtgtatatgccgatctgcacggcgaaaagcgtacatttttgggcgctgtcgcgggggcggtaatgacggacaatgtaaaagagtatatattaaaacaaggcttttttgttttagaaccctccggagaaacttttaatattgttccgccaaataataaacccaaagaatggtaa

SEQ ID NO: 66676 - protein, 174 aa, Unknown
  Obtained from environmental sample
  misc_feature (1)..(174): Xaa is any amino acid
MEAVQTANPPSFESIWAILDRISEKQEENARQIGKLGSRIGEIIEHLIAPNLREKFRELGYDFPKANPNSDVTDRTNNIHLEIDVMLENGDKALLVEVKTKPTTEDVQDHIKRLKKMRVYADLHGEKRTFLGAVAGAVMTDNVKEYILKQGFFVLEPSGETFNIVPPNNKPKEW

SEQ ID NO: 66677 - DNA, 927 bp, Unknown
  Obtained from environmental sample
  misc_feature (1)..(927): n is a, c, g, or t
atgcaaactttaattttgtcatatgtatattacagaacactagcgccctccaaaggcgcttaccagtgggaaacggcggatcaacagatagaacttacgcgcggtaacaatatgtatatacacggccattgcctcgcgtggcacgagagcgctccaaaatggatgacaggcggaacaagggcggaagttgaaaaaaatttaaaagattatatttctacggtgcttttacattttaagggaaaaataccgtcatgggacgtggtaaacgaggcgataagggacggcctttccgccgccgaggcgtccggggactggagaaaatgcgtaagaaattatcaaaatccctggtacgacaagttaggcccggattatgttgagctttcattccgcgccgcccgcgccgccgacccggatattaccctgtattataatgattacggcctggaggatccaaacaaggcggaagcggtaaggaagatgatccaggatattaacgaccgttataaaaaagaaacaggcggcagccgaaacctgatcgaaggcgcgggttcgcaatcccatatgtttgaatttaaaaaactcaatatgaacaacgcgcgtttatctttggaaaagctcgtcagccttgggattgaaatttccataagcgagctggacttgtcccttatcgcttatgatcgcggcagtggaagggacacggttatgtcccaagcggatgagacagcgcaggcaaaatattacgcggaattatttaaattgtacaaagagtattccagatatataaaaagggtaaccatgtggggcatggatgacggaaccagttggatttccgccgggaatccctgtctctttgactggaaactaaacgccaagaaagccttntacgccgtcagcgccccggacgctttcctcgcggaggcgccgtga

SEQ ID NO: 66678 - protein, 308 aa, Unknown
  Obtained from environmental sample
  DOMAIN (2)...(301): Glycosyl hydrolase family 10
  misc_feature (1)..(308): Xaa is any amino acid
MQTLILSYVYYRTLAPSKGAYQWETADQQIELTRGNNMYIHGHCLAWHESAPKWMTGGTRAEVEKNLKDYISTVLLHFKGKIPSWDVVNEAIRDGLSAAEASGDWRKCVRNYQNPWYDKLGPDYVELSFRAARAADPDITLYYNDYGLEDPNKAEAVRKMIQDINDRYKKETGGSRNLIEGAGSQSHMFEFKKLNMNNARLSLEKLVSLGIEISISELDLSLIAYDRGSGRDTVMSQADETAQAKYYAELFKLYKEYSRYIKRVTMWGMDDGTSWISAGNPCLFDWKLNAKKAXYAVSAPDAFLAEAP

SEQ ID NO: 66679 - DNA, 1302 bp, Unknown
  Obtained from environmental sample
  misc_feature (1)..(1302): n is a, c, g, or t
gtgaattactacgaactgttgaatatagggcgcggcgctgacgccggtgagattaaacgcgcttatttttcagcggttaaactacattcgccggattccgatcccaagggatttaaggcgataaggctcgcctatgaaacgctttacgatcccaaaaagcgcgccgagtatgacggctattttgtcacatcaggcggcgcgcaaaacgatctgctcgcggcccgcagcctcatccgggaaaacaagtacaaacaagccatggaattcctcacggaattgagcggcaaaaatcctgattctacggatgttaaacggcttcttgcagaggtgttatggtaccttaagaaaagcggggccgccgataaaatttgcgaggaactgcttgaacacgatccgtctgactgcgagacgttgctgttacgcgcgaaaatagcgaaatcgcggggatatgcggacaaggccggcggctgttatattgccgcggtcaaagccgatccgtcgaaccccagggcgtggggcggatatatgcgttacgcgctcaaaaacacccctaatgaggttcccaatattttctatagcgccatggaacgggatataaatatgttccgcgatgattatattctttatatagtgggaacgcataacaataatttatttaacagtggggataattgtaaatattatgataaattcgctgagttttttatcaatgataaaagcccggaagaagatatatatccgcaaataatgtcattgattccgcgttttcttgaacaggccgaacttgttccgtttgtagaaaaaatactgcccgcgctggaaaacagcaaacagtacagtgataaagacgaaaagagttttatatatatacggtcggtcataaagctgtttaaacttcaatctgataaacggatacacgacgtgcttaatgacctgacggtatttcttttttatgaagacaaagatgaaaacgaacggttgggaatggaaatttatattgtctataacttgtccctgctgcgcccgtcaataaaagttctcatgcatgaatatccggagttgttcaaacttaaccaggcgttttatctggacgcgctaaatgaaaaaaaagaagattatcttttggataaatatatcgcgatacataaaaagataaggcccggttttaacttttattatgatggtgacgaggatacggaaaatgtaacgcctgttaggcgtgaatctcccaaaatcggacgcaatgacccatgcccctgcgggagcggcaagaagtataaaaaatgctgcggggcaaaatga

SEQ ID NO: 66680 - protein, 433 aa, Unknown
  Obtained from environmental sample
  DOMAIN (414)...(433): SEC-C motif
  misc_feature (1)..(433): Xaa is any amino acid
MNYYELLNIGRGADAGEIKRAYFSAVKLHSPDSDPKGFKAIRLAYETLYDPKKRAEYDGYFVTSGGAQNDLLAARSLIRENKYKQAMEFLTELSGKNPDSTDVKRLLAEVLWYLKKSGAADKICEELLEHDPSDCETLLLRAKIAKSRGYADKAGGCYIAAVKADPSNPRAWGGYMRYALKNTPNEVPNIFYSAMERDINMFRDDYILYIVGTHNNNLFNSGDNCKYYDKFAEFFINDKSPEEDIYPQIMSLIPRFLEQAELVPFVEKILPALENSKQYSDKDEKSFIYIRSVIKLFKLQSDKRIHDVLNDLTVFLFYEDKDENERLGMEIYIVYNLSLLRPSIKVLMHEYPELFKLNQAFYLDALNEKKEDYLLDKYIAIHKKIRPGFNFYYDGDEDTENVTPVRRESPKIGRNDPCPCGSGKKYKKCCGAK

SEQ ID NO: 66681 - DNA, 729 bp, Unknown
  Obtained from environmental sample
  misc_feature (1)..(729): n is a, c, g, or t
ttgaaggaaacattcggcatcaccccggagtcggcggtggatccggatttagctgtcgtccggggcgcggccatacaggcaggcgtattaagcggggtgttaaatgaaaacgcgattgtcctgaccgatatttgcccctacagcctcagcacgaaagcattgacggatgtagggtttggccacctggaatcgttctgtgatattcttataaaacgcaacactaccctccccgcctccgcctcccaaatatacttgactgccttcgataatcagacaatagtgcatattaccgcgtatcagggcgaaagcattgatccagatgaaaattacctgctgaattgttttgaactccgcggcatacctaaagccaaagcgggcaaagaaaagataaatatccgctttgaatatgatttgaacggcattttgaaggttcaggcggaagtagtctcaacgggcaaatcggcggaagtgacggttaacacggcgcagatgggcaaaaaccttgatctttcaaaatggaaggacgcttcctccgcctggaaataccggaagataataagtaaagcggaaaggcttgtaaaggttcatgacggggccgaagacattgaagccgccgccgatgaattgaaaaaagcgcttgttatgaactgggacgacgcgattatcgaaaaacttaagagaatccttaccgacgcgattgacgcaatggaagaggaagacaaggagtga

SEQ ID NO: 66682 - protein, 242 aa, Unknown
  Obtained from environmental sample
  misc_feature (1)..(242): Xaa is any amino acid
MKETFGITPESAVDPDLAVVRGAAIQAGVLSGVLNENAIVLTDICPYSLSTKALTDVGFGHLESFCDILIKRNTTLPASASQIYLTAFDNQTIVHITAYQGESIDPDENYLLNCFELRGIPKAKAGKEKINIRFEYDLNGILKVQAEVVSTGKSAEVTVNTAQMGKNLDLSKWKDASSAWKYRKIISKAERLVKVHDGAEDIEAAADELKKALVMNWDDAIIEKLKRILTDAIDAMEEEDKE

SEQ ID NO: 66683 - DNA, 579 bp, Unknown
  Obtained from environmental sample
  misc_feature (1)..(579): n is a, c, g, or t
atggcggaagacgtgtatttttcgtgccttgatgacccgagtttttcacccagcacaaagtccatgctcgccaacgatttaattaatctatgggacagtggcacggatcaacgcagtatccatcatctaatggccctttcttccctttggaaagccagagattccgctccgcccagttttggaacgatggatggtaacaccgaactattaagaatatccattgatatgggtactgataccgaatgggaagattttctaaaagaagaatccactaatgattatacaagatgggcgcttgaagaattcctttttggtctgtcttatgaagaaattttacaagttcgcggcagattgatacattacggagtattatccgtaaaccatgatgaagtcagatattaccttgattcaaaaccggtctattctgccgtaaacgaacatgatccacgggctatttacgattttttcctcgaaagacgggacgcatgcaccctgcgtaaaagggtaaatgctccgggtccacaacatacattggaagagatttatttaaaataccgtattattctagagtcctgttag

SEQ ID NO: 66684 - protein, 192 aa, Unknown
  Obtained from environmental sample
  misc_feature (1)..(192): Xaa is any amino acid
MAEDVYFSCLDDPSFSPSTKSMLANDLINLWDSGTDQRSIHHLMALSSLWKARDSAPPSFGTMDGNTELLRISIDMGTDTEWEDFLKEESTNDYTRWALEEFLFGLSYEEILQVRGRLIHYGVLSVNHDEVRYYLDSKPVYSAVNEHDPRAIYDFFLERRDACTLRKRVNAPGPQHTLEEIYLKYRIILESC

SEQ ID NO: 66685 - DNA, 438 bp, Unknown
  Obtained from environmental sample
  misc_feature (1)..(438): n is a, c, g, or t
atgggcgagtataaaagaccgagttgggacgaatatttcatggaagtctgtgaagcaatttccaaacgggcaacctgtgacaggggacgctccggttgtgtgattgccaaggacaaacagcttcttgttaccggctatgtgggcgccccggcggggcttccgcattgcgacgaagtcgggcatcaaattaaaaaaatgatccacgaagacggcagggaaaccacccattgcgtcagaaccgtccatgccgagcaaaacgccatttgtcaggcggcaaaacgcggcatttccattgacggagccaccatttattgccgaatgactccgtgcaggacttgcgccatgttaatcatcaactgcggaattaaaagggtcgtttgccaacgccattaccatgacaacgaagactcgcttgcgatgttgaaaaagccggagtaa

SEQ ID NO: 66686 - protein, 145 aa, Unknown
  Obtained from environmental sample
  DOMAIN (7)...(129): Cytidine and deoxycytidylate deaminase zinc-binding region
  misc_feature (1)..(145): Xaa is any amino acid
MGEYKRPSWDEYFMEVCEAISKRATCDRGRSGCVIAKDKQLLVTGYVGAPAGLPHCDEVGHQIKKMIHEDGRETTHCVRTVHAEQNAICQAAKRGISIDGATIYCRMTPCRTCAMLIINCGIKRVVCQRHYHDNEDSLAMLKKPE

SEQ ID NO: 66687 - DNA, 873 bp, Unknown
  Obtained from environmental sample
  misc_feature (1)..(873): n is a, c, g, or t
gtgaagtatctccaaatgtttttattggttttagtattgatgggcattccaatctctggaacgcttgccgcggaagagttgatccatgtagttggaaagggagatacaattttttcgctctcccgtttttatcatgtgacggctgatgagcttatgaaagccaatggcatttcagatccttccaagcttagcgttggaaaaaaactgataataccggttcccgctgacggttctcctttgccgggacaaaattccggatttacatcttccgttattgagaacccgcaaatgtttgctatttacaaggcggttaagggcgacacgcttttcagtatagcgcgcaataatggtattactttacagaaattacaggagataaacggcttttcttctgatcatgtgcttaaaataggcgatgcaattaaggtgccgaagaagggttcgtcttttgggacgcaaggtatttcgcctgcggcaaataccgcggtaatcaaaccgtctacggcaaataagacggcagccccagcggggatttatgctttgcgttggcctgtaacacctaaggatatttcctacatgaccggacaaatgggtgttgttgtagagggtgaaaaacttgaatcagtgcggagtttgacccanggaaatgtggtatcagccggcccgtggcgcaagtttggcagggttgtaattgtagaaacggctgggtggtatttatacatgtacggcggctgtgagactataacagtaaatgtccgcgacaagataacgcccggaatggaattgnaaaaatangtatccatacgatttctgttaaacaacagctcttttttatgggttttcgaaccaaaaatcctatggatccggctttag

SEQ ID NO: 66688 - protein, 290 aa, Unknown
  Obtained from environmental sample
  SIGNAL (1)...(23)
  DOMAIN (101)...(144): LysM domain
  misc_feature (1)..(290): Xaa is any amino acid
MKYLQMFLLVLVLMGIPISGTLAAEELIHVVGKGDTIFSLSRFYHVTADELMKANGISDPSKLSVGKKLIIPVPADGSPLPGQNSGFTSSVIENPQMFAIYKAVKGDTLFSIARNNGITLQKLQEINGFSSDHVLKIGDAIKVPKKGSSFGTQGISPAANTAVIKPSTANKTAAPAGIYALRWPVTPKDISYMTGQMGVVVEGEKLESVRSLTXGNVVSAGPWRKFGRVVIVETAGWYLYMYGGCETITVNVRDKITPGMELXKXVSIRFLLNNSSFLWVFEPKILWIRL

SEQ ID NO: 66689 - DNA, 990 bp, Unknown
  Obtained from environmental sample
  misc_feature (1)..(990): n is a, c, g, or t
atggaagtcagattagagaagacgggaaagcgtcccaagaaattaatagataagtctcaaaaacgaattaagatacagaaggaatctgatccgttggcgttgtacttccgtcaaatttccagattcccgcttttaactttgcaggaagagcaaaatatcggcgaaaaaattataaatcttcgcgcaaaacttaaagaactggaatcggataaaaagaaaaacaaagatgttgattacagtaaggaaaaagccgcccttgacagcgcccttcttcactataaaaactccatgataaacgccaatctgcgccttgtcgtgtccattgccaaaaattaccagcatcgcggactttcgcttttggatttaattgacgaaggaaatatcggtcttattgaagcggttgaacgttttgattacacaagaggctgccgtttttccacttatggcacatggtggattaggcaggctattatcaagagcattggggataaggggcgcgttatccgcataccgattcacatgctcaacactattaaaaaatgctattatgtggcgaaacaacttacgcaggatttagggcgtgatccaaacgaagatgaactatccgagtatttggacgttcctgtttctaaagttaaagaaatagtgaagttgtcccaggagacgacaagtttggacaccattgttgacgatggaaaccttacgcgccttgccgatttaattaaagacgatgcgagagccgaaccgtttgaaatggttttttccatgacattacaggaaaccattggtggaattctctcccagttatccgaaagggagatgaaaataatccaactgcgttttggtctgacgggggaaaacccgcttaccctggaagaaaccggaaaatatctaggcatcacccgcgagcgcgtccgtcaaattcaggaaaaagccgtttggaaacttcgtacattgcacgaattgcgcgagctaagagagaattcataa

SEQ ID NO: 66690 - protein, 329 aa, Unknown
  Obtained from environmental sample
  DOMAIN (29)...(65): Sigma-70 factor, region 1.2
  misc_feature (1)..(329): Xaa is any amino acid
MEVRLEKTGKRPKKLIDKSQKRIKIQKESDPLALYFRQISRFPLLTLQEEQNIGEKIINLRAKLKELESDKKKNKDVDYSKEKAALDSALLHYKNSMINANLRLVVSIAKNYQHRGLSLLDLIDEGNIGLIEAVERFDYTRGCRFSTYGTWWIRQAIIKSIGDKGRVIRIPIHMLNTIKKCYYVAKQLTQDLGRDPNEDELSEYLDVPVSKVKEIVKLSQETTSLDTIVDDGNLTRLADLIKDDARAEPFEMVFSMTLQETIGGILSQLSEREMKIIQLRFGLTGENPLTLEETGKYLGITRERVRQIQEKAVWKLRTLHELRELRENS

SEQ ID NO: 66691 - DNA, 414 bp, Unknown
  Obtained from environmental sample
  misc_feature (1)..(414): n is a, c, g, or t
atgtggattatatttgcgttattatcggcgtttttcgcggctttaacttcaattttggcaaaaatcggtattcaaaatgttaattcaaatttagcgactgcaatcagaaccgttgtcgtacttattatgtcatgggctattgtttttttctccggaaagcaaaatgaaatcgcaaatatcgggaataaaaatttactctttttaattttatccggaatagcgacgggattatcatggctctgttattacagggctttgcaaatcggggaagcgtcaaaagttatacctatagataaattcagtctggtaataggcatggtattggcttttatcgtattaaaagaagcaataacaataaagataattatcggaggcgttctaattactattggcacgtttgttttaatattttaa

SEQ ID NO: 66692 - protein, 137 aa, Unknown
  Obtained from environmental sample
  SIGNAL (1)...(20)
  DOMAIN (11)...(137): Integral membrane protein DUF6
  misc_feature (1)..(137): Xaa is any amino acid
MWIIFALLSAFFAALTSILAKIGIQNVNSNLATAIRTVVVLIMSWAIVFFSGKQNEIANIGNKNLLFLILSGIATGLSWLCYYRALQIGEASKVIPIDKFSLVIGMVLAFIVLKEAITIKIIIGGVLITIGTFVLIF

SEQ ID NO: 66693 - DNA, 2199 bp, Unknown
  Obtained from environmental sample
  misc_feature (1)..(2199): n is a, c, g, or t
atgaaaataaaaattaaactgagccttatgatgatcgccattgtagcggtcgtggcgggcgttattacggtaattcagctaaaacagacttcaaatatcagcatggaattaagcctccgcggactgaattatttagccggagagcaagcccggtactggcaaggaagggaagaaagttatataaagcagttaaccggaattgcggaaataatgagtgaatttgaaatgctgcccgcaaaggaccggagagatctgtatgataatatactgaaggctgtcctgaataataatcccaactttgtccgcatattttccatttggaaaccgaacgccatggacggcatggacagcctttatataggccgcccgggttcaacctcaacggggcagtacgcaatgacatggggcagagatacaggcgagattgaaataaaacccaacctcatcctcgatgaaattaacgcctggatgaacggccccaacgcgctcaagacccgggttgaaaaccccacgccttttaagaataacggaaaagacacttttattgtcagaatgggagtccccataaccagaagcacctccaaagaagtagtcggacacttatgcgttcttatagacatctcggcggtacagtcatcagtggaaaaagccattaaagagaacgacgaaatatcctcaatgtccatttactcaaacaacggatttattatgggaagcctggttccggatcgggtgggaaagatgctgcccgacgtggaaaccatatatggcaaatatctggatgatgtcaacaaggccgttcttgaaggacgggaattcaactgctcaagctattcaaatgttttgaaatcaaacgtgaaaattgaagttgtgcctttccagataggcgattcggacaatacctggagcgtaatgatcgcgtcggcggaatcgctcattctaaaagaggtaaatgaaattaccaaatttaccattgcccttgtggcaatatcccttgtagtggcggcggtaatcgtgtactttgtcctgaacagcaccaccaggccaatcgtcaaggtagcggacacccttagggacatatccgaaggcgaaggcgacctgaccaggactatcgccgtccattcccaggacgaaatcggcgatcttgccctgtacttcaacaaaaccctgcaaaaaatcaaaaacctggttttgatcatcaaaaatgaggcggcaagcctgagcagcgtaggcgctacccttgccagcaatatgacggaaaccgccgcggcgataaatcaaatcaccgccaatatccagagcatcaaggcgcgcgtcattaaccagagcgccagcgttacagaaaccaacgccactatggaacaggttatcggcaacatcaataaacttaacggccatgtggaaagccagagccgcagtgtttcccaggcctcatccgccattgaggaaatggtagccaatatcagttcggttacgaacacgctgatcaataactccaccaatgtaaataccttaaaagaagcctccgaagtaggacgtaacggattgcaggaagtggcctcggacattcaggaaatagcccgcgagtctgaagggcttatggaaattaacgcggtaatggaaaacatcgccagccagaccaacctgctttcaatgaacgcggcgattgaagccgcccacgcgggagaggcgggcaagggctttgccgtagtcgccgatgaaatccgcaaacttgcggagagttccagcgagcagtccaagaccatcggcaatgttttgaagaagataaaatcttcgatggacaagataaccaagtccacagagagcgtactggccaaattcgaggcgattgacacgggcgtcaagacggtggcggatcaggaagataatatccgcaacgctatggaggaacagggcgaaggaagcaagcaaatcctgcaaggtatcagcactttgaacgaggttacccagaatgtaaagggcggttccgaggaaaatgctaacggcagccaggaagtaatgaaggaaagccagaaccttgaaagagtaacccaggaaataaccggcggcatgaacgaaatggcatcgggcgcggatcaggtgaatgttgcggtacacaatgttaatgatctgaccaacagaacccgtgaaggcattaatagtttattgaaagaagtttcacgcttcaaggtggagtaa

SEQ ID NO: 66694 - protein, 732 aa, Unknown
  Obtained from environmental sample
  SIGNAL (1)...(19)
  DOMAIN (324)...(395): HAMP domain
  misc_feature (1)..(732): Xaa is any amino acid
MKIKIKLSLMMIAIVAVVAGVITVIQLKQTSNISMELSLRGLNYLAGEQARYWQGREESYIKQLTGIAEIMSEFEMLPAKDRRDLYDNILKAVLNNNPNFVRIFSIWKPNAMDGMDSLYIGRPGSTSTGQYAMTWGRDTGEIEIKPNLILDEINAWMNGPNALKTRVENPTPFKNNGKDTFIVRMGVPITRSTSKEVVGHLCVLIDISAVQSSVEKAIKENDEISSMSIYSNNGFIMGSLVPDRVGKMLPDVETIYGKYLDDVNKAVLEGREFNCSSYSNVLKSNVKIEVVPFQIGDSDNTWSVMIASAESLILKEVNEITKFTIALVAISLVVAAVIVYFVLNSTTRPIVKVADTLRDISEGEGDLTRTIAVHSQDEIGDLALYFNKTLQKIKNLVLIIKNEAASLSSVGATLASNMTETAAAINQITANIQSIKARVINQSASVTETNATMEQVIGNINKLNGHVESQSRSVSQASSAIEEMVANISSVTNTLINNSTNVNTLKEASEVGRNGLQEVASDIQEIARESEGLMEINAVMENIASQTNLLSMNAAIEAAHAGEAGKGFAVVADEIRKLAESSSEQSKTIGNVLKKIKSSMDKITKSTESVLAKFEAIDTGVKTVADQEDNIRNAMEEQGEGSKQILQGISTLNEVTQNVKGGSEENANGSQEVMKESQNLERVTQEITGGMNEMASGADQVNVAVHNVNDLTNRTREGINSLLKEVSRFKVE

SEQ ID NO: 66695 - DNA, 1449 bp, Unknown
  Obtained from environmental sample
  misc_feature (1)..(1449): n is a, c, g, or t
atgatgcaaaaagtaacactctcagtcgccggaaaggatttagttctggaaaccggcaggatagcaaaacaggcaaacggctctgtttttgcccaatacgcgggttcggcggtaatcgccacagtctgttcctcccatgaatcggtggaaggtcttgactatgtgcctcttacagtcgactataacgaaaaatattacgccgcggggaaaattcccggcggtttcataaaaagggaaagccgtcccaaggacaaggagattcttgtctcccgccttatcgacagacccatgcgtccgctctttgataaaactttcggtcgcgaaattcagttgatcccgacaaccttatccaccgatcaggtaaaccctccggacattctggcgattatcgcctcatccgcggctgtccacatctcggacattccgtttaacggacccgtcgcgggcgtgcgcgtgtgtcaggtggacggacagcttgttgtgaatcccacctatgaacaaatagaaaattctacaatggaaatcatggtcgccggcactaaagacggcatcaccatggtagaaggcggcgcgaaagaagtaagcgaagaactgatgatacaggcgcttgataaagcccacgccatgatcaaggaattttgcgcgttgcaggaaaaactgcgcgagcttgcgggaaaaccgaagcttcccctcaatccgctgccttactctttggaaaatctggatgccatccgcgccgccgcttttccaaaactgcaaaccgcctgcttccttcccacaaaacaggaaaggcacgaaggtattaaagccgttaaaacagaattagcggcgcaacacgccgcgcagcttgaagatgaaaaccaaaagaaactttttaacgcgttattcgaagacatgcagtatgaaatcctgcgctcttcaattttgaataacggaaaacgcgtggacggaagaggtttggaagatatccgtaacattacatgcgaaataggaattttacagcgcacccacggttccgcgctatttacgcgcggcgaaacacaggcgcttgcggtaacgacactggggactgtttttgacgaacagatttacgatgacattgaaggcgataagcgcgaaaactttatgctgcactacaactttcctccttattcagtcggcgaagtcggcagaatgggaacgggacgcagggaaataggacacggtaatctggcgcagcgttccttaaaagcgatgattcccacaaaagatgaattcccgtatacagtccgcgtcgtctctgaaattatggagtctaacggctcttcttcaatggcgtcggtctgcggcggaaccctttccatgcttcatgccggcgtccctatgaaaaaacccgtggcgggcatcgcaatggggtcttatcaccgaaggaaaagccggtcccggggacagattcgccgtgttatctga

SEQ ID NO: 66696 - protein, 482 aa, Unknown
  Obtained from environmental sample
  DOMAIN (145)...(209): 3' exoribonuclease family, domain 2
  misc_feature (1)..(482): Xaa is any amino acid
MMQKVTLSVAGKDLVLETGRIAKQANGSVFAQYAGSAVIATVCSSHESVEGLDYVPLTVDYNEKYYAAGKIPGGFIKRESRPKDKEILVSRLIDRPMRPLFDKTFGREIQLIPTTLSTDQVNPPDILAIIASSAAVHISDIPFNGPVAGVRVCQVDGQLVVNPTYEQIENSTMEIMVAGTKDGITMVEGGAKEVSEELMIQALDKAHAMIKEFCALQEKLRELAGKPKLPLNPLPYSLENLDAIRAAAFPKLQTACFLPTKQERHEGIKAVKTELAAQHAAQLEDENQKKLFNALFEDMQYEILRSSILNNGKRVDGRGLEDIRNITCEIGILQRTHGSALFTRGETQALAVTTLGTVFDEQIYDDIEGDKRENFMLHYNFPPYSVGEVGRMGTGRREIGHGNLAQRSLKAMIPTKDEFPYTVRVVSEIMESNGSSSMASVCGGTLSMLHAGVPMKKPVAGIAMGSYHRRKSRSRGQIRRVI

SEQ ID NO: 66697 - DNA, 699 bp, Unknown
  Obtained from environmental sample
  misc_feature (1)..(699): n is a, c, g, or t
gtgttatctgacattttaggtgaggaagatcacttgggggacatggactttaaagtcgcgggaaccaaagacggaataaccggttttcagatggacataaaaatcgcgggtgtcagtcctgaaattatgcgcaaggctcttgatcaggcaaaaaggggaaggatgcatattctttctataatgaaccagtgtatagacaagcctgtcgaacagatcagcgaatacgcccccaagattgtcactttacggattgacattgataaaatcggagcgcttatcggtcccggcgggaagaacatcaaggcgttatgtgaacaatattcggttaaaattaacacggaggatgacggcaccgtaacgatttttggaaaaagcacaaaggacgcggaagacgcgaaagccgccgttgtcggcatcgcatgcgatccggaagttgacaaaatatacaacggcaccgtaaaacgaataatggattttggcgcgtttgtggagatactgccgggtaaggaaggacttgtccacataagcaaactttcaaggcaaaggatcgcgcaggttacggacgtgttaaaagagggtcagcagataccagtcaagttgctggaaattgacaagcaggggaggctcaatctttcgtacatcgatgcgattgatccatccggcgctcctgaagcaaaaagcaaccaacgcaggaattaa

SEQ ID NO: 66698 - protein, 232 aa, Unknown
  Obtained from environmental sample
  DOMAIN (1)...(53): 3' exoribonuclease family, domain 2
  misc_feature (1)..(232): Xaa is any amino acid
MLSDILGEEDHLGDMDFKVAGTKDGITGFQMDIKIAGVSPEIMRKALDQAKRGRMHILSIMNQCIDKPVEQISEYAPKIVTLRIDIDKIGALIGPGGKNIKALCEQYSVKINTEDDGTVTIFGKSTKDAEDAKAAVVGIACDPEVDKIYNGTVKRIMDFGAFVEILPGKEGLVHISKLSRQRIAQVTDVLKEGQQIPVKLLEIDKQGRLNLSYIDAIDPSGAPEAKSNQRRN

SEQ ID NO: 66699 - DNA, 543 bp, Unknown
  Obtained from environmental sample
  misc_feature (1)..(543): n is a, c, g, or t
ttgacaagcaggggaggctcaatctttcgtacatcgatgcgattgatccatccggcgctcctgaagcaaaaagcaaccaacgcaggaattaatagcggtgtgaatgaagtacttgtaaaagtagttaaaaatgccccgcgtgcggctcttccgaagtacgaaagcgaaggggccgccggtatggatttacgcgccttccttgacgctgatgtttccataccgccccttggaagggtaaaaatcccaacaggtcttaaaatcgaaattccgcagggttttgaggggcaaatacgtccgcgctcgggtttggcggttaaaaaaggcttaaccgtgctaaattcgcccggtacgatagattctgattatcggggggatttagatataatttttataaatttgggcggcgatgatattataattaaagatggggagcgaatcgcccagcttgtcatcgctcccgtttgtagggcgaaccttgtggaggttggcgatcttggcgcaacggcgaggggcggcggcggttttggatctaccggcgcgtag

SEQ ID NO: 66700 - protein, 180 aa, Unknown
  Obtained from environmental sample
  DOMAIN (46)...(179): dUTPase
  misc_feature (1)..(180): Xaa is any amino acid
MTSRGGSIFRTSMRLIHPALLKQKATNAGINSGVNEVLVKVVKNAPRAALPKYESEGAAGMDLRAFLDADVSIPPLGRVKIPTGLKIEIPQGFEGQIRPRSGLAVKKGLTVLNSPGTIDSDYRGDLDIIFINLGGDDIIIKDGERIAQLVIAPVCRANLVEVGDLGATARGGGGFGSTGA

SEQ ID NO: 66701 - DNA, 1494 bp, Unknown
  Obtained from environmental sample
  misc_feature (1)..(1494): n is a, c, g, or t
atggggagcgaatcgcccagcttgtcatcgctcccgtttgtagggcgaaccttgtggaggttggcgatcttggcgcaacggcgaggggcggcggcggttttggatctaccggcgcgtagaataggcgcagaaagcggcgcggacggcggcgttattattggaatggtaatgaaagattttattaatttaattattaattatttccagcggcgaaatgccaattcccttgaaagcaaacgctttttatctaaaaccatattcaattatatattatccgaaatgcttttttcgtttgttatttgtttcggttttttcttttttatcttctttgtaaaccaaattcttcttatggcgaaagaaattctcaccaagcgcgtgccttttgatcaagtcgcgcttttaatacttttttcactgcctacagtaatcgccatgtcagccccgttcgcgtgccttgtcggcactcttatgacagtagggcgtttaacatcagacaatgaaatacttgttatgctctcatcaggcctgtcgtataaaaatgtgtttttccctgccgttacagttggaattattatttctattttatcgttttttacaaatgatatattgcttccgattggtactgttcaatctaacaaattgtggcgcaagattcttgtctctacccccgcgctggaaatggaagctaattctgtaaaaaaattcaaaaataccgtaattgttacaggcggcgtaaaagataatacaattgaaaatctgcttattatagatagaacggaaaacggagagcgcagagttatttcggcaaacagcgcggaactaaaagacggcggaaaagagggtttgagtcttaaccttgattcggcgtttattcattcgtcaaaagaaatttccagagaagattacgattacgccaatacggaaaatttgcagtattgggtttccaactctaatattatgcagcaatatataagcgtaagcccaagagagatgagctcaagggacgttcaatcggcaattaaagataaaaaaaccgatttagccgtaaagttaaacgacaaaaaaataagaatgatgaacaatatgtcatctttggaaaatactttaaggatcggaccgtcaggaagcgattggaaccgcagaaatacaacggtcgccgcttttcaacgcgataccgaatcgttaagagatatgaagagagacagatcgcttattgtttatataatcgagatatacagaaaattttccgttcccctcggcgcgttntgttttgtttttcttgctgtctctctggggttaatggcgaaaaagagcgggcagaccgtggggtttattttcggcaatattatcgccgtgttatactggtctatgctttttatagggcaggcaatgggcttacgcgccggaacgccgccctttttagcgatgtggtctcctaatattttctttttatctataggcattgttcttgccgttattaaggtgcgcaaatga

SEQ ID NO: 66702 - protein, 497 aa, Unknown
  Obtained from environmental sample
  DOMAIN (88)...(493): Predicted permease YjgP/YjgQ family
  misc_feature (1)..(497): Xaa is any amino acid
MGSESPSLSSLPFVGRTLWRLAILAQRRGAAAVLDLPARRIGAESGADGGVIIGMVMKDFINLIINYFQRRNANSLESKRFLSKTIFNYILSEMLFSFVICFGFFFFIFFVNQILLMAKEILTKRVPFDQVALLILFSLPTVIAMSAPFACLVGTLMTVGRLTSDNEILVMLSSGLSYKNVFFPAVTVGIIISILSFFTNDILLPIGTVQSNKLWRKILVSTPALEMEANSVKKFKNTVIVTGGVKDNTIENLLIIDRTENGERRVISANSAELKDGGKEGLSLNLDSAFIHSSKEISREDYDYANTENLQYWVSNSNIMQQYISVSPREMSSRDVQSAIKDKKTDLAVKLNDKKIRMMNNMSSLENTLRIGPSGSDWNRRNTTVAAFQRDTESLRDMKRDRSLIVYIIEIYRKFSVPLGAXCFVFLAVSLGLMAKKSGQTVGFIFGNIIAVLYWSMLFIGQAMGLRAGTPPFLAMWSPNIFFLSIGIVLAVIKVRK

SEQ ID NO: 66703 - DNA, 1401 bp, Unknown
  Obtained from environmental sample
  misc_feature (1)..(1401): n is a, c, g, or t
atgatcgggacaaaaggaacggttgtagccgttaacggcaatatggtaagcgtccgttttgacggtattgtttccatgaacgaggtcggctatgtaaaggttgccgattcaaaactgaagagcgaagttatccggattcgcggcaatatcagtcaactgcaggtttttgaaatcacaaaaggtattaccgtaggcgatgatgttgagtttaccggagacatgctgtcggttgaagtagggccggggttgctgggccaggtttatgacggtcttcaaaaccctctgcctcaacttgcaaaagcggccggttactttctggaaaggggtgtctacattgaccctctgccgggagattcaagctggcagtttacgccaaaggcaaaagcaggcgacaaagtagaacgcgccgatacccttggcacggtgccggaaggttcttttacccaccgcatcatggttccgttttacctttacggctcatacacgtttcatggggtcaagcccgaaggtacatataaaattcacgacacgatcgcggaacttaaagacgaaaagggaaacgccatacaggtaaaattaagcttccgctggccggtaaagcgcgccgtagactgttacgaagagcggcttaaacccgtagaccctatggttacccgcgtccgccttatcgacacattcttcccggtcgcgcgcggcggcacttactgtattcccggccccttcggcgcgggcaagacggttctccagcaaataacaagccgtttcgcggacgttgacatcgtaattgtcgccgcctgcggtgagcgcgccggcgaggttgttgaaacccttaaagagttccccgaattaaaagacgaaagaacaggccgctccctcatggaacggactatcattatttgtaatacgtcctccatgccggtcgccgcgcgcgaagcgtcggtttacacggctgtaacccttgccgagtactacaggcagatgggtcttcacgtccttcttctcgcggactcaacaagccgctgggcgcaggccatgcgcgaaatgtccggccgccttgaggaaatccccggtgaggaagcgttcccagcctacatggaatctacaatcgccaacttctacgaaagagcgggcattgtgcgcctgcgcgacggaagcctcggctccgtaacaataggcggcacggtaagcccggcgggcggtaactttgaagaaccggtaacgcaggcgacattgaaagttgtcggcgctttccacggcctgtcccgcgagcgctccgacgcccgcaagttccccgccattcaccctatggattcatggtcaaagtacaagggaattattccctcagaaaaagtggaatacgcgcacggctttatgcgccgcggcaggaagtcgaacagatga

SEQ ID NO: 66704 - protein, 466 aa, Unknown
  Obtained from environmental sample
  DOMAIN (8)...(72): ATP synthase alpha/beta family, beta-barrel domain
  misc_feature (1)..(466): Xaa is any amino acid
MIGTKGTVVAVNGNMVSVRFDGIVSMNEVGYVKVADSKLKSEVIRIRGNISQLQVFEITKGITVGDDVEFTGDMLSVEVGPGLLGQVYDGLQNPLPQLAKAAGYFLERGVYIDPLPGDSSWQFTPKAKAGDKVERADTLGTVPEGSFTHRIMVPFYLYGSYTFHGVKPEGTYKIHDTIAELKDEKGNAIQVKLSFRWPVKRAVDCYEERLKPVDPMVTRVRLIDTFFPVARGGTYCIPGPFGAGKTVLQQITSRFADVDIVIVAACGERAGEVVETLKEFPELKDERTGRSLMERTIIICNTSSMPVAAREASVYTAVTLAEYYRQMGLHVLLLADSTSRWAQAMREMSGRLEEIPGEEAFPAYMESTIANFYERAGIVRLRDGSLGSVTIGGTVSPAGGNFEEPVTQATLKVVGAFHGLSRERSDARKFPAIHPMDSWSKYKGIIPSEKVEYAHGFMRRGRKSNR

SEQ ID NO: 66705 - DNA, 594 bp, Unknown
  Obtained from environmental sample
  misc_feature (1)..(594): n is a, c, g, or t
gtggcatcatattattacctgatggcgcagcttccttatctcatctacgagcaaaagccacctatatcgtccgcgggttttaaggcgctcgccgagacccaattaagcgaagaagacgccgctcttatgcggtatctttcgcttgatccggatccggaaggcaagtttccgtcttatgcggagcttgcccctcctaccggttgcgactttatcgacagttggcgggaatgggaacgctcgttaaggcttaatcttgccaaaaaccgcgctgttaaacttaaaagggataatctttccgcgcttgaaccgcctttttatcctgtggaagctgttgccgccgcagtaaagtcggtgaacgctgaaatatctcctttagaaggagagttccttatcgataaggcgcgctggaacgccatagaatcattggcaggtaataactattttgatcgcaacagcgtttatgcatatttccttaaacttatgttgattgagcggcgtgtgtcgttcaatactgaaagaggatttactgaatataaatcattgtacgcttctattattgaaagcgagcataattccctgggggttcctaaatga

SEQ ID NO: 66706 - protein, 197 aa, Unknown
  Obtained from environmental sample
  misc_feature (1)..(197): Xaa is any amino acid
MASYYYLMAQLPYLIYEQKPPISSAGFKALAETQLSEEDAALMRYLSLDPDPEGKFPSYAELAPPTGCDFIDSWREWERSLRLNLAKNRAVKLKRDNLSALEPPFYPVEAVAAAVKSVNAEISPLEGEFLIDKARWNAIESLAGNNYFDRNSVYAYFLKLMLIERRVSFNTERGFTEYKSLYASIIESEHNSLGVPK

SEQ ID NO: 66707 - DNA, 1704 bp, Unknown
  Obtained from environmental sample
  misc_feature (1)..(1704): n is a, c, g, or t
gtggaagaaaaaacattactgacaattgaagaataccaggcgcggatttccgaactggaaaaaacagtaaggaaaaaagacagggaaatcagcaggctgcaaacaggcattgagcaggaaaaaatattcgcgaatgtaaaagccaacatggttgcggccaaaacagtagcccagcggataagggatcattatttacagctccttcttgataacagttccgacataataatctgtttaaataatttaaagcgtattgttttttgctccaaagtccttataaaacttgccggcgcggaggcggattcggaaagcggcagacaaattgatgaattcttaaagggtgtctgcgatgacaggtgtattgaaaccattaacgccaacctttccgaagtatttgccggcaatggggcgcggactgtcccgctggagatctgttttagcagcagtaccgaggtcaggcaatgcgaaattgattttattccgatgagttcaagtgaaatcggcaacgaaggggccatggtgattttcaatgatgtcaccgccatcgaacacgcccgcgaggacgcggaactggccagcgccgccaagtcggaatttctgctggacatgagccacgagatgcggacgcctcttaacgcaatcataggcatgaccgccattgccagaaaatccgacagcgccgaacgcaaggaatactgccttaaaaaaattgaggatgcctccacacatctgctggatgttatcaatgacattctggatatatcaaagatagaaacgaacaagctggaattgtcccttgaaagttttgtttttgagagaatgatccagaaagcggttaatatcatcaattaccaggtggaggaaaaacaccagtatttttccgtgaatctaaacgataatattccccataccctgacaggcgacagcaagaggctgatacagattataacaaacctgctttccaacgccgtgaaatataccccggaaggcgggagtgtgcatcttgacgcgcggttggcggctacagaaaatggcgttcatacgctgcagattgaggttacagacagcgggattggaataagcgccgagaatcagtcccgtcttttccattcttttcatcagacagacgccaacagttcgcacaaatttggcgaggccggcatgggccttgctatttcaaggcatctggttgaattgatgggcgggcgtatctgggttgactccgagcttgggatgggcgcgacctttggctttaccttcctggcaaagcagggcgatgagagtgaaaataaaattctttcaaataatattcactgggccaataaacgcgcgcttgttgtggacgacgccccccatattctcgtatacttccgcggcgaggcctcccggctctctatttcctgcgatgtcgtgttaagcggggaggcggcgcttgagctgattgagaaaaacggcctgtacgacatttactttatcgactggaagatgcagggcatgaacggcattgaaaccgccgccaggatcagggaactgggcgcgggcaagtccccaatagtcttaatgatctccgcggccgagcggaagctggcggaggatgacgcaaaaaaagcgggcattgaacattatgtgcagaagccgctgttccgttccgatattattgactgccttaacagctgtttcgttccggacgcgcggaaatcctag

SEQ ID NO: 66708 - protein, 567 aa, Unknown
  Obtained from environmental sample
  DOMAIN (442)...(557): Response regulator receiver domain
  misc_feature (1)..(567): Xaa is any amino acid
MEEKTLLTIEEYQARISELEKTVRKKDREISRLQTGIEQEKIFANVKANMVAAKTVAQRIRDHYLQLLLDNSSDIIICLNNLKRIVFCSKVLIKLAGAEADSESGRQIDEFLKGVCDDRCIETINANLSEVFAGNGARTVPLEICFSSSTEVRQCEIDFIPMSSSEIGNEGAMVIFNDVTAIEHAREDAELASAAKSEFLLDMSHEMRTPLNAIIGMTAIARKSDSAERKEYCLKKIEDASTHLLDVINDILDISKIETNKLELSLESFVFERMIQKAVNIINYQVEEKHQYFSVNLNDNIPHTLTGDSKRLIQIITNLLSNAVKYTPEGGSVHLDARLAATENGVHTLQIEVTDSGIGISAENQSRLFHSFHQTDANSSHKFGEAGMGLAISRHLVELMGGRIWVDSELGMGATFGFTFLAKQGDESENKILSNNIHWANKRALVVDDAPHILVYFRGEASRLSISCDVVLSGEAALELIEKNGLYDIYFIDWKMQGMNGIETAARIRELGAGKSPIVLMISAAERKLAEDDAKKAGIEHYVQKPLFRSDIIDCLNSCFVPDARKS

SEQ ID NO: 66709 - DNA, 411 bp, Unknown
  Obtained from environmental sample
  misc_feature (1)..(411): n is a, c, g, or t
ttgagtcccggcgaattcaaagagattgaagcggccaggctgcacggcgaccttaaagaaaacgcggaatacatcgccgcgaaggaaaaacaggtcctgcttaacacgaccgcggaaaggctcaaggaagatattgaccgcgcccagttgtttgatccgggagccgttgattcttccaaggtgtcattcggaaccgtcgttgtcctgcacaaccacagcaaggacagaaaagaagagtacaccattctgggcccatgggagtctgaccccgagaacaacgtgatttcctatctggccccctttgggaaaataatgatgggcagggccgaaggcgaacaattcaattttaccagcgacggcgagaagatttcttacacggtagagagtataagaccggcggttattaactag

SEQ ID NO: 66710 - protein, 136 aa, Unknown
  Obtained from environmental sample
  DOMAIN (1)...(50): Prokaryotic transcription elongation factor, GreA/GreB, N-terminal domain
  misc_feature (1)..(136): Xaa is any amino acid
MSPGEFKEIEAARLHGDLKENAEYIAAKEKQVLLNTTAERLKEDIDRAQLFDPGAVDSSKVSFGTVVVLHNHSKDRKEEYTILGPWESDPENNVISYLAPFGKIMMGRAEGEQFNFTSDGEKISYTVESIRPAVIN

SEQ ID NO: 66711 - DNA, 1473 bp, Unknown
  Obtained from environmental sample
  misc_feature (1)..(1473): n is a, c, g, or t
atgaaaaaagcgtttttttacttttcagtcggtattgccgcattatcagtattgttaataattttcctcgcgaccggattatggaagcagattttttatcccagatcggctgaaaatgttaaaacaaaaatagttaccccgagagaggcggtcatgttttcctcaaccggacaggccgggcaggtttcatgggaagaaaacatcagcacaaaagtgcctttggaagacggggaaacggttatcgccgtccttaacaaggaaagcgaagaaaatatgccggaagagcaatttgtagtttatcgcacgccgaatgccaaagaccccatgtttattacatttataggctatgacgaacaagcgcgcggctacaaacgtttttggaacgcccccaccacggcaagccagggtgaaaccatcactgttttcagtcaggatttaatcggtgacagaaacaactgcataattgtaagcggaatgaacgataaaaatgagcatacaatgactgtattcaggcgcagtcccggaagggcggcgaacattccctataaaaaaatagcggaattacaaattgccggttctataataattcaggaaaccgtacgttctttggcgtaccagcagggattaaccaaaggacagagttttaatattgcggcatacggtcaggacagcgcatcggtcaatattctggatcaaattgaaaccatctattcgtttaatcccaataccgaacagtacgagcggattagcgtatcaagaatacccggttcgcaaattgaacagcgccgaatcagagaactgctgagcggaactcccggcgtttttgaaaaatttataaatgacctttggtactatgtaagccctcagggcactatagacgcgaagcagtatatttattttgatccttcaaaaaaggaaatcatatttttcggcgacgaggcgcagcaagtcttcctttggcaaaccgctaccaaaacccgttacggtttatatgtgagaagccagaatatatcgataagcacgctgctgcgttttgttgatattgaacttgagtcgctggacagcattaaactgcgtgttatagaagatgtcaggcttagaatcacggcaaacacaacatgggacggttcctaccgcagagcgggagctgcgaattttaaggaaaacctaacccagttaagaccgacaatcgacggggtttttgattcgtcatggggcagaattcaattttacaattcgggcgactatacgattacttccgtgggcgttgtaaaaaagggacgctatgttttctataaagtaaacaatatggacctgttggaattgcgcccggaagaaggcgatgaaaaccgtcttgtttataaagccgaaaacgccgcaggagtacttctgctctcccgcgttaaggtgggaataaacggcgttcaagatttacttgagccgcccatcacgcttaccaagcctattaattaa

SEQ ID NO: 66712 - protein, 490 aa, Unknown
  Obtained from environmental sample
  SIGNAL (1)...(26)
  misc_feature (1)..(490): Xaa is any amino acid
MKKAFFYFSVGIAALSVLLIIFLATGLWKQIFYPRSAENVKTKIVTPREAVMFSSTGQAGQVSWEENISTKVPLEDGETVIAVLNKESEENMPEEQFVVYRTPNAKDPMFITFIGYDEQARGYKRFWNAPTTASQGETITVFSQDLIGDRNNCIIVSGMNDKNEHTMTVFRRSPGRAANIPYKKIAELQIAGSIIIQETVRSLAYQQGLTKGQSFNIAAYGQDSASVNILDQIETIYSFNPNTEQYERISVSRIPGSQIEQRRIRELLSGTPGVFEKFINDLWYYVSPQGTIDAKQYIYFDPSKKEIIFFGDEAQQVFLWQTATKTRYGLYVRSQNISISTLLRFVDIELESLDSIKLRVIEDVRLRITANTTWDGSYRRAGAANFKENLTQLRPTIDGVFDSSWGRIQFYNSGDYTITSVGVVKKGRYVFYKVNNMDLLELRPEEGDENRLVYKAENAAGVLLLSRVKVGINGVQDLLEPPITLTKPIN

SEQ ID NO: 66713 - DNA, 510 bp, Unknown
  Obtained from environmental sample
  misc_feature (1)..(510): n is a, c, g, or t
gtggccattggcgagatcggcctggactattaccggaaattcggcgataaaaaatcgcaaatcgaactgtttattacgcagcttgacctggccgccaagctgaatatgcctgtaatcatccataaccgggacgcaggccacgacgtgctggaaatccttcgcgatcgcctgccgcccagagggggagtattgcattgctattccgaggatgccgcttatgccaaggaagcccaaaagctgaacctgtacttttcctttgccggaaaccttacctacaaaaatgcccgtaacctccacgagacgattccggaactgcccgttgaccggctccttatcgaatcggaaagcccgtttatggtgccgaccgggcaaaagggcaagcgcaatatgcccaaatatctgcccgaaacctgtctgtgtctcgccaaaatgctggatatggagcccgaagcggccgcggcacagctttgggagaacgccaacagattcttcggccttccgaatgagtga

SEQ ID NO: 66714 - protein, 169 aa, Unknown
  Obtained from environmental sample
  DOMAIN (1)...(165): TatD related DNase
  misc_feature (1)..(169): Xaa is any amino acid
MAIGEIGLDYYRKFGDKKSQIELFITQLDLAAKLNMPVIIHNRDAGHDVLEILRDRLPPRGGVLHCYSEDAAYAKEAQKLNLYFSFAGNLTYKNARNLHETIPELPVDRLLIESESPFMVPTGQKGKRNMPKYLPETCLCLAKMLDMEPEAAAAQLWENANRFFGLPNE

SEQ ID NO: 66715 - DNA, 1425 bp, Unknown
  Obtained from environmental sample
  misc_feature (1)..(1425): n is a, c, g, or t
atgtcccttaactggaaagaaattgacctgatcctcgaggagcttgatctgccgggttcgcaaattcaaaaggcggcgcagagcgcttttgatgtaatcggcctgcgcgtgcacaagagaggcgttacgcgacaactgctcatcgcgctgagcccgggcgcctgccgtatgcatgaaacttttaagccttttcccaaaagcgacaagccgttgaggtttgcccagttcctcaactcaaggattgtcaacggctggatagaggaagcggagcagctgggaacaaaccggattatccggctgcttgtgagaaaaggggaattcagctacaacttgtacgtcaggctgtggtcaaacgccgcgaattttatcgttactgacgaagacgggaacgtgttagacgcaatgcgacgccagccgaaaaaaggggagataaccggcgggcattacgtcccccccgcggagcagaaagaaaacgaaaaccgcgagtacgcgattcgggaactgccggaacttgacggaaataattctttcaatgccaaaatcgacgccttttacgcggagaagggcggcgctttttccctggaagcgctgaaggaacaggcgcggcgaaactgcgagggcagcatcgggcgcctgcaggcggcattggaaaagctgaaagcaaaagaagcggactatgcctcggcggacaggctacgggaatacggtgacattatcctcgccaatattgcggcgatacagccgggcgatgaatggcttgaggcggaaaatttttatgctgagggaaaaatccgaataaaacttgatccccacgcgcgcccctccgcgcaggctgaactgtattacgagcagtacacaaaagcgaaaagcggccttgaaaatatccgcgccgaaataacagccggccagcaggagctctatgaagttgaaaagaaactggcggcgcttcttgccgaggacaatcccctggttctggcaaagctccttaaatcacgcgctgtaaaaccccatcccgctgcttcgcaggataaaaaaaggcccggcctgagttttcggcgcgaggaatggctgttaattgtaggcagggacgcctcggaaaacgataccttgcttcgccttcatgtaaagggaggcgacctgtggcttcacgccagggattttcccggctcttatgtgtttatcaaacaacgtcccggcaagagcttccccctggatatacttttagacgcgggaaatctggcgattttctactcaaaaggaagaaacagcgccgaatgggacctgttttataccccggtaaaatatctgcgccgcgccaaaaacggccccaaggggctggtaattcccacgcaggagaaaaacctgcacatcaagcttgatgaaaaacggctaaaggaactggaatcctgccgggttgaaaaatag

SEQ ID NO: 66716 - protein, 474 aa, Unknown
  Obtained from environmental sample
  DOMAIN (1)...(347): Fibronectin-binding protein A N-terminus (FbpA)
  misc_feature (1)..(474): Xaa is any amino acid
MSLNWKEIDLILEELDLPGSQIQKAAQSAFDVIGLRVHKRGVTRQLLIALSPGACRMHETFKPFPKSDKPLRFAQFLNSRIVNGWIEEAEQLGTNRIIRLLVRKGEFSYNLYVRLWSNAANFIVTDEDGNVLDAMRRQPKKGEITGGHYVPPAEQKENENREYAIRELPELDGNNSFNAKIDAFYAEKGGAFSLEALKEQARRNCEGSIGRLQAALEKLKAKEADYASADRLREYGDIILANIAAIQPGDEWLEAENFYAEGKIRIKLDPHARPSAQAELYYEQYTKAKSGLENIRAEITAGQQELYEVEKKLAALLAEDNPLVLAKLLKSRAVKPHPAASQDKKRPGLSFRREEWLLIVGRDASENDTLLRLHVKGGDLWLHARDFPGSYVFIKQRPGKSFPLDILLDAGNLAIFYSKGRNSAEWDLFYTPVKYLRRAKNGPKGLVIPTQEKNLHIKLDEKRLKELESCRVEK

SEQ ID NO: 66717 - DNA, 966 bp, Unknown
  Obtained from environmental sample
  misc_feature (1)..(966): n is a, c, g, or t
ttgaaaaatagtttttttttcaatatcattagagcatggcagttcggaaaacacaataccataaaaaccgctaccagaaaaaccacgaagaaaccaccctcgaaaccttctaccaaaggcgcggggactcatatgcccatatcggttgttttccggatttttttgttaatcgtaattataatcgctttttttatgctcttgccggtaattaaaaatttaagactcaaggcaaaggcgacggaacagggaacaggtaacagggaacaggtaacagagagcagggaacagggagcagagagcagagagcagggagcagagaagaaagaagagggaaagaaaccacagtctgaaaaatcggtagatccagtgcagccttcctcgccaaagatgccggaaaaagagccggagaaagcgcctgttaacaaagagccggtatcacccgccgagcgagcgaaagcgagcgaaggttcccctccggagaaaaaaccgcagaccgaaaaaccgacaactcccgctcagccttcttctccgcctgtacctgtttcaacgccgcctgtcaaacctgtagaaagccgtggaagcatctatcttatacaggaatcaaacaagattctggtaaaagtgaacaggaaccttaatcctaacacgcccctgacggacagcattaacgcgttgcttgcagggcccacccctgatgaaatcatgcgcggcatagaaagttttgtgcccgaaggctcaaggctattaaaaccgccgacaattataggaagcacagtccgccttgattttaatcaggagttcaggtacaaccagcgtggcagggaaggctgtgaagcccagataaagcaaattgtctggacagccacagagtttcccaatatcaaggatgtgcagtttcttatcgagggaaatatagtggactttcttagcgaaggcgtagtaattaaaaaccccatcggaagatga

SEQ ID NO: 66718 - protein, 321 aa, Unknown
  Obtained from environmental sample
  misc_feature (1)..(321): Xaa is any amino acid
MKNSFFFNIIRAWQFGKHNTIKTATRKTTKKPPSKPSTKGAGTHMPISVVFRIFLLIVIIIAFFMLLPVIKNLRLKAKATEQGTGNREQVTESREQGAESREQGAEKKEEGKKPQSEKSVDPVQPSSPKMPEKEPEKAPVNKEPVSPAERAKASEGSPPEKKPQTEKPTTPAQPSSPPVPVSTPPVKPVESRGSIYLIQESNKILVKVNRNLNPNTPLTDSINALLAGPTPDEIMRGIESFVPEGSRLLKPPTIIGSTVRLDFNQEFRYNQRGREGCEAQIKQIVWTATEFPNIKDVQFLIEGNIVDFLSEGVVIKNPIGR

SEQ ID NO: 66719 - DNA, 834 bp, Unknown
  Obtained from environmental sample
  misc_feature (1)..(834): n is a, c, g, or t
gtgcgcgggccgaacatggcaattgtgtggagtgatcgtggtcagggtgtccgcgcgcctgtagtattttacaaccgttccaacgaggcggcccagcagcttgcgccgggcagttttgactgggacgcgatttttggcgcaacagggcagtcaaaaattcgctggttccactcaggcggtattttcagcgccctttcgccgaccacttcacagctcgttatcgaggcgatgcaggccgcgaagaaggccggcgcggtggtatcattcgatctgaactacagggccaaactctgggcagtcgcggcggcggagcagggcaaaagcgccgctcaagccggcgaggaagcggccaaaaccctgcggaaaatcgcaggttatgtggacatattggtcggtaatgaagaggatctgcagaaaggacttggcctaaaaggtcaggatgtggaagccaaaggctctctcgatccatcggcgttttttaagatgatcgaaaacgttaccaaggattttcccaatatcaaggcggtggcaactactttgcgtgaggttcattccacgaaccgccacacatggagcgccgtgctatggattgacggcaagcagtaccaagcccccaccaccgaacttgatgtctacgacagggttggcggcggcgatggttttgccgctggattgttctacggccttttatccggcaaaagccacgaggaagccctgcgccttggctgggcgcacggagcgatgttgaccaccacgcctggcgatacctcaatggtcagcctggatcaggtagaagcgtttgccaaaggcggttcagccaggattcagcgttag

SEQ ID NO: 66720 - protein, 277 aa, Unknown
  Obtained from environmental sample
  misc_feature (1)..(277): Xaa is any amino acid
MRGPNMAIVWSDRGQGVRAPVVFYNRSNEAAQQLAPGSFDWDAIFGATGQSKIRWFHSGGIFSALSPTTSQLVIEAMQAAKKAGAVVSFDLNYRAKLWAVAAAEQGKSAAQAGEEAAKTLRKIAGYVDILVGNEEDLQKGLGLKGQDVEAKGSLDPSAFFKMIENVTKDFPNIKAVATTLREVHSTNRHTWSAVLWIDGKQYQAPTTELDVYDRVGGGDGFAAGLFYGLLSGKSHEEALRLGWAHGAMLTTTPGDTSMVSLDQVEAFAKGGSARIQR

SEQ ID NO: 66721 - DNA, 1656 bp, Unknown
  Obtained from environmental sample
  misc_feature (1)..(1656): n is a, c, g, or t
ttgattcatatccaaacgcttgggatatgggacaagggactagggattagggggttttgggagtactgcggcgcaggcactgcctccaccaaccagctcaacgcgaacctctggaagaacgagtactgcttccgcggcgacgacgcgggctacaccgccaccgtccccgcctacaccccgaaagtggctgcctgcccgggcggcaagcacggcctcacccaatacaagcacagcgagccggcctggatgagatgcgagaaggatgccggtcctggcggcggctcctgcacagcggacaactacgccgcgtgcacagacccaggcgactgcgccgcgatcaccacctcgacaggcccatgcagcacggaaggctgctacgaatgggataccaccgatccatccaatcccgtctgcgctataaacacaaccacccagcaatatgcctgcagccagtacagcggcggcgtttgggacgacgaaaacgagatatgcaccgccgatatcgccgaaggctcatgcaatgctactggtacgactggaacgactcccgacttcgactttagccaaacatggacagcgatcggcacctgctcaaagttagatgtggatgcatcagaaagccagagcagccttaacgacaactgcgacgttatcaaggcaggcggcggctgggcaacaaccgaaggcgaatgcatctattcccacctcaacaccagccaatgcacaggccttagcggcactatggaatcattcggcacctgcaaatatgataatgcctccttagccaacgcaaccggcacgtgctcagacattggctccggcgacggctacacagccacctaccgagccaccgaaggcgtgtgcgtctggaaagacgtagcggcaggagcaggcggaactcagggttgcacttcaataaaggcaggccttggctcaggcgactggacagcaaccgaaggcaaatgcacttggtctggcttaacatcggcagtttgcagcgcatcgggaacagattcttggaatggtaataatgatgcagcagcagccacaggcatttgcatagcagcgaatgatgaagatgtggcatcagatgcttgcactaattcttctgatacttggattgagaccaccccagcagtcgaagagactggcacttgcgtaaagacttctggcagctatgcttctacttgtcctgccctnggcggtgtcagcggctcacaagaagcgaccaaaggcaaatgcgaagaaatcatcacctcttttgcaggcacccagcttgctgtcagcgattgcggcggcagcgcgccagctgacgctactgaaagcggtgacaccaaagcagaatgcacctggacaaacgtatcagcagatgcttgcacagcagtaggagcagcaagcttggaattaattcctgctccaaccgacaaatgcgtagtgacagttgatagcggaacagagtttagcaatactcgttgcgccaccatcctaagcgatgcaaccttacctactggaaccagttccttcttgcacaccaaaggcacctgcgcttggctaggcataactcaggatacttgctcttctgagattagcggcgacgactttgatgatagcgacggagatggcacctgcaaggtagatttgacaccagcaccataa

SEQ ID NO: 66722 - protein, 551 aa, Unknown
  Obtained from environmental sample
  misc_feature (1)..(551): Xaa is any amino acid
MIHIQTLGIWDKGLGIRGFWEYCGAGTASTNQLNANLWKNEYCFRGDDAGYTATVPAYTPKVAACPGGKHGLTQYKHSEPAWMRCEKDAGPGGGSCTADNYAACTDPGDCAAITTSTGPCSTEGCYEWDTTDPSNPVCAINTTTQQYACSQYSGGVWDDENEICTADIAEGSCNATGTTGTTPDFDFSQTWTAIGTCSKLDVDASESQSSLNDNCDVIKAGGGWATTEGECIYSHLNTSQCTGLSGTMESFGTCKYDNASLANATGTCSDIGSGDGYTATYRATEGVCVWKDVAAGAGGTQGCTSIKAGLGSGDWTATEGKCTWSGLTSAVCSASGTDSWNGNNDAAAATGICIAANDEDVASDACTNSSDTWIETTPAVEETGTCVKTSGSYASTCPALGGVSGSQEATKGKCEEIITSFAGTQLAVSDCGGSAPADATESGDTKAECTWTNVSADACTAVGAASLELIPAPTDKCVVTVDSGTEFSNTRCATILSDATLPTGTSSFLHTKGTCAWLGITQDTCSSEISGDDFDDSDGDGTCKVDLTPAP

SEQ ID NO: 66723 - DNA, 531 bp, Unknown
  Obtained from environmental sample
  misc_feature (1)..(531): n is a, c, g, or t
gtgtgcgcccgaacccgctcttttaacggaatagctaaaattgagcgcggcatcgtagtagacgacaaatccgagacaactgcgcaaaacatttatgctgcgggtgattgtacacaaacatctgatatctcaagcgggcagagcaaaatcatggcgcttttacctaatgcctatatgcagggcgagtgcgccggggtcaatatggcgggcggcagtatgagtttcaacaaggcaatcccaatgaacgcaatcggatttttcggcttgcacatcatcacagcgggcaactataccggagacatctatgctcaaacagataatattaattacaaacgtctgtattacagcaataacaagcttaacggttatatacttatcggtaatgtggaaaaagccggaatttatacaagccttatccgggaatgtacaccgcttgacacaatcgactttgcgcttgtctgtgaaaagccggggcttatggtgtttacaaaagaggatcgaatggtaaagttaggaggcgcggcatcatga

SEQ ID NO: 66724 - protein, 176 aa, Unknown
  Obtained from environmental sample
  misc_feature (1)..(176): Xaa is any amino acid
MCARTRSFNGIAKIERGIVVDDKSETTAQNIYAAGDCTQTSDISSGQSKIMALLPNAYMQGECAGVNMAGGSMSFNKAIPMNAIGFFGLHIITAGNYTGDIYAQTDNINYKRLYYSNNKLNGYILIGNVEKAGIYTSLIRECTPLDTIDFALVCEKPGLMVFTKEDRMVKLGGAAS

SEQ ID NO: 66725 - DNA, 354 bp, Unknown
  Obtained from environmental sample
  misc_feature (1)..(354): n is a, c, g, or t
atgatctcagcgcagaattttaatttcagagaattaaacagacggataaaaactgccaaagaaaccgtttattacatagacgattgtttcgggcaaagatatataggcagcggcatgagcggtaaacacctaactataaaaggaacgccgggaaacgcgctgggagcttatctggacggcggaataattgaggtacacggcaatgcgcaggatgctgtcggggatacaatgaacgagggtaaaatcatcattcacggtaatgctggcgatgcgctcggttacgccatgcggggcggttgtatttttgttccgggcactgcaggtatagaacgggtatcacatgaaggagtataa

SEQ ID NO: 66726 - protein, 117 aa, Unknown
  Obtained from environmental sample
  misc_feature (1)..(117): Xaa is any amino acid
MISAQNFNFRELNRRIKTAKETVYYIDDCFGQRYIGSGMSGKHLTIKGTPGNALGAYLDGGIIEVHGNAQDAVGDTMNEGKIIIHGNAGDALGYAMRGGCIFVPGTAGIERVSHEGV

SEQ ID NO: 66727 - DNA, 375 bp, Unknown
  Obtained from environmental sample
  misc_feature (1)..(375): n is a, c, g, or t
atgaaggagtataaggaaaagaaaccggtaatcgtcattggcggcaaggcggggagttttctgggtgaatatcttgcaggcggactgattgtggtgctgggcatcgagtctcaagatattccggtctggtattttacgggaaccggtatgcacggcggaaaaatctttataaggacagataaagaactcgcttctcttccggagcaggttattgctgaaatagcaaccgataatgatttgcaggagattgcgcagtatgtcggcgagtttgccgaatattttaacgtagatgcacagaagcttatgaaagacagattttatgttttgagacctaatgccagaaatccgtataaacagttgtatactgcgaattag

SEQ ID NO: 66728 - protein, 124 aa, Unknown
  Obtained from environmental sample
  misc_feature (1)..(124): Xaa is any amino acid
MKEYKEKKPVIVIGGKAGSFLGEYLAGGLIVVLGIESQDIPVWYFTGTGMHGGKIFIRTDKELASLPEQVIAEIATDNDLQEIAQYVGEFAEYFNVDAQKLMKDRFYVLRPNARNPYKQLYTAN

SEQ ID NO: 66729 - DNA, 1815 bp, Unknown
  Obtained from environmental sample
  misc_feature (1)..(1815): n is a, c, g, or t
atgtgcggtatttttggttatgtagggaatgaaaacgctgttccaattataattgatgggttaaaaaaacttgaataccggggatatgattcagccggtattgctgtttacggtgagaatggtttaggtgtcgtaaaacaaaaaggacgcttggctgcgctggaaaccaggctgtcagaaggtacgctttcaggacacatagggatcggtcatacccgctgggcaacgcatggagagccatctgacataaactctcaccctcatattggaagtaaaaacaaaatcgcagttgttcataacggtataatagaaaattacggttatttaaaagaacgtcttgaacattggggggtaacctttgcttcgcaaaccgacagtgaagtaatcgctcagcttgccgaacattactataacggggatttactggatacggttatccacgtctcaaacgctttggaaggctcctatgcgttaggcgttatgtgcgttgatgatccggacatccttatagccattaaaaaagacaatcccctgataatcggcgtatcagatcacggaaactttattgcgtctgatgtacctgctgttttgaagcatacaaataaggtatgttatctgaacgacaaggaaattgccgtgctgcgtgataaaagcgtagagtttttcaatattgacaaagaaccgcttgaaaaaccgcttgaaacgataacatggaatcttgacagcgccgaaaaaggcggctatccgcatttcatgctaaaggaaatcatggagcaacctaaaatcctgcgtgaaacgattaattctgtgataaaatccggtaattataaaagtatttttgataacattgatgtttcgcgttttaccaaaattgtaataaccgcctgcggttcggcttataatgccggggttgtagctaaatacgtgtttgagcggttgtgcaggtttccatcaatcgaaacggagcttgcgagcgagttccggtataaagatgccgttattgacgaaaaaacacttgttattttggtcagtcagtccggtgaaactgcggatactatagcggccatgagagaggcaaaaagcaaaggcgctgttaccttgtcaattgtcaatgtggtaggcagcactatcgccaaggaagcggacttttgtctctttacggcggcaggccccgaaattgccgtggctacaacaaaagctttttcagcgcagcttgtgttattgtatattctggctatatggtttgcagccaggtcaggcaagctatcgcgggaagctgagcagaaattgttatctgaaattgaagccctgccggaaaaggcggcagatttactcaaacagatcgattctatccaaaagtacgcttctgcctgcgtcggatataagagtattttctttatcggaagaaacattgattatgctattgcgttggaaggttctctcaagctcaaggaaatatcctacatccactcggaagcgtacgccggcggcgagttgaaacacggaacaatttcgcttgttgaagaagatactctggttgtcgctatctcaaactgcgctttgttatatggtaaaattatgagcaatgcagaacaggtaataagccgcggagcaaaagtgttgcttatcggtaattgtccgaatgtaaaagtaaatgacaaactattccatatagctctgccagaaagtatagatttattttccccgtctttatcggttattgttttgcagcttttcagctattatgtagctgcgaacaaggggctggatatagataaacccagaaatttggccaaaagcgttaccgttgaataa

SEQ ID NO: 66730 - protein, 604 aa, Unknown
  Obtained from environmental sample
  DOMAIN (2)...(193): Glutamine amidotransferases class-II
  misc_feature (1)..(604): Xaa is any amino acid
MCGIFGYVGNENAVPIIIDGLKKLEYRGYDSAGIAVYGENGLGVVKQKGRLAALETRLSEGTLSGHIGIGHTRWATHGEPSDINSHPHIGSKNKIAVVHNGIIENYGYLKERLEHWGVTFASQTDSEVIAQLAEHYYNGDLLDTVIHVSNALEGSYALGVMCVDDPDILIAIKKDNPLIIGVSDHGNFIASDVPAVLKHTNKVCYLNDKEIAVLRDKSVEFFNIDKEPLEKPLETITWNLDSAEKGGYPHFMLKEIMEQPKILRETINSVIKSGNYKSIFDNIDVSRFTKIVITACGSAYNAGVVAKYVFERLCRFPSIETELASEFRYKDAVIDEKTLVILVSQSGETADTIAAMREAKSKGAVTLSIVNVVGSTIAKEADFCLFTAAGPEIAVATTKAFSAQLVLLYILAIWFAARSGKLSREAEQKLLSEIEALPEKAADLLKQIDSIQKYASACVGYKSIFFIGRNIDYAIALEGSLKLKEISYIHSEAYAGGELKHGTISLVEEDTLVVAISNCALLYGKIMSNAEQVISRGAKVLLIGNCPNVKVNDKLFHIALPESIDLFSPSLSVIVLQLFSYYVAANKGLDIDKPRNLAKSVTVE

SEQ ID NO: 66731 - DNA, 573 bp, Unknown
  Obtained from environmental sample
  misc_feature (1)..(573): n is a, c, g, or t
atggaaagcgctttgatagtttcgaactcagaaaaggacacctctttttttaccggatttctaaacgcggcttctgttcatcaaatttcttccctgcaatcatgcgacagcgcccgaaggcttattttaaaaaaggattttgatttggtaattgtcgacgcgccgcttcgcgatgaatccggcgaagacttttcccgatatgccgcttccaggggcatatcgcaagtgatgctcctggtaaacggcgacttctttgcttctgtatccgctgtctgtgaggaagacggcgttatggccatttcaaaacctgtagacaaagcccttttttggtctgcattgctgctcgtaaaatcggttcaaagcaggataaaacggatacaggctgaaaatatactgctaaaacaaaaaattgaagacatacgcattattgaccgcgcaaaatgcacactaatatcatgtatgaacatgaatgagcaggaagcgcaccggtacatagaaaaacaggcgatggatatgcgctcgtcaagaagaattgtcgcggaaggcatattaaaacgttatgagaatttctga

SEQ ID NO: 66732 - protein, 190 aa, Unknown
  Obtained from environmental sample
  DOMAIN (129)...(184): ANTAR domain
  misc_feature (1)..(190): Xaa is any amino acid
MESALIVSNSEKDTSFFTGFLNAASVHQISSLQSCDSARRLILKKDFDLVIVDAPLRDESGEDFSRYAASRGISQVMLLVNGDFFASVSAVCEEDGVMAISKPVDKALFWSALLLVKSVQSRIKRIQAENILLKQKIEDIRIIDRAKCTLISCMNMNEQEAHRYIEKQAMDMRSSRRIVAEGILKRYENF

SEQ ID NO: 66733 - DNA, 384 bp, Unknown
  Obtained from environmental sample
  misc_feature (1)..(384): n is a, c, g, or t
ttgtttctgcttgagatgtttgccaaaatacgtattcatcccgtaccgtatctgctttcgggaatcgcgaatattattttttatctgcttctgctctctctttcggaacagatgtcgttctggcttgcctatactctggcggcaatcggcgtgtcggtaatgattacgctgtattcccgttcgcttctgccgtcatggaacaaaagctggtacatggggctggttgtggcgatttcgtatgtgcttctgtattcggtattaaacgccgaatcctacgccctgcttatcggatcaatcggagcgtttacggtagtcggtctggttatgtttgttacgcgtaaacttgattggtacgggagcgaagaaacgcacgaaggcatttag

SEQ ID NO: 66734 - protein, 127 aa, Unknown
  Obtained from environmental sample
  misc_feature (1)..(127): Xaa is any amino acid
MFLLEMFAKIRIHPVPYLLSGIANIIFYLLLLSLSEQMSFWLAYTLAAIGVSVMITLYSRSLLPSWNKSWYMGLVVAISYVLLYSVLNAESYALLIGSIGAFTVVGLVMFVTRKLDWYGSEETHEGI

SEQ ID NO: 66735 - DNA, 762 bp, Unknown
  Obtained from environmental sample
  misc_feature (1)..(762): n is a, c, g, or t
atgccggatttgaaaggagaaatttgttttaataacgttacctttaattatgaggataaggagccaatactaaagaatatatcctttacccttaaacccggcgaaagtatggcgatactgggagccaccggttccggaaaatctaccctagttcacctgttaagccgtctgtatgatctgaatgaaaattcttcgcataacgcaggtataattacaattaatggtattgatatacgccgcgttgcgagaccgtggctgcgccgccacatagggctttgtttgcaggaggcttttcttttttccaagaccattaaagaaaatatcgccataacaaaaccggaaatggatattgaagaaattaaaaaggccgccgcaatcgccatgatagacgagactattgaaggttttgcggaaggttataacactgtcatcggggagcggggcgttaccctttccggagggcagaagcagaggttgattatttccagaatgttggcgggcaatacgccggtgataatttttgatgacagtctttccgccgtagacattgaaaccgacgcgaagatccgcgctgccctgcgtaacagggtcaaagacgcggcggtgataatcatttcccaccgcatatcaagccttatgcagacggataaaatccttgtccttaaaaacggaaccgtggaagacattggctctcacgaggaactattacagcggggcggaagctataaacgaattttcgatctacaagccaattcttcctag

SEQ ID NO: 66736 - protein, 253 aa, Unknown
  Obtained from environmental sample
  DOMAIN (34)...(224): ABC transporter
  misc_feature (1)..(253): Xaa is any amino acid
MPDLKGEICFNNVTFNYEDKEPILKNISFTLKPGESMAILGATGSGKSTLVHLLSRLYDLNENSSHNAGIITINGIDIRRVARPWLRRHIGLCLQEAFLFSKTIKENIAITKPEMDIEEIKKAAAIAMIDETIEGFAEGYNTVIGERGVTLSGGQKQRLIISRMLAGNTPVIIFDDSLSAVDIETDAKIRAALRNRVKDAAVIIISHRISSLMQTDKILVLKNGTVEDIGSHEELLQRGGSYKRIFDLQANSS

SEQ ID NO: 66737 - DNA, 759 bp, Unknown
  Obtained from environmental sample
  misc_feature (1)..(759): n is a, c, g, or t
atgctgaagagcagctgcaaaaagggatcaacctgtacgaggacgccatgtcacggcggctcttgtcaagttcgccccaatacggaagactctacgcggggcttggcgacctggaatattttgtcaagacaggtgatatggaagccgccctgcgctattataatcttgcgcagcaaaacggctgggcgccgcccgatatgcaataccgcatgggcgccgcgcattatcagcttggcaattggcaggccgcgttggagaatttctttgccgcctcctcaaagttgccgcagaaccgcagaatactgtttgcgcttggaaattcggcccttaagcgcggcgattcttttgccgctcagggttattacaaccgcctgcttgacatgcttgaaaaccagcgcagcgcgtctacccttgctgctgcccaatgaccgccccgagtacctggatcttgccgagcgtttgatgatggcccgcaacaatgccggcgttgctaaccagatgcttgccgccagaaccggaagccgcgtttaccagtcgcgcgcaatgtctttatactcggaatcggaacgcgcttgggattcccttacacgtgagcctcgttcaatggttcgttcgagcagtacgtctctgccattccttaatatcaggaacattctttatccacggcaaaactatgagccacaaatgtttatgcgtatagacagggaagcctcggaatcttcacgctgggagcaactcgctccggcattcagggactaa

SEQ ID NO: 66738 - protein, 252 aa, Unknown
  Obtained from environmental sample
  misc_feature (1)..(252): Xaa is any amino acid
MLKSSCKKGSTCTRTPCHGGSCQVRPNTEDSTRGLATWNILSRQVIWKPPCAIIILRSKTAGRRPICNTAWAPRIISLAIGRPRWRISLPPPQSCRRTAEYCLRLEIRPLSAAILLPLRVITTACLTCLKTSAARLPLLLPNDRPEYLDLAERLMMARNNAGVANQMLAARTGSRVYQSRAMSLYSESERAWDSLTREPRSMVRSSSTSLPFLNIRNILYPRQNYEPQMFMRIDREASESSRWEQLAPAFRD

SEQ ID NO: 66739 - DNA, 1560 bp, Unknown
  Obtained from environmental sample
  misc_feature (1)..(1560): n is a, c, g, or t
atggtgaggctgctgaggaatcttatccggggcgctcctgcgagagaaaccgcggcgctggccagtgaaatactggataggacgattaccgtaccaaggggttttgaaaaaagctcggttgaggcactggaagccgagaaatcaagtttttcttatatctttttccacaatttccttcccgtgtttcggcttattatgataatcgcaattcttttgggatctattttattccttacctataagtttgtgtatatcccacttaaagcggaatctatatatacaatgggctatgagcggataccggaaggtgaataccaacgcgccaatgaacgttttaatgaagccttcaaaatacaccgcaaaaaagactggttcttcaaatatgccgacgctttcatcaaagaacggcagtatatatacgcggaacagaaatacgacgaactgctgcgttattacccacgtgacaaacagggcgttctgtcttacgctttcctggaaacgcattacatgcggaactatcccaaggcggacagccttttaaggcatcaaatcctggattataatccggatgatcctgaggccctgcttgccctgggcgataacagcctcgcctggggagcgctcgatccttcaaaatatgaggatgcccgtttctcgtatgcccgtctgcttgacatattcggccagcagccgtttattatggacgggatgatgaagtactttatcaggacagacaacctgaaagaagtgcttccaatctggcaatggtttgacgccgttcccaagaaaaggcccctggaagcggagacgctttcggagttgggcggctatcttttggacaaacagcttgaggaagtccgcggcgtccccaatgaatatgtcgcgctcatagaagatgtacgcaaaatactgctgcgcgcggtacagcaggatccttccctgcctgaaccgcattatcatcttgcccgttattataagaaccttggcaatgatcatgaggaaagggttactctggagattgcgatcaaccgctttgacaacgcgaaagaagaagacctgtcccgtcttactaaccgcattgacgcccaccagcgttatgctgataatttgattaacagcagggagtttatgcatgctgaagagcagctgcaaaaagggatcaacctgtacgaggacgccatgtcacggcggctcttgtcaagttcgccccaatacggaagactctacgcggggcttggcgacctggaatattttgtcaagacaggtgatatggaagccgccctgcgctattataatcttgcgcagcaaaacggctgggcgccgcccgatatgcaataccgcatgggcgccgcgcattatcagcttggcaattggcaggccgcgttggagaatttctttgccgcctcctcaaagttgccgcagaaccgcagaatactgtttgcgcttggaaattcggcccttaagcgcggcgattcttttgccgctcagggttattacaaccgcctgcttgacatgcttgaaaaccagcgcagcgcgtctacccttgctgctgcccaatga

SEQ ID NO: 66740 - protein, 519 aa, Unknown
  Obtained from environmental sample
  DOMAIN (442)...(475): Tetratricopeptide repeat
  misc_feature (1)..(519): Xaa is any amino acid
MVRLLRNLIRGAPARETAALASEILDRTITVPRGFEKSSVEALEAEKSSFSYIFFHNFLPVFRLIMIIAILLGSILFLTYKFVYIPLKAESIYTMGYERIPEGEYQRANERFNEAFKIHRKKDWFFKYADAFIKERQYIYAEQKYDELLRYYPRDKQGVLSYAFLETHYMRNYPKADSLLRHQILDYNPDDPEALLALGDNSLAWGALDPSKYEDARFSYARLLDIFGQQPFIMDGMMKYFIRTDNLKEVLPIWQWFDAVPKKRPLEAETLSELGGYLLDKQLEEVRGVPNEYVALIEDVRKILLRAVQQDPSLPEPHYHLARYYKNLGNDHEERVTLEIAINRFDNAKEEDLSRLTNRIDAHQRYADNLINSREFMHAEEQLQKGINLYEDAMSRRLLSSSPQYGRLYAGLGDLEYFVKTGDMEAALRYYNLAQQNGWAPPDMQYRMGAAHYQLGNWQAALENFFAASSKLPQNRRILFALGNSALKRGDSFAAQGYYNRLLDMLENQRSASTLAAAQ

SEQ ID NO: 66741 - DNA, 384 bp, Unknown
  Obtained from environmental sample
  misc_feature (1)..(384): n is a, c, g, or t
atgaatatcgtagatagttccttatggattgagttctttgccggaacaaaactgaatatatccattatcaacgtaatccggaaaacaagtacgctttgcgttccggttatttgtttgtatgaagttcacaaaaaattcataaatgataacgatatagaaaaagccgatttagcggtggatattatgaaaaacggcaaagttatagatatgaattcagaaattgcggtttttgcctcaaatgtcagcaagcagtataaactcccaatggctgacagcatcatttacgctaccgcccaaatccacaatgccgaaatttacacccaagacaagcattttaaagacttgaaacaagtgcgttatttcgaggcgcgaaaaacaacttag

SEQ ID NO: 66742 - protein, 127 aa, Unknown
  Obtained from environmental sample
  DOMAIN (2)...(120): PIN domain
  misc_feature (1)..(127): Xaa is any amino acid
MNIVDSSLWIEFFAGTKLNISIINVIRKTSTLCVPVICLYEVHKKFINDNDIEKADLAVDIMKNGKVIDMNSEIAVFASNVSKQYKLPMADSIIYATAQIHNAEIYTQDKHFKDLKQVRYFEARKTT

SEQ ID NO: 66743 - DNA, 807 bp, Unknown
  Obtained from environmental sample
  misc_feature (1)..(807): n is a, c, g, or t
atgcaagccaagaagaaagccgcgaaaaagacctataagtcatcggccaagaaaaagaccgttccgagcctcaacacggttacgatggacgagttgaaagccattatcgccgaaacatccaagacaatggccgaaaaccacgccaaaaccgaggcctcgcttaagactgcgtttaaaacgtgggaagccgcccacgccaaaacagaggcctcgattgataggctatccgccgaaaaccgattgttagccgccgaaaatcggaaaacctcggagtctgttcgggaactgcatgccgtagtcagtgaaacctctgacgaggttcggaaaacctcggagtctgttcgggaactgcatgccgtagtcagtgaaacctctgacgaggttcggaaaacctcggaggccgtccggcaactgaacgacacgctcggcgggatgggcggacacctcggcgaagtgatagagtttatcgtcatacccaagatacgccccgccataaacgctttgggtaatcactcgtttaaagaaatcacggcgaggaaaatcgtcgagaccgttatcaacgatagaaagagaaaactaaccgaggtagacgtgctgctgtacggcgacaccgaggctatggccgttgaggtaaagacctgtctacagacaagcgacgtcgataaacatttggaccgtctgcaaaaactgcgcgaccacgaagccgaacgccgaggtcaaaggcaagacgcttttcggcgcggtggtaggcgcaatcgtacacgagccaatcagaacctacgccctttaaaaatggtctgtacgtaa

SEQ ID NO: 66744 - protein, 268 aa, Unknown
  Obtained from environmental sample
  misc_feature (1)..(268): Xaa is any amino acid
MQAKKKAAKKTYKSSAKKKTVPSLNTVTMDELKAIIAETSKTMAENHAKTEASLKTAFKTWEAAHAKTEASIDRLSAENRLLAAENRKTSESVRELHAVVSETSDEVRKTSESVRELHAVVSETSDEVRKTSEAVRQLNDTLGGMGGHLGEVIEFIVIPKIRPAINALGNHSFKEITARKIVETVINDRKRKLTEVDVLLYGDTEAMAVEVKTCLQTSDVDKHLDRLQKLRDHEAERRGQRQDAFRRGGRRNRTRANQNLRPLKMVCT

SEQ ID NO: 66745 - DNA, 747 bp, Unknown
  Obtained from environmental sample
  misc_feature (1)..(747): n is a, c, g, or t
atgttggccgggataacggatatattggttatcacgacgccggaggacggcgccgcgtttgcgcggcttttgggcgacgggtctcagtggggtattaagctctcctacgcggcgcagccgcgcccggaggggttggcgcaggccttcatcataggcgaagagtttgtgggcggaacgccggcggcgctgattttgggcgacaatattttttgggggcacggcctcgtggagcgcttgcagttggcaattaaccgtacggatttagccactatcttcgcctatcgggtaaacgacccgcagcgctacggaatagtagaggttgacaaaatgggaaacgccgtatcgatagaggagaagcccgccgcgccgaagtcgaagttagcggtgaccggcctctatttttatgatgccgatgtctgtaagttggccaaaactctgaagccgtcgtcacgcggggaactggaaataaccgatctgaaccgcctctatttagaactcggaaagttacaggtagttgacttggggcgcggcatagcgtggttagataccggaacgcacgaatctatgttgcaggcgtcgtcgtttgtggagacgatacaggcgcgccaaggcctaaaggtcgcttcgcctgaggagatagcgtttaggcgaggtttgatagacgcaaaacagttggtggcgttggcggagccgatgaagaagaatgagtatgggcggtatttgttggatgtcgctaatggactttaa

SEQ ID NO: 66746 - protein, 248 aa, Unknown
  Obtained from environmental sample
  DOMAIN (1)...(199): Nucleotidyl transferase
  misc_feature (1)..(248): Xaa is any amino acid
MLAGITDILVITTPEDGAAFARLLGDGSQWGIKLSYAAQPRPEGLAQAFIIGEEFVGGTPAALILGDNIFWGHGLVERLQLAINRTDLATIFAYRVNDPQRYGIVEVDKMGNAVSIEEKPAAPKSKLAVTGLYFYDADVCKLAKTLKPSSRGELEITDLNRLYLELGKLQVVDLGRGIAWLDTGTHESMLQASSFVETIQARQGLKVASPEEIAFRRGLIDAKQLVALAEPMKKNEYGRYLLDVANGL

SEQ ID NO: 66747 - DNA, 1641 bp, Unknown
  Obtained from environmental sample
  misc_feature (1)..(1641): n is a, c, g, or t
gtgagtgtaatggcgtatgcgccttatggcgcgggcggagtaattatccgggtggaagcggatatacggcggggaattcctggtattgacattaccgggcttgctgaaggggcagttcgtgaagcgcgggaaagagtaagggcggcgttcaggaattccgggttcaagtttccgctggacaggattctaatcaacctggcgccagcgggattacggaaagacggggccgcgctggatttaccgattgccctggcggtaatggcggctgcggaacttgtcccggtgcctccgaacatcctggtgatgggagaactggaactttcgggaaagatacgtccggtacggggtgttctggcggcaatcgccggcggccttgaagagggtattaccgaattcattgttcccgctgaaaacaagggagaagccgcgatattatacagcgcgggcaggaaccctgttatgcgtttcaaagcggtatcttccctgcgcgaagcggttgacgcgctttttctccgcgaagaaaccggcgtactctccgctcccgaagaatcgaataataatatagaagattgcgtttcccaggaatcgtcaacaggggatgccggtgccgggacaatggactttgccgacgtgcgtggccaggctgtatacaaacgtgctttggaaataagtgccgcagggggacacaacatgcttgttttcgggccgccgggcgcgggcaagaccatgttggcaaggcggcttccttccataatggctccgctgactcccgatgaagcggttgaagtcacgcggctctacagtctggcagggccttacaagacggggaccggccttattgaccgcctgatcacacagccgccgttccgcgccccgcaccattcggcaagcgccgaggggattctgggcggtggaagaaccccgcgccctggcgagataagccttgcccatttcggcgtgctgttcctcgacgaagcccctgaattcaggatcaatgtgctgcaggccttgcgtgaaccgctggaagaccgagttataagcatttcccgcgcagaaggccccatgcgtctcccggcggaatttcagttgattttagcgactaacgcctgcccctgcggaaggctggggatcaggcataatgataatggaacggaaggcgaaatgcagacctgtttatgttcgccggaagaaatttcccggtactggcgcaaattcggcggcgctctccttgaccgtatcgagattcgcaccgctgttattcccccaagtgttaatgaaatcggcaaaccaagtggaggcgccaatggcggcgaagaacgcagcgcggacattgccaagcgggtaaaggccgccgttgaaatccagcagttgcgctataaaggcatggggatacgccgtaacgcgctgattcccgccggaaaaatcgaaaccttttgcggcatggagcagcaggcgcgggacgcgtttcacaaggcccttgcgcggttggggctttcaggccgcgcgtatcacggcattttacgggtagcgcggacaatagccgacctggatggcaaggaaacaataggcatggaacatattctggaagcggtacagcaccgccgttatggggaagacccctacgagattattaccatttaa

SEQ ID NO: 66748 - protein, 546 aa, Unknown
  Obtained from environmental sample
  DOMAIN (230)...(383): ATPase family associated with various cellular activities (AAA)
  misc_feature (1)..(546): Xaa is any amino acid
MSVMAYAPYGAGGVIIRVEADIRRGIPGIDITGLAEGAVREARERVRAAFRNSGFKFPLDRILINLAPAGLRKDGAALDLPIALAVMAAAELVPVPPNILVMGELELSGKIRPVRGVLAAIAGGLEEGITEFIVPAENKGEAAILYSAGRNPVMRFKAVSSLREAVDALFLREETGVLSAPEESNNNIEDCVSQESSTGDAGAGTMDFADVRGQAVYKRALEISAAGGHNMLVFGPPGAGKTMLARRLPSIMAPLTPDEAVEVTRLYSLAGPYKTGTGLIDRLITQPPFRAPHHSASAEGILGGGRTPRPGEISLAHFGVLFLDEAPEFRINVLQALREPLEDRVISISRAEGPMRLPAEFQLILATNACPCGRLGIRHNDNGTEGEMQTCLCSPEEISRYWRKFGGALLDRIEIRTAVIPPSVNEIGKPSGGANGGEERSADIAKRVKAAVEIQQLRYKGMGIRRNALIPAGKIETFCGMEQQARDAFHKALARLGLSGRAYHGILRVARTIADLDGKETIGMEHILEAVQHRRYGEDPYEIITI

SEQ ID NO: 66749 - DNA, 768 bp, Unknown
  Obtained from environmental sample
  misc_feature (1)..(768): n is a, c, g, or t
gtgacttcaaccgcttcatcgggagtcagcggagccattatggaaggaagccgccttgccaacatggtcttgcccgcgcccggcggcccgaaaacaagcatgttgtgtccccctgcggcacttatttccaaagcacgtttgtatacagcctggccacgcacgtcggcaaagtccattgtcccggcaccggcatcccctgttgacgattcctgggaaacgcaatcttctatattattattcgattcttcgggagcggagagtacgccggtttcttcgcggagaaaaagcgcgtcaaccgcttcgcgcagggaagataccgctttgaaacgcataacagggttcctgcccgcgctgtataatatcgcggcttctcccttgttttcagcgggaacaatgaattcggtaataccctcttcaaggccgccggcgattgccgccagaacaccccgtaccggacgtatctttcccgaaagttccagttctcccatcaccaggatgttcggaggcaccgggacaagttccgcagccgccattaccgccagggcaatcggtaaatccagcgcggccccgtctttccgtaatcccgctggcgccaggttgattagaatcctgtccagcggaaacttgaacccggaattcctgaacgccgcccttactctttcccgcgcttcacgaactgccccttcagcaagcccggtaatgtcaataccaggaattccccgccgtatatccgcttccacccggataattactccgcccgcgccataa

SEQ ID NO: 66750 - protein, 255 aa, Unknown
  Obtained from environmental sample
  misc_feature (1)..(255): Xaa is any amino acid
MTSTASSGVSGAIMEGSRLANMVLPAPGGPKTSMLCPPAALISKARLYTAWPRTSAKSIVPAPASPVDDSWETQSSILLFDSSGAESTPVSSRRKSASTASRREDTALKRITGFLPALYNIAASPLFSAGTMNSVIPSSRPPAIAARTPRTGRIFPESSSSPITRMFGGTGTSSAAAITARAIGKSSAAPSFRNPAGARLIRILSSGNLNPEFLNAALTLSRASRTAPSASPVMSIPGIPRRISASTRIITPPAP

SEQ ID NO: 66751 - DNA, 462 bp, Unknown
  Obtained from environmental sample
  misc_feature (1)..(462): n is a, c, g, or t
atgaacggagtgtcttccataaatataggttttgtgtggctgattatcgcgagtatagcggcaagtatatacagtattttacagagaaaattaacaaaaacctattccgcgctgcaaacgtctatattcagcatttggtttggaacaataatgttatcaatcttttcgccggcttcttatatggaaattaaaaatgtgccattggtacagattgtatatttattaattttgggagtattttgcagcgctatcgcgtatataacatggacagttaccataagcaaagcaaaaaataccgcgtccgcgacaaattatttgtttttatcgccgtttttaacgaccttattgggcgtaattatagcaaaagaaatcccggacatagcgacaatattcggcggaataattattatgctaggaatgtttgtttttaatttttctgataaactgaaaaaaacacagtga

SEQ ID NO: 66752 - protein, 153 aa, Unknown
  Obtained from environmental sample
  DOMAIN (19)...(145): Integral membrane protein DUF6
  misc_feature (1)..(153): Xaa is any amino acid
MNGVSSINIGFVWLIIASIAASIYSILQRKLTKTYSALQTSIFSIWFGTIMLSIFSPASYMEIKNVPLVQIVYLLILGVFCSAIAYITWTVTISKAKNTASATNYLFLSPFLTTLLGVIIAKEIPDIATIFGGIIIMLGMFVFNFSDKLKKTQ

SEQ ID NO: 66753 - DNA, 873 bp, Unknown
  Obtained from environmental sample
  misc_feature (1)..(873): n is a, c, g, or t
atgtcagtaactgcgacgacagcgccggcaccggttcaacccgagggatacatatccgtcgaaacgtttgacgccttaaaaagcatgttcaatgacttcttggagcggtcgggccagcttgagagcgcctacgcgtcgttgcaggaggaggtcaagaaggtcaacttagagttggagcgtaagaacgccgaactgcgctgtagcctcgccaggcgcgaggccttggagcgtgaggtgcagcaggccaagacgatggcggctttgggcgagatgtcggctaccgtcgcccacgagatacggaacccgcttggggctatgggcatgtgggccgggcttttggagagggacatggatccgcaggatcccaagcgtaagacgttgggcaagataaccgacggtctggcgaagctcaacaagatcgtcaccaacctgctggtctacacgcgcccgatgaccgcggagttcaggacggtgcgtctggacgcgttgctcgatgagatagtcgattttacagaggtggagatagggaggcttgggcggaagatcacagtggaaaagaaattcgacggccaaaactccgtatccgtaaaagccgatcctgagaagatcaaccaagcggtgataaacctctgcctaaacgcggtgcaagccatggaagacggggggacgctcagcgtccggctctcggcggagggtgattacgccgtattctccatcgttgacacaggctcaggaataagcgccgagaacatcaccaagatatttgacccngttcttcacaacaaaagaggacggtacgggcctaggcctcgccatagtcaaaaagataatagagtcccacatgggaacgatagaagtaacaagcgagcgtaa

SEQ ID NO: 66754 - protein, 290 aa, Unknown
  Obtained from environmental sample
  DOMAIN (198)...(282): Histidine kinase-, DNA gyrase B-, and HSP90-like ATPase
  misc_feature (1)..(290): Xaa is any amino acid
MSVTATTAPAPVQPEGYISVETFDALKSMFNDFLERSGQLESAYASLQEEVKKVNLELERKNAELRCSLARREALEREVQQAKTMAALGEMSATVAHEIRNPLGAMGMWAGLLERDMDPQDPKRKTLGKITDGLAKLNKIVTNLLVYTRPMTAEFRTVRLDALLDEIVDFTEVEIGRLGRKITVEKKFDGQNSVSVKADPEKINQAVINLCLNAVQAMEDGGTLSVRLSAEGDYAVFSIVDTGSGISAENITKIFDPVLHNKRGRYGPRPRHSQKDNRVPHGNDRSNKRA

SEQ ID NO: 66755 - DNA, 798 bp, Unknown
  Obtained from environmental sample
  misc_feature (1)..(798): n is a, c, g, or t
gtgaggctgtaccttgagcggatgtcggcggacgccgacacggttatcgtacaattaagggaaagctccgcaaagataatatcacaagcgccgttacacgggttgtggatagaggggaggcattatcttcctgtggacattgacacggcggcaatggacaattcgaaaacaaaaaaagaaggggtaagccggacataccggaagttcgacgggtttcatccgatatttgcatatgcaggaaaggaagggtatatgctggactgcgaattgaggcccggcagccagcactgccagaaagggacggcagcatttattgaagggttgaatgcgcgccttgggggcataaaatcaggcgggcgtttattgttccgtctggacagcggcaacgattctttcgatacccttaaagccgtgacagggaaagggcgttattgcgtcataaagcgtaacaaacgaagggaaaacgacgaggaatggcttaaaagggccaaacggcacgggaaacgggtagagtccaggaaagggaaaaaagtctggatagggactgtgcggatgcaccccaagagaaaaggcgaagcccttgaggaggtcatgtgcgtgttcgaggttatagaacggaagaccgacagccaggggaaccggtatttatttcccgaaacagaggtaaacagctggtggaccaaccttggctgcggggcggaaaaagttatagaactttatcggggccatgccacaagcgagcagtttcacagtggactttaccccaataggtgcacacagttaagcgtggttacctaa

SEQ ID NO: 66756 - protein, 265 aa, Unknown
  Obtained from environmental sample
  misc_feature (1)..(265): Xaa is any amino acid
MRLYLERMSADADTVIVQLRESSAKIISQAPLHGLWIEGRHYLPVDIDTAAMDNSKTKKEGVSRTYRKFDGFHPIFAYAGKEGYMLDCELRPGSQHCQKGTAAFIEGLNARLGGIKSGGRLLFRLDSGNDSFDTLKAVTGKGRYCVIKRNKRRENDEEWLKRAKRHGKRVESRKGKKVWIGTVRMHPKRKGEALEEVMCVFEVIERKTDSQGNRYLFPETEVNSWWTNLGCGAEKVIELYRGHATSEQFHSGLYPNRCTQLSVVT

SEQ ID NO: 66757 - DNA, 876 bp, Unknown
  Obtained from environmental sample
  misc_feature (1)..(876): n is a, c, g, or t
atggcgtatcaattcatgaaagcgaatcaaaacgagtacgccgttaaggagatggccatgctttttggggtaagccgtagtgcctattatcgatgggccaggaacggggcttcgcagcggcgtaaagcagacgatgcggagctggtgcgccttattcttgaaatagtggcgaatcatcaccgccggtatggcagcccgcgggtacgccgggaacttcgcgatacctacggaaaacgggttagccttaagaaagtagcccgcctgatgcgggaaaacggccttaatgcccgaagaagcaggaagcatatcccgacgaccgactccaaccatgcccttgcagtctttgagaatgtactgtcccgggagttttatgccgaatccggcggcgtaaagtgggtttcagacattacctatctgcgtacgataaatggctgggtatacctgaccatagtgcttgacctgtttgaccggaaaattattggctgggcgcttagccttggcatggagacttccgagacagtcatcgccgcttttgaaatggcagtcaaaaacaggagccctcaaggcggcctgatattccattcggacaggggcgtccagtattgtgcccaatccttccaggatgttttgaggaaaagatctcctacagttaggcagagcatgagcaggaagggcaattgctgggacaacgcgtgtgccgaatcgtttttcaaaacactgaagagggaactggaaacattggacggtaggcattccgaggctgaggtcaggcaatcagtgtttttctacatcgaggcatattacaatcgcattcgcatgcattcggcacttgactatgtagcgcctaacgtgtttagcttaggtaaccacgcttaa

SEQ ID NO: 66758 - protein, 291 aa, Unknown
  Obtained from environmental sample
  DOMAIN (124)...(287): Integrase core domain
  misc_feature (1)..(291): Xaa is any amino acid
MAYQFMKANQNEYAVKEMAMLFGVSRSAYYRWARNGASQRRKADDAELVRLILEIVANHHRRYGSPRVRRELRDTYGKRVSLKKVARLMRENGLNARRSRKHIPTTDSNHALAVFENVLSREFYAESGGVKWVSDITYLRTINGWVYLTIVLDLFDRKIIGWALSLGMETSETVIAAFEMAVKNRSPQGGLIFHSDRGVQYCAQSFQDVLRKRSPTVRQSMSRKGNCWDNACAESFFKTLKRELETLDGRHSEAEVRQSVFFYIEAYYNRIRMHSALDYVAPNVFSLGNHA

SEQ ID NO: 66759 - DNA, 312 bp, Unknown
  Obtained from environmental sample
  misc_feature (1)..(312): n is a, c, g, or t
atggggaagaaaagtacagaacggcgtgttcacacgaaggaattcaaagccgaggcggtagcattggcggagaaaaaggaaaagccagtaagccggatcgcaacggatctgggaatcaacgagaatatgctgcaccggtgggtaaaggcatctcgggagtcggcggggagcggcttgcaagcgttcccgggtcacggacggccaaaggatgcagagcttgcccgcctgcggaaagagaacaaaacgctcagggaggccaatgaaattttaaaaaaagcggcggtcatcttcgcgcaaggggaaccccaataa

SEQ ID NO: 66760 - protein, 103 aa, Unknown
  Obtained from environmental sample
  DOMAIN (8)...(90): Transposase
  misc_feature (1)..(103): Xaa is any amino acid
MGKKSTERRVHTKEFKAEAVALAEKKEKPVSRIATDLGINENMLHRWVKASRESAGSGLQAFPGHGRPKDAELARLRKENKTLREANEILKKAAVIFAQGEPQ

SEQ ID NO: 66761 - DNA, 711 bp, Unknown
  Obtained from environmental sample
  misc_feature (1)..(711): n is a, c, g, or t
atggagctgatgcgcgaccactttgaaggcacccccatggacatgaccaaggacgtgggcgcagggccatttgcccttccctatcgctggaggcccatgagctttgaggttgatgggcaaaaatatatacacgaaagggccatatccacacagcagacaggttggtcgtacgttgcccagatgcgctcttggctgcccaatccaattggaggcgtgctttggtttggcgtggacgacacctatagcactgtctatgtgccaatgtactgcgccatcagtgagccgcccaagcactacgcccaagggaatggcagcatggctgaattttcttgggacagcgccttttgggttttcaactttgtcaccaattacgcctatagccgctacagcgacatgatacaggacatccaaaaagtgcagcgcgagttggagggccgcttcgaggccgaccaagaatccattgaaaaaaccgcgcaaaggctgtatcagctaagcccgggagaggccatcacgtacctgaccgaatactccgccaagtgttccgaacaaacagtgacgcggtggcgcaaactgggcgaacacctcatctggaagtacctagatggcaacgtgcgcgacgagagcggcagagtgacgcatccaaagtaccctgacgcttggtacaagagaatcgtccaagaccacggcgacacaatcaagttgccaaaataa

SEQ ID NO: 66762 - protein, 236 aa, Unknown
  Obtained from environmental sample
  misc_feature (1)..(236): Xaa is any amino acid
MELMRDHFEGTPMDMTKDVGAGPFALPYRWRPMSFEVDGQKYIHERAISTQQTGWSYVAQMRSWLPNPIGGVLWFGVDDTYSTVYVPMYCAISEPPKHYAQGNGSMAEFSWDSAFWVFNFVTNYAYSRYSDMIQDIQKVQRELEGRFEADQESIEKTAQRLYQLSPGEAITYLTEYSAKCSEQTVTRWRKLGEHLIWKYLDGNVRDESGRVTHPKYPDAWYKRIVQDHGDTIKLPK

SEQ ID NO: 66763 - DNA, 759 bp, Unknown
  Obtained from environmental sample
  misc_feature (1)..(759): n is a, c, g, or t
ttgttcaatagagaaaatcaaatttacagatcacacagtggagatgttatgataggtattatcggagcgatggaagaagaagtgacttttctgtgtgaagctatgggaaagttcaccaaagaaaaaataggagtctttgaatttttcaccggaaagattgaaggaaaagacgtaacaattctgcgctgcggtatcggcaaagtgaacgccgctgtcggctgcgccttgctcattcaaaaattttcccctgagtgtataataaataccggttccgccggcggcattcattccgagttaaaagtcggcgacgccgttatttctacggggcttctttaccacgatgttgatgttaccgcttttaattatgcgcccggtcagcttcccgggcagcctcaagtttttaaggcggacgaaaaacttgtaaaaatcgccgaagacgctgttgatgaattaaaaacggaaaaaattcttcccgctgattttacccaccgccgcggcgtaatcggctcaggcgatatttttatgcatgagccggaacgtataaacactgtgcgccgtgttttccccgacgtagacgctgtggaaatggaaggagcggcgatagcgcaagcctgctgtcttttctccgttccctttttggtaatccgcgcgctctctgatattgcgggaacgcagtcgcccgtaagctttgatgaatttcttccgatagcgtccaaacattcttctaaaatagtaatcagaattattaagaaaaaataa

SEQ ID NO: 66764 - protein, 252 aa, Unknown
  Obtained from environmental sample
  DOMAIN (17)...(249): Phosphorylase family
  misc_feature (1)..(252): Xaa is any amino acid
MFNRENQIYRSHSGDVMIGIIGAMEEEVTFLCEAMGKFTKEKIGVFEFFTGKIEGKDVTILRCGIGKVNAAVGCALLIQKFSPECIINTGSAGGIHSELKVGDAVISTGLLYHDVDVTAFNYAPGQLPGQPQVFKADEKLVKIAEDAVDELKTEKILPADFTHRRGVIGSGDIFMHEPERINTVRRVFPDVDAVEMEGAAIAQACCLFSVPFLVIRALSDIAGTQSPVSFDEFLPIASKHSSKIVIRIIKKK

SEQ ID NO: 66765 - DNA, 963 bp, Unknown
  Obtained from environmental sample
  misc_feature (1)..(963): n is a, c, g, or t
atgcagatcgacaaccaggactacatcatcaagccgatgaactgtcccttccatattatgatctataaaacaaagggccgcagttaccgcgacctgcccctgcgctgggccgagcttggcacggtgtaccgttatgagcgcagcggcgtgctccacggcctgctacgtgtaaggggttttacccaggacgacgcccacatcttctgcacgccggatcagatggaatcagagattctcgaagtgcttcgtttcagcctttcgctgtggaaggtgttcggcttcaaggacataaaggcgtatctggcgaccaagcccaaggaaagcgtgggcgaacagagccgctgggacgccgcgctggaaagccttcgcaaggcggtggaagccgaagggcttgcttatcagattgacgaaggcggcggcgcgttctacggccccaaaatcgatcttaaaataaaagacgcgcttgggcgcgaatggcagatgacgacaatccagtttgattttaacgagcctgagcgttttgacatgacctttgttgacgcggacggccagcacaaacggccctacatggttcaccgcgccctgctgggcagtcttgagcgcttcttcggcgtgctaatcgaacacttcggcggcagttttcccccgtggatcgcgccggagcaaatcgccgtgattcccgtcgcggagggctttaacgagtacgcgaaaaaagttaccgcagaactgaaagctcacgacctgcgggtctccgttgagttaggcgacgacaggcttaacgcgaagatacgcgactgtcagaaccgcaagattccctacatgcttgtagtcggccaacgcgaagcggatgaaggcacggtatcaatacggctgcgtgacggcaaacagcttccggcaatgaaggtcgccgactttgccaaatacgcgctggaaaaaatcgaaagccattcaattgaactgtaa

SEQ ID NO: 66766 - protein, 320 aa, Unknown
  Obtained from environmental sample
  DOMAIN (2)...(112): tRNA synthetase class II core domain (G, H, P, S and T)
  misc_feature (1)..(320): Xaa is any amino acid
MQIDNQDYIIKPMNCPFHIMIYKTKGRSYRDLPLRWAELGTVYRYERSGVLHGLLRVRGFTQDDAHIFCTPDQMESEILEVLRFSLSLWKVFGFKDIKAYLATKPKESVGEQSRWDAALESLRKAVEAEGLAYQIDEGGGAFYGPKIDLKIKDALGREWQMTTIQFDFNEPERFDMTFVDADGQHKRPYMVHRALLGSLERFFGVLIEHFGGSFPPWIAPEQIAVIPVAEGFNEYAKKVTAELKAHDLRVSVELGDDRLNAKIRDCQNRKIPYMLVVGQREADEGTVSIRLRDGKQLPAMKVADFAKYALEKIESHSIEL

SEQ ID NO: 66767 - DNA, 1362 bp, Unknown
  Obtained from environmental sample
  misc_feature (1)..(1362): n is a, c, g, or t
atgtggagtaggaagtcgagttgctgttcgcaatctaagattgaaagtattgcgcaatgcttacgaaccaagaccccactccccactccccactccctactcccttttctcttctgttatttgttatttggttgttcttccattcccgcgccgtccggccctgttgtaatccctgaagattttgccgggattgtccacgcgggccaaaccaatacaccgcaggaatacgccctactggacaggatgggcgcaagctggctccttaccactttttattggagccgcattgaaggacaagaagaccggtggaatttcgttgattatgatacttatgttgatacggcaaaagcggcggggaaaaaaataatcggtgttcttgcttatgacgtctcctggatacacaaagacggcaaagcccgcgactatatcccgccggacaaagtctatttatttttaaattatgtgcggcggacagcggagcattttaagggcagggttgacgcgtggtgtatctggaacgagccgaactttactttctggaagggaagcagggacgaatttctgtcgctttcccgccaggcagcggacgcgttaagagaaatcgattctgaggtgacccttttgggcggggcatttaaccgcgggattttcggccttccgacggcgtatatcaacggcctgtttgaatcgggcgcaatggaaaaggcggatgcagtcgccttccatccctatgagttaaaccctaatcgttccgccaggctgttcctaaaattccgcgcccaggttaccaaatacggctttgaagatcgtatatggctaaccgaagtaggataccctaccgggggctggtatcccactgccgtttcagaaaaaaactttccgacgtatgttgttaaaacttttatcggcctagccatcaacggcgcaaaaaaaatattatggtatcagttgttcgatccgcaaaaccgctccggatcaaattcagaggattttttcggacttgtacggagcagggacgattacacatccaaaggagcggaagcattccgcctctgcgccatatacctttccggcgcaacataccatcctgagcttccacagcgaaaaaacatgcccaataccctccactcattttattttgaacagccatcgggtgaacggacccttgtcttatggaaggacggggcgacggtaaaccttatactgcaggcttcggaaaacggttataccaggcatgacattattacgggaaacgccgaaacaataagttcacaaacggctataggggttggaaacgttccgatttttattacctggcagggaggtggaagcccttcattgcagattagcggcagacgataa

SEQ ID NO: 66768 - protein, 453 aa, Unknown
  Obtained from environmental sample
  misc_feature (1)..(453): Xaa is any amino acid
MWSRKSSCCSQSKIESIAQCLRTKTPLPTPHSLLPFLFCYLLFGCSSIPAPSGPVVIPEDFAGIVHAGQTNTPQEYALLDRMGASWLLTTFYWSRIEGQEDRWNFVDYDTYVDTAKAAGKKIIGVLAYDVSWIHKDGKARDYIPPDKVYLFLNYVRRTAEHFKGRVDAWCIWNEPNFTFWKGSRDEFLSLSRQAADALREIDSEVTLLGGAFNRGIFGLPTAYINGLFESGAMEKADAVAFHPYELNPNRSARLFLKFRAQVTKYGFEDRIWLTEVGYPTGGWYPTAVSEKNFPTYVVKTFIGLAINGAKKILWYQLFDPQNRSGSNSEDFFGLVRSRDDYTSKGAEAFRLCAIYLSGATYHPELPQRKNMPNTLHSFYFEQPSGERTLVLWKDGATVNLILQASENGYTRHDIITGNAETISSQTAIGVGNVPIFITWQGGGSPSLQISGRR

SEQ ID NO: 66769 - DNA, 609 bp, Unknown
  Obtained from environmental sample
  misc_feature (1)..(609): n is a, c, g, or t
atggggcttattcacgccgcggaaaaattcgaccataagaagaatgtgcgcttctgcacttatgcgggctggtgggtacgccagtttattatccgctatctggcgaataaacaccgcatggtcaggctgccccaccggaaagaagagatcctccgcaaggtacagcggacatatcacagtctcagccagagcctgatgcaccagcccaagacggaagaaatcgctaatgaattgggaattccggcgaaagacattgattttattcttaatatgagctacggcatcctgccgctggaatcggacagcagcaaagacgaatattccgcgacaatggaaatccatgaagactatacgtactgccctgaacggaacctgttccggcaatactaccgtgacagcgcgaggcgctgccttgacaatctgaaagacagggagagaaaggtgctttcttaccgctaccagcttgaagacgataaacagtacacgttcaaggaaatcggtgcgaaaatggacttgtccccggaaatggtgcgccagatagagttgaaagccctggcgaagatccgccgccacgcgaatgagttggacaactaccaggaagcaatgtaa

SEQ ID NO: 66770 - protein, 202 aa, Unknown
  Obtained from environmental sample
  DOMAIN (44)...(125): Sigma-70 region 3
  misc_feature (1)..(202): Xaa is any amino acid
MGLIHAAEKFDHKKNVRFCTYAGWWVRQFIIRYLANKHRMVRLPHRKEEILRKVQRTYHSLSQSLMHQPKTEEIANELGIPAKDIDFILNMSYGILPLESDSSKDEYSATMEIHEDYTYCPERNLFRQYYRDSARRCLDNLKDRERKVLSYRYQLEDDKQYTFKEIGAKMDLSPEMVRQIELKALAKIRRHANELDNYQEAM

SEQ ID NO: 66771 - DNA, 1326 bp, Unknown
  Obtained from environmental sample
  misc_feature (1)..(1326): n is a, c, g, or t
ttgaccggccctatagtcacaggatgggacggaagggtatttgccccggcgggaggaaaaatttcctgcttcacggcttcagggaccctcctttggacaacggaattgggaagcggaatcagcgccggcccgctcctcgatcagaatggctgtgtagtactggctctaaaaaatggcgagcttattcgtataacgccttttggcggactcagctcctggaagctgccccccgctcccgtcatcgtggtcccgatggagaatgacatccttgccatgtacggcaacggaaacatcctgcgcgtcgattcttcctcggaggattccgagcccctccccttcccagcccttggcgcaaggccgttggcggcgtccggcaggaacggcagggcggcggtttttctcgccaacgggcagatgacgttcctttccggcgatgacggaaaagtcctctggactgccggcagttttatcaagccgcgttccaatgaggaaaaggcggaactgatttttgaccggcgcggaatctacgcgttatgcgcaagcggagccgccggtttttccgtagacggcaatctgcgctggttcgcgaatcttgaaaacgcgtcgggcgttccggcgttcagcaatgacggggtgctgtactccggcgggaaggactgggtaataaacgcgtggaagatagaagaccatatattgaatcaaaaatataacttatacggccccgcgcaagatgccttttacgggacgggaaatccgccgccttccatttacgcgcgcgttatcgggcgtttttatgaaacattggtaaaaagggaacttgagattattcaaagaggcattgattccggcatgataggcgggaacgagcttgaatggatcgcctatttaatggaaacggcggacggcggctactggccgaattttttaaacagccgcgaaccaaaagccataataaaccaccggatatcggccctgcagcttctgtcccgcatggggtcaatcgaaacaattccctggcttgtctcctttttcaaaagggaaagcgaacctcttgtcaggattgccgcggcgctggctattggcggcatcggcatggatccggagggcaaggcgatacaggaattcacggccgccgtcaggaccggcaatccgaaaaatgacgagcaattattcatctcaattgccgccgcgacagggtctctctgccgtttttccggcccccctttatacgacatcggcacgcagcttcttaatctgctgaacattcccggcctcccgccttcggtacgacggcaggcgcagaatgaactgaatactctgcgctaa

SEQ ID NO: 66772 - protein, 441 aa, Unknown
  Obtained from environmental sample
  misc_feature (1)..(441): Xaa is any amino acid
MTGPIVTGWDGRVFAPAGGKISCFTASGTLLWTTELGSGISAGPLLDQNGCVVLALKNGELIRITPFGGLSSWKLPPAPVIVVPMENDILAMYGNGNILRVDSSSEDSEPLPFPALGARPLAASGRNGRAAVFLANGQMTFLSGDDGKVLWTAGSFIKPRSNEEKAELIFDRRGIYALCASGAAGFSVDGNLRWFANLENASGVPAFSNDGVLYSGGKDWVINAWKIEDHILNQKYNLYGPAQDAFYGTGNPPPSIYARVIGRFYETLVKRELEIIQRGIDSGMIGGNELEWIAYLMETADGGYWPNFLNSREPKAIINHRISALQLLSRMGSIETIPWLVSFFKRESEPLVRIAAALAIGGIGMDPEGKAIQEFTAAVRTGNPKNDEQLFISIAAATGSLCRFSGPPLYDIGTQLLNLLNIPGLPPSVRRQAQNELNTLR

SEQ ID NO: 66773 - DNA, 795 bp, Unknown
  Obtained from environmental sample
  misc_feature (1)..(795): n is a, c, g, or t
ttggtcagaataatcgccggctggaaggagatcgaatttgaagttatgcgcgaccgcgccggaaacgtcatcacggtctgctcgatggaaaatttcgatcctgtcggcatacatacgggcgacagcatcgtcatcgctcccgccgtcaccctggccgacaaggaataccagatgctccgttccgccgccctgaacattattcaggcgttgggcgtggagggcggctgtaacgtacagttcgccctgtatcccgaaagttttgattacgcggtcattgaggtaaacccgcgcgtctcgcgttcctcggcgcttgccagcaaggctacaggctaccccatcgcgaaagtcgcgacaaagatcgccgtcggctacactctcgacgaaatagtgaacgccgttaccggcagcacattcgcggcgtttgagccgacgcttgactatgtggcggtgaaatttcccaaatggcctttcgataaatttgtgtacgcgcacaaggaactgggcacgcagatgaaagcgaccggcgaggttatggccattgccgacacctttgaggaagcgcttttgaaagccgtgcgcggcgcggaaataggccttagcagccttaaccttccgcgccttgcgtcaaaatccgacgaggaaatccgcggacttctgcgtactgtaaccgacgaacgcctgtttgtgctgtacgaggcgctcaagcgcggcgtcagcgtcgatgaattgtacgatacgacaaaggttgaccgctggtttttgcatgggctggcgaatataatgaaaagtcattaa

SEQ ID NO: 66774 - protein, 264 aa, Unknown
  Obtained from environmental sample
  DOMAIN (215)...(263): Carbamoyl-phosphate synthetase large chain, oligomerisation domain
  misc_feature (1)..(264): Xaa is any amino acid
MVRIIAGWKEIEFEVMRDRAGNVITVCSMENFDPVGIHTGDSIVIAPAVTLADKEYQMLRSAALNIIQALGVEGGCNVQFALYPESFDYAVIEVNPRVSRSSALASKATGYPIAKVATKIAVGYTLDEIVNAVTGSTFAAFEPTLDYVAVKFPKWPFDKFVYAHKELGTQMKATGEVMAIADTFEEALLKAVRGAEIGLSSLNLPRLASKSDEEIRGLLRTVTDERLFVLYEALKRGVSVDELYDTTKVDRWFLHGLANIMKSH

SEQ ID NO: 66775 - DNA, 1596 bp, Unknown
  Obtained from environmental sample
  misc_feature (1)..(1596): n is a, c, g, or t
atgaaatatgcatggcttggagttttattggtggcgctggggattcaggcgtacgcaaaaccgaacgctgaaaaagaaaatctcaaaaccggggtaaacggaaaattgagtcatattggagcctattccgtgggcgaaaccagcgcggacgggggcattgcggaaatcgtaaagtataacaaagataacaagcgtatatacatggtaaacggcgcgctgggcagccttgatattgttgatgccagcgcgctgcgttccggaaaattcaccggtttgaccctgtacaagcgcgttgatataaaaacgatgggaaccgcgaacgggtttgattacggagacctgaccagcgtggcgatcaacacaaagaacaaaatgatcgctctggcggttcaacaccgcgaatatgacgcgccgggttacatcgtcattataaactatgaaggtgaatacctccggcattacggcgcgggcgttcagccggacatgatctgttttactcccgacggacagtacatcctgaccgccgatgaaggagaaccgaggcaagggtacgcggccggggcggttgatcctcccggctcggttactattgtaaatatcaataccaatgaagtccgcgttatcggttttgaggattttgacggggaagccgccagaaccgctttgacgcaaaacggcgttatcatcaataagggactaaaaccttcgctggattttgagcctgaatatatcgcggtaagcgatgacagccgaaccgcgtgggtgtcattgcaggaggcaaacgcgctggcaatactggatattcccggcggagccttcaagtcagttgcagggctgggctttaaggatcacagccttccccaaaacagcctggaccttctcagggataaaaaggccgaacttgccccgcagaatctgtggggagcttatatgcccgacggcattgcccttgttaccattcaggggaaagcgtatgttctcaccgccaatgaaggggacgcccgcgaatggggttccggtaccggcgcgtataccgatgtcgtttcgttcagtattggcgagtacaaaatggacattattgacaacgccaggaaagacggcctggacgaggggaaaaaatacctgtacggcgcgcgttccttttcaatctgggaagcctccgacgtgaatacgcaatcagccggagccaaacttgtatatgacagcggcaatgaatttgagactcgcaccgccgcacttttcccggcgaatttcaacgcgtcccacggtaacaatgacattgacaaccgcagcaataaaaaagggcctgagccggaatatgtggataccctcaagatcgggaacaagatatacgccctgatcggactggagaggattggcggcgttatgttatacgatatttccaaccccgcttcgcctgtgttttatgattacatcaacacccgtgatttttcaaaatcgacactggctgagatgggcgatctgggacctgagggactctgccctgtggaagcggctgacagccccactaaacgccccttgatttttgtggcaaacgaagtttcgggaactatcgcggtatttgaggtacagtga

SEQ ID NO: 66776 - protein, 531 aa, Unknown
  Obtained from environmental sample
  SIGNAL (1)...(19)
  misc_feature (1)..(531): Xaa is any amino acid
MKYAWLGVLLVALGIQAYAKPNAEKENLKTGVNGKLSHIGAYSVGETSADGGIAEIVKYNKDNKRIYMVNGALGSLDIVDASALRSGKFTGLTLYKRVDIKTMGTANGFDYGDLTSVAINTKNKMIALAVQHREYDAPGYIVIINYEGEYLRHYGAGVQPDMICFTPDGQYILTADEGEPRQGYAAGAVDPPGSVTIVNINTNEVRVIGFEDFDGEAARTALTQNGVIINKGLKPSLDFEPEYIAVSDDSRTAWVSLQEANALAILDIPGGAFKSVAGLGFKDHSLPQNSLDLLRDKKAELAPQNLWGAYMPDGIALVTIQGKAYVLTANEGDAREWGSGTGAYTDVVSFSIGEYKMDIIDNARKDGLDEGKKYLYGARSFSIWEASDVNTQSAGAKLVYDSGNEFETRTAALFPANFNASHGNNDIDNRSNKKGPEPEYVDTLKIGNKIYALIGLERIGGVMLYDISNPASPVFYDYINTRDFSKSTLAEMGDLGPEGLCPVEAADSPTKRPLIFVANEVSGTIAVFEVQ

SEQ ID NO: 66777 - DNA, 984 bp, Unknown
  Obtained from environmental sample
  misc_feature (1)..(984): n is a, c, g, or t
ttggtaattgtgctgtcggtagtatttactattctcatactccgcaatttattggagaaaaaaaaggtcagcgcgacgacaatatcaaaaatagaaaatatttctttccactctctgaatacatgttttctgctgctcctttcttttatcaccctgtatcctttctggacaacaattgccgtgtcctttaatgacgcgctggactcgatccggggcggcattaccttctttcccagaaaattcagcctttttaattatgaggtaattttccggacaggggctattccccacgctttctttatttctgtcgcgaggacatcgattaacctggttacaagcgtgttttttacggcaatgatcgcttttgccctatcccgccgtgaatttatactgcaaaaaccttttactcttattttgatactttccatgtacataaacgcgggccttattcctacatttttactaatcaggaatcttggtatggtcggaacattctgggtatatatagtcccgggaattgtaaacgcgtttaattttgttgtaatgagaacatatatgcgcactattccggaaagcatcattgaatcggcgcgcattgacggttacggggatttttatatatttatccgtattatttttcctttatgcctgccggttcttgccacaatagggctttttgtcgcggtaggatcatggaatgcgtggtttgacacgatgatttacaattcaggcgatgagaggctgcatacccttcaatacaaattgatggaatacctgcaatcaagccagtctgccggcaagtcagccggagacgcgggggcaatggctctggccgccggggcggggggaggcgcgaccatggtaacgcccatgagcatacgcgcggcgattactgtaatcgcggccgctccaattttgatgatttatccctttatgcagcgttactttgttgttggtttgaatgtaggcggcgtgaaagaataa

SEQ ID NO: 66778 - protein, 327 aa, Unknown
  Obtained from environmental sample
  DOMAIN (95)...(322): Binding-protein-dependent transport system inner membrane component
  misc_feature (1)..(327): Xaa is any amino acid
MVIVLSVVFTILILRNLLEKKKVSATTISKIENISFHSLNTCFLLLLSFITLYPFWTTIAVSFNDALDSIRGGITFFPRKFSLFNYEVIFRTGAIPHAFFISVARTSINLVTSVFFTAMIAFALSRREFILQKPFTLILILSMYINAGLIPTFLLIRNLGMVGTFWVYIVPGIVNAFNFVVMRTYMRTIPESIIESARIDGYGDFYIFIRIIFPLCLPVLATIGLFVAVGSWNAWFDTMIYNSGDERLHTLQYKLMEYLQSSQSAGKSAGDAGAMALAAGAGGGATMVTPMSIRAAITVIAAAPILMIYPFMQRYFVVGLNVGGVKE

SEQ ID NO: 66779 - DNA, 519 bp, Unknown
  Obtained from environmental sample
  misc_feature (1)..(519): n is a, c, g, or t
atgcagaaggatattttagttttgtttgcgaagtacaataatgtagcaaaccagaagatgaatgaggtgataaaaaccctttcaaaagaagaatgggataaggatctgggcgggttttttagttctgtccgaggtctttgttcccatctttatatctgcgacttcaactggttaaaacggttttcccgcctgcaggattttgatgtttttagggaagctccttttgcccgtgagccctattcctttaaggaagtgctttttgcggacatggctgaatattttaccagccggcctcttttggacgaaaagatcagcgcttttataaatgaagtgaacgataaagacctggactctcttttaaagtacagcgattccagtggaaatttgtacgaaaagaacttcggcggccttgttgtgcacagttttaaccacgacacccatcacaggggcatgatttcattgtacctggaaatgctaggtcggaaaaacgattttggctctttcaacgctgtactctag

SEQ ID NO: 66780 - protein, 172 aa, Unknown
  Obtained from environmental sample
  DOMAIN (1)...(166): DinB family
  misc_feature (1)..(172): Xaa is any amino acid
MQKDILVLFAKYNNVANQKMNEVIKTLSKEEWDKDLGGFFSSVRGLCSHLYICDFNWLKRFSRLQDFDVFREAPFAREPYSFKEVLFADMAEYFTSRPLLDEKISAFINEVNDKDLDSLLKYSDSSGNLYEKNFGGLVVHSFNHDTHHRGMISLYLEMLGRKNDFGSFNAVL

SEQ ID NO: 66781 - DNA, 1062 bp, Unknown
  Obtained from environmental sample
  misc_feature (1)..(1062): n is a, c, g, or t
gtgcgcccgttgggcctccacgattcggtccggaggaacatttatgttccccctcaccttccgggaacgggtggggtcgagggttcatggcaccaatttccattagagctgtgtttacgcgcagatcttacggcatggatgccgcggcgcccagtgctgtcacagggacagaaggcgccggaaatgccaaaggagtgttttatgataattaatcacaacttgagcgcaatgtttgccgacagatccctcaaagtcaccaatgtttttcttgacaaaaatatggagaaactgtccagcggcttgcgaatcaaccgcgcaggtgatgatgcttcagggctcgctgtttctgagaagatgcggagccaaatccgcggtttgaaccaggcgtcaacaaacgcccaaaacggtatttcgtttattcaaacaacggaaggctatctccaggaatctgaagacatcattcagcgtttgcgtgagcttgcggtaatgtcctcgcacggtatttatactgccgaagacaggatttacatccaggtagaagtttcggcccttatagccgaagtagaccgcatcgcttctcacgcgcagttcaacggcatgaatcttcttaccggaaggtttggccggctgatgggtgaaaatgtggttaccgcttccatgtggttccatatcggcgccaatatggatcagcgaacgcaagtgtttatcggcaccatgactgccaagggtctcgggatccgcaacgtcggtgacgattctattctttcactgtccgaaccggacagtgccaaccgtgccattggaaccctcgataacgctattaaaaagatcaacaaacaaagagctgatcttggcgcctaccagaaccgcttggaacacgcagtccgcggccttgatgttggagcagaaaatttgcaggcatcggaatccaggatccgcgatactcaaatggcgactgagactgtttcttacaccaagaaccagatcctcgttcagtcaggtaccgcgatgctggcccaggcaaatcagaaaggtcagacggttctacagcttctgcggtaa

SEQ ID NO: 66782 - protein, 353 aa, Unknown
  Obtained from environmental sample
  DOMAIN (260)...(331): Bacterial flagellin C-terminus
  misc_feature (1)..(353): Xaa is any amino acid
MRPLGLHDSVRRNIYVPPHLPGTGGVEGSWHQFPLELCLRADLTAWMPRRPVLSQGQKAPEMPKECFMIINHNLSAMFADRSLKVTNVFLDKNMEKLSSGLRINRAGDDASGLAVSEKMRSQIRGLNQASTNAQNGISFIQTTEGYLQESEDIIQRLRELAVMSSHGIYTAEDRIYIQVEVSALIAEVDRIASHAQFNGMNLLTGRFGRLMGENVVTASMWFHIGANMDQRTQVFIGTMTAKGLGIRNVGDDSILSLSEPDSANRAIGTLDNAIKKINKQRADLGAYQNRLEHAVRGLDVGAENLQASESRIRDTQMATETVSYTKNQILVQSGTAMLAQANQKGQTVLQLLR

SEQ ID NO: 66783 - DNA, 444 bp, Unknown
  Obtained from environmental sample
  misc_feature (1)..(444): n is a, c, g, or t
atgctgttaaccgaaattgttcccaagccgtggaattttgaaatccttgccagcgatatttcccttaaatgtttgatgaccgccaaggaaggtttctaccccgacaaccgtctggaaggaattccgcccgcatatcttacaaaattttttaacaaggtagacggcggttataaaatcaaacctgaaatacaggcaaaaataaagtttgactatcataaccttaagaacgattcacagcaaagaaaccttgacgtcgttttctgccggaatgtaattatttattttgacgatgttgctcagaccaacgttatcaaccgtttctgggattcaatggcttccaagtcattcttatttataggtcattcagagtcattgtttggaatgaaaacaaaatttgaattcgtaaaaactgaatgggcaacactttaccgaaaaaacctttag

SEQ ID NO: 66784 - protein, 147 aa, Unknown
  Obtained from environmental sample
  DOMAIN (2)...(142): CheR methyltransferase, SAM binding domain
  misc_feature (1)..(147): Xaa is any amino acid
MLLTEIVPKPWNFEILASDISLKCLMTAKEGFYPDNRLEGIPPAYLTKFFNKVDGGYKIKPEIQAKIKFDYHNLKNDSQQRNLDVVFCRNVIIYFDDVAQTNVINRFWDSMASKSFLFIGHSESLFGMKTKFEFVKTEWATLYRKNL

SEQ ID NO: 66785 - DNA, 1143 bp, Unknown
  Obtained from environmental sample
  misc_feature (1)..(1143): n is a, c, g, or t
gtggcagatgaaatatcagtcttagtagtagatgactcggcgttaatgcggaatttaataggccgcatgatcgaagatacccccggccttgccgttgctgaaaaagcgatgaacggcatattcgcccttcaaaaaattccccgcgtggaaccggacgttatctgtcttgatatagaaatgccggaaatgaacggcattgaatttttaagggagcggaaaaaacgcgggattgatattcccgtagtaattctttcttccatcgccgcgaaaggcgcgcaggtaaccatggaagccctttctttgggagccagtgactttattcaaaaaccttcgggctcaatatccgaggatattcatacggtaaaagatacgctagtcggtatgctcttaggttacggcggcgcataccgcaaatcaaaagggaaaaaggttcttgctccttcggagtacgcgaagaaaactcctcccgccaccaaaaatgttgatcttctcgctcattttaatcttgtaccgaccgccgaggccaaacctgccgctccgcccacgccgcttcgcaaaccgggaaggacggaaataatcgccataggcatcagcacaggcggccccgacgctttacgcgttgtgttctctaaaattgacgcggacttaaaagttccgattgtagtagtacagcacatgccacccggctttaccaatgaattcgcaaagagccttgaccgcatctgcccgctggaagttaaagaagccgctgaaggcgactctatagttccgggaagaatccttatcgctcagggcaacaaacatcttgaagtggaaaagaaagccggcagccaggtagtgcacctttccgactctccgcttgtttcgggacaccgcccttcagcggacgtgcttttcgcttctgtagcgatgaattataccaacaacgctcttggagtaaaaatgaccggcatgggccgcgacggcgcacagcatcttgggacaatttacagggaaggcggtatgacgcttggtcaggatgaaaaaagcgcggttgtctacggaatgccccgtgttgccttcgagttgggccatgtaatggaacaagtttctttggataatatggcgcgcagaatttgcgatgtcgcaaaaacgcctcgttag

SEQ ID NO: 66786 - protein, 380 aa, Unknown
  Obtained from environmental sample
  DOMAIN (5)...(122): Response regulator receiver domain
  misc_feature (1)..(380): Xaa is any amino acid
MADEISVLVVDDSALMRNLIGRMIEDTPGLAVAEKAMNGIFALQKIPRVEPDVICLDIEMPEMNGIEFLRERKKRGIDIPVVILSSIAAKGAQVTMEALSLGASDFIQKPSGSISEDIHTVKDTLVGMLLGYGGAYRKSKGKKVLAPSEYAKKTPPATKNVDLLAHFNLVPTAEAKPAAPPTPLRKPGRTEIIAIGISTGGPDALRVVFSKIDADLKVPIVVVQHMPPGFTNEFAKSLDRICPLEVKEAAEGDSIVPGRILIAQGNKHLEVEKKAGSQVVHLSDSPLVSGHRPSADVLFASVAMNYTNNALGVKMTGMGRDGAQHLGTIYREGGMTLGQDEKSAVVYGMPRVAFELGHVMEQVSLDNMARRICDVAKTPR

SEQ ID NO: 66787 - DNA, 1230 bp, Unknown
  Obtained from environmental sample
  misc_feature (1)..(1230): n is a, c, g, or t
atgaaagtcgtagttatcggcgcccaatggggcgatgagggaaaaggaaaaatcgttgactatctggcaaacgaagcgcagataatcgtccgctacgccggcggggcgaacgccgggcacacaattgtcacgggcggacagcaatacgccctgcatctgataccttccggggttttttatcccgataaaatttcaatcctgggcgccggcatggttatcgatccaaaagcgttattcgacgagattaaaatgcttgaagaccgcggcatagacacaaagggcagaatttttatttcggaccgcgcccatattgtgcttcccaaatatattcagatagacaaagagcgcgacgccgcgcgtaagaaaccaatcggcactacgggccggggcatagggatcacatattcaatgaaaagcgaaagggacagcatacgcattgccgaccttaactggaaagaaaaaatggacgagcttgacaaagccgaccgcgatttcctcgcgccttacattgacaggcttcttgaaatgtcggttgacttaagcacataccttaatcaccgtaaaaattcgcaggtgctttttgaaggcgctcagggaactcttcttgatctcgatcttggaacttacccctatgtgtccagcggaatgtcatgcgcggcaggcgcggcggtcggcggctgtatcggaccgcgcgcaatcgacaaggtactgggtgttttcaaagcatactctacccgcgtaggtaacgggccgcttcccagcgaatttgatccgactgccgaagacgagctctgccgctttgtccgcgataccggccgcgaatacggcgttaccacaggcagaccgcgccgctgcggttaccttgatcttgtttctcttcgttacgcctgtcttaccaattctatcgacagccttgtaatgactcatcttgatgtatatgacacttttgaggaaattaaagcgtgcgtcggctacaggatcggagataaaatcgtagaatcatttccgtcttccattgaagaactcaacaatgccaaaccggttttacggacttttaaaggctggaagaagtctctcgctgacgcgctcatctacgatgaattccctgtagccgcaatggaatatatcgagtttatcgaacgtttttgtgaaacttccgttgatattgtatcagtcggctatgatcgtaaagcgacaataatccgtaaaagcccctggctgtgccagtaa

SEQ ID NO: 66788 - protein, 409 aa, Unknown
  Obtained from environmental sample
  DOMAIN (2)...(401): Adenylosuccinate synthetase
  misc_feature (1)..(409): Xaa is any amino acid
MKVVVIGAQWGDEGKGKIVDYLANEAQIIVRYAGGANAGHTIVTGGQQYALHLIPSGVFYPDKISILGAGMVIDPKALFDEIKMLEDRGIDTKGRIFISDRAHIVLPKYIQIDKERDAARKKPIGTTGRGIGITYSMKSERDSIRIADLNWKEKMDELDKADRDFLAPYIDRLLEMSVDLSTYLNHRKNSQVLFEGAQGTLLDLDLGTYPYVSSGMSCAAGAAVGGCIGPRAIDKVLGVFKAYSTRVGNGPLPSEFDPTAEDELCRFVRDTGREYGVTTGRPRRCGYLDLVSLRYACLTNSIDSLVMTHLDVYDTFEEIKACVGYRIGDKIVESFPSSIEELNNAKPVLRTFKGWKKSLADALIYDEFPVAAMEYIEFIERFCETSVDIVSVGYDRKATIIRKSPWLCQ

SEQ ID NO: 66789 - DNA, 390 bp, Unknown
  Obtained from environmental sample
  misc_feature (1)..(390): n is a, c, g, or t
gtgctcgttttcaagggcgaaatacaggccctgcttgaccaactggtgtcacagcagttaaaaacatcgtatgacaacgacgttttgaaggcagccctgcccgaaatccttaaggcttgggccgccaagggcgattcccttgcattgctgctgccaaaagcgtcccttgacaagcttgaaggcttttttaaggataaactgtccgcgcaactcaagaaagggctggaactcaaatcggataattccttttcgggcggtttccgcatcgcccaaaaggacggttcggcgtattacgacttctcggccgaatcggtagctgaaatgctgtccgcctaccttaacccccaactggcggaaattcttaaagattcggcaaaaaaggaagtataa

SEQ ID NO: 66790 - protein, 129 aa, Unknown
  Obtained from environmental sample
  misc_feature (1)..(129): Xaa is any amino acid
MLVFKGEIQALLDQLVSQQLKTSYDNDVLKAALPEILKAWAAKGDSLALLLPKASLDKLEGFFKDKLSAQLKKGLELKSDNSFSGGFRIAQKDGSAYYDFSAESVAEMLSAYLNPQLAEILKDSAKKEV

SEQ ID NO: 66791 - DNA, 570 bp, Unknown
  Obtained from environmental sample
  misc_feature (1)..(570): n is a, c, g, or t
gtgggacagtactattaccttgtacctcagcttccctatcttgtttttggccaggcgccgcctatgtcgccggaagcgttcagggatctggcgctgaccctgctcgacgagcaggacgccgcgctgctggatacgcttggagtgggcttaaaaccgtcccttgatacaacttccagcggttccgattttattgataaatggcgggaatgggaacgcatactcaggctgaacctcgtcaaacaccgcgccgccaaattaaaacgcgaagcccccgcggtcgagccgcccgtgcttccctccgacgctgcggctgccgcggcaaaagccgtgcaggaaacgcctttggaaggggagatcgaaatcgacaaggcccgctggcatgccattgacactctgctcgagggaagcggtccctttgaccgggacaccgttttcgcttatatgctcaagttgataatccttaatcggcaggctttatttcaggccgaaaggggattttctgaatataaatcgctctacgcttccatcctggaacaatcaggtaaattaactgcgggagaatctaaatga

SEQ ID NO: 66792 - protein, 189 aa, Unknown
  Obtained from environmental sample
  misc_feature (1)..(189): Xaa is any amino acid
MGQYYYLVPQLPYLVFGQAPPMSPEAFRDLALTLLDEQDAALLDTLGVGLKPSLDTTSSGSDFIDKWREWERILRLNLVKHRAAKLKREAPAVEPPVLPSDAAAAAAKAVQETPLEGEIEIDKARWHAIDTLLEGSGPFDRDTVFAYMLKLIILNRQALFQAERGFSEYKSLYASILEQSGKLTAGESK

SEQ ID NO: 66793 - DNA, 1143 bp, Unknown
  Obtained from environmental sample
  misc_feature (1)..(1143): n is a, c, g, or t
atgacaggaacaaaaggaacggtggtagccgttaacggcaatatggtaagcgcccgttttgacggcgctgtctccatgaacgaggtcggttatgtcaaggtcgccgacaaaaagctaaaaagcgaggtcatccggatccgcggcgaagtatgccagttacaggtcttcgagatcaccaaaggtatcgcggtcggcgatacggtggaatttaccggggacatgcttgccgtggaactggggcccggcctcctgggacaggtttacgacggcttgcagaccccgttgccccagcttgccgaagctgcgggctatttcctggagaggggcgtctacatggatcccctgcccggtgacaaaaaatgggattttacccccaccgccaaagtgggcgacaaggtggcccgcgccgacaccctcggcaccgtaatggaaggggcctttacccaccggattatggtgcccttcaacctgtacggctcatacaccgtgtcaaaaatctccaaagccggctcatacaagatcaaagacaccgtcgccgaacttaaagacgaaaaaggcaagacggttaatgtcacattcagcttccgctggccggtaaaacgcgccgtggactgctatgaggaacggcttaaaccggaagaacccatggtgacgagggtacgcctcatagacaccttcttcccggtggcccgcggcggcacttactgtatccccggcccctttggcgcgggcaaaacggtattgcagcagataaccagccgcttcgccgacgttgacatcgttatcgtcgcggcctgcggcgagcgcgccggcgaggttgtggaaaccctcaaagaattccccgaacttaaagacgaaagaacagggcgctccctcatggaacgcaccattatcatctgtaatacctcctcgatgcccgtagcggcccgcgaagcttcggtatacaccgcggtgaccctcgccgaatactacaggcagatgggtcttaatgtcctgctgctcgctgactcgacaagccgctgggcgcaggccatgcgcgaaatgtcaggccgcctgaggaaatacccggcgagggaagcgttccccgcctacatggaatctacaatcgccagcttctacgaaagagccggtattgtgcggtga

SEQ ID NO: 66794 - protein, 380 aa, Unknown
  Obtained from environmental sample
  DOMAIN (8)...(72): ATP synthase alpha/beta family, beta-barrel domain
  misc_feature (1)..(380): Xaa is any amino acid
MTGTKGTVVAVNGNMVSARFDGAVSMNEVGYVKVADKKLKSEVIRIRGEVCQLQVFEITKGIAVGDTVEFTGDMLAVELGPGLLGQVYDGLQTPLPQLAEAAGYFLERGVYMDPLPGDKKWDFTPTAKVGDKVARADTLGTVMEGAFTHRIMVPFNLYGSYTVSKISKAGSYKIKDTVAELKDEKGKTVNVTFSFRWPVKRAVDCYEERLKPEEPMVTRVRLIDTFFPVARGGTYCIPGPFGAGKTVLQQITSRFADVDIVIVAACGERAGEVVETLKEFPELKDERTGRSLMERTIIICNTSSMPVAAREASVYTAVTLAEYYRQMGLNVLLLADSTSRWAQAMREMSGRLRKYPAREAFPAYMESTIASFYERAGIVR

SEQ ID NO: 66795 - DNA, 621 bp, Unknown
  Obtained from environmental sample
  misc_feature (1)..(621): n is a, c, g, or t
gtgaaagacggaagcctcggctctgtaaccatcgggggaactgtaagccccgcgggcggtaactttgaagagccggtaacccaggcgacgctgaaagtcgtcggcgctttccacgggttgtcccgcgagcgctccgacgcccgcaagttcccggccatccacccgcttgactcatggtcaaagtacaagggaattatttccgccgagaaagtggaatacgcccacaactttatgcgcagaggcattgaagtagagcagatgatgaaggttgtcggcgaagaaggcacaagtatcgaagactatgttgtctttttaaagggcgatcttatagactccgtttatttccagcagaactcatttgacgtggtagacgccgccgttaaaccggaaaggcaaaaatacgtgttccagaaactgcttgtagtactcgcgtcccagtttacctttgccgacaagaacgaagcgagaagctggttcaacaggctaaggcagaagttccttgattacaacgggtcggaatggaagagcgagcgttttgaagggcttgaaagcgaaattgaaaacgcgatcaagaaccagtcgaaaggcttggataaggccgcggaaaaaatattggcttaa

SEQ ID NO: 66796 - protein, 206 aa, Unknown
  Obtained from environmental sample
  misc_feature (1)..(206): Xaa is any amino acid
MKDGSLGSVTIGGTVSPAGGNFEEPVTQATLKVVGAFHGLSRERSDARKFPAIHPLDSWSKYKGIISAEKVEYAHNFMRRGIEVEQMMKVVGEEGTSIEDYVVFLKGDLIDSVYFQQNSFDVVDAAVKPERQKYVFQKLLVVLASQFTFADKNEARSWFNRLRQKFLDYNGSEWKSERFEGLESEIENAIKNQSKGLDKAAEKILA

SEQ ID NO: 66797 - DNA, 3207 bp, Unknown
  Obtained from environmental sample
  misc_feature (1)..(3207): n is a, c, g, or t
atggcttgccgtccaggttaccaatatcggcataacgctccgttacggctgcaatatggttctggtatgggcttcccatctttcggacgggactgtcgtccccaacgccgacgtggaactcatggaaggcggaagggttgttctcgtcggcaaaaccgacgatcagggccttgcggtgtttatttccccaatggcgattttgtttccaggtttaccgaaccccagggcaattcctggagcaacgcttttggcaacggcttccgcgtccgggtaagcgaaggttccgggccgaccatggacagggccgagttcgttcccaatgacagccacaacctctggcgtttcagaatagacgcgtatgagagcccctttaacgcggaaagggaacgcccggtgattttccttttcaccgaccgcggcctgtacaggcccggcgaaaccgtcaccttccggggcattgacaggaatctaagcagggggcagtacacagcgttccgggggccgtataaaattgaggtcagcaccggggcgtaccaggctccggtgattgcaacgctcgaagggaatactaccggaaacgggggctctttcggttctttcaccctgccgcagaacctcgatccgggccagtacaggattatctaccgccgcgccgggacaacggtttccggacgggagcgtgaaaccgaagaatcaatagggtttactgttgccaattttgaacgcctccgttttgaatcctccctgcgctttactgatcctgtggtccatcagggcgaaaaactcagcgcttccctttccgcttcctggcttgccgggggcgggctttcaggcgcgccctatacatggtttctgacccgggagcccgcttccgtggttccgggcggggcacaaggcccctggcactattggaatttcgggcctgaatccgacggcgagcgatcctttgtcgggcggggggaagggaccctgggccccgacgggaaagcaagtattgccaacaatacatccggcgagggtattgagggcgcggcctaccgctaccagctcgaagcctcggtacaggacgcggcccgccaggaaatatcctcccgcgccgccattctggttaatcccgcatctttttacattgccgcgcgccttgattcgggaacaataaaaaccgccgccacaggcgccgccgccggtggcgccgcaacaaacccctccgcctggttcctcagcgcgggacagccggcgacattaagctgggcgcttgtttcgcctaacggcgacggggtgggaactagtctgactagtcaggacttgtcgatacagcttgtccgccacgaatggaaacaggcgcgccaacagggaacaggcggcaggatcaacctggtatgggagcgggttgaggaaatcaccgcgcagagaaacgtgaaaattacgcctgcgtcttcaggcgggatcatctccggcgtgtttaattttacgcctgacaagagcggcctctgggaattcaggctttccggcagcgatcaaaaaaagagagtggccgcgacccgttcccgtttttacgtcagcggcgcgggatgggtgcgctgggactctgacgacgtggacaccataaccctcaacaccgaccgcccgagttacgcgcccggacagacggcgaaaataatggcgcgttcgccgcttgaaaaaggcaaatacctgttaacgctggaacgcgaaaatgtcatatcccaaaagattatcgagcttaacggttccgccctgaccatcgacatccccatcgaagattcatatgtgccgataatctacgccgcgcttagttcctacacggtgcgttcttccgccgctgtgaataacagctattacgaacctgacctggacaaacccaggggcatcttcggcgttacgccgatttatattgacaatgaaagccgccattaccaaattgagattgataccggcaggaacacctaccgcgccgcggaagaagcgcaggtaaagataaaggtcttgctgaacggcaggccggcggcgaatacggaagttagttttctggcggttgaccgcggggtggttgacctcatcgactaccatgttcccgatccgctcgcttcgttttacgccccctggcattttcccctgggagtgcgcggcgcggacagccgttccctcctgatcgatccggtgacgtataacatttcggatctgcagggcggcgacagcgatgacgacggcaagggagatgatgccgcgcgcggttttagtgacgatatgaaagaacgcaaggactggaggccgacggcggtttttgaaccgtaccttgtcaccgggcaggacgggactgtcaccgtaaaattcaaactgcccgattcgcttaccagttaccgctgtaccgcgcttgccgtgggcgttaacaattttggcattaaggaacaggatctgcgggtaagcgccccgctgacggcgattgccgccatgccgcgcaaactccgctggcgggacaccggcacggtttcgctcatactgacgaatcttgaaaacgccgcggtagaggccggcgtaacgcttgcgtcatccgccgaggctgacgccgttatagaggttgacggcgcggattccaaaaccgtaaaggtgcttcccggcgcgtcacaggaggttacattcaaagtcgcagctattggcacaggccttgcgcagcttacctttacactgcgctcgcccgaagtaaacgagcgtatcatcaaaacgcttcttgttgacaggcccagcctgaccgagactgttacaacaatcggcaatctggggccggaaaaacttttcttcgaagaaggcatgatactgccgtcgctggttccggaaggaacgggcaatgtttccgtgagcctttcggcttcccgactggcgacgcttaaagaagccgtgcgctatttgttggattacccctacggctgcattgagcagcgcacggcccgcctgcttccgatagccgcctttggcgagtaccttgacacattcaacctggatagtccgcttgccgcttttggcgggcggcctgacataatagatcccgcgggttcgacgcgcggattgtccgcctgggatccaaaaaaacttgtgaaaaagaattggcggaactcgccagattccagctggccgacggctcattcccctattggccgggaggcagtaacggcaatctttttgtcagcatga

SEQ ID NO: 66798 - protein, 1068 aa, Unknown
  Obtained from environmental sample
  DOMAIN (59)...(311): Alpha-2-macroglobulin family N-terminal region
  misc_feature (1)..(1068): Xaa is any amino acid
MACRPGYQYRHNAPLRLQYGSGMGFPSFGRDCRPQRRRGTHGRRKGCSRRQNRRSGPCGVYFPNGDFVSRFTEPQGNSWSNAFGNGFRVRVSEGSGPTMDRAEFVPNDSHNLWRFRIDAYESPFNAERERPVIFLFTDRGLYRPGETVTFRGIDRNLSRGQYTAFRGPYKIEVSTGAYQAPVIATLEGNTTGNGGSFGSFTLPQNLDPGQYRIIYRRAGTTVSGRERETEESIGFTVANFERLRFESSLRFTDPVVHQGEKLSASLSASWLAGGGLSGAPYTWFLTREPASVVPGGAQGPWHYWNFGPESDGERSFVGRGEGTLGPDGKASIANNTSGEGIEGAAYRYQLEASVQDAARQEISSRAAILVNPASFYIAARLDSGTIKTAATGAAAGGAATNPSAWFLSAGQPATLSWALVSPNGDGVGTSLTSQDLSIQLVRHEWKQARQQGTGGRINLVWERVEEITAQRNVKITPASSGGIISGVFNFTPDKSGLWEFRLSGSDQKKRVAATRSRFYVSGAGWVRWDSDDVDTITLNTDRPSYAPGQTAKIMARSPLEKGKYLLTLERENVISQKIIELNGSALTIDIPIEDSYVPIIYAALSSYTVRSSAAVNNSYYEPDLDKPRGIFGVTPIYIDNESRHYQIEIDTGRNTYRAAEEAQVKIKVLLNGRPAANTEVSFLAVDRGVVDLIDYHVPDPLASFYAPWHFPLGVRGADSRSLLIDPVTYNISDLQGGDSDDDGKGDDAARGFSDDMKERKDWRPTAVFEPYLVTGQDGTVTVKFKLPDSLTSYRCTALAVGVNNFGIKEQDLRVSAPLTAIAAMPRKLRWRDTGTVSLILTNLENAAVEAGVTLASSAEADAVIEVDGADSKTVKVLPGASQEVTFKVAAIGTGLAQLTFTLRSPEVNERIIKTLLVDRPSLTETVTTIGNLGPEKLFFEEGMILPSLVPEGTGNVSVSLSASRLATLKEAVRYLLDYPYGCIEQRTARLLPIAAFGEYLDTFNLDSPLAAFGGRPDIIDPAGSTRGLSAWDPKKLVKKNWRNSPDSSWPTAHSPIGREAVTAIFLSA

SEQ ID NO: 66799 - DNA, 1395 bp, Unknown
  Obtained from environmental sample
  misc_feature (1)..(1395): n is a, c, g, or t
ttggcggaactcgccagattccagctggccgacggctcattcccctattggccgggaggcagtaacggcaatctttttgtcagcatgaggatggcgcatatcgcggccttggcaaaggaaaaaaacatgaatgtcccggactcgctggatacccggaaacttttatcgtatatcgggacaacctcaagcgattccgacgctccaaaccgcccgtcaaaagacccttttctcaaaggttattcattgtgggtcagaaccatgtacaaagaaagaatcggttctgaaataacggcctttttaaagcgcggggacgaactgggaatttcaggctgggcgttcgccggtcttgccgcgctggaaatgggacagaaggatttggccgcgtccgcaagggatcgcgtacgcagatttatccgcccgggaacccgcagcctcgacttaaccgatacctacgagcggcagggcaatttctggggttacgattccgaccgttacgccctcgcgcttatgctcttcaattcgcttgattcccagtcaggccgggaaggcgatgacatgacaacacgccttgccacatccctcatcgaacgtcagcgcaggggcgtgtggaacaacaccgcgtcttctttctgggcggcgcttgcctttggaatgttaggcgacgcggaatcatccgaatggaaatctgctaacggctcgccgtttactgcgccgcggcttgacgtgacaacgagccttggcggggcttccctgttcagcgccgaatttaaaacttacggcggcgttcctgtgtcatataacgggcgcttcatggaaaagccgataatcgatcttaaacgcgacacccttctgcccctgcggattgagcgttcggggcccggcaggctctactacacggccagcctccgctacggcattccggtcgagcttgccgccgcccgcgacgaggggcttggggtgtttgttgaaacttttgattccgatggcaaccccgtcaggaacggcaaactccaggcgggcaagacctatacccggcgcgtcaccgtttccagttcccgcgaccgcacttttgtggctttacgctcgcccatcccatcaggggctgaaattgtagacgcagtctttgtcaccagttccggcgtgcctccttcccaaaatgacgagtcagaaaatgaagacgattggcgttattacaagccggagccggtgcgtttcatgatggacgacgaggcccgcttccactgggattttttcagtgccggcaggcagcagattgaattccgtttccgcgcggtaatgcccggcatataccccaccccgcccgctgtcgccgagtgcatgtacgaggaggagattttcggcagatcgggaggggaactggttaggattcaatga

SEQ ID NO: 66800 - protein, 464 aa, Unknown
  Obtained from environmental sample
  misc_feature (1)..(464): Xaa is any amino acid
MAELARFQLADGSFPYWPGGSNGNLFVSMRMAHIAALAKEKNMNVPDSLDTRKLLSYIGTTSSDSDAPNRPSKDPFLKGYSLWVRTMYKERIGSEITAFLKRGDELGISGWAFAGLAALEMGQKDLAASARDRVRRFIRPGTRSLDLTDTYERQGNFWGYDSDRYALALMLFNSLDSQSGREGDDMTTRLATSLIERQRRGVWNNTASSFWAALAFGMLGDAESSEWKSANGSPFTAPRLDVTTSLGGASLFSAEFKTYGGVPVSYNGRFMEKPIIDLKRDTLLPLRIERSGPGRLYYTASLRYGIPVELAAARDEGLGVFVETFDSDGNPVRNGKLQAGKTYTRRVTVSSSRDRTFVALRSPIPSGAEIVDAVFVTSSGVPPSQNDESENEDDWRYYKPEPVRFMMDDEARFHWDFFSAGRQQIEFRFRAVMPGIYPTPPAVAECMYEEEIFGRSGGELVRIQ

SEQ ID NO: 66801 - DNA, 1983 bp, Unknown
  Obtained from environmental sample
  misc_feature (1)..(1983): n is a, c, g, or t
gtgaatcttccctctgcgtcctccgcgtctccgcgtgaggaatttcttcaatttatttataattcgggagaaacttatttgcaaaacaaaagttattgggagataaacagtaaaatactccgcgagcgctacccaggcctccttgatcagctaacgcatgaggatgacggcctcaccgatgaagatattaaaaccgaaacaagcgcgtccggcgagccaactttaaaagttaaagggctgtacgtccactccccgcgcgatcctgtaaaagaaggcaagcgctttgcggaatcagccatagcggaagcagctttaaataaaacatcttcgtcagtattcattgtccttggattcggacttggttatacggcgcaggcccttgcggagcttgatccccaaagcccaatcatcatagtggaaaaataccccgcgttgctgcgcctcgcctttgaatcgcgtaaccttgaaaaactgctttcaggaaacaagatcgcgttcgtgctggatgaaaatggggtaagcggggttctctcccattttgaaaaaggcgccgttgaaaaactaaaaattgaaatcctgcgtaacaagcccctgaccggcattgacgaacaatggtactcagccgtggaaaataaaatccgcgcctggacaatgaagggcgacgtaaatgcggcgacacttaaaaaattcgggaaacgctgggttagaaacatactgcgaaattcatgcgctataagagatttaccggggatttcccgcttcgcggggcttgccggcggcgcgccttataatgtgtattacggaacgtattacggcacagcgggcgatggcgcgtccggcgaacccctgcccgtattcatggcggcggccgggcccggcctggacaaagtcggagcgttgctgccggaaatccgcaaacgctgtatcctgctggccgtggacacaagcctgcgttaccttttaaggaacaacgcggagcccgactttgccctggtaatcgatccgcagttttggaacagcaggcatcttgaccgctgcgccggcggaaataccaacctgataatcgaatcggctgtgtacccgcccgtgctgaggctcgcgtttaaaaggatgtacctctgcggatcgctttttccgctgggaaaatatatcgaagaaagagtcgatccaaaaggggcgctcgccaccggcggctcggtcgccacaagcgcgtgggatttttccaggctgttaggcgcaaaacagatatggatcgccggccttgacctcgcctttccgggcggcaaaacccattaccggggggcgcagtttgaagaaaaagcccttgccgaatcatggcgcctgcagccctctgaatcatggctggcccgcgcaatgcgcgacggcataccgcgtattggccccgctcttggcggcggacaggtgcgaagcgacagccgcctttccctctacgccgcctggttcgagaactgtttcagccaataccccgatataaaaaacttcagcctctgtgacggcggcctcgcgatagcgggccttgaagccgccgaacctgaggccattcttgccctgcccgatcgtcgcaatgaaatcgacgcgcggattgaatcggcgtgttccggtattgaagcggattttttcgagccgcaggaagttaagcgaagaagccaacgttatgaaaaggcaatagcggaactgcgtatatcacttgaaaaaattaaagccgcctgtgaaaaaggtgaaagaatcgcgaaacaggctttgcgagaaaaactggactcaggcaaacaggaaaaaattcttgccgatcttgatacgataaaccggctaatcagttcaagcgaagtaaaggaaatcgccggttttctttttccgcagcaggccattacgtcagatgaaaaagacgctttccgtaattacatggaaacgtcagccgcattatacagatcgctcggggaagctacggaaactgtggaaatttga

SEQ ID NO: 66802 - protein, 660 aa, Unknown
  Obtained from environmental sample
  DOMAIN (268)...(423): Protein of unknown function DUF115
  misc_feature (1)..(660): Xaa is any amino acid
MNLPSASSASPREEFLQFIYNSGETYLQNKSYWEINSKILRERYPGLLDQLTHEDDGLTDEDIKTETSASGEPTLKVKGLYVHSPRDPVKEGKRFAESAIAEAALNKTSSSVFIVLGFGLGYTAQALAELDPQSPIIIVEKYPALLRLAFESRNLEKLLSGNKIAFVLDENGVSGVLSHFEKGAVEKLKIEILRNKPLTGIDEQWYSAVENKIRAWTMKGDVNAATLKKFGKRWVRNILRNSCAIRDLPGISRFAGLAGGAPYNVYYGTYYGTAGDGASGEPLPVFMAAAGPGLDKVGALLPEIRKRCILLAVDTSLRYLLRNNAEPDFALVIDPQFWNSRHLDRCAGGNTNLIIESAVYPPVLRLAFKRMYLCGSLFPLGKYIEERVDPKGALATGGSVATSAWDFSRLLGAKQIWIAGLDLAFPGGKTHYRGAQFEEKALAESWRLQPSESWLARAMRDGIPRIGPALGGGQVRSDSRLSLYAAWFENCFSQYPDIKNFSLCDGGLAIAGLEAAEPEAILALPDRRNEIDARIESACSGIEADFFEPQEVKRRSQRYEKAIAELRISLEKIKAACEKGERIAKQALREKLDSGKQEKILADLDTINRLISSSEVKEIAGFLFPQQAITSDEKDAFRNYMETSAALYRSLGEATETVEI

SEQ ID NO: 66803 - DNA, 1116 bp, Unknown
  Obtained from environmental sample
  misc_feature (1)..(1116): n is a, c, g, or t
atgccctatgagcccggttctgtgctgaaagccatatcaatttcggcgttgctggattcaggcgcgataacggaacactccgaatttgtctgcaatggtatttatgaatggactaccccctcaggcagaagggaacggctgagatgcgccgacgggatcgctcatggcagggtcgggccgagggaaataataatgttatcctgcaatataggcgcgtttcacgccgccagcatgcagaacgatcagggcttctaccagtccatgctggatttcggctttggcaaaagaaccggcgcgtggaggccggaaatggaaatatccggtttccttgacaaacccggatcgaggacctggtcaagccgcaccaagcagtccatcgcgttcgggcaggagatagccgtttccgcgctacaggtactgcaggccgccggcgccatcgcaaacgacggagtattggtcccgccaaaaatagtgtcccgcatcgtttccgccgacggcagcacagaaaagatctgggacaacggcgacaaccagaaccgccggataataagcccggagaccgcaaggaagatgcgccagtacatggctgacacggcgtccgtgatgggcaccggctggcgcggcagcatcggcgatatcaatatcgcgatcaaaaccggcaccgcccaataccgggatccctccagcaggaggggatccggttattccgctacagatttcatttcaagctgtatcgcccttttgcccgcggaaagcccttcgcttgttttgtatgtggcaattattaaacccagaggcgaaactctcggcggaagaatcgccgcgcccgccataaaggaagctgccgaagaaattgtcaattacctcggcatccctcgcggcagaaccccctggttgtctcatccgggcaccatagacattggggaagagaggctgccggccataggcggcagcgtccccagcttttacggcctctccaaaaaagccctggtgcccctgcttctgcgaaacgacctccacatagaaatgtggggcgacggctgggtaaggcgtcagtcccctccccccggaacgacgttaaccgcggacatggtgattgagctgtatttggaataa

SEQ ID NO: 66804 - protein, 371 aa, Unknown
  Obtained from environmental sample
  DOMAIN (317)...(371): PASTA domain
  misc_feature (1)..(371): Xaa is any amino acid
MPYEPGSVLKAISISALLDSGAITEHSEFVCNGIYEWTTPSGRRERLRCADGIAHGRVGPREIIMLSCNIGAFHAASMQNDQGFYQSMLDFGFGKRTGAWRPEMEISGFLDKPGSRTWSSRTKQSIAFGQEIAVSALQVLQAAGAIANDGVLVPPKIVSRIVSADGSTEKIWDNGDNQNRRIISPETARKMRQYMADTASVMGTGWRGSIGDINIAIKTGTAQYRDPSSRRGSGYSATDFISSCIALLPAESPSLVLYVAIIKPRGETLGGRIAAPAIKEAAEEIVNYLGIPRGRTPWLSHPGTIDIGEERLPAIGGSVPSFYGLSKKALVPLLLRNDLHIEMWGDGWVRRQSPPPGTTLTADMVIELYLE

SEQ ID NO: 66805 - DNA, 816 bp, Unknown
  Obtained from environmental sample
  misc_feature (1)..(816): n is a, c, g, or t
atgaacagtctgccaaaacggcgttatatattcgcggtatccgcgctgcttttggcggcgctgtatatcctaatccgttacgcgctgaatatagaacccggcatttccgacaacacgggcatgttgaaaacgacgcttgaacgcgggcctatagtcgacaggaacgggaagatacttgcaagtcaggtcaggcgttatgatatctacattatcccgcccaaagaaagaaacccgaacaagcagaatgaaaaaatagaaaacctcgcggacaggctgtcccctgtcctggaaatgaacgaggaagaaatacggcaaagaatcaaagcttccaaaaaagactttataattaaaagaaacgttacgccggaagcctataacattatcagaacaatgcaggaagagaaaggcaatccccttgcgggagttgtcgcaagggccgtgcctttcagggtttatcccgaaaaagaacttgccgcgcagattatcggttttgtcggcgcggagtaccagggccaggaaggaattgagtatgccctcaataccgaactcgccgggaaagagaatgagggcaatggcaacagggtagaattgaccatcgacgcgaacgtccagtacattctggaaaaagtggccggctcgacgctgaaggatacccgcgcggaatcggttatttttctcgcgatggatcccagaaacggcgagatactcggatccgcggtcaagcccggcttcgatccaatgattttcgcaattttagtaacgaatattaccgtaaccttccggcgaatatgccctatgagcccggttctgtgctga

SEQ ID NO: 66806 - protein, 271 aa, Unknown
  Obtained from environmental sample
  SIGNAL (1)...(19)
  DOMAIN (43)...(199): Penicillin-binding Protein dimerisation domain
  misc_feature (1)..(271): Xaa is any amino acid
MNSLPKRRYIFAVSALLLAALYILIRYALNIEPGISDNTGMLKTTLERGPIVDRNGKILASQVRRYDIYIIPPKERNPNKQNEKIENLADRLSPVLEMNEEEIRQRIKASKKDFIIKRNVTPEAYNIIRTMQEEKGNPLAGVVARAVPFRVYPEKELAAQIIGFVGAEYQGQEGIEYALNTELAGKENEGNGNRVELTIDANVQYILEKVAGSTLKDTRAESVIFLAMDPRNGEILGSAVKPGFDPMIFAILVTNITVTFRRICPMSPVLC

SEQ ID NO: 66807 - DNA, 1992 bp, Unknown
  Obtained from environmental sample
  misc_feature (1)..(1992): n is a, c, g, or t
atgaaacacaataaaacgtttaccagcgaattattcatgtcggccccattaacgggaaaaaaagcggtttttgaaacggtattatcacccttgaggcagaacggcgaagttgtcggaatattgagcatcgcgcgcgacataaccatacgcaaaaccatggaagatgaaatccgcgccgctttggaatccaagacgtccttcctcgcccatatgagccatgagttaagaaccccgcttaacgtggttataggccttaccgatttaattctggaagacaaccgccaggacgtatttattacaaataacttaatgaaaataaacaacgccggaagcactcttttaagcattgtaaactcaattttggacttttcaaaaattgagtcgggcaaacttgaattaacgccggttgaatattttaccgccagcgtcctaaacgatgttgttaccgttgttcttacccgcctgggggaaaaacccataaagttccgtctggatatagaagaagatatgccggaaaggcttataggcgacgacctgcgcgtaaaacagatattaattaatcttttgaccaacgccgtaaaatatacccgcgagggaaatattgatttaagcatacgctgtaagcacgaaggcagcgccgtgtggatggatattaatgtcagcgacacaggcataggcatacgcgagaaagacatgaaaaagctgttcaatgattatgtccaggttgataaaaaaaccaaccgcaacatagaaggcacaggcctgggactgcccattaccaaaaaacttgtagaaatgatgaacggacaaatcaatgcgaaaagcgagtacggcaaaggcactgcgtttattgtgcggataaagcagggccatgttgataattcgattcttggtcctgaagttgttaaaaaactccgcaatttcaagtatgccgaagacaagcgtattgccgccaaaaaaataatacgtctcgatttaagctatgcccgcgtgcttgtagttgacgacgtgcttaccaacctggacgtaacgtcggggcttttgcgcaaatacaggatgcaggtcgactgcttagacaacgggccggcggcgattgaaaggataaaggccggaacgcctgtttacaacgccgtattcatggaccacatgatgccggatatggacggcatagaaacggtggaccatatccgcgcgttagactcgcaatacgcgaagaagatacccataatcgccctgaccgccaacgcgattcaggggacggatcagctgttttttcatcacaaattccaggcgtatttaaccaaacccatcgacatggcggagttggatctgattgtaagaaaatgggtgcgcgacgaaacccgcgatgacgtgcccgttattacctcgcctatttacggagaggcttccgaacagatagaatttgacataccgggcgtagatacaaaaaaagggcttggcctgtacaccggcgacgcaagcgtataccttgcgcttctgcgctcctatgtttccaataccccggggcttcttgaaaaattgaagatcgtctcggaaagcaccctgcccaagtataatatctccgtacacggattaaaaggctccagcgccaacataggcgcggaaacaatacgcgaagcggcttatgaactggaaaaactgtcaaaagaaggcaatttgcagggtgtttgggcgctaaacaacaaacttatagccgatacgagaatcattatcgcaaacataaaggcgtggctggacaaatatgacgccacaagggagaaaaaacccgtccagaaagcccccgacagggaacttcttaaacgccttaggcaatcatgcgaaaactacgacataaaaggcgccgataaaactttgacaatactggaaagtaccgattacgaaaatgacaatgatctgataaaatggttaagggataaaattgaaaattcggacttttccgaagcggcacaaaagcttaaaaattatgtttaa

SEQ ID NO: 66808 - protein, 663 aa, Unknown
  Obtained from environmental sample
  DOMAIN (498)...(584): Hpt domain
  misc_feature (1)..(663): Xaa is any amino acid
MKHNKTFTSELFMSAPLTGKKAVFETVLSPLRQNGEVVGILSIARDITIRKTMEDEIRAALESKTSFLAHMSHELRTPLNVVIGLTDLILEDNRQDVFITNNLMKINNAGSTLLSIVNSILDFSKIESGKLELTPVEYFTASVLNDVVTVVLTRLGEKPIKFRLDIEEDMPERLIGDDLRVKQILINLLTNAVKYTREGNIDLSIRCKHEGSAVWMDINVSDTGIGIREKDMKKLFNDYVQVDKKTNRNIEGTGLGLPITKKLVEMMNGQINAKSEYGKGTAFIVRIKQGHVDNSILGPEVVKKLRNFKYAEDKRIAAKKIIRLDLSYARVLVVDDVLTNLDVTSGLLRKYRMQVDCLDNGPAAIERIKAGTPVYNAVFMDHMMPDMDGIETVDHIRALDSQYAKKIPIIALTANAIQGTDQLFFHHKFQAYLTKPIDMAELDLIVRKWVRDETRDDVPVITSPIYGEASEQIEFDIPGVDTKKGLGLYTGDASVYLALLRSYVSNTPGLLEKLKIVSESTLPKYNISVHGLKGSSANIGAETIREAAYELEKLSKEGNLQGVWALNNKLIADTRIIIANIKAWLDKYDATREKKPVQKAPDRELLKRLRQSCENYDIKGADKTLTILESTDYENDNDLIKWLRDKIENSDFSEAAQKLKNYV

SEQ ID NO: 66809 - DNA, 456 bp, Unknown
  Obtained from environmental sample
  misc_feature (1)..(456): n is a, c, g, or t
atggatgaggagcaaaaaaagattatcgcggtggacgacgttcctgagaatttaacggctatcaggaatacattgaaagacctgtacgaggtgtatccatgcccatccgcaatgaagatgtttgaattactggaacatgtcaagccggatataatattgctggatgtaaagatgccggacatggacgggtacgaagcgataaagaagctgaaaagcgacgccagattcaaggaagtgccggttatattcctgaccgccatgagcgacgagcaaaacgaaatagaaggattaaaactcggcgccgtcgattatatacacaagccttttgttacccccttattgcttcagcgtataaaaatacatctttccatggcggatcagaaaaaaacaatattggacagaaacagggaaattgaggattttctgaagaaaatctcaaatacccccaccgcttaa

SEQ ID NO: 66810 - protein, 151 aa, Unknown
  Obtained from environmental sample
  DOMAIN (6)...(119): Response regulator receiver domain
  misc_feature (1)..(151): Xaa is any amino acid
MDEEQKKIIAVDDVPENLTAIRNTLKDLYEVYPCPSAMKMFELLEHVKPDIILLDVKMPDMDGYEAIKKLKSDARFKEVPVIFLTAMSDEQNEIEGLKLGAVDYIHKPFVTPLLLQRIKIHLSMADQKKTILDRNREIEDFLKKISNTPTA

SEQ ID NO: 66811 - DNA, 540 bp, Unknown
  Obtained from environmental sample
  misc_feature (1)..(540): n is a, c, g, or t
ttgtccgaagacgaaaaaataaagtacaaagaagcggacggcgttttaaccgacgtgcttgtgcgctctcaggtgacaaaattcaaaaagctccgctttcatacccatgaaaatatcggttacggggatatcagccttcccgaagaggaaactcatacgcgctctcttgcccttctcttcggtcccgaaagcgaatgcggcaaatcactggaaaaaatggacgaacaggagattggcgaggctctttacgggatgggaaaccttatccggaatatcgcgcctgtttttcttctctgcgacccgcgcgaccttggaatcgcggagcgcgtgcgcgacacgcacttcggctatccggctctttacatttacgacaaatatccggggggaacgggccttacggaaagccttgcgctccgcattgagccgctgttagacgcaatccgcgaagttttaaggaattgtccctgtaaaaacggctgcccttcctgcgttggcgcgggcggaaataaagccgcggtaagacagttattaaatttttaa

SEQ ID NO: 66812 - protein, 179 aa, Unknown
  Obtained from environmental sample
  misc_feature (1)..(179): Xaa is any amino acid
MSEDEKIKYKEADGVLTDVLVRSQVTKFKKLRFHTHENIGYGDISLPEEETHTRSLALLFGPESECGKSLEKMDEQEIGEALYGMGNLIRNIAPVFLLCDPRDLGIAERVRDTHFGYPALYIYDKYPGGTGLTESLALRIEPLLDAIREVLRNCPCKNGCPSCVGAGGNKAAVRQLLNF

SEQ ID NO: 66813 - DNA, 522 bp, Unknown
  Obtained from environmental sample
  misc_feature (1)..(522): n is a, c, g, or t
ttgaggtcgggtttgtccacaagcacttgtctatcaaaacgtccggggcgcaggagcgcggggtctaacacgtcgggtctgtttgtggcggccaggataattagcccgctggcgttgtcaaaaccgtccatttccacgaggagttggtttaacgtctgttcacgctcgtcgttgccgcctgcgatattgtttatcctgcttttgccgattgcgtctaactcgtcaataaaaataatacagggagctttgtttcttgcctgcttgaataaatcgcgtacacgcgccgcgccaacaccgacaaacatttctacaaagtcggctccgctcatgcggaaaaaggaaactctcgcttctcccgcaacggcgcgcgccagtaaagtttttcccgtccccggtggtcccaccaaaagcactcccttgggtatcttgccgccaatctctttgtattttgaggattctttaaaaaatcgacaacttcaacaagctcttctttggcttcatcaacgccggcaacatcgctaa

SEQ ID NO: 66814 - protein, 173 aa, Unknown
  Obtained from environmental sample
  misc_feature (1)..(173): Xaa is any amino acid
MRSGLSTSTCLSKRPGRRSAGSNTSGLFVAARIISPLALSKPSISTRSWFNVCSRSSLPPAILFILLLPIASNSSIKIIQGALFLACLNKSRTRAAPTPTNISTKSAPLMRKKETLASPATARASKVFPVPGGPTKSTPLGILPPISLYFEDSLKNRQLQQALLWLHQRRQHR

SEQ ID NO: 66815 - DNA, 783 bp, Unknown
  Obtained from environmental sample
  misc_feature (1)..(783): n is a, c, g, or t
atgaatgaaaattccggtgacaagaatgataataaaggcggcccaatgtttccgtttggcggaccacccaaaatgcctgattttaaagggtttgggggttggaaattccttcttgtctatgttgttatcctgattataggaatgagcctttttaattatgtttttcttaacaagatgaatcctgcgatagatttttctgaatttaaatcccgtatttcaacgggcgaaattaaacgtgttgaaataacggaatcttattttacaggttttacaaatcccgataaaaaagagtcttcaaggactgttcctcgttcttacggttcacatgataaagtgtaccgcactgtttcaatccttactgaaggttttattgattttcttgatgcgcataatgtttcctatggcgcggtttcacgcgaaggcaacgctgttttaaattttatttttagctgggtattgccaatagctttcttcatttttatttggcggtttgttttcaagcggttggggaatatgggtggcaatgtgctttccatcggacaaaaccgcgcggttattgtcgcggagggggacattgttacgcgctttagcgatgttgccggcgttgatgaagccaaagaagagcttgttgaagttgtcgattttttaaagaatcctcaaaatacaaagagattggcggcaagatacccaagggagtgcttttggtgggaccaccggggacgggaaaaactttactggcgcgcgccgttgcgggagaagcgagagtttcctttttccgcatga

SEQ ID NO: 66816 - protein, 260 aa, Unknown
  Obtained from environmental sample
  DOMAIN (61)...(206): FtsH Extracellular
  misc_feature (1)..(260): Xaa is any amino acid
MNENSGDKNDNKGGPMFPFGGPPKMPDFKGFGGWKFLLVYVVILIIGMSLFNYVFLNKMNPAIDFSEFKSRISTGEIKRVEITESYFTGFTNPDKKESSRTVPRSYGSHDKVYRTVSILTEGFIDFLDAHNVSYGAVSREGNAVLNFIFSWVLPIAFFIFIWRFVFKRLGNMGGNVLSIGQNRAVIVAEGDIVTRFSDVAGVDEAKEELVEVVDFLKNPQNTKRLAARYPRECFWWDHRGREKLYWRAPLREKREFPFSA

SEQ ID NO: 66817 - DNA, 2004 bp, Unknown
  Obtained from environmental sample
  misc_feature (1)..(2004): n is a, c, g, or t
atggaattattgcataaatcaactgtcgttgcaaggttcgccagtcttgtgttagtatataatatgaaaaattccaccttgcctccactttatttaatagacgcttatggtcttatttaccgttcatatttcgcctttttaacacatcccctgcgtaataacaccggtaaaaatgtttccgctttattcggatttgcccgtactataatttccctaattgatgacggcgctcctgtcgttgacaacgacggtaaagatcttaatcatttaaaacccctccgtcttgcccgcgattttgattcgcgcactcccaccttccgccacaagatgtacagcgagtacaaggcaaacaggcaaaaaacgcccgaagaccttcacgagcaagttccgttagttgaagaatttttgaacgcgctgggcgttaaatgtattaaaaacgacggctttgaggctgacgatattatcgcgactcttgcggaaaaatgccgcgccgaaaaaaggcagtgctatattctttcatcggacaaagacctgctgcagcttgtcggcggcggaatatttgaattacgtcccgcaaaaattaacagaaagaatgaaaacccaacatcgccgggtccatcgtgggaacttatcgggcacgatgaagtaaaagcggagtggggtgtagagccgccgaaagtgctggatttgctttcgttaatcggcgacagttccgacaatgttcccggcgtaaaaggaataggcgaaaagacagcggttaaattgatggctcgctacggctctttagacgagatatataaaaatctggcggcgattgaaggctcaacaggaaagaaaattgccgaagggaaagaaagcgcctatttttctcaatcgcttatccgcctgcgaaacgatgtggaattgtcagttaattccattgatgagttatccgtagaaaatcttgacagacccgccggagcgaaagttcttatccgcgaaggcataaggcagagcgccaaacaacttgatccaagcgtaaaaccagccgctcaaacagccgccgagcaaaacgcagatacgcaaaattctccggaacaagaaacggacagcgtaaaccaaatggaaacattatcttttcccgctgcggagcaaagccttcttggagacggagagtacaaaacaattcttgatattgacgagttgaactctattttggaacaggcaaaaaaacaaaaacttttagcgctcgattttgaaacagattccctcgacgcatggcgttctcgtcccatcggtatttcgcttgcggtaaaacccaaagaggcgttttatgtccccgtcgctccccatgatgtcagcggcacgccgtcaaaattcaatgatcccgaaaaagtccgctccctgctttcccctctgtttgccgacaaagaaatgacgatagctgcacataacgccaagtttgattacaaagtaagccgaggctggggaattgaccgctggcaatgcaaaatctgggacacaatgacggcggcgtgggtagttgatcctgagcgaaacaattattctttggactctcttgtcgcctacacttttgactgcacccccacaaaatatatggacatagtgccgaagggagctgcgtttgatgttgtttctctggaaaccgccacccgctattcgggggaagacgccgatttttgcatcaggctgaaacatcaccttgaaccaatgttgaaaaaaaccgaatccatcgcactttttgaaaatcttgaaatgcccctgctccccattcttgcggaaatggaaggagagggaataaaaatcgagccgaaagcgctgacaagttacggcaaggaactcgccgtagagttagataaaattcaatccgacacatggaaaattgtaggacacgaatttaatcttgcatcgacaaaacagcttcaggaagtgctttacgttgagcgcaaactcacccccggcaagaaaacaaaaacaggctntccacagacgcggcggcgctga

SEQ ID NO: 66818 - protein, 667 aa, Unknown
  Obtained from environmental sample
  DOMAIN (386)...(573): 3'-5' exonuclease
  misc_feature (1)..(667): Xaa is any amino acid
MELLHKSTVVARFASLVLVYNMKNSTLPPLYLIDAYGLIYRSYFAFLTHPLRNNTGKNVSALFGFARTIISLIDDGAPVVDNDGKDLNHLKPLRLARDFDSRTPTFRHKMYSEYKANRQKTPEDLHEQVPLVEEFLNALGVKCIKNDGFEADDIIATLAEKCRAEKRQCYILSSDKDLLQLVGGGIFELRPAKINRKNENPTSPGPSWELIGHDEVKAEWGVEPPKVLDLLSLIGDSSDNVPGVKGIGEKTAVKLMARYGSLDEIYKNLAAIEGSTGKKIAEGKESAYFSQSLIRLRNDVELSVNSIDELSVENLDRPAGAKVLIREGIRQSAKQLDPSVKPAAQTAAEQNADTQNSPEQETDSVNQMETLSFPAAEQSLLGDGEYKTILDIDELNSILEQAKKQKLLALDFETDSLDAWRSRPIGISLAVKPKEAFYVPVAPHDVSGTPSKFNDPEKVRSLLSPLFADKEMTIAAHNAKFDYKVSRGWGIDRWQCKIWDTMTAAWVVDPERNNYSLDSLVAYTFDCTPTKYMDIVPKGAAFDVVSLETATRYSGEDADFCIRLKHHLEPMLKKTESIALFENLEMPLLPILAEMEGEGIKIEPKALTSYGKELAVELDKIQSDTWKIVGHEFNLASTKQLQEVLYVERKLTPGKKTKTGXPQTRRR

SEQ ID NO: 66819 - DNA, 1266 bp, Unknown
  Obtained from environmental sample
  misc_feature (1)..(1266): n is a, c, g, or t
atgtatcgaggcgatattgtaatgaaatgcgttgatgtttcggtttcgactccgctcagacgtcggtcgatgaaagcaaaccgggtccttgtgcggagccgaaaggacggttttcgggggacggcgatgccaaacaacaaaaaaaacacaatactcatagcntgcgacaggaaccctaacaccagcttcggcaggatgacgctcgacctgcaaaaggttctctccgaagacgaggcgttttgcgtccataccgtttggtttacgacgccgaaatactttcccgacgttttcagtccgcccgaaggcgatcgcacgatacacgcgccaagcatagaattaggttggctgctcttccgccgcccgtttcgccgaatgctcaaagaggtcaacccggacaaggtactgctgacgcaccaaggtatgggttacttagtccgcgaagtacgccgcgcccttccggacgcgttgacaagcgtcatagtgcacgatgtattccccaagactctccgcccgcattccataaaacatcggctcttttacagatactttatcgctccggctcgcgaagcccgcggatttatgtacaatagccggtacacggcggatcaggcgcataccgtactcgggctcgatcccaaccgccctatcatcggatgtccgatagacagggcggtattcagaccgcgcgctgataaaaaggccgtactgcggcaaaaatacgggcttgacggctataaaggcgtgtgcatgaatataggccttgacgagccaagaaaaaatattcccacattcttcgcgctcgcgaaagcgcgtcccgaaacggcgttcgtacgcgtcggtcccttttcgccgtggatgaaaaaatggatcgacgataaccatgcaagcaacattatacattatacgggaatctcggtggatcggcttcttgagctgtacggatgcgccgacctgtttatctatccgagctttgccgaaggcttcgggctgcctccgctcgaagctctcgcctgcggcatacaagcggtggcggcgcggtcgtccgcgcttgaagaaaacctcgacggcgtgataccgctgatcgatccgccggatagagtcgacgggtatttagaggtcatagacaatgtgctggcgggcaaacgcgtcgtcaacgaagaagcggcgcaaagtttgctggaacggttttccattgacaatttcggcaaaagagttcgcgcctgctttcgggataattccgattcaggagagataggtaaaacttaa

SEQ ID NO: 66820 - protein, 421 aa, Unknown
  Obtained from environmental sample
  DOMAIN (233)...(392): Glycosyl transferases group 1
  misc_feature (1)..(421): Xaa is any amino acid
MYRGDIVMKCVDVSVSTPLRRRSMKANRVLVRSRKDGFRGTAMPNNKKNTILIACDRNPNTSFGRMTLDLQKVLSEDEAFCVHTVWFTTPKYFPDVFSPPEGDRTIHAPSIELGWLLFRRPFRRMLKEVNPDKVLLTHQGMGYLVREVRRALPDALTSVIVHDVFPKTLRPHSIKHRLFYRYFIAPAREARGFMYNSRYTADQAHTVLGLDPNRPIIGCPIDRAVFRPRADKKAVLRQKYGLDGYKGVCMNIGLDEPRKNIPTFFALAKARPETAFVRVGPFSPWMKKWIDDNHASNIIHYTGISVDRLLELYGCADLFIYPSFAEGFGLPPLEALACGIQAVAARSSALEENLDGVIPLIDPPDRVDGYLEVIDNVLAGKRVVNEEAAQSLLERFSIDNFGKRVRACFRDNSDSGEIGKT

SEQ ID NO: 66821 - DNA, 750 bp, Unknown
  Obtained from environmental sample
  misc_feature (1)..(750): n is a, c, g, or t
ttggtgatttattatattatattatgtaatatgaccgcaaaaaacgcaaaagatcatatcgccttggcgcttgacaacgccgacgacgccggcgtcttgaaaaaacttattgccgacacggcggaacacgtcggcgtctacaaactcggcttggaacaattcacccgcttcggccccaaagcgttggattttgtcaaggacgctggccggaagatcttcttggatttgaagttccacgacatacccaacacagttgaaaaggcggtgcgggcggcctgcgggtatgagatcgattacctgacgatacacacgcagggcggggtggaaatgatgagggccgccgcaaaagccgccgcagcgtcggcgtaccggcccaaaatccttggcgtcacccttttaaccagtattgaccaatcgatgctgaatagcgaacttgcggttccaatgcctgccgccgagtatgtccggcatctggcccaaaaagccgtcacggccggaatagacggattagtctgttccgcggcggacttagagatgataaaaccgtcgatacccgacgactttgagatcgttactcccgggatacgccccgccggcgcggatgtaaacgaccaaaaacgagtagccgctccggagtgggcgatcaaaaccggagcgacgctcttagtaataggccgcccgataacgggagccgcagaccccggtaaagcggcggaagatatcgctaaatgtatcgaggcgatattgtaa

SEQ ID NO: 66822 - protein, 249 aa, Unknown
  Obtained from environmental sample
  DOMAIN (18)...(241): Orotidine 5'-phosphate decarboxylase / HUMPS family
  misc_feature (1)..(249): Xaa is any amino acid
MVIYYIILCNMTAKNAKDHIALALDNADDAGVLKKLIADTAEHVGVYKLGLEQFTRFGPKALDFVKDAGRKIFLDLKFHDIPNTVEKAVRAACGYEIDYLTIHTQGGVEMMRAAAKAAAASAYRPKILGVTLLTSIDQSMLNSELAVPMPAAEYVRHLAQKAVTAGIDGLVCSAADLEMIKPSIPDDFEIVTPGIRPAGADVNDQKRVAAPEWAIKTGATLLVIGRPITGAADPGKAAEDIAKCIEAIL

SEQ ID NO: 66823 - DNA, 2127 bp, Unknown
  Obtained from environmental sample
  misc_feature (1)..(2127): n is a, c, g, or t
ttggggattgagcttgccgggccggcttgccagaatgtctacatcggtgcggaatcgattgagccgggacggttttcagcgttgcccttctacgatgacgtgattgatcatcgcgtggaaaccgagccgaccgcccaagatgtttggggcgacagcgataggcggaacgggattcggcaggatagtgtcaatgtcgataacaacattaataataagccggtaacaatagtcccgtttgccgacggcgaaatctcccgccgaacaaccccggcccgcgacatctggcgttgcggcgatcttgaattcaaaatatataccccgtcgccctctatcccggacatggctcttgaagcggagttcatgtcaatcgatcccactatcacaaaggacgtcctgataccggctgtcttcgccgaactgactttagacaacaccgcccacaatttgccgcgtaaggccttcttcggctacgagggcaacgatccgtacaatgctatgaggcgtgtcgacagttgggaaatcaaagataatgataagggaagaaacggcggtgtcaataataagaatatcaaaggcgtcgcccaaggcggcgtcaccggcatattcaccgacgacgcggacgcggtgtgcgcgctcgccttctccgccggcgagttgcttgccgacgacatcgccgataggttgccgttcggtttgggaaccacggggcttttggttatgaccgcaaagccgggggaactgcgcacttggcgcttcgccgtctgcttctatcgggccggcgttgtcacgacgggcgttgaggcggtctacatgtacacgcgccacttcaaaaacatcgaggatgtggcttattacgctctcaaaaacttcgagcgctacagggccgaggtcgccgaatttgacgcgatgatagttgagcgcggctttggcgccgaaaggctctttatgctctcgcaggctataaagagctactacggctcgactcagctgctcttcgaccaagcggcggcgacgccgttatgggtcgttaacgagggcgcttacaggatgatgaacacgcttgacctcgccgtcgaccagctgtttttcgagatgctgaaaaatccgtggacggtgcgctccgtgctggatcaatacgcaagcggctactcgtacttcgacgaggtgaaaaatgagcgcggggagaagttccccggcggcatcagctttgcgcacgacatgggcgtggcgaacgccttctcggcgccggggcgctcggcctacgagctcagcgggcggagcggctgctactcctacatgtcgcaggagcagcttgtcaactggatactctgcgccggcgtctactgggagggagctaaagacgacgcgtggctttcaagccgccgtcagatgattgaacaatgtttgacaagtatgctgaacagagatagccaaagcgtcggcggtcgcgacggcgtcatggatttggactcctgcagaaccggcggcggcgccgagattaccacgtatgacaatgtcgataccgcgcttggacgttcgcggcgtagcagttaccttgccgtgaagtgctgggcggcctacttggcgctctctgagatgcttgaggcggtcgggtcgaaagggccggccgagacggcgtcggagcaggcagaaaggtgcgccgggaccatattgaaatacagacgggacgacggaaccatcccggcgttattggaggagggcgacgccgccgtcacgctctccgtcgtggaggggctcgtgtatccggtggtcatggggctcttcgagaatatggggacggccgagaagtactgcgtcttcatcagcgcgttgaagaagcacttcaatgttgcgttggcaaacggttgccggtttgcggacggcagctggaagatgtccaagacgagcgacaactcatggctcagcaagacgttcctgtgtcagtttatagccgaaaagatatttaaacacgcccccgacacggaggccgacaaggtgcacgcctcgtggcttttggacggcgagaacgcgattcaggcgttcagcgatcagatgagggcgggtaaaatctgcggcagcgcctattacccgcggggcgttacggggattttgtggctgtgttgttga

SEQ ID NO: 66824 - protein, 708 aa, Unknown
  Obtained from environmental sample
  DOMAIN (1)...(449): Glycosyl hydrolase family 52
  misc_feature (1)..(708): Xaa is any amino acid
MGIELAGPACQNVYIGAESIEPGRFSALPFYDDVIDHRVETEPTAQDVWGDSDRRNGIRQDSVNVDNNINNKPVTIVPFADGEISRRTTPARDIWRCGDLEFKIYTPSPSIPDMALEAEFMSIDPTITKDVLIPAVFAELTLDNTAHNLPRKAFFGYEGNDPYNAMRRVDSWEIKDNDKGRNGGVNNKNIKGVAQGGVTGIFTDDADAVCALAFSAGELLADDIADRLPFGLGTTGLLVMTAKPGELRTWRFAVCFYRAGVVTTGVEAVYMYTRHFKNIEDVAYYALKNFERYRAEVAEFDAMIVERGFGAERLFMLSQAIKSYYGSTQLLFDQAAATPLWVVNEGAYRMMNTLDLAVDQLFFEMLKNPWTVRSVLDQYASGYSYFDEVKNERGEKFPGGISFAHDMGVANAFSAPGRSAYELSGRSGCYSYMSQEQLVNWILCAGVYWEGAKDDAWLSSRRQMIEQCLTSMLNRDSQSVGGRDGVMDLDSCRTGGGAEITTYDNVDTALGRSRRSSYLAVKCWAAYLALSEMLEAVGSKGPAETASEQAERCAGTILKYRRDDGTIPALLEEGDAAVTLSVVEGLVYPVVMGLFENMGTAEKYCVFISALKKHFNVALANGCRFADGSWKMSKTSDNSWLSKTFLCQFIAEKIFKHAPDTEADKVHASWLLDGENAIQAFSDQMRAGKICGSAYYPRGVTGILWLCC

SEQ ID NO: 66825 - DNA, 1527 bp, Unknown
  Obtained from environmental sample
  misc_feature (1)..(1527): n is a, c, g, or t
atgcaaaaacacgatccgcaaaaagcgaatattttcagcgcgcatcaggaaattattgaagatattgtcattaatgaggaaatcccgtccagaatattaaacgacaaatgggcgggcgactgggctatttatcatgtttatgaaactgtccttattgtgcttcaaaaagccggcgatactttaatcgccgaacgcgccgcggattttgacgatgtgcgcgcgcttcttttgaggttatggtacggcagaaaaaacgacggcctttcttccctgacagaacctgttattattgcggcgcatgaccttatgccttccgataccgcttctttggacaggagcaaggcgctggcgcttcttaccgagaaaggcgggcttactacccataccgcaattatagcgaaaagttacggaatccctacattgttcggtattcacgggcttatggacgcggtaaaacaaggccaacttgcggttgtaaacgccgatgaagaaaaagtaattctggagcctgaaaccgaagttgccgccgaatatgaaaaaaagtacgaagcctaccgcagagacaagcgggacgccgatacatacctcgtaaaacaggcatgtacccaggacgggacacggatagacattggattaaatctttcgggagctttagacgatgaacttcaagctgcccctttcgctgattccgtcgggcttttcaggacagagtttctttaccttggcagggatttcttgccggacgaagaagagcagatttccgcttataaaaaggttcttgaatgtttcggacagcggcctgtaatcctgcgcactcttgacattggcggggacaaacagctttcaagcctgaatataaagcgcgaggaaaacccgtttttaggaaacagaggcatacgtttttgtttaagttaccccgatgtttttaagacgcagattagagcggctttacgcgccggcgtttacgggaatatgtggatcatgtttccaatggtaaattccatagacgacatacggaaagcaaaagaaattatcgcgtccgttcaggaagaacttgaaaaagaaggagaacccttcggtcaggttaaaatcggcattatgatagaaacgccttccatagcgcttatggcggatcttgccgcgcgtgaagttgatttcgcgagcataggcaccaatgacctgtgccagtacctgtgcgcggccgacaggatgaacagcgaagtggagccctattaccagtcctttcaccccgcgatattcaagctgataaaagaagtgacggccgcttttgaaaaacacggaaagcccatatcaatctgcggagaactcgcagccgacccgcttgcggcccctgtttttgtagggctgggcttaagaaaactgagcatgggcgccgcctccgtagccgccgtaaaacgcgcgatatgttccataaccgaaaaaaaagcgcgggagattgcggataaagtccttgaatgcgcgaccgcggaagaagttaagagcgaattggaaaaaattaaaaattag

SEQ ID NO: 66826 - protein, 508 aa, Unknown
  Obtained from environmental sample
  DOMAIN (79)...(164): PEP-utilising enzyme, mobile domain
  misc_feature (1)..(508): Xaa is any amino acid
MQKHDPQKANIFSAHQEIIEDIVINEEIPSRILNDKWAGDWAIYHVYETVLIVLQKAGDTLIAERAADFDDVRALLLRLWYGRKNDGLSSLTEPVIIAAHDLMPSDTASLDRSKALALLTEKGGLTTHTAIIAKSYGIPTLFGIHGLMDAVKQGQLAVVNADEEKVILEPETEVAAEYEKKYEAYRRDKRDADTYLVKQACTQDGTRIDIGLNLSGALDDELQAAPFADSVGLFRTEFLYLGRDFLPDEEEQISAYKKVLECFGQRPVILRTLDIGGDKQLSSLNIKREENPFLGNRGIRFCLSYPDVFKTQIRAALRAGVYGNMWIMFPMVNSIDDIRKAKEIIASVQEELEKEGEPFGQVKIGIMIETPSIALMADLAAREVDFASIGTNDLCQYLCAADRMNSEVEPYYQSFHPAIFKLIKEVTAAFEKHGKPISICGELAADPLAAPVFVGLGLRKLSMGAASVAAVKRAICSITEKKAREIADKVLECATAEEVKSELEKIKN

SEQ ID NO: 66827 - DNA, 846 bp, Unknown
  Obtained from environmental sample
  misc_feature (1)..(846): n is a, c, g, or t
atgtccgaggacaaactggaaagcctgatccgcaaacgcagtgcggaacatgagcgaaaacttacttccaaacagcggaaaaggcagtataaagaataccacaaactgttaaaccagtactggaagcccggattgtatgaccgcagttaccgcaatctttcggggaacgttgttatgagacagcccaatgaggctgaactgacagagatttaccgtaaaatgaaaaagttcactaaagaggatctgtacgattgcggcgcctgtggctatgggagctgtaagggaatggctgtggcaattcacaacggaattaacaagactgaaaattgcgcccattatacccttgacatactcaaggagaaaaaagacgcggatgaactagtccgcctgctacaggaacaaatcagccagggatccggcctcgccgaaggaataaccaaattggtgcatgaactgaacgccacaatcggttcgcaatccgaggcggtagatcaatcttcggcggtaactgtaaaaatgatcgattcgatcagggacacttcggcggtttccatgaaacaacaggaatccgtaaaggggttgatagaaaacaccgataaaagccagaaatcaatgaaggcaaccattcaatcagtcgacgatatctcccaatcggttgacggtatatcgcaggcaatcaaaataatcagcgcaatcgcggccaacaccaatttattgtccatgaacgcggcgattgaggccgcccatgccgagaacgccggaaggggctttgcggtagtgccggagaaatacgccgtctttctgaaagcaccagagaaaattcagataatattttcctttacataa

SEQ ID NO: 66828 - protein, 281 aa, Unknown
  Obtained from environmental sample
  DOMAIN (83)...(113): Putative Fe-S cluster
  misc_feature (1)..(281): Xaa is any amino acid
MSEDKLESLIRKRSAEHERKLTSKQRKRQYKEYHKLLNQYWKPGLYDRSYRNLSGNVVMRQPNEAELTEIYRKMKKFTKEDLYDCGACGYGSCKGMAVAIHNGINKTENCAHYTLDILKEKKDADELVRLLQEQISQGSGLAEGITKLVHELNATIGSQSEAVDQSSAVTVKMIDSIRDTSAVSMKQQESVKGLIENTDKSQKSMKATIQSVDDISQSVDGISQAIKIISAIAANTNLLSMNAAIEAAHAENAGRGFAVVPEKYAVFLKAPEKIQIIFSFT

SEQ ID NO: 66829 - DNA, 792 bp, Unknown
  Obtained from environmental sample
  misc_feature (1)..(792): n is a, c, g, or t
atggacggctccaaggaaaaagtcttaattaaccccgacctctgtattggctgcggaaactgcatctcggtctgccaccatgaagcccgtcatattgtagatgataccgcctctttcttttccgacctgaaacgcggcgacaaaattatcgcggttgtcgccccggctgtcgcgtcggttttccccggtgaacaccttaaaattaacggctacctgagatcagtcggcgttgaagccttttttgacgtaagcctcggcgcggaactcacggtcatatcatacctcaattacatcaaagagaaaaaaccccgtatggtcatagcccagccctgtccggccattgtcagctatatcgaaatttatcaccctgaactgataccgcaccttgcgccggcggacagcccgatgcttcacacggtcaaaatgatacgcgaatattttaagcaatacagcaatcataaaatcgccgtcatttcgccctgtatcgccaagcggcgggaatttgacgaaaccaaacatggggactacaacgttaccatgtttgccctgaaaaaatacctggaggagaatagaataaacctttcttcctataggactgagggatataccggcctgcttgccgaacgggcggttcagttttccagccccggcggcctgcttgacaccgccgagcgctttgtgccgggcgtacggcggaatacccgcaagatcgaaggaatacccaacatctacccctaccttacggaaatcgcccagttattgaacgataaggaagtggaattccgcttctga

SEQ ID NO: 66830 - protein, 263 aa, Unknown
  Obtained from environmental sample
  DOMAIN (40)...(261): Iron only hydrogenase large subunit, C-terminal domain
  misc_feature (1)..(263): Xaa is any amino acid
MDGSKEKVLINPDLCIGCGNCISVCHHEARHIVDDTASFFSDLKRGDKIIAVVAPAVASVFPGEHLKINGYLRSVGVEAFFDVSLGAELTVISYLNYIKEKKPRMVIAQPCPAIVSYIEIYHPELIPHLAPADSPMLHTVKMIREYFKQYSNHKIAVISPCIAKRREFDETKHGDYNVTMFALKKYLEENRINLSSYRTEGYTGLLAERAVQFSSPGGLLDTAERFVPGVRRNTRKIEGIPNIYPYLTEIAQLLNDKEVEFRF

SEQ ID NO: 66831 - DNA, 720 bp, Unknown
  Obtained from environmental sample
  misc_feature (1)..(720): n is a, c, g, or t
atgaacagaaaaagtgtcattatgactaaaacaaggcgtattgccttaataataaaattatcgggtatatccatagcctgtgtgcttttggcatttatagttttttcaattttcactgtacgttccatgaaaacaacaaatcttacacctgctgtcgacattggaataaataaactaaaaagcgacatggttttttttataaacagattatcaactgaatacggacaattaaaacttatagacggtgatctggtaggacaggaaggcgcttctctaaaaaataattacaaactggtagatgaaataagttccgattatgacattacggcaaccgtctttgcccgtaacggcaatgactaccgccgaataagtaccagtattatggataacgccggaaaacgcgccgttgatacatttcttgaaacagacaatgccgcatatcagcgcatacaagaaggtaacggttatataggaaaagatgtcattctcggtaaaaattatattaccaaataccaccctattttttcagaaaatggaaaagaagttatcggcgttttatttgtcggaaaagatatgacagctatcgaggaaataattaacgttaatattgttaaatacattaaaagaatggcagtaatcacgtttaccgttttattggctttcgccgcttttttgggactgggctgtaaacttaattttttaagccttatatttaaatga

SEQ ID NO: 66832 - protein, 239 aa, Unknown
  Obtained from environmental sample
  SIGNAL (1)...(26)
  misc_feature (1)..(239): Xaa is any amino acid
MNRKSVIMTKTRRIALIIKLSGISIACVLLAFIVFSIFTVRSMKTTNLTPAVDIGINKLKSDMVFFINRLSTEYGQLKLIDGDLVGQEGASLKNNYKLVDEISSDYDITATVFARNGNDYRRISTSIMDNAGKRAVDTFLETDNAAYQRIQEGNGYIGKDVILGKNYITKYHPIFSENGKEVIGVLFVGKDMTAIEEIINVNIVKYIKRMAVITFTVLLAFAAFLGLGCKLNFLSLIFK

SEQ ID NO: 66833 - DNA, 2076 bp, Unknown
  Obtained from environmental sample
  misc_feature (1)..(2076): n is a, c, g, or t
atggcaaagacaccaattactccggttatacggattgatgaagaaaagtgcgttaattgttacgcctgtattgccgaatgtccagtaaaatattgcatggacgcatcaaaagaaaaagtgttaataaattcagacctgtgtatcggttgcggcaattgcatattagcctgccaccatgaagcaagaacgccgattgacgacacaccacgtttcttttcagaccttaaacaaggaaatgaaattatcgccgttgcagctccggccgttgcgtccgtgtttcccgacaagcacctcaaccttaacggttttttaaaatcgcttggcgttaaagatttttttgacgtaagcttcggcgcagaattaaccgttgtttcatatctcaattacataaaaaataaaaatccgaaaatggtaatagcgcagccctgtcccgccattgtcagctttatcgaaatttatcaccctgaattaataccataccttgcgcctgcggacagcccaatgcttcacaccgcaaaaatgatcagagaatattatccgaaatataaaaatcataaaatcgcaatgatttctccatgtatcgctaaacgccgtgagtttgacgagacggaactcgttgaatacaacataacaatgattgcgttaaaaaattattttaaggcagaaaatatagatttaaactctttttcaaaagttgaatataacggcccgattgccgagcgtgcagtcggattttcaagtcccggcggattgcttgacaccgcagaacgttttgtgccgggcatacggagaaatacagaaaaaatcgaaggagtacacagcatatacgcctacttgatagaaactgcgcaagcattaaaagaccctgatgaagaattacctcttttaattgactgcttaaattgcgaaaaaggctgcaacggcggcccaggtacgggaaacagccacatttcaataaacaaacttaaaaaaccaatccgtaaacgaagcgcagaacttgaacaacaaatcgcgcccaaacaaaaaaaagaacagtacaaaaaatatcacaaactgctgaataaatactggaaaccaggattatatgatcgcaattaccttgaccattcaggaaattatgacaagaaaacacctaacgaagatgaattgaacgacatctaccgtaagatgaaaaagttttcaaaagaagatatatacgattgcggagcttgcggatataaaaggtgcagaagaatggcaatggcaatttttaacggagtaaacaaacctgaaaattgcgctcattatacacttgccgtactcgcagaaaaaaccaatacagaagaattaaaccgccaattacaggaacacatcggacaagcgtcaatccttattgacggaataagtaaatcggtacaagatttaaacgccattatcggtgcacaagctgaagcggtagatcattcagcggcggaaactgaaggaataatcacatcaattaaagaaacttcggaagtctcacagaaacaaaaagaatcaatacaaggattaatagaagttgccgcacagggcaaagaatccatgcaaaaaacaattaattcaataaatgaaatttcaaaatcagttgaaggcgtaagttcggcaattaatataatcacttcaatagcggaaaatacaaatctgctctccatgaatgcggcgattgaggccgcccacgccggagacgccggaagaggctttgcggtagttgccggagaaatacgccgtctttctgaaagcaccagagaaaattcagataatatttcccttacattaaaaaatatcgtcagcggaatagaaataacatcaaaacagtcaggtaaaaccgacagccgaataaatcaaatgtcaaaagagataaacggattcgcacaaacaatgtcgtcttttattaacacctttaatgaattatcagcgaaaagctccggtattaccgactctcttgaaagtcttaaagagcaaagctcggcagttaaaacaagttatgcgcaaatgattgaaatgacgcagaaacttaccgcggcaatgaaagaattatccgacttgtcaaaaggataa

SEQ ID NO: 66834 - protein, 691 aa, Unknown
  Obtained from environmental sample
  DOMAIN (399)...(429): Putative Fe-S cluster
  misc_feature (1)..(691): Xaa is any amino acid
MAKTPITPVIRIDEEKCVNCYACIAECPVKYCMDASKEKVLINSDLCIGCGNCILACHHEARTPIDDTPRFFSDLKQGNEIIAVAAPAVASVFPDKHLNLNGFLKSLGVKDFFDVSFGAELTVVSYLNYIKNKNPKMVIAQPCPAIVSFIEIYHPELIPYLAPADSPMLHTAKMIREYYPKYKNHKIAMISPCIAKRREFDETELVEYNITMIALKNYFKAENIDLNSFSKVEYNGPIAERAVGFSSPGGLLDTAERFVPGIRRNTEKIEGVHSIYAYLIETAQALKDPDEELPLLIDCLNCEKGCNGGPGTGNSHISINKLKKPIRKRSAELEQQIAPKQKKEQYKKYHKLLNKYWKPGLYDRNYLDHSGNYDKKTPNEDELNDIYRKMKKFSKEDIYDCGACGYKRCRRMAMAIFNGVNKPENCAHYTLAVLAEKTNTEELNRQLQEHIGQASILIDGISKSVQDLNAIIGAQAEAVDHSAAETEGIITSIKETSEVSQKQKESIQGLIEVAAQGKESMQKTINSINEISKSVEGVSSAINIITSIAENTNLLSMNAAIEAAHAGDAGRGFAVVAGEIRRLSESTRENSDNISLTLKNIVSGIEITSKQSGKTDSRINQMSKEINGFAQTMSSFINTFNELSAKSSGITDSLESLKEQSSAVKTSYAQMIEMTQKLTAAMKELSDLSKG

SEQ ID NO: 66835 - DNA, 774 bp, Unknown
  Obtained from environmental sample
  misc_feature (1)..(774): n is a, c, g, or t
atgaaaagattgttatcagttatcttaatcgctttgctgtgcatcgcggcgttagccggatgccgcaagaaacaggaacccgttacgctaaacgtgtttgccgccgcttcgcttacagagtcgcttaatgaaatcgccgtgttgtacaaggcaaaaaacccggctttaactttaagctttaactatgattccagcggcaaattacagacgcagattgaaaacggcgctgaagccgacatattcatatcagcggctgtgaaacagatgaatacgcttgcagacggcggttttgttgacacggctacgaaaaaagatttattgctcaacagggttgtgttgattgtacccggcaattcgagcaggggaattacgtcttataacgacgtgcctaccgataaggtctcgcttatcgcgctgggtaactccgccgttccctgcggacagtacgcggaagagatttttaaatcgcttggagtgtgggaggcgattcaacctaaaatatctttcggcgaaaacgtaaaggaaatcctttcgcaggttgaaagcgcaagcgtagacgcgggcgtggtttattccaccgacgcagccacggcaaaaggtgatattaggattgccgccgacgctcctgcgggcagccattcgcctgtcgtgtatcctgccgccgtattgaaaggcgcaaaagactcaaaagcggcaaaggcgtttctggattacctgagcacgccggaagccgttgcggtatttgaaagaataggcttcgcaatggtaaaataa

SEQ ID NO: 66836 - protein, 257 aa, Unknown
  Obtained from environmental sample
  SIGNAL (1)...(19)
  DOMAIN (5)...(246): Bacterial extracellular solute-binding protein
  misc_feature (1)..(257): Xaa is any amino acid
MKRLLSVILIALLCIAALAGCRKKQEPVTLNVFAAASLTESLNEIAVLYKAKNPALTLSFNYDSSGKLQTQIENGAEADIFISAAVKQMNTLADGGFVDTATKKDLLLNRVVLIVPGNSSRGITSYNDVPTDKVSLIALGNSAVPCGQYAEEIFKSLGVWEAIQPKISFGENVKEILSQVESASVDAGVVYSTDAATAKGDIRIAADAPAGSHSPVVYPAAVLKGAKDSKAAKAFLDYLSTPEAVAVFERIGFAMVK

SEQ ID NO: 66837 - DNA, 834 bp, Unknown
  Obtained from environmental sample
  misc_feature (1)..(834): n is a, c, g, or t
atgattgcgtataccctgcccaacgcctgtttctgcgactgtaccgccagcgatgatgttgccgcgttgtacgcgaagattctgagcgcgtccattccggttgttacacctaacaagcgggccaattccggcaaactggagtattaccgaaagctgaccggtttttcccgtgaccggggaattccctacctgtacgaaacaacggtctgcgcgggcctgccggtaatttcaaccctgcgggatctgtacctttccggggatagggtgcgccgcattgaagcggttctttcggggactttaagttttattttcaataattttgacggcaaaaaatctttttccgccctggtgcgggaagcaaaggccaaaggctataccgagccggatccccgcgacgatctgaacgccatggacgcggcccgcaaagccctgatccttgcccgtgagtgcggcctttcccttgaatttgccaatgtcgccattgagccgattttgccccgcgcctgtttcaaggcgaaaaatgttgacgctttctttaaggaactggaaaaatcggacgctgcttttgaaaaacgccgctcccaggccgccgcgcagggaaaggctctgcgctatattgccgttattgaggaaggctccgcgaaactcgccctgagggcggaagcggcggacagtcccttccgttcactggtagacagcgacaacatggtggtaattaccaccgaccgttattcaaaactgccgatggtgatcaaggggcccggcgcgggcgcgcaggtaaccgccggcggtatctttgccgatattgcgcggattgcgcggcctttggtttaa

SEQ ID NO: 66838 - protein, 277 aa, Unknown
  Obtained from environmental sample
  DOMAIN (74)...(270): Homoserine dehydrogenase
  misc_feature (1)..(277): Xaa is any amino acid
MIAYTLPNACFCDCTASDDVAALYAKILSASIPVVTPNKRANSGKLEYYRKLTGFSRDRGIPYLYETTVCAGLPVISTLRDLYLSGDRVRRIEAVLSGTLSFIFNNFDGKKSFSALVREAKAKGYTEPDPRDDLNAMDAARKALILARECGLSLEFANVAIEPILPRACFKAKNVDAFFKELEKSDAAFEKRRSQAAAQGKALRYIAVIEEGSAKLALRAEAADSPFRSLVDSDNMVVITTDRYSKLPMVIKGPGAGAQVTAGGIFADIARIARPLV

SEQ ID NO: 66839 - DNA, 921 bp, Unknown
  Obtained from environmental sample
  misc_feature (1)..(921): n is a, c, g, or t
gtgaaaaaaaaagcggcgtttgtcgcggtagtgggccgtccttcggcgggaaaatcgacattggtaaatcaaatctgcggcgaaaaagtatctattgtcagcgcggtcccgcagacgacgcgcaacgcgattcgcggcatcattaaccgggaacagggccagttggtgtttattgacacgccgggccgccataaatcagaaaaaaaattcaacaaaaaactgaccgacatatccggcagggcggtggacgattcggatattatgctgtatgtgctggatgcctcgcgtctgcccggaccggaagaggcggaagtcgccgccctccttgccccccgcgcggacaggactatagccgccattaacaaaattgacattgccggcgttaattgtaacggcatatatgaatttctggggcaggctttacccggcataagcagagaccactgttttgaggtttccgccaaagacaacatcggtattgaagcgctgctggcggcgttatacgctcttgctcccgaaggcgaaccgttctacagtgaagaattttataccgatcaggaagttgaattccgcattgcggagattatccgcgagcaggccgtcaaccgtctacggcaggagttgcctcatgccctgtatgttgaaattgccgacattgaatttgacggaaaagatacgccgcatgaaaatgagccgcagaattcaaaattgtgggtgcgggctttcatcgttgttgagcgggaatcccaaaagggcatggtagtaggcaaaggcggcgccatgatcaaggcaatccgccttgccgctctgaaagaactgcataacatttttgactggaaaatcgatcttgatctgcgggtaaaaaccggcaaggactggcggcacaatgaccgtattctgaagcggcttacggaagggtag

SEQ ID NO: 66840 - protein, 306 aa, Unknown
  Obtained from environmental sample
  SIGNAL (1)...(18)
  DOMAIN (3)...(175): Elongation factor Tu GTP binding domain
  misc_feature (1)..(306): Xaa is any amino acid
MKKKAAFVAVVGRPSAGKSTLVNQICGEKVSIVSAVPQTTRNAIRGIINREQGQLVFIDTPGRHKSEKKFNKKLTDISGRAVDDSDIMLYVLDASRLPGPEEAEVAALLAPRADRTIAAINKIDIAGVNCNGIYEFLGQALPGISRDHCFEVSAKDNIGIEALLAALYALAPEGEPFYSEEFYTDQEVEFRIAEIIREQAVNRLRQELPHALYVEIADIEFDGKDTPHENEPQNSKLWVRAFIVVERESQKGMVVGKGGAMIKAIRLAALKELHNIFDWKIDLDLRVKTGKDWRHNDRILKRLTEG

SEQ ID NO: 66841 - DNA, 921 bp, Unknown
  Obtained from environmental sample
  misc_feature (1)..(921): n is a, c, g, or t
atgatcggcgagattgtttcgctacctatccccatggacagaatcggtaaaagtatagattccctcatggagacctacggttcttatggcatggtaaaccattcaggagaagcgaatcttcccggcagagagaacatcgcccgtattgtgcggggtctggatgagcttattttccccggttttcgggaaaatcagggcctggatcacagtaatttgcggctcattaccgcggaaaaagtaaaccatcttgcccgtgaacttattcacgaagtggaaaaaagtcttgccttttccgtccgttcaggcagcctcggctgcggccatgacggctgccatgcggcggcggaacttattgtagaaagtttttttgatgaactgccgacgatccgccgcgctctgtccctggatatgcaggccagttttcggggagaccctgccgctcgaagctttgaagaaatcatactttcatatcccggttttcaggctgttacaattcaccgtctggcccattatttctgggaggcccaggttccccttattccccgtatgatgagcgaacttattcatggcagcaccggcatcgacatacatcccggcgcacagattggcgaatcgttttttattgatcacgggaccggcattgttattggcgaaacggcaattatcggcaaaaacgttaaactctatcagggcgttaccctgggggcgctttccgtaaaaaaagaagaaagcagccataagcgccaccccactatcgaagacgatgttaccatttattcccacgcgaccattttgggaggggaaacggttatcgggcgtggcagcgtcatcggcggcaatgtgtggataaccgagtccgttccgcctaataccacggtttataccgtcgccggggaacaggtattgcggcagcgctcttaa

SEQ ID NO: 66842 - protein, 306 aa, Unknown
  Obtained from environmental sample
  misc_feature (1)..(306): Xaa is any amino acid
MIGEIVSLPIPMDRIGKSIDSLMETYGSYGMVNHSGEANLPGRENIARIVRGLDELIFPGFRENQGLDHSNLRLITAEKVNHLARELIHEVEKSLAFSVRSGSLGCGHDGCHAAAELIVESFFDELPTIRRALSLDMQASFRGDPAARSFEEIILSYPGFQAVTIHRLAHYFWEAQVPLIPRMMSELIHGSTGIDIHPGAQIGESFFIDHGTGIVIGETAIIGKNVKLYQGVTLGALSVKKEESSHKRHPTIEDDVTIYSHATILGGETVIGRGSVIGGNVWITESVPPNTTVYTVAGEQVLRQRS

SEQ ID NO: 66843 - DNA, 669 bp, Unknown
  Obtained from environmental sample
  misc_feature (1)..(669): n is a, c, g, or t
gtgatcatcccctggcttaaggaacagcaggcttgtgatatcgcggcggtttgcgtggatcttgggcaggaagccgactggaagaccattaaacagcgggctttggacacgggggccgtttcctgcaaagtggtggacgcgaaaaaagaatacgttgaaaactatgtgtggcccgcccttaaggccaacgccctttatgaagacaaataccttttggggacttctaccgcccggccgcttattgccaaggtgctggtcgagcgggcacggaaagaaaaagcccatgctattgctcacggggctacaggcaagggtaacgatcaggttcgcttcgatcttgggatcatggcccttgcgccggaaatggaaattatcgccccctggcgaacctggaacatcaagagccgtgaagaggagatccgttatctggaagaacggaagatccccatgccaatgaaaaaagatgattcctattccagggacgacaacctctggcatatctcacatgagggcttggagctggaagaccccgccaaagagcctgagtttggaagaatgttaaaaatgacaacgccgcctgaaaaggccccagacaaaccggcttatgtggaaataggttttaagaaaggaattcctgtttctgtggacggtaaaaaatggacggggtaa

SEQ ID NO: 66844 - protein, 222 aa, Unknown
  Obtained from environmental sample
  DOMAIN (2)...(222): Arginosuccinate synthase
  misc_feature (1)..(222): Xaa is any amino acid
MIIPWLKEQQACDIAAVCVDLGQEADWKTIKQRALDTGAVSCKVVDAKKEYVENYVWPALKANALYEDKYLLGTSTARPLIAKVLVERARKEKAHAIAHGATGKGNDQVRFDLGIMALAPEMEIIAPWRTWNIKSREEEIRYLEERKIPMPMKKDDSYSRDDNLWHISHEGLELEDPAKEPEFGRMLKMTTPPEKAPDKPAYVEIGFKKGIPVSVDGKKWTG

SEQ ID NO: 66845 - DNA, 570 bp, Unknown
  Obtained from environmental sample
  misc_feature (1)..(570): n is a, c, g, or t
atggacggggtaagcctcatccttgccctgaacaaacttgggggaacgcacggcattggcctggttgacatcgtagaaaaccgcgtagttgggatgaagagcaggggagtctacgaaacgcccggcggtacgattctttactatgcacaccaggaactggagcatctttgccttgaccgccagacttattcgttcaaacagacagtttcgcaaaagctggcggagctcatctacggcggcctctggtttactcccttacgggaagctctttccgcctttgttgacgttacccaggaaactgttaccggtactgtgcggctaaagcttttcaaaggttcaatcaattccgcgggcgcttcttcgccattttcgctttacaacgcttccatcgccagttttaccaccggcgagctgtacaaccacgcagacgccaggggctttatccgcctctacggccttcccacgctggtgcgcgcactgatgaataacgacgcaaaaagcgggaaacgcatgaaaaaagcaagtgagagccccaaacccgattctaaatcccagggcatctccggataa

SEQ ID NO: 66846 - protein, 189 aa, Unknown
  Obtained from environmental sample
  DOMAIN (1)...(161): Arginosuccinate synthase
  misc_feature (1)..(189): Xaa is any amino acid
MDGVSLILALNKLGGTHGIGLVDIVENRVVGMKSRGVYETPGGTILYYAHQELEHLCLDRQTYSFKQTVSQKLAELIYGGLWFTPLREALSAFVDVTQETVTGTVRLKLFKGSINSAGASSPFSLYNASIASFTTGELYNHADARGFIRLYGLPTLVRALMNNDAKSGKRMKKASESPKPDSKSQGISG

SEQ ID NO: 66847 - DNA, 309 bp, Unknown
  Obtained from environmental sample
  misc_feature (1)..(309): n is a, c, g, or t
gtgagagccccaaacccgattctaaatcccagggcatctccggataatatgaaagataattccaggcaagtgctgtgggcggggaggctggaagaaaaaccggaagccgaagctttcgcgttccaggcttctatcgccgtcgacaagcgcatggttcaggaagatatagccggaagccgtgtccatgcggcaatgctcgcgaaacaggggatcattcccggcgatacggcgcagggctttagacagggagttggagcgcatagttggggaaatttcaagcggggcgttaataatcgaccagaacgctga

SEQ ID NO: 66848 - protein, 102 aa, Unknown
  Obtained from environmental sample
  misc_feature (1)..(102): Xaa is any amino acid
MRAPNPILNPRASPDNMKDNSRQVLWAGRLEEKPEAEAFAFQASIAVDKRMVQEDIAGSRVHAAMLAKQGIIPGDTAQGFRQGVGAHSWGNFKRGVNNRPER

SEQ ID NO: 66849 - DNA, 882 bp, Unknown
  Obtained from environmental sample
  misc_feature (1)..(882): n is a, c, g, or t
gtgtccatgcggcaatgctcgcgaaacaggggatcattcccggcgatacggcgcagggctttagacagggagttggagcgcatagttggggaaatttcaagcggggcgttaataatcgaccagaacgctgaggacattcactcttttatcgaaggggtgcttacagagcggctgggcgatgccggccgcatggttcatgccggaaggagccggaacgatcaggttgcgctggacttaaggctgtacctaaaaaaaacaatcctcgaccttcgcgcggaattggcggagacgattgccacactgcttgataaggctgaagctcacgcggaaacggttgtgcccggttatacccacctgcaaagggcgcagcctgttaccctgggctatcaccttgtcgcctggtgttgtgccctggacagggacaggggccgcctggcggacgctttggaaaggctcgacgagtgcccgcttggctcaggcgctctggcaggttcgaccctgcctcttgatcgggcggcgacagcagaggcattgggctttaagcgtccaacgcttaacgcgatggattcagtggctgacagggacttagtgctggaaaccgccgctgccatttcgatcattatggttcacctctcccgcttctgcgaagacatcgtcatatgggcaagcgaggaatttaggtttatcgatcttgccgagtcgtacagcaccggctcttcgatcatgccacagaaaaaaaacccggactttgcagagcttatccgcggcaagtcaggcagggctatcggaaatctggtaaccctccttacgctgcttaaagggctgccatacgcatatgacaaggatcttcaagagacaaagaagcccttttcgatagcatga

SEQ ID NO: 66850 - protein, 293 aa, Unknown
  Obtained from environmental sample
  DOMAIN (1)...(263): Lyase
  misc_feature (1)..(293): Xaa is any amino acid
MSMRQCSRNRGSFPAIRRRALDRELERIVGEISSGALIIDQNAEDIHSFIEGVLTERLGDAGRMVHAGRSRNDQVALDLRLYLKKTILDLRAELAETIATLLDKAEAHAETVVPGYTHLQRAQPVTLGYHLVAWCCALDRDRGRLADALERLDECPLGSGALAGSTLPLDRAATAEALGFKRPTLNAMDSVADRDLVLETAAAISIIMVHLSRFCEDIVIWASEEFRFIDLAESYSTGSSIMPQKKNPDFAELIRGKSGRAIGNLVTLLTLLKGLPYAYDKDLQETKKPFSIA

SEQ ID NO: 66851 - DNA, 363 bp, Unknown
  Obtained from environmental sample
  misc_feature (1)..(363): n is a, c, g, or t
ttgcntgcggatctttcggggcatggttgcttctgcggctttcaatatcgaacgaatgaaggccgcctgtaccgggggcttttggatgctacagatgttgccgaataccttgtgcgcaaaggcatgcctnttcggaaagcncacgaggcggcggcccttcttgtacgcgattgcatttccatgagcttaacttcaattggtgagctgcccattgaaaaattaaaagaaaagtcggaattatttgaagaagacctttacgcgctgataaagccggaagccggcgtaagggggcgcaaaacctcaggcggccccgcgcctgaagagctgcggcggcagataaaagaactccgccagaggaattaa

SEQ ID NO: 66852 - protein, 120 aa, Unknown
  Obtained from environmental sample
  misc_feature (1)..(120): Xaa is any amino acid
MXADLSGHGCFCGFQYRTNEGRLYRGLLDATDVAEYLVRKGMPXRKAHEAAALLVRDCISMSLTSIGELPIEKLKEKSELFEEDLYALIKPEAGVRGRKTSGGPAPEELRRQIKELRQRN

SEQ ID NO: 66853 - DNA, 717 bp, Unknown
  Obtained from environmental sample
  misc_feature (1)..(717): n is a, c, g, or t
atggaatatgaatttgaaggacgtactgaaaaagaagcgattgatcgcgcggcagaagagcttggtcttgaaaaagacgattttgacgtggagattctggaaacccaacgccagggcctgttcaagaaaggccatgtgcggataaaagttcataccgacaggcctgttgcgcggaacaaacaagctaaggcaggcgacggaggaaacacccgtcaggaacgttccagtcagccgattttcggcgacccaatggcacagaatgaattcgaggaaaaagtaattggctttgtcgaggaacttatcaaacggatgggttacaatggaaaagtttcggttatgttccgggatgaatttaagcttggcctcaagatcgattccgaacattcttccatattgattgggaaaaaggggaaaaaccttgacgcccttcagcttctggtcaacatctttgccggaaggcagggacgtgaggatatgcgggttattctggacagtgaaaattaccgcatacgccgcgaagaatcgctggtaaggcttgcctacactgtagccgaccgcgttcgggaaagccacagttcagtcctgcttgagccgatgaatccctttgaccgccgccttattcataccacgctaaacgatattaccgatattgaaaccaaaagcgaaggcgatggcctgtacaaacaggtaagggtctttttccgtggcgcaaaataa

SEQ ID NO: 66854 - protein, 238 aa, Unknown
  Obtained from environmental sample
  DOMAIN (180)...(235): R3H domain
  misc_feature (1)..(238): Xaa is any amino acid
MEYEFEGRTEKEAIDRAAEELGLEKDDFDVEILETQRQGLFKKGHVRIKVHTDRPVARNKQAKAGDGGNTRQERSSQPIFGDPMAQNEFEEKVIGFVEELIKRMGYNGKVSVMFRDEFKLGLKIDSEHSSILIGKKGKNLDALQLLVNIFAGRQGREDMRVILDSENYRIRREESLVRLAYTVADRVRESHSSVLLEPMNPFDRRLIHTTLNDITDIETKSEGDGLYKQVRVFFRGAK

SEQ ID NO: 66855 - DNA, 855 bp, Unknown
  Obtained from environmental sample
  misc_feature (1)..(855): n is a, c, g, or t
atgattcccggcagcaaggacattccccggatatccctgggaaccttcctgcataaaatagcccaaaccaccggcatatacgctttttttaacgacagaatcgaaaaggaaaccaccgtcattgacgaggcgacaggaaaaaataaaaccaccacggttattggctggcaggaactcctgatgatcgccgttggattccttatcgtataccttggggccgtgaaaaattttgagcctttgctgctcatccccataggctttgggacgatttttgtcaatatcccctttgcgggcatgggaagcccgggggaatggaacgaagcgcttaaaatttttgaacaccagggctttctcaatattatttacaacgcgggcgttggaaacgaatttttcccgttgataatcttcatcggcatcggggctcttaccgacttcggccctcttatcgccaatcccaaaactgcccttttgggagccgcggcgcaattcggcgttttcggcacaatgttctttatcagcctcgccaactacattcccggcgtgaattttaaccccagagaggcctgcggcgtcgcgattatcggcggcgctgacggccccaccacgatatacatcgccgcgaaactcgcgccccacctgctggcaacggtcgcggtcgcggcctattcgtacatggcccttgttccaatcatacagccgcccattatgaaagcccttaccacaaatgaggaacggcttatcaaaatgaaacagttacggcccgtttcgcanaaagaaaaattattttcccccttgtggtatttatactctccgtgcttctcatcccggctgcggctcccctcatcggctgtttga

SEQ ID NO: 66856 - protein, 284 aa, Unknown
  Obtained from environmental sample
  DOMAIN (55)...(281): Na+-transporting methylmalonyl-CoA/oxaloacetate decarboxylase, beta subunit
  misc_feature (1)..(284): Xaa is any amino acid
MIPGSKDIPRISLGTFLHKIAQTTGIYAFFNDRIEKETTVIDEATGKNKTTTVIGWQELLMIAVGFLIVYLGAVKNFEPLLLIPIGFGTIFVNIPFAGMGSPGEWNEALKIFEHQGFLNIIYNAGVGNEFFPLIIFIGIGALTDFGPLIANPKTALLGAAAQFGVFGTMFFISLANYIPGVNFNPREACGVAIIGGADGPTTIYIAAKLAPHLLATVAVAAYSYMALVPIIQPPIMKALTTNEERLIKMKQLRPVSXKEKLFSPLWYLYSPCFSSRLRLPSSAV

SEQ ID NO: 66857 - DNA, 489 bp, Unknown
  Obtained from environmental sample
  misc_feature (1)..(489): n is a, c, g, or t
gtggtatttatactctccgtgcttctcatcccggctgcggctcccctcatcggctgtttgatgtttggaaacttcctgcgtgaatgtggggttgtagatcggctctccaagaccgcgcagaacgagttattaaacattgtctcgctgttcctttccctcggcgtgggcagccagatgacccctgaaaaattccttaacccctcttcccttataatcgtggtgatgggcctgattgccttctgcatcgccaccgccgccggcgtcctcgtggccaaattcatgaatcttttcctcaaagagaagatcaaccccctcatcggttcagccggcgtatccgcggttccgatggcggcgcgcgtttcaaacaaggtgggcctggaatacgatccttcgaacttcctgctgatgcacgcgatgggccccaatgtagccggcgttatcggaacggcgattgccgcgggcgttatgattgcagtgtatgcgaattag

SEQ ID NO: 66858 - protein, 162 aa, Unknown
  Obtained from environmental sample
  DOMAIN (1)...(161): Na+-transporting methylmalonyl-CoA/oxaloacetate decarboxylase, beta subunit
  misc_feature (1)..(162): Xaa is any amino acid
MVFILSVLLIPAAAPLIGCLMFGNFLRECGVVDRLSKTAQNELLNIVSLFLSLGVGSQMTPEKFLNPSSLIIVVMGLIAFCIATAAGVLVAKFMNLFLKEKINPLIGSAGVSAVPMAARVSNKVGLEYDPSNFLLMHAMGPNVAGVIGTAIAAGVMIAVYAN

SEQ ID NO: 66859 - DNA, 372 bp, Unknown
  Obtained from environmental sample
  misc_feature (1)..(372): n is a, c, g, or t
gtggggagtggggaatggggaatggggaatggggaattcgcgatcgttacgcgccatcccctacgggcttgcagcatgtgggcggcatacggacggcgctttttaattatcttttcgcccgctcaaggggcgggacatttgtcctgcggctggaagacaccgaccgtacgcgttccgacgcgcgttatgtgcaaaacctgtacgacactttttcatggctggggttttcactgggacgaggggccggacatcggaggtgttttcgcgccttacacgcagtcagaacgctcggagttgtataagaaatacgctgatgaattgattaagcaaggggcgggcatattactgcttctgcaccgcggagcgtattga

SEQ ID NO: 66860 - protein, 123 aa, Unknown
  Obtained from environmental sample
  misc_feature (1)..(123): Xaa is any amino acid
MGSGEWGMGNGEFAIVTRHPLRACSMWAAYGRRFLIIFSPAQGAGHLSCGWKTPTVRVPTRVMCKTCTTLFHGWGFHWDEGPDIGGVFAPYTQSERSELYKKYADELIKQGAGILLLLHRGAY

SEQ ID NO: 66861 - DNA, 1062 bp, Unknown
  Obtained from environmental sample
  misc_feature (1)..(1062): n is a, c, g, or t
ttggcgcgggtgtcagcgggcgaggcgcacacgataaggcttaaaataccgctgggcgaaaccacccgcttcaatgattaccttttgggcgaaattgaatggaaaaacgatgacgtgaaccccgatccggtattgctcaaatccgacggctttcccacctaccatctcgccaacgtcgttgatgatcatctgatggagataagccatgtcatgcgcgcccaggagtggctcgcgtccactccgttacacgtaatcatgtacaagagcttcgactgggatccaccagagtactgccaccttcccatggtgatgggccaggacgggaaaaaactaagcaagaggcacggcgcgaccagcattgacgaattcaggaagcagggctatctgcctgaggcgcttatcaactacgtcgccctgctgggcgcgtcttacgaagagggaagggatatactcagcctgcgtgagcttgagcagttgttcagcatagacaagctcaacaaggctccggcgattttcgattacaaaaaacttgaatggttcaatggccagtacatcaggatgaaaagcgacgaggagcttgccgccctttgcctgccctccgcggttgaagcgggtctttttggcgctgccggaacccaacccacgacggagcaaaaaaaaatctttatttccgcaatgccccttatccgcgagcgtcttacttttacccatgaggccgctgaaaaaatcgcctatctgttcgcgcctcccccgctgcccgcgccggaagaattcatccccaaaaaagctgaccttgccgaaacgattaggcttttacggcttgcacgggatatggttaaccagctcgctaactcggttaacgacgcagcggcggaagcctatatcaaggaacaggccgaaaaagccgcggtcaagttaggcgatctaatgatgcccctgcgcgtcgccattaccggcagccgcgtcagccctccccttttcggctcgctgcggattttaggcgcgcaggagtcgctgcagagggtggagaaggctttggaacaattaggaatgagcaattag

SEQ ID NO: 66862 - protein, 353 aa, Unknown
  Obtained from environmental sample
  DOMAIN (2)...(179): tRNA synthetases class I (E and Q), catalytic domain
  misc_feature (1)..(353): Xaa is any amino acid
MARVSAGEAHTIRLKIPLGETTRFNDYLLGEIEWKNDDVNPDPVLLKSDGFPTYHLANVVDDHLMEISHVMRAQEWLASTPLHVIMYKSFDWDPPEYCHLPMVMGQDGKKLSKRHGATSIDEFRKQGYLPEALINYVALLGASYEEGRDILSLRELEQLFSIDKLNKAPAIFDYKKLEWFNGQYIRMKSDEELAALCLPSAVEAGLFGAAGTQPTTEQKKIFISAMPLIRERLTFTHEAAEKIAYLFAPPPLPAPEEFIPKKADLAETIRLLRLARDMVNQLANSVNDAAAEAYIKEQAEKAAVKLGDLMMPLRVAITGSRVSPPLFGSLRILGAQESLQRVEKALEQLGMSN

SEQ ID NO: 66863 - DNA, 1278 bp, Unknown
  Obtained from environmental sample
  misc_feature (1)..(1278): n is a, c, g, or t
gtgaacatatttgaaaaagccttgtcaaactttaagcgacaatccggtagccaaaagggtaatagaaaatcgttaggtgaaaatagttttaggaatttgttgaccgccgacgaggatttttatagtttatatgtagaccccttcaacgacaattacctttgcaacgcatgggtgaacattgcggtaaatatttttatccgcaatattgcccgtgcggatttcattcttgaaagagacggggttgagctaaaaagcggctccctctattccttgttccacaggccaaacgagcatttaagcaggtatgacttgtggaaggaaaccgccgcatggtggttcatagagggcgaggcgttttggtggttcggcgcggactatagcggcggtcttccaaagcaactgcatattcttaaccccaggaaactccaacttgagggagaggggttggacgtgtgcaaaccgagtttgcttggtaattatcaaagcaaaaatcggcgttggttttataacgccggagccgaattagtacctatcttttctgatgagcttgtccacttcagggactggaacccgtggaacccgctaagaggcgttaatccccttgtgtctttagccctcgaactggagcaggattattttgcgaataaagctaattctacgttgctcaaaaataatgccataccccaagggctgttaaaaacagaccagacgttaaggccggaggaagccgatgcaatagaacggcggtgggagagcaaatacgggcaggttaaagcagggcgcaagattgcggtactcggaaagggtacaagttttgaagcgttaagttttaatcccgatgttgtaaagctttttgagttaaaaagatggaacctctacacgatactcgccaaattcggaattccccctcgtgtcgcaaatatctctgacaagtcaacggctttatccggcaaggacacaaaagagcagcactcggcgttttggcaatacacgcttattcctctgttgcgccaatttgagcaaatacttgaaagccaattttttatgcgcttcggattaaaagaggccggaaggtttgacctttgggatataccggaattgcaggacaatgaggacgcgcaaagcaaaagggatattgcggaaataaacgccgggattaaaacaatcaatgacgtattaaaggaaaggggcaaggatactaaaccgtggggcgatttatggtatcggcccaagaacatggtagcaactaacggctgcaacgggaatggggaaaaatga

SEQ ID NO: 66864 - protein, 425 aa, Unknown
  Obtained from environmental sample
  DOMAIN (39)...(394): Phage portal protein
  misc_feature (1)..(425): Xaa is any amino acid
MNIFEKALSNFKRQSGSQKGNRKSLGENSFRNLLTADEDFYSLYVDPFNDNYLCNAWVNIAVNIFIRNIARADFILERDGVELKSGSLYSLFHRPNEHLSRYDLWKETAAWWFIEGEAFWWFGADYSGGLPKQLHILNPRKLQLEGEGLDVCKPSLLGNYQSKNRRWFYNAGAELVPIFSDELVHFRDWNPWNPLRGVNPLVSLALELEQDYFANKANSTLLKNNAIPQGLLKTDQTLRPEEADAIERRWESKYGQVKAGRKIAVLGKGTSFEALSFNPDVVKLFELKRWNLYTILAKFGIPPRVANISDKSTALSGKDTKEQHSAFWQYTLIPLLRQFEQILESQFFMRFGLKEAGRFDLWDIPELQDNEDAQSKRDIAEINAGIKTINDVLKERGKDTKPWGDLWYRPKNMVATNGCNGNGEK

SEQ ID NO: 66865 - DNA, 1233 bp, Unknown
  Obtained from environmental sample
  misc_feature (1)..(1233): n is a, c, g, or t
gtgatgggtacgacggttttattcaagcctactgcggtgcagagaaaagcccttgcgttgttaaagggcggggctaaacacatattgctttttggcggatcacgctctggaaaaacaacggtgctggttatggcgattatctacagggcgttaaagtttgccgggtccagacatttgatttgccgttaccgcgctaaagatgctcgttcatcggttatgcgggaaaccttgttaccgtggttggataaaactgtaggaaaaatcggctacacctaccttgcccatgaaagcatggttaccctttttaattcttcggagatttggattggcggcctgggggacagggagcaagcggacaaaatactcgggcacgaatacaacacaatttactttaacgagattagccagctttcctatgccgctgttacaacggcttattcacggctggcaatgagaataaaggattgccggaacctgttttactacgactgcaatccgggcagccctttgcattgggcttacaagatttttgttttgaaacggacatctcttactggcgatccattggagaagccggagctatatcaagcaatgctcctcaatccagaagataacaaggctaatctgccggaagattacatttcggacattctcgacacgcttcctgaaaagcaaaaggcaaggtttagggacgggctttgggtaaaggcagagggcgttatctacgacaagtttgacgagacgatgatcgttcgttcatctgacttgcctgaaagctttgaccgatacgccgccgggcaagatttcgggcttaatatcacgtttgtattgattgcctggcttggcgatgtgatttacgtcctgggcgattacggcgcttacaacatgacgacacaaagctttaacgaggaagtaaccgcaaggggcttgatggattgccctgacgggatggggcttcctgtttattgcgaccctgctggcggtgaaagaatacaggaaataaccgggggcgtaaaagcaaataacagcgttgacagcggcatagattatataaacgcaaaaatagaacggcatcaatttttcgtttctgaaaaatgtaccggggtgctttcggagatttgggattattgcagggacgaagctgggcagattgtaaaagtcaacgaccatttccttgatgccttgcgttatgcggtattttccgatgtgcagcatggggtaatcctatcgtga

SEQ ID NO: 66866 - protein, 410 aa, Unknown
  Obtained from environmental sample
  DOMAIN (29)...(402): Terminase-like family
  misc_feature (1)..(410): Xaa is any amino acid
MMGTTVLFKPTAVQRKALALLKGGAKHILLFGGSRSGKTTVLVMAIIYRALKFAGSRHLICRYRAKDARSSVMRETLLPWLDKTVGKIGYTYLAHESMVTLFNSSEIWIGGLGDREQADKILGHEYNTIYFNEISQLSYAAVTTAYSRLAMRIKDCRNLFYYDCNPGSPLHWAYKIFVLKRTSLTGDPLEKPELYQAMLLNPEDNKANLPEDYISDILDTLPEKQKARFRDGLWVKAEGVIYDKFDETMIVRSSDLPESFDRYAAGQDFGLNITFVLIAWLGDVIYVLGDYGAYNMTTQSFNEEVTARGLMDCPDGMGLPVYCDPAGGERIQEITGGVKANNSVDSGIDYINAKIERHQFFVSEKCTGVLSEIWDYCRDEAGQIVKVNDHFLDALRYAVFSDVQHGVILS

SEQ ID NO: 66867 - DNA, 954 bp, Unknown
  Obtained from environmental sample
  misc_feature (1)..(954): n is a, c, g, or t
ttgaaaaaccatctgctgccgttcttcggcaatatgcccatgaacaaaatcacaaaaatcgaagtcgaggactttttcgatgcgcttatcgaaaaggaatatcaaaacacatccatcaacggcttttacggcacgctgaaaaccatgctcattgaagcggtagagcgaaacataataccaaaagacccgacagacaaaatggggcgtttggtaaatgacaggcgggccattaagattatcatgccggaagaattcaagaaactgtttgtaggcgattggcggcgggtgtgggaaaatgacaggctttcgtacacggctaacaagctggcggctttgacgggcatgagggcatccgaggtggtagggctaaaaggaagttttgtatatgacgagcatatttatctgtgcatgcagtatgacgattacggataccgccctacaaaaacaaaagacaagcacaatatacccctgacttccgacatgataaacgagctaaaagaactcaagcgcatgaatggggacggctttgtgttttcgcttgacggcggcgcaacgcccatttgccggaacaccgtgtataagcatttccaccgggcattgcggaatatagggattacagaagacgagatttccgagcgccatctgcatttgcacgcatggaggcatttctttaataccgaaatgctaaaaggcggccttaccgttacgcaagcccaggccgtaaccgggcataagagcgagcggatgacggaatggtattgccattttgacccgaccgaatttgcaaaggcgaaagaagtgcaggaagccttgctgcgtcctgccccgaaaaaaatagccaaagaagaaaaggcaggggcaaaaactgccggcaataaggataaagccgttaaagtaattcctttccctgaaaagaaaacaaagcagccggagaagaaacgcaaacaagcttaa

SEQ ID NO: 66868 - protein, 317 aa, Unknown
  Obtained from environmental sample
  DOMAIN (90)...(263): Phage integrase family
  misc_feature (1)..(317): Xaa is any amino acid
MKNHLLPFFGNMPMNKITKIEVEDFFDALIEKEYQNTSINGFYGTLKTMLIEAVERNIIPKDPTDKMGRLVNDRRAIKIIMPEEFKKLFVGDWRRVWENDRLSYTANKLAALTGMRASEVVGLKGSFVYDEHIYLCMQYDDYGYRPTKTKDKHNIPLTSDMINELKELKRMNGDGFVFSLDGGATPICRNTVYKHFHRALRNIGITEDEISERHLHLHAWRHFFNTEMLKGGLTVTQAQAVTGHKSERMTEWYCHFDPTEFAKAKEVQEALLRPAPKKIAKEEKAGAKTAGNKDKAVKVIPFPEKKTKQPEKKRKQA

SEQ ID NO: 66869 - DNA, 1605 bp, Unknown
  Obtained from environmental sample
  misc_feature (1)..(1605): n is a, c, g, or t
atggacagccgttacgcgatctccattgttcttgccgcccatgtcccttttgtcagggaacaccgcaaagacgacgacttgtcacaggcgggggaagaaggccgtttttttgaatatgtttcggaaaccctgcttccgctccttggcgtcttagaccggctggaaagcgaccatgttcctttctgcctgggactagctgtctctcccattcttatgttcctgctcggcgacgaacatattctgaataaatacatgctttatacggacaaacaaattgaattcgggaaacaggaaatagagcgcacctcggataacgccgggatgaataaattggctcaaatctattgcgacgaattactggaaagaagaatcgcctttaccgaacgctacgaaaagaatattctgaaagcttttgatttttacaggcgcaagggaaaagttgaaatcctggcaagcagcgcgactaacgcgtttctgccttttatcggccataatgccgaaacgcttcaggcgcagatggaaatacccgtgtcaggttaccgcagttactttataaacagcccgcagggattctggctgccggctttgggctggacaagcgcgatagaaccgtatttaaaagcgtacaattttacatatacaattgtggacagccacggtttgttatacggcaaaccattgccggagaaggggagtttttccccggtaaaaacacctaacggcactcttattctggcaagggatttttacgccgtgcgggaaattgaaaaaatatcaagcgatgatatttatatggataacacccgcgatgccggatacgaacttccgcccgaaatggtaagttcgtttttaaacgcggaaggagagaggcacaagacgggatacaaatattgggcgcgcgcgtataaatcaggaggaggaaagtcagccgcggtttacaatccgcaggcggcttccggcaggataaccgagcacgcaagatcatttttggaaaatacggtttcccgccttgaagaagcgtctaaacacatggaagaacccccgataagcctctacgcgaataacgccggtttcttcggaaatatttggcgcgaagggccgcagtttatcgaagcccttttccgcatggcgcagggctacagggatttacagtttgtcactcccagctcttatattttcaaccggaaacttaattcccttcaggttgtcgctccggaattttcctcgttgggcgttaacggctatgccgaaacatggctggacacatccaacgactggatataccgccatcttatccgttcaatggaaaggatgacggaattagccgagcgttttcccgacgacacaggccttaaagagcgtgccttgaatcaggcggcccgtgagatactgcttgcgcaatcttccgactggccgtacctgttacacaggcaggagtctaccgaatttgcccgtaacaacgccgagaacgctcttcgcaattttacaacgatatacgaagctctgggcagcaattacatcagcaccgaatggcttacaacgcttgaacgccgccacaatattttccctaacattaattaccgggttttcaggagaaagaagtaa

SEQ ID NO: 66870 - protein, 534 aa, Unknown
  Obtained from environmental sample
  DOMAIN (8)...(432): Glycosyl hydrolase family 57
  misc_feature (1)..(534): Xaa is any amino acid
MDSRYAISIVLAAHVPFVREHRKDDDLSQAGEEGRFFEYVSETLLPLLGVLDRLESDHVPFCLGLAVSPILMFLLGDEHILNKYMLYTDKQIEFGKQEIERTSDNAGMNKLAQIYCDELLERRIAFTERYEKNILKAFDFYRRKGKVEILASSATNAFLPFIGHNAETLQAQMEIPVSGYRSYFINSPQGFWLPALGWTSAIEPYLKAYNFTYTIVDSHGLLYGKPLPEKGSFSPVKTPNGTLILARDFYAVREIEKISSDDIYMDNTRDAGYELPPEMVSSFLNAEGERHKTGYKYWARAYKSGGGKSAAVYNPQAASGRITEHARSFLENTVSRLEEASKHMEEPPISLYANNAGFFGNIWREGPQFIEALFRMAQGYRDLQFVTPSSYIFNRKLNSLQVVAPEFSSLGVNGYAETWLDTSNDWIYRHLIRSMERMTELAERFPDDTGLKERALNQAAREILLAQSSDWPYLLHRQESTEFARNNAENALRNFTTIYEALGSNYISTEWLTTLERRHNIFPNINYRVFRRKK

SEQ ID NO: 66871 - DNA, 522 bp, Unknown
  Obtained from environmental sample
  misc_feature (1)..(522): n is a, c, g, or t
gtgattctggcggaaatgcgttctcccccgccgcttctggttcaccgcctggacaaggacacttcgggagcgctcctaacggcaaaaacaagggaagccgccgcccgcttttcccgtcttttgggaacggacaggcaggctgtaaaacagtacattgcggtgtgcgccggaagccccgtaaaaaaagaggggatcatttcgcaggacttaatgatacggggcgtattaaaaaaatcggaaacaagatacaaagtgataaaaagcggggaattttccttgctggaacttgagcttggcacaggaaggatgcatcaaatccgccgccaccttgccatgaccggaaatcctgtgcttggagacgataaatacggagattttacgctaaataaaaaattacgcaaagagaagggacttaaacgcctgcttttacattcgtcccggattgtaataaaaagcgaatttcaacttgatgtaacagcgcctttgcctgaatattttgaggcttttacttctttctcctga

SEQ ID NO: 66872 - protein, 173 aa, Unknown
  Obtained from environmental sample
  DOMAIN (1)...(112): RNA pseudouridylate synthase
  misc_feature (1)..(173): Xaa is any amino acid
MILAEMRSPPPLLVHRLDKDTSGALLTAKTREAAARFSRLLGTDRQAVKQYIAVCAGSPVKKEGIISQDLMIRGVLKKSETRYKVIKSGEFSLLELELGTGRMHQIRRHLAMTGNPVLGDDKYGDFTLNKKLRKEKGLKRLLLHSSRIVIKSEFQLDVTAPLPEYFEAFTSFS

SEQ ID NO: 66873 - DNA, 861 bp, Unknown
  Obtained from environmental sample
  misc_feature (1)..(861): n is a, c, g, or t
atgaaacgaagaatcctgcaacccgaggttttgatcgaggcgcttccctatatccgcgagtttacgggcaagccctttgtcgtgaaatacggcggcagcaccttgctggacgaggcgcagtgcgcgcgtatcgccggggatctcgcgcttctgaagcttgtcgggatccaactggtggtggtacacggcggcggcaaacacatcaacgagatgctgaatcgcctggggatacaaaacaaattcctgaacggattgcgcgttacggatgaagagaccatgcgcgtcgtggagatggtgctctcggggcgctccaataaggatgttgttacccttatcaaccgctacggaggtaaagcgataggcatatcgggcaaggacggcccgctgatccacgcgcttccgtatacggacgccgacggcaacacctacgggcaggtcgggatcatcgagtctgtttccggtgaggtcatcgatcatctgctcgccgggggctatatccccgtgatttcgcccgtcgcctacggtgagggcggcaagagctataacctcaacgcggatcatgtcgcgagccgggtggcgcaggccattcacgccaagaagctgatctacctgagcgatatacccggggtattgcgcgatccgtccgacaaggccagcctgatctccacgctgaacgcggaagaggcggaggcgctcatcgcggacggcacgatcaccggcgggatgctcccaaaaatacaatcgatagtcgaatgtctccggcacggcgtcgagaaggtgcatatcatcagcggattggcgccccacgcgctgctgcttgagatatttacgaacatcggcgtcggcacccgagttcactag

SEQ ID NO: 66874 - protein, 286 aa, Unknown
  Obtained from environmental sample
  DOMAIN (24)...(264): Amino acid kinase family
  misc_feature (1)..(286): Xaa is any amino acid
MKRRILQPEVLIEALPYIREFTGKPFVVKYGGSTLLDEAQCARIAGDLALLKLVGIQLVVVHGGGKHINEMLNRLGIQNKFLNGLRVTDEETMRVVEMVLSGRSNKDVVTLINRYGGKAIGISGKDGPLIHALPYTDADGNTYGQVGIIESVSGEVIDHLLAGGYIPVISPVAYGEGGKSYNLNADHVASRVAQAIHAKKLIYLSDIPGVLRDPSDKASLISTLNAEEAEALIADGTITGGMLPKIQSIVECLRHGVEKVHIISGLAPHALLLEIFTNIGVGTRVH

SEQ ID NO: 66875 - DNA, 1170 bp, Unknown
  Obtained from environmental sample
  misc_feature (1)..(1170): n is a, c, g, or t
atggaaaaaaacaataaacggcgcgcaattgacaatatcaagttctctatcggcaaaaagctgatattgatcatttcaataatggtcattatctcgcttggatctattaccgcactcgcctcatggcttatctatgaggatttaaggattaacgccgaggaaaccaacttcgagacaaaccgccgctcggcggccgaagcggaaacgaccttcgcaaacgtgcgttccaactcaagaattcttattcaaaccattaccgctatgggggcaaacagcgaagccataaacgatatggcaaatttcttttttttagaaaacccgcatatcgcggcgttgtcttttattacccagggaaagaccgagaggcttattattaacaagaggttctttacatccggggaaattgacgaggctcttgccgtgtctttcttcaacgggcgcagggacgctctgggccgcgccattcgcggtgagacatttgttttaaacgcggctccccatttttcaaggccggttcttgccctgtttttcccgtggcaggacgcgggagcgtgctgcgttcttttttcttcccataatttgaataataatttcggctccgggcttaaccagtcctttatgctcaatactcagggcgatgtgcttcttgccgccgattttgagttaatgcaatccgccatgaatatcaaaaacgaggattttattaaagcgatacttgaaagccctaaaatgagcgagcagcaggtaattatttccgaatttaaatttttacagggctccagaagcgttgtaaaatccggcttttttacggcaacatgggtaaacttaaggcctgtaatccagtttgtcctgaataaaataaataaatcttttaacactaatatgaatttgaaaccggcgttctccggagtgaatgaaaagggagaacacgttatgcgccaatttgtggcgtataccanattaaacagcataaacgcggttgtaattaccaatattgaatacgacagggtgtttgaggggatagccgccaccacaaggcgcaatatttaccttacggtcgcagtgttaagtttgtcggttatatttatctgggtttttctcaaaaacaatttccattcccataagggcgcttgccgtcgccgcgcggagcatagagggcggcgaatttag

SEQ ID NO: 66876 - protein, 389 aa, Unknown
  Obtained from environmental sample
  misc_feature (1)..(389): Xaa is any amino acid
MEKNNKRRAIDNIKFSIGKKLILIISIMVIISLGSITALASWLIYEDLRINAEETNFETNRRSAAEAETTFANVRSNSRILIQTITAMGANSEAINDMANFFFLENPHIAALSFITQGKTERLIINKRFFTSGEIDEALAVSFFNGRRDALGRAIRGETFVLNAAPHFSRPVLALFFPWQDAGACCVLFSSHNLNNNFGSGLNQSFMLNTQGDVLLAADFELMQSAMNIKNEDFIKAILESPKMSEQQVIISEFKFLQGSRSVVKSGFFTATWVNLRPVIQFVLNKINKSFNTNMNLKPAFSGVNEKGEHVMRQFVAYTXLNSINAVVITNIEYDRVFEGIAATTRRNIYLTVAVLSLSVIFIWVFLKNNFHSHKGACRRRAEHRGRRI

SEQ ID NO: 66877 - DNA, 867 bp, Unknown
  Obtained from environmental sample
  misc_feature (1)..(867): n is a, c, g, or t
ttgccgcaaaagggcggcgatgaaatcggcatattgacaaacagtttccagcgaatgagcagcgcccttagtgtcttcggcaaatttacaaaccgcgatgtcgccgtaaaggccatgagggggcagataaggccgggcgggcttcctaaacacgcgactatctttttttcggatatccgcaattttaccgccatatccgaaacatttacaaccaaattcggcggggactcgtccgaccgcatagttttctggcttaacaactactttacgcagatgataaactgcgtggaaatgaccaacggggtcgtggacaaatttatcggcgacgcggttatggcgcattggggcaccgcttacagcgccggaagcccgcgcaaagacgcgttcaactgcgtcatggcggcgctgatgatgcgcaaggctctttttaatttgaacaggggcagaaaaaaagacgatccttccaacccgatgatcagaatagggtgcggaataaatacgggcgttgttaccgccgggcaaatcggctccgatcttcgcatggaatacaccgttatcggcgatcccgtgaatctcgcgtccagggtcgaatcgcttaacaaacccctgggcacggatattctgataacagaggacacatggaagcttgtgggcagtaaatttattaccgaggaaatgccccccgtaacggtaaaaggaaaagaaggcgccattagaatattcgccgttgttaatcatgttgataataacaaagggccgtttacgcttgcggagcttcgggaacttttgggtattgaaccacctcagatgtcaaaggtagatgtcaatgcagacgaaaaaaagtacaaaatcggcgcctcagcataa

SEQ ID NO: 66878 - protein, 288 aa, Unknown
  Obtained from environmental sample
  DOMAIN (44)...(245): Adenylate and Guanylate cyclase catalytic domain
  misc_feature (1)..(288): Xaa is any amino acid
MPQKGGDEIGILTNSFQRMSSALSVFGKFTNRDVAVKAMRGQIRPGGLPKHATIFFSDIRNFTAISETFTTKFGGDSSDRIVFWLNNYFTQMINCVEMTNGVVDKFIGDAVMAHWGTAYSAGSPRKDAFNCVMAALMMRKALFNLNRGRKKDDPSNPMIRIGCGINTGVVTAGQIGSDLRMEYTVIGDPVNLASRVESLNKPLGTDILITEDTWKLVGSKFITEEMPPVTVKGKEGAIRIFAVVNHVDNNKGPFTLAELRELLGIEPPQMSKVDVNADEKKYKIGASA

SEQ ID NO: 66879 - DNA, 1059 bp, Unknown
  Obtained from environmental sample
  misc_feature (1)..(1059): n is a, c, g, or t
ttgtcatttttgcccgccgtcgaaaagagttacggcttctccgtgcggtgcgttcaggacggaaccgtttcggcggaggagcaacgggaagcggaacggcggcgcgaaaaagcggctgtttactttaccgattcgcgggacggcaggaaatatcgcatggtagagataggcgaacaaacgtggatggcggagaacttggattatcagcctaaagagggtagctcttggtgttataataacgataacgccaattgcgccctatacggcagattgtatgatttcaacacggcgaagagtatctgtccaacgggctggcacttacccgacaaatgggaatgggatacattggcgctgaaagtcggaggcaatagggacagcgatgaggacggcggcgactattgggagggcgtgggcaagcgcctgaaagcaaggcgcggttggagcgtttggcgcagtacaagcggcaacgggtcggacagactcggattttcggccctgcccggcggtcaccgcgccgccaaaaaggacgatgtattcaacaacgccggatactacggctattggtggacggccacagggcacactaacagctacaccgccgtctcccgaaccatggattacgacaaaaacggcatgtccgaggtcagtagcgacatccgctacggcttttcggtacgctgcatacaagacgaaagccccgaaaaggttcanaagaggatagaggcggagcaaaaaaggatcgcggaagagcaaagaaaaatcgaagaggtacggaaaataatggaagaggagcanaaaaggatcgaaaaattatccacctattttaccgattcgagagacggtaaaaaataccgcgctgtgaagataggcggtaaaagatggatggcggagaatttgaattatcaaactggcaattcttggtgttacgacaacaataattccaactgcgagaagtacggcagattgtatgattggaacacagcaaagacggcgtgtcctatctcttccgtgcttaataaggattcgctgggcctcttcgaacgtgttgtatggtactaa

SEQ ID NO: 66880 - protein, 352 aa, Unknown
  Obtained from environmental sample
  misc_feature (1)..(352): Xaa is any amino acid
MSFLPAVEKSYGFSVRCVQDGTVSAEEQREAERRREKAAVYFTDSRDGRKYRMVEIGEQTWMAENLDYQPKEGSSWCYNNDNANCALYGRLYDFNTAKSICPTGWHLPDKWEWDTLALKVGGNRDSDEDGGDYWEGVGKRLKARRGWSVWRSTSGNGSDRLGFSALPGGHRAAKKDDVFNNAGYYGYWWTATGHTNSYTAVSRTMDYDKNGMSEVSSDIRYGFSVRCIQDESPEKVXKRIEAEQKRIAEEQRKIEEVRKIMEEEXKRIEKLSTYFTDSRDGKKYRAVKIGGKRWMAENLNYQTGNSWCYDNNNSNCEKYGRLYDWNTAKTACPISSVLNKDSLGLFERVVWY

SEQ ID NO: 66881 - DNA, 663 bp, Unknown
  Obtained from environmental sample
  misc_feature (1)..(663): n is a, c, g, or t
gtgttcgggggtaatatagaaaatgctgtttactatatttccagcaccgtgcagcaattcacagacctaacagaacgcaggcaaaagctttttgagcgagttgcctccctgcgcacaaggcatttttgcttagttttagaggatttttttgacccccacaatatatctgccgttatccgcacctcagaggtctatggcttgcaagatgtgcatataatagaggaagataatccatacaggataaataaggctattttaaagggttctatcaaatggctggatgtttttcggtataaaaaaagggaagtttgcatagaaggcctaaagagcaagggctacacaatagctgtggcaaacacacacgccaaaaaaaccattttggatttggacttatccaaacccaccgccttttatatgggtgcggaattccgcggcaaccaccccgataccgttaaatacgcagactgcaattttgttctgccccaatatggcttcacagaaagcatgaacgtttcggttgcttcgggcattcttttgacttatttggatgtttatatgaggctgaggggcagaaagaatttttccctaggagtggaagaacaagaggctttgattatggaatggcgaaataggcaccttggctatgcagggtcaaaggagtag

SEQ ID NO: 66882 - protein, 220 aa, Unknown
  Obtained from environmental sample
  DOMAIN (41)...(180): SpoU rRNA Methylase family
  misc_feature (1)..(220): Xaa is any amino acid
MFGGNIENAVYYISSTVQQFTDLTERRQKLFERVASLRTRHFCLVLEDFFDPHNISAVIRTSEVYGLQDVHIIEEDNPYRINKAILKGSIKWLDVFRYKKREVCIEGLKSKGYTIAVANTHAKKTILDLDLSKPTAFYMGAEFRGNHPDTVKYADCNFVLPQYGFTESMNVSVASGILLTYLDVYMRLRGRKNFSLGVEEQEALIMEWRNRHLGYAGSKE

SEQ ID NO: 66883 - DNA, 1023 bp, Unknown
  Obtained from environmental sample
  misc_feature (1)..(1023): n is a, c, g, or t
atgtccattaaagtaggtatcaacggattcggccgcattggtcgcatggttttccgcgctgccgttcaaaatttctccaacgatatagaaatcgtgggaatcaacgatttgctagagcctgggtatctggcttatatgcttaaatacgattccgttcatggtcgtttcaaaggcgatgttggcgtagatggctcaaacttggtagtgaatggcaaaaaaattcgcctcaccgcagagaaagaccctgcaaacttaaaatggggcgatgttggtgcgcaagtagtggtggaatcaactggattcttcttggaaaacacagacgcatctgctcgcaagcatcttcaggctggcgcaaaaaaagtgattatgtctgctcctgcaaaagacgataccaaaacttttgtttatggcgttaatcacaaaacctatagtggcgaagatgttatttccaatgcaagctgcacaacaaactgccttgcaccactcgcaaaagtcgttcacgaaaaattcggcattacccgtggcttaatgaccaccgttcacgcggcaacagcaacccaaaaaaccgttgatggtccttcttcaaaagattggcgcggcggtcgtggcattttggaaaacataattccttctagcactggcgcagccaaggctgtaggcttggttctccccgaagtgaacggcaaactgacaggtatttctctccgcgttccaagcagcgatgtgtccatcgttgatttaaccgcagagctaaaaacctcgttcaaagacaaaaaagaagcaatggaaaaaatcaacgccgctcttaaagaggcttctgaaggcgaactcaaaggcattctcggctacacccaagacgccgtagtttccacagatttccgcggtgattcccacacttccatttacgatgcagacaagagccttgcccttgacggcaactttgtgaaactcctttcttggtacgacaacgaatggggctattcaaacaaagtgctggagatggctagagttattgcgaaataa

SEQ ID NO: 66884 - protein, 340 aa, Unknown
  Obtained from environmental sample
  DOMAIN (159)...(321): Glyceraldehyde 3-phosphate dehydrogenase, C-terminal domain
  misc_feature (1)..(340): Xaa is any amino acid
MSIKVGINGFGRIGRMVFRAAVQNFSNDIEIVGINDLLEPGYLAYMLKYDSVHGRFKGDVGVDGSNLVVNGKKIRLTAEKDPANLKWGDVGAQVVVESTGFFLENTDASARKHLQAGAKKVIMSAPAKDDTKTFVYGVNHKTYSGEDVISNASCTTNCLAPLAKVVHEKFGITRGLMTTVHAATATQKTVDGPSSKDWRGGRGILENIIPSSTGAAKAVGLVLPEVNGKLTGISLRVPSSDVSIVDLTAELKTSFKDKKEAMEKINAALKEASEGELKGILGYTQDAVVSTDFRGDSHTSIYDADKSLALDGNFVKLLSWYDNEWGYSNKVLEMARVIAK

SEQ ID NO: 66885 - DNA, 585 bp, Unknown
  Obtained from environmental sample
  misc_feature (1)..(585): n is a, c, g, or t
atgaaaagaaaagctagcatttccaggaaaacggcagaaactgatattgaattatatttggatttagactctaaaaaaaaaggaaacataaaaagtggtagtgcattcttagatcatatgctcaatttgttccaatcgcacgcaggagttgaacttagccttgcctgcaagggcgatattgaaatagattttcaccacagcatagaagatataggcatagtttttggttctggcttaaaccaagctcttggcgataaaaaaggcattgagcgttttggtttttactttgccccaatggacgaatgcctagcaagagtagccttggatttcagcggtcgctatgcttatgttttgcaaggaactttgcctgcaagaataggcgacttagattccagcctttgggaacattttttcaaaagcctagccgaaaacgcaaaaatgaatctgcacatagaacttctctacggcttggacggtcaccactgcatggaagccatattcaaagcattcgcaagatctgttgctatggcaataggcaaaggcaaaaatgcagatgaaatacccagcactaaaggaacgctttaa

SEQ ID NO: 66886 - protein, 194 aa, Unknown
  Obtained from environmental sample
  DOMAIN (32)...(175): Imidazoleglycerol-phosphate dehydratase
  misc_feature (1)..(194): Xaa is any amino acid
MKRKASISRKTAETDIELYLDLDSKKKGNIKSGSAFLDHMLNLFQSHAGVELSLACKGDIEIDFHHSIEDIGIVFGSGLNQALGDKKGIERFGFYFAPMDECLARVALDFSGRYAYVLQGTLPARIGDLDSSLWEHFFKSLAENAKMNLHIELLYGLDGHHCMEAIFKAFARSVAMAIGKGKNADEIPSTKGTL

SEQ ID NO: 66887 - DNA, 348 bp, Unknown
  Obtained from environmental sample
  misc_feature (1)..(348): n is a, c, g, or t
atgactcttgattttaacaaagtacgcatatttatccgccccggccgcacggacttgcggaaggcggtaaacgggctgtctgtaatggtagaacagcagatggcgggagaaccgttcagcgggaacgtgtacctgttttgcaaccgtgggcgcaggctgctgaaggcggtgtggtgggacaggaacgggttctggctggcgcacaagaggctggaaaaggacaggttcccgtggccggagacggaagaggaagcgagggagataagcgcggaagaactgtcaatgctgctggcggggatagattttttcaaggcgcacaaaacgctgtattacaaaaatgtttcgtaa

SEQ ID NO: 66888 - protein, 115 aa, Unknown
  Obtained from environmental sample
  DOMAIN (6)...(114): IS66 Orf2 like protein
  misc_feature (1)..(115): Xaa is any amino acid
MTLDFNKVRIFIRPGRTDLRKAVNGLSVMVEQQMAGEPFSGNVYLFCNRGRRLLKAVWWDRNGFWLAHKRLEKDRFPWPETEEEAREISAEELSMLLAGIDFFKAHKTLYYKNVS

SEQ ID NO: 66889 - DNA, 1365 bp, Unknown
  Obtained from environmental sample
  misc_feature (1)..(1365): n is a, c, g, or t
gtgactcctgaagagattgaagcgatgtgggaggatccgaagctccggggcgatcatttgttctgggcatggctccaggaagcgttggatacgcagttcagcgcggcggcaaaagcggttgccgaagcgggaatcgtgctggaaggggatctgcccatactgatgaatgacgacagctgcgacgtgtgggcgcacaaggaaatttttactcaggagctttcagcgggcgccccgcctgacatgtacagtcccgaagggcagaactggggtttccccctgcataactgggcggagcaggagaaagacaatttcgcttggtggaagcaaaggctcgccgttgcgggcaagtattatcaggcgtaccgcatagatcatgtgcttgggtttttccgtatatgggcttcgtcccccagggattattcttccgcgttgggacgttatatcccctacacgcccataaccaattccgatttaaagaaactcggttttgacaaggggcgaataaagtggatttccttgccccatattcccaccaacgagctgttagacgcaatgcacgccaaccatattaatgaagctgacattcccgccgcgacaaagaaaatattttccaaggcgcttgatcaggttggcagcgaggaactttggctgttcaagaaaaaaattaaaggcgaaaaagatattgacgcccttggcctgcacccgtccgcacgctcatacctgttcaatgcctggcgcaaccggcttttccttgagtacgcaaaaggaaagttttttccggcctggagttacagagactcccgcgcttaccattcacttaccaacgaggaaaaagaaaaccttgaacaattattgcaaaaacgaatggcaaaatcggaaaaaatatgggaggttcatgggagaaagctgctctctattctggttgagtcttcgcccatgctgccctgcgccgaagacctgggcgcggttccgaactgcgttcccaaggtgctgacaaagttgaagatcttaggcctgcgggttgtccgctggcacaggcaatgggacaaaccaaaccagccttatattccatttgaggattaccctgatctctcggtttgcactgccgcggtacatgacagttccaccctccctgaatggtgggaacgggaagcgaatcaacagcagttcgccggttttgtgggcgtcccctcattgccaaagatttacaacccgcgggacggcaaaaacaatccttgccaaaatcgcgaccgcacgttcgcgtttccgcgtctttcagattcaggatttgcttcatctttccaacaagtggtactcgcaagaccccgcttcggagcgcatcaacgtgcccggaacctgcaatga

SEQ ID NO: 66890 - protein, 454 aa, Unknown
  Obtained from environmental sample
  DOMAIN (2)...(438): 4-alpha-glucanotransferase
  misc_feature (1)..(454): Xaa is any amino acid
MTPEEIEAMWEDPKLRGDHLFWAWLQEALDTQFSAAAKAVAEAGIVLEGDLPILMNDDSCDVWAHKEIFTQELSAGAPPDMYSPEGQNWGFPLHNWAEQEKDNFAWWKQRLAVAGKYYQAYRIDHVLGFFRIWASSPRDYSSALGRYIPYTPITNSDLKKLGFDKGRIKWISLPHIPTNELLDAMHANHINEADIPAATKKIFSKALDQVGSEELWLFKKKIKGEKDIDALGLHPSARSYLFNAWRNRLFLEYAKGKFFPAWSYRDSRAYHSLTNEEKENLEQLLQKRMAKSEKIWEVHGRKLLSILVESSPMLPCAEDLGAVPNCVPKVLTKLKILGLRVVRWHRQWDKPNQPYIPFEDYPDLSVCTAAVHDSSTLPEWWEREANQQQFAGFVGVPSLPKIYNPRDGKNNPCQNRDRTFAFPRLSDSGFASSFQQVVLARPRFGAHQRARNLQ

SEQ ID NO: 66891 - DNA, 1335 bp, Unknown
  Obtained from environmental sample
  misc_feature (1)..(1335): n is a, c, g, or t
ttggctggaattctacaagaagttctccatgccattcggggctttttcgttcgtattcctttcggtcgcgctggggctggtagcaaaaagaagcggtcagaccgtaggctttatgattggcctcatcatttcggtaatctactgggctctgcttctgggcgggcagaccatgggaataaggctaagcacccccccattttggtcaatgtggctgccaaatattctcgcgctgtcgatcgggcttgttctgactattatcagggtaaccagatgacgctggatcgatatttaatccgccagtttctgcctatctttatcgtggctatcggtatgttcatgtttgttttgtcattgatcgatctgttcgcgcatctggtccggtatcttaactacgaagtccccttttcccagataatgaaaataagcgcgtactatctgccaaaaagtttttcctacgccctgcctatatccctgttgttcgcttcggcctatacccttggggatctctatgcgcgtaacgagcttacttcgattttttcatcggggatccccttttggcgtttcagcatgccgttagttgtaatcgggtttctcgcttcgattttttcgtttttctttgatgacaatctggttataccgaccttgcgggtaaagaacgagctgtcacggcgtttcctgcgccagacaaccgccgagaacaactcggacattgtaatcaaagcgagaaacggagagcttatatattcgattgattattatgattataacgcgaaagtccttaacgggataagtattgtggaacaggactcctcgggtaattttatttcgcttatccgcgctcaaaggggaacatggacaggcgagtattgggatcttgtcaacccgatgatttattattgggaggaaagctttctgcggaccaggccccttccccctacggacgcgtatcgtgaagaaccggacatcttcaggcgcaacgccgtcaaaccggaagaacttcccgctatgcaggaaaaattactgataaaggaccttacagccgcggggcttccacacatggaggctcaggctgattattaccaccggttctcatactctacaatatcatttattgtaatggtcctttcaatatcaatgggtggcaaattcagaaaaaacatccttttaatgagccttttgtcaagcctttccgcggcggttgttttttatgtcatggaaatgatctccatgatgatggccaaactgggctatatcccgacgctgattggggcgtggtttccggtcgtgatctttatcataattggcgcgatgctcctgatatgggcgaaaacctaa

SEQ ID NO: 66892 - protein, 444 aa, Unknown
  Obtained from environmental sample
  DOMAIN (95)...(441): Predicted permease YjgP/YjgQ family
  misc_feature (1)..(444): Xaa is any amino acid
MAGILQEVLHAIRGFFVRIPFGRAGAGSKKKRSDRRLYDWPHHFGNLLGSASGRADHGNKAKHPPILVNVAAKYSRAVDRACSDYYQGNQMTLDRYLIRQFLPIFIVAIGMFMFVLSLIDLFAHLVRYLNYEVPFSQIMKISAYYLPKSFSYALPISLLFASAYTLGDLYARNELTSIFSSGIPFWRFSMPLVVIGFLASIFSFFFDDNLVIPTLRVKNELSRRFLRQTTAENNSDIVIKARNGELIYSIDYYDYNAKVLNGISIVEQDSSGNFISLIRAQRGTWTGEYWDLVNPMIYYWEESFLRTRPLPPTDAYREEPDIFRRNAVKPEELPAMQEKLLIKDLTAAGLPHMEAQADYYHRFSYSTISFIVMVLSISMGGKFRKNILLMSLLSSLSAAVVFYVMEMISMMMAKLGYIPTLIGAWFPVVIFIIIGAMLLIWAKT

SEQ ID NO: 66893 - DNA, 354 bp, Unknown
  Obtained from environmental sample
  misc_feature (1)..(354): n is a, c, g, or t
atgatggccgaggtttccgtctttcagcgggaagcgcagacgcttcagagtatgagtaaagaccggggactttccctgtattggctggaattctacaagaagttctccatgccattcggggctttttcgttcgtattcctttcggtcgcgctggggctggtagcaaaaagaagcggtcagaccgtaggctttatgattggcctcatcatttcggtaatctactgggctctgcttctgggcgggcagaccatgggaataaggctaagcacccccccattttggtcaatgtggctgccaaatattctcgcgctgtcgatcgggcttgttctgactattatcagggtaaccagatga

SEQ ID NO: 66894 - protein, 117 aa, Unknown
  Obtained from environmental sample
  misc_feature (1)..(117): Xaa is any amino acid
MMAEVSVFQREAQTLQSMSKDRGLSLYWLEFYKKFSMPFGAFSFVFLSVALGLVAKRSGQTVGFMIGLIISVIYWALLLGGQTMGIRLSTPPFWSMWLPNILALSIGLVLTIIRVTR

SEQ ID NO: 66895 - DNA, 855 bp, Unknown
  Obtained from environmental sample
  misc_feature (1)..(855): n is a, c, g, or t
atgattttcgcccccattttaattgccgccataggaggcatgatttgcgaacgttccggcgttgtaaacatcgcgcttgaaggattaatgtcgctgggagccatgaccgccgcgattattcatgttattctggaaacaaaaaccggtctttccattccgctggcgctcctgctttccgcgcttaccggcggacttttttcccttattcacgcttttgcttccatttctctgcgcgcggatcaggttgtttccggcacgggaataaaccttcttgccaacgggttaactgtttttgtctgccagcttgttttccgcatggaccgcagtatgaattacaggatgggaatgaagtccggtcttttcggtctttatcccaccatctggatcgctcttgtcatcttagccgtaagctggtttgtgctgtacaaacgctcgtggggtataagactacgcgccgccggcgagcatccgcaggctttagcgtccgccggggttaatgtggttaaactccggtacgccgccgtaattatttccggccttctcgcgggtcttgcgggcggctgtatcgttcttactcaggatattcaatttaccgtaagcacgattaacggaaaaggttttatcgcccttgccgccgtttctttcggccgctggctgccgttgggcatactcggctcaagttttttattcggcgtatcctcaagtatggcggttaacattgttaacattaaaaaacttcaatttctgccttcggaagtgttcagcatgatgccgtttttgattacgttgataacacttgttttattcagcgggaaagagacagcgcctaaggcattggggcagaaggatttttaa

SEQ ID NO: 66896 - protein, 284 aa, Unknown
  Obtained from environmental sample
  DOMAIN (1)...(266): Branched-chain amino acid transport system / permease component
  misc_feature (1)..(284): Xaa is any amino acid
MIFAPILIAAIGGMICERSGVVNIALEGLMSLGAMTAAIIHVILETKTGLSIPLALLLSALTGGLFSLIHAFASISLRADQVVSGTGINLLANGLTVFVCQLVFRMDRSMNYRMGMKSGLFGLYPTIWIALVILAVSWFVLYKRSWGIRLRAAGEHPQALASAGVNVVKLRYAAVIISGLLAGLAGGCIVLTQDIQFTVSTINGKGFIALAAVSFGRWLPLGILGSSFLFGVSSSMAVNIVNIKKLQFLPSEVFSMMPFLITLITLVLFSGKETAPKALGQKDF

SEQ ID NO: 66897 - DNA, 1119 bp, Unknown
  Obtained from environmental sample
  misc_feature (1)..(1119): n is a, c, g, or t
ttgacgactaaattaaaaaagatagaaaacaaaatactggaactgttaacgggcggcgacggagtaacttccgtcatcgccgtagttcttggttttcttacggcgaccattcttcttatcgcgattggaaaaaacccgtccggaatgtatgatgcgatacttcaggtggtaagcggttttgattcccgcttcggcacatggaatccgcgctatataggtgaatggcttgtcagctcgataccgttgatcctctgcgggctttcgatgggcttcgcggcccgcaccggcctttttaatatcggcgcggaagggcagtacattgcggggcttaccgcggcgcaggttttcgctcttttttttccgccggttcccgttcttcattggcttgtcgctgtcttgggcgcgacgcttgccggcgctttatggggcggcatagccggtttctttaaggcgcggtacaaagtttcggaagtagtttccacaatcatgatgaactacatcgccctttatgttcaccgcatcgtaaccttaagcatccacggcagtaatactttcagaactcctgattttcccgtaacggcgtctattacaagcgctgtgatgtcgtcaatcacaaacggatcaaggcttaattacggcctttggttcacagtccttgcggttgtaatttattgggttatcatggaaaaaacaacgcttggctattctctgcgcgccgccggatttaacagggatgccgctttttacgccggcatgcgcgtaaatcttaatattaccgtgtccatgttaatatcgggagcgtttgcgggtcttgcgggcgcttctgtttctcttggcttgttccactacgggcgcgtgcttgccgcttttgacaattttggttttgacggtatcgccgtcgcgctcggcggaagttgtaccgccggaggaatttccgttgtgggattgcttttcggaatgttaaggtcggcgcagcccttaatgcagtcgcggcagatacccagagaaatcgcctcgattatcatgggactggtcgttgtatttatctcgcttcgcgccggaatgcaattgtttattgaatggcgtatgaaagagagagtgggaagggaaaggacataa

SEQ ID NO: 66898 - protein, 372 aa, Unknown
  Obtained from environmental sample
  DOMAIN (71)...(350): Branched-chain amino acid transport system / permease component
  misc_feature (1)..(372): Xaa is any amino acid
MTTKLKKIENKILELLTGGDGVTSVIAVVLGFLTATILLIAIGKNPSGMYDAILQVVSGFDSRFGTWNPRYIGEWLVSSIPLILCGLSMGFAARTGLFNIGAEGQYIAGLTAAQVFALFFPPVPVLHWLVAVLGATLAGALWGGIAGFFKARYKVSEVVSTIMMNYIALYVHRIVTLSIHGSNTFRTPDFPVTASITSAVMSSITNGSRLNYGLWFTVLAVVIYWVIMEKTTLGYSLRAAGFNRDAAFYAGMRVNLNITVSMLISGAFAGLAGASVSLGLFHYGRVLAAFDNFGFDGIAVALGGSCTAGGISVVGLLFGMLRSAQPLMQSRQIPREIASIIMGLVVVFISLRAGMQLFIEWRMKERVGRERT

SEQ ID NO: 66899 - DNA, 528 bp, Unknown
  Obtained from environmental sample
  misc_feature (1)..(528): n is a, c, g, or t
ttgtttctgtctttatatcaatttgctccttacgcaagtgaatatggaataaaaaaacatgaaaaaagttatccgcttgacagaaatacaggcggcatatactccgcggatattacggtattccgcgggtcggaaaaaaacggatattgtttattaaaaaaaccttttattgtttcttttgttacagttccggcaataaggtcgcctgaattaattgaacggaatggaaatctttatattgccgataatctcgtagaacccgcaaaagaaaaaatacggacaatattcagaattgccggaaaatataaacatgattgtctggtattaggcgcattcggatgcggagcgtttgcaaatccgcccaatcatatagcggaattattcaaagaagtttttcttgaaaaagaatttatcaatagatttaaatttgttgttttctcaatatttgaagatcataatagtaacaagcggcataatccaaacggaaatgttttgccgtttttggaagtgttcgacagtataccataa

SEQ ID NO: 66900 - protein, 175 aa, Unknown
  Obtained from environmental sample
  misc_feature (1)..(175): Xaa is any amino acid
MFLSLYQFAPYASEYGIKKHEKSYPLDRNTGGIYSADITVFRGSEKNGYCLLKKPFIVSFVTVPAIRSPELIERNGNLYIADNLVEPAKEKIRTIFRIAGKYKHDCLVLGAFGCGAFANPPNHIAELFKEVFLEKEFINRFKFVVFSIFEDHNSNKRHNPNGNVLPFLEVFDSIP

SEQ ID NO: 66901 - DNA, 1227 bp, Unknown
  Obtained from environmental sample
  misc_feature (1)..(1227): n is a, c, g, or t
atggttattagattttcttttattaccatgcttttactcattttttcggtgttttggctttccgcgtgtaccggcatgaaaaacgaaaacaaagatattacagtacctaaagtctcctgttatatcagaacatgggccataccgccggcggcgcgggaaaacggcagcctctattggaacgccgaaatgatcaagggcgaataccttaacgatttgatcatctcatttgcccttctggataataacgatgtttccaaaccttacattcccgaatttaacccttccatgttcggcaatatctggaatgaagtatccgccctaaaagcaaaatatcctcaccttaagattactttctccgtgggcggatacggcgccgacggtttttccgatatgacctatgatccaaaactgcgcgcggcttttacagctaacgtatgcaaatggctggaagattacaacctggacggcatggacgttgactgggaatatcctgtgggaccgtcatggggctcagtaataaaaacgcgtcccgccgacaggcaaaattatatcgctcttctgcgggagttacgggacgcgatggacaagttaggcgctaaaaccggcaaacggtacagtctttccacggcggttccggcaagcggctggttcacaaaagctaacgatgtaaaggcggcggcgcaaattgtggattcgctgaaactcatggcttatgattattacggcgaatggagcgataccaccggacatctcgccaatttaaacaacaacccatccgatccggcatggggcggctggagtacaaagcaggctctggaagaatatctgtcggcgggagtgccgccgggaaaaataacattaggcatagggttctacggaagagcgtggcaaggcgttgagcgcggcgctaacgagaatactcccggcctttatcagccgtataaatcaattcccaaatctccgccttttaataacggaacgattgactggacggaaataaaagaatttctgaagcccggttccggctacaaacattattgggacgatacagccaaggcgccttacctctacaacggcgacatctggatcacttacacagacgcggaacagataaaaattttaactgattttgttaaagaaaaaaaactcggcggagtctttgtctgggaatacggccacgacatgaacgccgatttattaaaagttctggccgaaaactcgcaataa

SEQ ID NO: 66902 - protein, 408 aa, Unknown
  Obtained from environmental sample
  SIGNAL (1)...(27)
  DOMAIN (36)...(394): Glycosyl hydrolases family 18
  misc_feature (1)..(408): Xaa is any amino acid
MVIRFSFITMLLLIFSVFWLSACTGMKNENKDITVPKVSCYIRTWAIPPAARENGSLYWNAEMIKGEYLNDLIISFALLDNNDVSKPYIPEFNPSMFGNIWNEVSALKAKYPHLKITFSVGGYGADGFSDMTYDPKLRAAFTANVCKWLEDYNLDGMDVDWEYPVGPSWGSVIKTRPADRQNYIALLRELRDAMDKLGAKTGKRYSLSTAVPASGWFTKANDVKAAAQIVDSLKLMAYDYYGEWSDTTGHLANLNNNPSDPAWGGWSTKQALEEYLSAGVPPGKITLGIGFYGRAWQGVERGANENTPGLYQPYKSIPKSPPFNNGTIDWTEIKEFLKPGSGYKHYWDDTAKAPYLYNGDIWITYTDAEQIKILTDFVKEKKLGGVFVWEYGHDMNADLLKVLAENSQ

SEQ ID NO: 66903 - DNA, 1395 bp, Unknown
  Obtained from environmental sample
  misc_feature (1)..(1395): n is a, c, g, or t
atggcggacatgataactaaagtcatcaaagaaaaatccggcagcgttcaatatgaaaataacggaaaaaaattggtctgcgctttcacgccgcttcccggttacgattggatatttattcagaatatagaagaaagcgaaatacttgctcctgtaatacatatccgcaatataatgatgatgatcggattaatatgcgcagcgattggcgttattgtagcgattatttccgggcgttccataaccaaaccgttaacgggtataacaaaaatagttaaacatacaggcagcggagatttgaccatgcgcgttaacgttaaatcaaatgatgaaataggcgaattggccgacggcttcaacgccatgcttgataatattaaaaacctcattacaactatacagcaggaatcaaaacacttgtccaacataggggacacgcttgccggcagttcgcaaaaaacagcaactgcggtaaaagaaattacaggcaacattcaaaacattcaacatctcgcggtcaaccagtccgcttcggtaacccagacaaacgccacaatggagcagataagcggcaatattaaaaaacttaacgatcatgtggctcatcagacagagagcgtttcccagtcgtcttcggcagttgaggaaatgatttccaatattaactctgttacccagacgcttttcagaaacacggacaaggtgaatgagctgacagacgcttccggcgtaggacgcggaggattgcagactgtagtttcagatgttgaggagattgccaaagaatccgaggacttgttaaagatcaattcggtgatggaaaacatcgcgagccagacaaatttgctttccatgaacgccgctattgaagccgcccatgccggggattcgggcaagggattcgccgttgtagccggagaaatccgcaaactggcggaaagctcaagcgcgcagtcaaaaaccatagacgcggttctaaataaaattaaaggttctatagataagatttcccattccaccggcagcgcgctggaatcatttgaagccatcgaaggcggaatacatacggtttccgatcaggaaggaaatatacgcggagccatggaagagcagggcgaagggagcaagttgattcttgacgccatctgccagcttaacgagattacacagcaagttaaggacagttccctggagatgcttgaaggcgcgaaggaaattattaccgaaggcaagaaccttgagagagcgacaggcgaaattaccggcggaatgagcgaaatggccgcgagcgcggaacaaatcaacactgccgtgagcgaagtaaacagcatcagcgggcaaaacaaggaaattattgataacctggtcgtagcggtctcgaagtttaaggtttaa

SEQ ID NO: 66904 - protein, 464 aa, Unknown
  Obtained from environmental sample
  DOMAIN (59)...(128): HAMP domain
  misc_feature (1)..(464): Xaa is any amino acid
MADMITKVIKEKSGSVQYENNGKKLVCAFTPLPGYDWIFIQNIEESEILAPVIHIRNIMMMIGLICAAIGVIVAIISGRSITKPLTGITKIVKHTGSGDLTMRVNVKSNDEIGELADGFNAMLDNIKNLITTIQQESKHLSNIGDTLAGSSQKTATAVKEITGNIQNIQHLAVNQSASVTQTNATMEQISGNIKKLNDHVAHQTESVSQSSSAVEEMISNINSVTQTLFRNTDKVNELTDASGVGRGGLQTVVSDVEEIAKESEDLLKINSVMENIASQTNLLSMNAAIEAAHAGDSGKGFAVVAGEIRKLAESSSAQSKTIDAVLNKIKGSIDKISHSTGSALESFEAIEGGIHTVSDQEGNIRGAMEEQGEGSKLILDAICQLNEITQQVKDSSLEMLEGAKEIITEGKNLERATGEITGGMSEMAASAEQINTAVSEVNSISGQNKEIIDNLVVAVSKFKV

SEQ ID NO: 66905 - DNA, 444 bp, Unknown
  Obtained from environmental sample
  misc_feature (1)..(444): n is a, c, g, or t
atggcttcaaatgattccagcgcgctgccggtggaatgggaaatcttatctatagaacctttaattttatttagaaccgcgtctatggtttttgactgcgcgcttgagctttccgccagtttgcggatttctccggctacaacggcgaatcccttgcccgaatccccggcatgggcggcttcaatagcggcgttcatggaaagcaaatttgtctggctcgcgatgttttccatcaccgaattgatctttaacaagtcctcggattctttggcaatctcctcaacatctgaaactacagtctgcaatcctccgcgtcctacgccggaagcgtctgtcagctcattcaccttgtccgtgtttctgaaaagcgtctgggtaacagagttaatattggaaatcatttcctcaactgccgaagacgactgggaaacgctctctgtctga

SEQ ID NO: 66906 - protein, 147 aa, Unknown
  Obtained from environmental sample
  misc_feature (1)..(147): Xaa is any amino acid
MASNDSSALPVEWEILSIEPLILFRTASMVFDCALELSASLRISPATTANPLPESPAWAASIAAFMESKFVWLAMFSITELIFNKSSDSLAISSTSETTVCNPPRPTPEASVSSFTLSVFLKSVWVTELILEIISSTAEDDWETLSV

SEQ ID NO: 66907 - DNA, 543 bp, Unknown
  Obtained from environmental sample
  misc_feature (1)..(543): n is a, c, g, or t
atgccgccgaatatcgtaactcaatacactgtagacattggctattcaacagaccgaatagtgattaaccctcaatcatcggtaacgcttcgggcaaacggcggggggaacggcgcgaataccggcttgtattgtcttcctgttagttattgcattatcgggaatacgattgacagggctgatgaaacaggcgggaacggtacgggggtcatcgaggaaacctgttatacattgaatacagttgaccgtcatgcggtttttactggttttcaagagactgtaggctgtttgtgcgctagagactataaaggggttggcaatcaatttgttagtgaaaataaatgtgtatttaacaataaatatgaaataagaagattaacgccgttagagtgtgaaagattacagggttttcccgatagttggacggaatacggacatgacagaaaaaaaatctctgacaatcagcggtataaggctttgggaaatagtgtcgctattccctgtgtggaattcatacttaaacaaatagcaaatagcaaatag

SEQ ID NO: 66908 - protein, 180 aa, Unknown
  Obtained from environmental sample
  misc_feature (1)..(180): Xaa is any amino acid
MPPNIVTQYTVDIGYSTDRIVINPQSSVTLRANGGGNGANTGLYCLPVSYCIIGNTIDRADETGGNGTGVIEETCYTLNTVDRHAVFTGFQETVGCLCARDYKGVGNQFVSENKCVFNNKYEIRRLTPLECERLQGFPDSWTEYGHDRKKISDNQRYKALGNSVAIPCVEFILKQIANSK

SEQ ID NO: 66909 - DNA, 852 bp, Unknown
  Obtained from environmental sample
  misc_feature (1)..(852): n is a, c, g, or t
ttgaaaatgaagttggggagcttgtttgacggtatcgggggtttttcattggcggcttccagggtgggaataatgcctgtatgggcaagcgagattgtaccggactgtatcagcattactaaacggcattttcctgttatgcgtcatttaggcgatataaccaaaataaacggcggggacgttgagcctgttgacattatttctttcggttcgccttgtcaggatttgagtatatccggaaaacgtgcggggcttgacggcgaaaaatcggggctgttcttacaggctgttcgtgtcattaaggaaatgaggagtgctacaaacggaacctatccaaaaagaattgtttgggaaaatgtgccgggggcttttagctcaaacaaaggcagggacttcaaaacggttattcaggaaatcgcaagggttgccgtgccgggaatttcaattcctcgaccttcgagaaaaattaaatggctggctgctggagccgtcgtgggagataacttttcgctggcttggcgctgcatggacgctcaatactggggcttgccccaacgtcgccgccgtatcttccttgtcgcagattttacaagtcaacgtgccggagaaatactttttaagccggaaagcaaaactggggatattgagaagggcaaagaagcgggggaaggaattgccggaaatgttgaaaacggcattagggcagcgggtttcaacgggtggcgaagcgtaacaggaacattggagtataaagaagattgcgcgccttgtatcaacggctgttatgccgccgaatatcgtaactcaatacactgtagacattggctattcaacagaccgaatagtgattaa

SEQ ID NO: 66910 - protein, 283 aa, Unknown
  Obtained from environmental sample
  SIGNAL (1)...(18)
  DOMAIN (3)...(282): C-5 cytosine-specific DNA methylase
  misc_feature (1)..(283): Xaa is any amino acid
MKMKLGSLFDGIGGFSLAASRVGIMPVWASEIVPDCISITKRHFPVMRHLGDITKINGGDVEPVDIISFGSPCQDLSISGKRAGLDGEKSGLFLQAVRVIKEMRSATNGTYPKRIVWENVPGAFSSNKGRDFKTVIQEIARVAVPGISIPRPSRKIKWLAAGAVVGDNFSLAWRCMDAQYWGLPQRRRRIFLVADFTSQRAGEILFKPESKTGDIEKGKEAGEGIAGNVENGIRAAGFNGWRSVTGTLEYKEDCAPCINGCYAAEYRNSIHCRHWLFNRPNSD

SEQ ID NO: 66911 - DNA, 1302 bp, Unknown
  Obtained from environmental sample
  misc_feature (1)..(1302): n is a, c, g, or t
atggacgaagttttgaaggctattcagcagaaattagccaacatgaaaaaaatcgagaataccggttttactgatctggcgaaggctaccgcctactttcaggaaaaagaaatgattcttgaagaaatggcaaaaacacttgaaactgttacatctaaccagtcagtacaaattgcgagtcttgaggggactattaagagtttgcgggacgaattgaaaacgcagacaaagtaccccaaagaacttacccgccgtgaactgttgtacaacctgggcaaggggattgtcgcggcgtggacgagaaatcagaaggttttgggtgaattggcttttacgcctaacctgaaatcggacaactggactaatccgagcgacattacctggggggagaagggctggattgatacaaaggccgccattggcgatccgatgggaaacatggggacacctgaccaataccttataaatccgatttatgaaacggaaattatgagcgacgttgcgaaaaaatccgtgatgatgaaccttgtcagccatcgtccgatgaaagggccttcaataatgcttcctacgagggaaaggggcggagtaaaacttaactggttgactgctttcggggaaaaaatcgagggcagcaagcctcatggcgcggagagggttgaattaaaagcctatacccttgcgggcttcattccgtggtttgacgaatatgccgaggacgttttcattgaccttggggctatgttcgttgatgaattccttgagacctatgggcaggaatttgacaggcagtgtttgattgcggataacgatccgtttaccggggcgatgatggtcaacgatgtaacggaggtaacgatagcccaaaacacaatagacaaattgacgtggaaggatttccgcgacagcgtttacaaagtccccgccgaggagcgcaaagattgcgcgtggttcctcaatgaaacggtactcaaccacatagccaacattgaagacacgacaggccgcccgatatggcggcgtccgagtgaagcaatgcccggcaaacttgacctgtatccttatcacgaagtctcaattttgccgcagattgccgacataaaggccggagaaatatttgcgatttttatgaacccgaaacggattattcacggcaaccgtaagggtattgaactcaagcggtatgaccagacgactgaagcgatggaatacggagaattgtttctccgcttcaggaagcgggacgggttcctcgtcaccagaccgaaaaacaacatggttgtattgaagactaaagcgtaa

SEQ ID NO: 66912 - protein, 433 aa, Unknown
  Obtained from environmental sample
  DOMAIN (151)...(431): Phage capsid family
  misc_feature (1)..(433): Xaa is any amino acid
MDEVLKAIQQKLANMKKIENTGFTDLAKATAYFQEKEMILEEMAKTLETVTSNQSVQIASLEGTIKSLRDELKTQTKYPKELTRRELLYNLGKGIVAAWTRNQKVLGELAFTPNLKSDNWTNPSDITWGEKGWIDTKAAIGDPMGNMGTPDQYLINPIYETEIMSDVAKKSVMMNLVSHRPMKGPSIMLPTRERGGVKLNWLTAFGEKIEGSKPHGAERVELKAYTLAGFIPWFDEYAEDVFIDLGAMFVDEFLETYGQEFDRQCLIADNDPFTGAMMVNDVTEVTIAQNTIDKLTWKDFRDSVYKVPAEERKDCAWFLNETVLNHIANIEDTTGRPIWRRPSEAMPGKLDLYPYHEVSILPQIADIKAGEIFAIFMNPKRIIHGNRKGIELKRYDQTTEAMEYGELFLRFRKRDGFLVTRPKNNMVVLKTKA

SEQ ID NO: 66913 - DNA, 435 bp, Unknown
  Obtained from environmental sample
  misc_feature (1)..(435): n is a, c, g, or t
atggacaggttccaggcgctcagtcgcaggcggggaaagcgtcacgcggactggaacaggatagcgggaaccatctttaacggcgcgtccaacatcgctcaggcgggagggcttgccgcgctggacgaaaagggccgggcggaaatgcgcgccatgatggactactatctcggcaacgcgaaacttatcagggacgcgctgcagaaacttgggatttactgtataggcggggataactcgccttacatttgggcgcactttcccggaagggacagttgggaagttttttccgaactattggagaaatgcaatatagtaaccactcccggcgcgggttttggtccggcaggccggggctttatacgtttttccgcgttcggccaccgcgccgacgttgaagaagcgtgctggcggcttggcacgttgtttccctga

SEQ ID NO: 66914 - protein, 144 aa, Unknown
  Obtained from environmental sample
  misc_feature (1)..(144): Xaa is any amino acid
MDRFQALSRRRGKRHADWNRIAGTIFNGASNIAQAGGLAALDEKGRAEMRAMMDYYLGNAKLIRDALQKLGIYCIGGDNSPYIWAHFPGRDSWEVFSELLEKCNIVTTPGAGFGPAGRGFIRFSAFGHRADVEEACWRLGTLFP

SEQ ID NO: 66915 - DNA, 426 bp, Unknown
  Obtained from environmental sample
  misc_feature (1)..(426): n is a, c, g, or t
atggcagtcgatattcaaaatattgttaagaatcttcatcctctggaaataagaatccttcttcattataaaaagggcgatgaactcactatcgagaaagttgagcaggaactgggcttaaagccgggaaacgggaatcaggcgctttcgtggctgacaggcaagggattgattggcgagatacgccgtgaaccggcggtcttttacgaacttaccgaccttggccgcgaatggaaagagaagggcagtcccgaagagcgtataattgagtttgtcagaaaaaaatccggcgatgttaaaattgaaggcagcctcaaattaccggatattgccaaagccctcaatatagaaaacaaggatgtcggcagcgcattcggcgctctttcaaaatcggcatccttgcgatggatgacaataaaaacgtaa

SEQ ID NO: 66916 - protein, 141 aa, Unknown
  Obtained from environmental sample
  misc_feature (1)..(141): Xaa is any amino acid
MAVDIQNIVKNLHPLEIRILLHYKKGDELTIEKVEQELGLKPGNGNQALSWLTGKGLIGEIRREPAVFYELTDLGREWKEKGSPEERIIEFVRKKSGDVKIEGSLKLPDIAKALNIENKDVGSAFGALSKSASLRWMTIKT

SEQ ID NO: 66917 - DNA, 1263 bp, Unknown
  Obtained from environmental sample
  misc_feature (1)..(1263): n is a, c, g, or t
atggatgacaataaaaacgtaataattaagaaccctcatgtagaaatgcagcttgaagaattttttaacggcgagcatattgatgacccggcgattatctaccttattgtgattcggggcctgctggaaaaaggggcaaaagctcccattcccgaaacctcgcttactgccgccgagaagaccgcgatgggcggcatcgccaaaaaacgcggcgccgctgacgcgcctttccgccagatagacaaggaaaccgtcgtttttgcctttaccgccgagggcggttcaattccggcgctggaagcggccgaagcgctcaaggcggcgggcatcacaggcgacgaaaccggctctttaactcaggctatgcttgagagcggaagttggaagggtaagacattcaggtcgtacaacgtgaaaacaccgcctgtccgcctgaaccccggcagaagcaatccctacgccaagtttcttgaaaatgtaaaagacaaacttgcctccctgggctttgaagaatttgacggtcccctggtcgagaccgagttctggaattcggacgcgctttttatgcctcagttccactcggcgcgggacattcacgacgcgtacagcatagccgacccgtcttccaaagacggaatcgcgcacgctaaggcgattgacgagccgtggctttccaacgtcgccgccgcgcatgagaacggcggtaagaccggcagccgcggctggaattacggctttgaccgcgactttacgcggcggctgattcttcgctctcaaggaaccgtactttccgcgaaaagccttcccgccgcgaaagtgcccggcaaatacttcggcatagtccgctgtttccgctacgaccgcgtggacgcaccccaccttccggatttttaccagaccgagggaatcgtgctgggcgagaatgtcaaccttcgcacccttttgggaatgttggaaatgtttgcccgcgaagttgccggagcgaaagaggtaaaatacgttcccggctatttcccgtttacggaaccttcggtagaagtgcatatcaagcaccctgtgctgggctggtttgagcttggcggctccggcattttccgccccgaagtaaccgaaagcctcggcgtaaacgtgcctgtcgcggcatggggaataggaatcgacaggatggcgttaatggctttggggttgaacgacctgcgcgaattattcagccacgacattgaaaatgtacggttaagacgcgccaaaacttcaggagcgtaa

SEQ ID NO: 66918 - protein, 420 aa, Unknown
  Obtained from environmental sample
  DOMAIN (135)...(413): tRNA synthetases class II core domain (F)
  misc_feature (1)..(420): Xaa is any amino acid
MDDNKNVIIKNPHVEMQLEEFFNGEHIDDPAIIYLIVIRGLLEKGAKAPIPETSLTAAEKTAMGGIAKKRGAADAPFRQIDKETVVFAFTAEGGSIPALEAAEALKAAGITGDETGSLTQAMLESGSWKGKTFRSYNVKTPPVRLNPGRSNPYAKFLENVKDKLASLGFEEFDGPLVETEFWNSDALFMPQFHSARDIHDAYSIADPSSKDGIAHAKAIDEPWLSNVAAAHENGGKTGSRGWNYGFDRDFTRRLILRSQGTVLSAKSLPAAKVPGKYFGIVRCFRYDRVDAPHLPDFYQTEGIVLGENVNLRTLLGMLEMFAREVAGAKEVKYVPGYFPFTEPSVEVHIKHPVLGWFELGGSGIFRPEVTESLGVNVPVAAWGIGIDRMALMALGLNDLRELFSHDIENVRLRRAKTSGA

SEQ ID NO: 66919 - DNA, 1392 bp, Unknown
  Obtained from environmental sample
  misc_feature (1)..(1392): n is a, c, g, or t
atgaatattttaccggcggatcgttatggttatgattttattaccgccgaatatataccgaaagatttatcgggcaaaaacacatttggtgttacagcgttaagctataacgaatactggcagcgcaatgcccagcaagcggaactgttttccaaaaagcctgattcctggcgcaatcttaaacttgaagaacttgaaacacttaaacaatacagaaactactgttcaaactggaacaattttttagtaaccgatccttttgatcctaagttaatacgcgactcgtctttttacggccttgtgcgtatcggagctctcagaaacgttctcttaaaacacaacgatttttgcgtccctgcgggaatccgaaacagcgtaataatttcgtgcgacataggcgacgatacagccattcagcactgcgcgtatatttctcattatatcatcggggacaactgcatactttccaaaattgatgaaatgcagactaccaatcacgcgaaattcggaaacggcgttattaaggacggcgaagttgaagaagtgcgggtgtggatcgatgtaatgaatgaagccggcggcagatccattctccctttcgatacaatgattactgcggacgcttatctgtgggctgtttaccgcgatgataccgccatgaccaacagattggcggagattactcaaaaacaatacggaagtttgcgcggcagttacggtacaattggttccggttcgacaattaaaagttgttcgattatcaaggatacggcaatcggaagctgcgcctacataaagggggcgaataaacttaaaaatttaacgatacattcttccgaagaagagcctacgcagataggggaaggcgttgaaatggtaaacggcattgtcggatacgcatgtaatgttttttacggcgcaaaggcggtgcgttttgttattggcaggaacagcagtcttaaatacggggcgcggcttattcattccgtgcttggagacaattcaaccgtatcgtgctgtgagatgcttaacaacctgatctttccggtgcatgaacagcaccacaacaattcatttttaatcgcaagccttattcagggaatgtcaaatctggcggcggcggctacgataggcagtaaccataacagccgcgccaacgacggagaaattcgggcaaagcgcggtttttggccggggcttgcggtaagtcttaaacactcgtgcgtcttcgcttctttcgtgattatcgcaaagggcgagtatccttcggaacttaatatcccgtttcctttcgcccttgtaaacaacaatgttcacaagaaccgtcttgaggtaatgcccgcctatttttggcttcataatatgtacgcgctgaacgcaattcatggatga

SEQ ID NO: 66920 - protein, 463 aa, Unknown
  Obtained from environmental sample
  misc_feature (1)..(463): Xaa is any amino acid
MNILPADRYGYDFITAEYIPKDLSGKNTFGVTALSYNEYWQRNAQQAELFSKKPDSWRNLKLEELETLKQYRNYCSNWNNFLVTDPFDPKLIRDSSFYGLVRIGALRNVLLKHNDFCVPAGIRNSVIISCDIGDDTAIQHCAYISHYIIGDNCILSKIDEMQTTNHAKFGNGVIKDGEVEEVRVWIDVMNEAGGRSILPFDTMITADAYLWAVYRDDTAMTNRLAEITQKQYGSLRGSYGTIGSGSTIKSCSIIKDTAIGSCAYIKGANKLKNLTIHSSEEEPTQIGEGVEMVNGIVGYACNVFYGAKAVRFVIGRNSSLKYGARLIHSVLGDNSTVSCCEMLNNLIFPVHEQHHNNSFLIASLIQGMSNLAAAATIGSNHNSRANDGEIRAKRGFWPGLAVSLKHSCVFASFVIIAKGEYPSELNIPFPFALVNNNVHKNRLEVMPAYFWLHNMYALNAIHG

SEQ ID NO: 66921 - DNA, 675 bp, Unknown
  Obtained from environmental sample
  misc_feature (1)..(675): n is a, c, g, or t
atgacaggcgtggacggtatccatgtccgcatgatcctttgccgccaccttgaacacagcaagcgcggacagataatcataaagccgcttgaggcaatcgccggataccgccagatgctccgctactacgcggtaaaaaccctcgttgaattttttgacgcccacccggaacttgattatcagggctttttggaattactgggtccgccttctcccaaagagcgcgtcagcgagtggacaaacatcggcggacagatagttccctctttccgcgttgacgaattgcgcaagagcatacgccagaacgagataaggagctgggatgaaattcaccgcgtatacgtccactgggacgaagcgtatcccttcgacaaatgcagccatgcgtggtccacactggcgtttcttcgcaactcggaagaagccgtttccgcccccgctttcaaaacggagatagcccttgttcagggaatccgccactggatagacaaacaaatctacgacagcagagcgaaagattttcacagctcgtttaagagagcgacctaccgcaatgccgcggaaatggaacaggtattaggcaacccaagcgataatccgttcctgcacattgtacagaaagaaagcgatgaattttttgaaatgacggaaagagttacagctagattgaaatag

SEQ ID NO: 66922 - protein, 224 aa, Unknown
  Obtained from environmental sample
  misc_feature (1)..(224): Xaa is any amino acid
MTGVDGIHVRMILCRHLEHSKRGQIIIKPLEAIAGYRQMLRYYAVKTLVEFFDAHPELDYQGFLELLGPPSPKERVSEWTNIGGQIVPSFRVDELRKSIRQNEIRSWDEIHRVYVHWDEAYPFDKCSHAWSTLAFLRNSEEAVSAPAFKTEIALVQGIRHWIDKQIYDSRAKDFHSSFKRATYRNAAEMEQVLGNPSDNPFLHIVQKESDEFFEMTERVTARLK

SEQ ID NO: 66923 - DNA, 1422 bp, Unknown
  Obtained from environmental sample
  misc_feature (1)..(1422): n is a, c, g, or t
gtggacatgaaaaagcaaggttttaatccgtatcttccttcatgggaatatattccggacggagaaccatatgtttttaacggaagagtatatatatacggttctcatgataaattcaacggtcatgtttattgccctaacgattatgtttgctggtctgcgcctgaggacgatttaagcgactggcgttatgagggagtgatataccctaagaccaacgacccctttaatacagacggaaggatgtgcctttacgctcctgatgtaacgcagggacaggatggccgttattatttgttttatgtgcttgataaagtaaacgttgtgtccgtggcggtttgtgaaacgcctgccggagaatttaaattccacggatatgtgcattatcccgacggaacaaaacttggcgagcggaaaggagatcagcctcagtttgatcctggcgttttaacggaaagcgataaaacatatctctttacaggtttttgcggacgcgacgataagaccagaataggcgctacggcggtaacgcttggacccgatatgctgaccgtccttgatgagtctgttcttgtagcccccggagtacataacagcaagggcacaagttttgaaggatttgaattttttgaggctccgtccataagaaaacacggcgacacatattattttatttattcgtcaatagcgtctaacgagctttgttacgcgacaagcaaaaatccggtaaaggattatgtttacggcggcgttatcatcagtaatgcggatgtgcatatcggaacttataaaccagccgataaacccatgggctgcggcggcaataatcacggaagcatcatcgaaataaaaggtaaatggtatattttttatcacaggcataccaacggaaacgagttcagccgccaggggtgtcttgaaccgatagaaataaaagcggacggttctattccgcaggtggaaatgacttcgtgcggaccaaacggtaaaccgcttatcggcaaaggagaatatcaggcatatattgcgtgtaacatattctccgttgataataatcggcagttagaaagacaatggccgcttcacaaccagtctctgccgaaaatttcacaggacggacgggacggcgatgaagaaacgggttatgtaacaaatatttccgataatcacggtattggttttaagtattttgattgcaaaggaattaaaagaataaagataaaaacgcgcggttacaacaacggggcttttcatgttaaaacaaaatgggacggcgagtctttagcgtgcataaaaattgaatacagcaatgtttgggtagaatactcttcggatataaaccttcctgacggagtacacgcgctttattttatttataaaggtaacgggttcgcttctattgcttcttttactttggaataa

SEQ ID NO: 66924 - protein, 473 aa, Unknown
  Obtained from environmental sample
  DOMAIN (20)...(317): Glycosyl hydrolases family 43
  misc_feature (1)..(473): Xaa is any amino acid
MDMKKQGFNPYLPSWEYIPDGEPYVFNGRVYIYGSHDKFNGHVYCPNDYVCWSAPEDDLSDWRYEGVIYPKTNDPFNTDGRMCLYAPDVTQGQDGRYYLFYVLDKVNVVSVAVCETPAGEFKFHGYVHYPDGTKLGERKGDQPQFDPGVLTESDKTYLFTGFCGRDDKTRIGATAVTLGPDMLTVLDESVLVAPGVHNSKGTSFEGFEFFEAPSIRKHGDTYYFIYSSIASNELCYATSKNPVKDYVYGGVIISNADVHIGTYKPADKPMGCGGNNHGSIIEIKGKWYIFYHRHTNGNEFSRQGCLEPIEIKADGSIPQVEMTSCGPNGKPLIGKGEYQAYIACNIFSVDNNRQLERQWPLHNQSLPKISQDGRDGDEETGYVTNISDNHGIGFKYFDCKGIKRIKIKTRGYNNGAFHVKTKWDGESLACIKIEYSNVWVEYSSDINLPDGVHALYFIYKGNGFASIASFTLE

SEQ ID NO: 66925 - DNA, 1629 bp, Unknown
  Obtained from environmental sample
  misc_feature (1)..(1629): n is a, c, g, or t
ttgagaaagcgctggtggatgccggcggctgggtcgagtacgcggcacaacattactagcaaaatattactaatacaggggacaacaatggctgacaaagaaaaaaggctgataaaagtttttgacaccacgctgagggacggcgagcaggcgcccggatgcagtatgaatctgacggagaagatagaggtcgcaaggcggctggaaagactcggagtagatataatcgaagcgggctttcccatatcaagccctggcgatcttgagtctgtaaaggctattgccggaataattaccaactgctctgtggccggcctttgccgcagcaaagaagccgacatggacgcggcgagagatgcgctggcaaaagcggcaagcccgcgtgttcacgtttttcttgcgacttctccggttcacatggagtacaaactaaagatgacgccggaacaggtgctggaacaggccgtctcctccgtaaagtacgcgaaaaaattctgcaacgacgttgagttctccgcagaagacgctttccgcagcgatcccgattttgtctgcaaggttttcggcgcggtaattgaagccggggccttaactgtaaatttccccgacacggtcggttatgcgatgcccgccgaattcggcgggcgcgtccgctatataaaagaacatactccgcacatggaaaaagcggctctatcggtgcactgccacaacgatctgggattggcggttgcgaacagtatcgccgccatcgcaaacggagcggatcaggttgagtgtacggttaacggaataggcgaacgtgcgggaaacgcctctttggaagaagtggtaatgggcttgcgtgttcggcacgatttcttttccgccgacacaagaatagacagtacgcaaatatattcggcaagccgccttgtgtcgcaggtgacaggcgtgaaggtacagccgaacaaagcgatagttggcgacaacgcctttgcgcatgaagcgggaatacatcagcacggagtattggcgaaaagagaaacctacgaaattatgactccgcaatcaatcggtattccgcagaaccgcatggttctgggcaaacattcaggccgccacgcttttgaagaccgtctaaaagatttaggcttgagcgttgacgcatcggcgttagaaaaaatattcgcagactttaaagaccttgccgacaaaaagaaagttgtcagcgatcgagacattgaagctcttgtaatggacagggcggtctctgttcccgaaacatggagactggatcattgggcggtgaacacaggctcggctttgggagcggcgggcgtaattcgcttacagcacaaagacggcgagtataaaaaattggtctgcatgggcgacggtcccatcgactcaatctttaaggcgataaatcaaattgtcggcaaagagcccgaacttgagctttatgaaatcggcgctattacgggcggctcttcttcgcaaggcgagtcaatggtaaaaatagtgatggatggacggcgttggaatgggcggggcgtctccaccgatgtaattgaatcttcgataatggcttatctttcggcgattaacgctatggagtgggatttaacgcagagtaggggaaattag

SEQ ID NO: 66926 - protein, 542 aa, Unknown
  Obtained from environmental sample
  DOMAIN (402)...(533): LeuA allosteric (dimerisation) domain
  misc_feature (1)..(542): Xaa is any amino acid
MRKRWWMPAAGSSTRHNITSKILLIQGTTMADKEKRLIKVFDTTLRDGEQAPGCSMNLTEKIEVARRLERLGVDIIEAGFPISSPGDLESVKAIAGIITNCSVAGLCRSKEADMDAARDALAKAASPRVHVFLATSPVHMEYKLKMTPEQVLEQAVSSVKYAKKFCNDVEFSAEDAFRSDPDFVCKVFGAVIEAGALTVNFPDTVGYAMPAEFGGRVRYIKEHTPHMEKAALSVHCHNDLGLAVANSIAAIANGADQVECTVNGIGERAGNASLEEVVMGLRVRHDFFSADTRIDSTQIYSASRLVSQVTGVKVQPNKAIVGDNAFAHEAGIHQHGVLAKRETYEIMTPQSIGIPQNRMVLGKHSGRHAFEDRLKDLGLSVDASALEKIFADFKDLADKKKVVSDRDIEALVMDRAVSVPETWRLDHWAVNTGSALGAAGVIRLQHKDGEYKKLVCMGDGPIDSIFKAINQIVGKEPELELYEIGAITGGSSSQGESMVKIVMDGRRWNGRGVSTDVIESSIMAYLSAINAMEWDLTQSRGN

SEQ ID NO: 66927 - DNA, 315 bp, Unknown
  Obtained from environmental sample
  misc_feature (1)..(315): n is a, c, g, or t
atgaaaaccttcaatggagaagttttatttcttgatcgcgatgatattaacaccgatgaaattatcccggcaaagtatctgaccgaggacacaaaagaagcgttaaagccgcatttactggaagacctgaaattaaaaggctttgacccattaagagatattaacggaaagggagcggtgctgacacgggcaaatttcggctgcggttcctcgcgcgaacacgctccgtgggcgtttgaagtgaacgggattaacattgtcatcgcggaagttttgcccgtatcttcagacagaatatgtacaactgcggcatga

SEQ ID NO: 66928 - protein, 104 aa, Unknown
  Obtained from environmental sample
  DOMAIN (1)...(99): Aconitase C-terminal domain
  misc_feature (1)..(104): Xaa is any amino acid
MKTFNGEVLFLDRDDINTDEIIPAKYLTEDTKEALKPHLLEDLKLKGFDPLRDINGKGAVLTRANFGCGSSREHAPWAFEVNGINIVIAEVLPVSSDRICTTAA

SEQ ID NO: 66929 - DNA, 630 bp, Unknown
  Obtained from environmental sample
  misc_feature (1)..(630): n is a, c, g, or t
atggccgaggggccaacgcttgcattgcaacggcgaaaaaactattcaaccaaagaagaagcccttgcggatttttctaaatgggcaagcgatgacgacgctgagtactcaacctgcttcgacatagagtgctcaaaacttgagccgcttgcgacagttggttacaaaccggatgaggtaaaaccgatacgggagcttgcgggaacaaaaatcgatcaggtgtacatcggttcatgcaccaacggcagaatcgaagacctgcgcgccgccgcggacgtgctgcgcggaaaaaaaatcgccgctaaggtacgcgcgattatcgcgcccgccaccacggacatttacgcgcaggcgctcaaagaggggctgatacaaaccttccttgacgcggactgctgcgtaacaaacgccacctgcggcgcgtgccttggaatgtccaacggcgtacttgccgaaggggaggtttgcgcttccacaacgaaccgcaatttttacggacgcatgggaaagggcggcatggttcacctcatgagccccgcgtcggcagccgccgcggcagtagcgggcgcgattgtaacaccgactgatataggtaattctgaaaatataacttttggggggaggcagtaa

SEQ ID NO: 66930 - protein, 209 aa, Unknown
  Obtained from environmental sample
  DOMAIN (1)...(189): Aconitase family (aconitate hydratase)
  misc_feature (1)..(209): Xaa is any amino acid
MAEGPTLALQRRKNYSTKEEALADFSKWASDDDAEYSTCFDIECSKLEPLATVGYKPDEVKPIRELAGTKIDQVYIGSCTNGRIEDLRAAADVLRGKKIAAKVRAIIAPATTDIYAQALKEGLIQTFLDADCCVTNATCGACLGMSNGVLAEGEVCASTTNRNFYGRMGKGGMVHLMSPASAAAAAVAGAIVTPTDIGNSENITFGGRQ

SEQ ID NO: 66931 - DNA, 975 bp, Unknown
  Obtained from environmental sample
  misc_feature (1)..(975): n is a, c, g, or t
gtggtactgccggtcgggggagaggtgggaggtgtgacgatgggcggtgaattgatagagactatcgagcgggagttttactcgtttgacgcgctgcagctggtcgcggttatcgaggaattgctggacgacagggggcggatattcttcgaggttgacgccgacttggcgtttccgccgagcgacgtgggttatgtcgggattgatgataatgactccggcgcgaccgtccgtctgcctgtgatgaacctgttaggctccgcctctccgctgcctataaatttctccgaccacataacccgctcccgccccgacgccaatatgtacgccgactttctctccatcatgcaaaaccgcctgcacgcgttgtggctcgacgcgcacagaaagcactctccgtggggcgggggcgacgcggccgctaaaaaaattttcgagtctatgaccgggctgtcgattgacaaggcggtattcttcgaattcgcgccggcgggactttggcagttgtcgaacaggactaggagcgcgcagggtttaaaggagttgttgttcgcggcgtttggggatatccccataagcatagaggagaacgcgggccgcctcgcgacggtgtcaaacgcccgacctctcggcggcgcggcgcggttgggcaagaacgcggcggtaggcacgagggtctacgacagaacgtctaacttcaggataacagtaggcccgcttgactgccgaacgtataagacgtttatgccgggcgcggacaactacctattgattcgcgggatagtgtccgtatacctgaacgagccggtaatttgcgaattaaaattcacgtgcgggctttgcgacctgccgcgtgcgcggttgggcggggggcaatcgaggggagatagcgagatcggcaggacggcggtgctgggaacaaataaaaacggcgtagctgcttttacggtcaaaataagcggctacgccaattaa

SEQ ID NO: 66932 - protein, 324 aa, Unknown
  Obtained from environmental sample
  DOMAIN (23)...(307): Protein of unknown function (DUF1305)
  misc_feature (1)..(324): Xaa is any amino acid
MVLPVGGEVGGVTMGGELIETIEREFYSFDALQLVAVIEELLDDRGRIFFEVDADLAFPPSDVGYVGIDDNDSGATVRLPVMNLLGSASPLPINFSDHITRSRPDANMYADFLSIMQNRLHALWLDAHRKHSPWGGGDAAAKKIFESMTGLSIDKAVFFEFAPAGLWQLSNRTRSAQGLKELLFAAFGDIPISIEENAGRLATVSNARPLGGAARLGKNAAVGTRVYDRTSNFRITVGPLDCRTYKTFMPGADNYLLIRGIVSVYLNEPVICELKFTCGLCDLPRARLGGGQSRGDSEIGRTAVLGTNKNGVAAFTVKISGYAN

SEQ ID NO: 66933 - DNA, 1758 bp, Unknown
  Obtained from environmental sample
  misc_feature (1)..(1758): n is a, c, g, or t
atgcgcgacgtctactatgaagaagaactacgctacctaaaggaagagggggcgcggttcgcccggaagtacccgcaacgcgcgggatacctgaacctcgaatccgccaaggacagggatcccaaggtcgaggcgctctttgagggtttcgctttcttgtgcgccggcatccgcgagcgcatcgacgacgccctcccaagcctcgccgccggtctcaccgacctcgtctggccgcaactcctccaccccatccccgccctctgcatagcggagttcaaaccgcgcccggggacgctccaaggcgcgtacaccctgccccgggggacgcccctcttcaccgaccccgaccccgccaccggtgtgaactgccggttcgccaccacgcgggaggtgcgcgtgaaccccataagcatagccggcgcgcatgccgcggcaagcgccgacggcaaggacgtgctgaccatcaacttcaaactcgacaaggggatacgcccggaggcgctcgatctctcgccggtgaggatctttatcaacgacgagctgcccgccgcgctgcatataaggaagatgctgctccggcacgccgaggaggttatcttgtcggacgacgccggacgctccaagacgctaccgccgcgggacgtcttcgcggaggggggcttcggggaggaggacgggctctttcccgagccgcagcgcgccggccgggcgctcggcctcatacgcgactacttcgcctttccggaaaggttcatgttcatagacctttacggtttggacgccctcgtccgaggcggcggaagcgcggcctccgctctatcgctacaaatacgctttgaccggaagttctcggcaaaggcgccgctctcccgggagaccttcaaactgcactgcgccccggccgtaaacgtattccggcgcgacgcggagcctatattcgtggacggcaggaggcgcgagtacgacctcgtctccgacgccggacgccccgagtgcttcgccatacacagcgtgacgtcggtcgcggggatagacagcgccacaggcctccggcgcaactacgaacgataccgcaagaccggcggcggcggacagcgtttctactcgctgcgtgcggaggagctctccggcgacgggctgctatacaacaacgacaggcggctgaaactctcgatgaacggccgccaaacggagggcgggcggctaatacgggagacgctccgcatagagacctggcagacaaacggcgctctcgcccgaaaggcgctcacggagggcgccgcgctgcgcaaggccgcgccggacttccccgactacataacattcacaaatataacgaaaccgaacccgcccataaacccgcccggcggcgacgaatacctttgggcgttcctctcgcacttggcgagcgcctacacgaatttcggggacgcggagagcctgaaagagctgctgcgcgcctacgactggggcggacgcgccgatttgcgtccggaaatagaggccatacgctcggtgtctgtaacgccgagcgacctgtcggtcgacaaagcggtgataaggggcgcggagatgaacatcgtcgtagacgaacgggcggccccggaggatagcctgtttttactgggaacggtgctggcaaggagcctctcgtgcatggcctctatcaatacgtttcttaaactgatacttactatgcccgtgtccggcaagagctacgagtggtactgccggtcgggggagaggtgggaggtgtga

SEQ ID NO: 66934 - protein, 585 aa, Unknown
  Obtained from environmental sample
  DOMAIN (1)...(585): Bacterial protein of unknown function (DUF879)
  misc_feature (1)..(585): Xaa is any amino acid
MRDVYYEEELRYLKEEGARFARKYPQRAGYLNLESAKDRDPKVEALFEGFAFLCAGIRERIDDALPSLAAGLTDLVWPQLLHPIPALCIAEFKPRPGTLQGAYTLPRGTPLFTDPDPATGVNCRFATTREVRVNPISIAGAHAAASADGKDVLTINFKLDKGIRPEALDLSPVRIFINDELPAALHIRKMLLRHAEEVILSDDAGRSKTLPPRDVFAEGGFGEEDGLFPEPQRAGRALGLIRDYFAFPERFMFIDLYGLDALVRGGGSAASALSLQIRFDRKFSAKAPLSRETFKLHCAPAVNVFRRDAEPIFVDGRRREYDLVSDAGRPECFAIHSVTSVAGIDSATGLRRNYERYRKTGGGGQRFYSLRAEELSGDGLLYNNDRRLKLSMNGRQTEGGRLIRETLRIETWQTNGALARKALTEGAALRKAAPDFPDYITFTNITKPNPPINPPGGDEYLWAFLSHLASAYTNFGDAESLKELLRAYDWGGRADLRPEIEAIRSVSVTPSDLSVDKAVIRGAEMNIVVDERAAPEDSLFLLGTVLARSLSCMASINTFLKLILTMPVSGKSYEWYCRSGERWEV

SEQ ID NO: 66935 - DNA, 621 bp, Unknown
  Obtained from environmental sample
  misc_feature (1)..(621): n is a, c, g, or t
gtgcttcgccatacacagcgtgacgtcggtcgcggggatagacagcgccacaggcctccggcgcaactacgaacgataccgcaagaccggcggcggcggacagcgtttctactcgctgcgtgcggaggagctctccggcgacgggctgctatacaacaacgacaggcggctgaaactctcgatgaacggccgccaaacggagggcgggcggctaatacgggagacgctccgcatagagacctggcagacaaacggcgctctcgcccgaaaggcgctcacggagggcgccgcgctgcgcaaggccgcgccggacttccccgactacataacattcacaaatataacgaaaccgaacccgcccataaacccgcccggcggcgacgaatacctttgggcgttcctctcgcacttggcgagcgcctacacgaatttcggggacgcggagagcctgaaagagctgctgcgcgcctacgactggggcggacgcgccgatttgcgtccggaaatagaggccatacgctcggtgtctgtaacgccgagcgacctgtcggtcgacaaagcggtgataaggggcgcggagatgaacatcgtcgtagacgaacgggcggccccggaggatag

SEQ ID NO: 66936 - protein, 206 aa, Unknown
  Obtained from environmental sample
  misc_feature (1)..(206): Xaa is any amino acid
MLRHTQRDVGRGDRQRHRPPAQLRTIPQDRRRRTAFLLAACGGALRRRAAIQQRQAAETLDERPPNGGRAANTGDAPHRDLADKRRSRPKGAHGGRRAAQGRAGLPRLHNIHKYNETEPAHKPARRRRIPLGVPLALGERLHEFRGRGEPERAAARLRLGRTRRFASGNRGHTLGVCNAERPVGRQSGDKGRGDEHRRRRTGGPGG

SEQ ID NO: 66937 - DNA, 681 bp, Unknown
  Obtained from environmental sample
  misc_feature (1)..(681): n is a, c, g, or t
gtgcgccggcatccgcgagcgcatcgacgacgccctcccaagcctcgccgccggtctcaccgacctcgtctggccgcaactcctccaccccatccccgccctctgcatagcggagttcaaaccgcgcccggggacgctccaaggcgcgtacaccctgccccgggggacgcccctcttcaccgaccccgaccccgccaccggtgtgaactgccggttcgccaccacgcgggaggtgcgcgtgaaccccataagcatagccggcgcgcatgccgcggcaagcgccgacggcaaggacgtgctgaccatcaacttcaaactcgacaaggggatacgcccggaggcgctcgatctctcgccggtgaggatctttatcaacgacgagctgcccgccgcgctgcatataaggaagatgctgctccggcacgccgaggaggttatcttgtcggacgacgccggacgctccaagacgctaccgccgcgggacgtcttcgcggaggggggcttcggggaggaggacgggctctttcccgagccgcagcgcgccggccgggcgctcggcctcatacgcgactacttcgcctttccggaaaggttcatgttcatagacctttacggtttggacgccctcgtccgaggcggcggaagcgcggcctccgctctatcgctacaaatacgctttga

SEQ ID NO: 66938 - protein, 226 aa, Unknown
  Obtained from environmental sample
  misc_feature (1)..(226): Xaa is any amino acid
MRRHPRAHRRRPPKPRRRSHRPRLAATPPPHPRPLHSGVQTAPGDAPRRVHPAPGDAPLHRPRPRHRCELPVRHHAGGAREPHKHSRRACRGKRRRQGRADHQLQTRQGDTPGGARSLAGEDLYQRRAARRAAYKEDAAPARRGGYLVGRRRTLQDATAAGRLRGGGLRGGGRALSRAAARRPGARPHTRLLRLSGKVHVHRPLRFGRPRPRRRKRGLRSIATNTL

SEQ ID NO: 66939 - DNA, 630 bp, Unknown
  Obtained from environmental sample
  misc_feature (1)..(630): n is a, c, g, or t
atgagttcagccactggaaatgttaacggttcgggagccactcaggcctattatcagaatctgaacgccaagaggccggcgggcggtaaaggtgcgtcgggtgctgccgcggctattgccgaccagtatacggcgggggcgcaggcgggcggcaaggcggatggtgtcgtctactcgaaagaggcggcattgcagaaggcgcagagcttggccgacgcgcactatgcctcaatgcgcggcatggtcgagagcctcataggcgggacctccggcccgcaaggtcaggctttctgggcgactgccgccaataagcccggcggcgtcgacctcaacgacttccaggtcagcgacgcgacacgcgccaaagcccaagagctcaccgctgaggacggctacttcggcgtaaagaagacgaccgaccgcataatggagttcgccaaggctctggccggttccggcgcttcggatgctaccatcaataacctccgcaagggcgtccaggccggtttcgacgcggtcgccaaaatgtacggcggcttcgacaagctcccgcagctctcaaaggacacctacgattcggttatgaaagagttcgatacttggacatccgggacgaagttggagagctaa

SEQ ID NO: 66940 - protein, 209 aa, Unknown
  Obtained from environmental sample
  misc_feature (1)..(209): Xaa is any amino acid
MSSATGNVNGSGATQAYYQNLNAKRPAGGKGASGAAAAIADQYTAGAQAGGKADGVVYSKEAALQKAQSLADAHYASMRGMVESLIGGTSGPQGQAFWATAANKPGGVDLNDFQVSDATRAKAQELTAEDGYFGVKKTTDRIMEFAKALAGSGASDATINNLRKGVQAGFDAVAKMYGGFDKLPQLSKDTYDSVMKEFDTWTSGTKLES

SEQ ID NO: 66941 - DNA, 561 bp, Unknown
  Obtained from environmental sample
  misc_feature (1)..(561): n is a, c, g, or t
gtggatcccttagacggcacccgccccttcatccgcggcatcccgacgcacagcgtccttatagccctggaggaagacggaatccccacggtaggcgtaatccacctgccggcaatgggactcacctgctacgccgcaagcggcgccggcgccttcatagacggcgagcgaattcacgtctcgtcaacaagcgacatttccgaagcgatgggcagcgtcttaggaataacggagtacgccggcgccccgttaggggacgacctcatagccctgacgcgggcgtgggactacacctacggcttcatggacgcctactcctacgtactgctggccggcgggcgcctcgacgcctgcgtaaacctgctggacaaaccttgggactgcgccgcggcggcctgcatagtaaccgaagccggcggacggttttcatccgtctccggagaaaaaacggttcacgggggatcgatagtgttgaccaatggaattttacatgaggcggcgcttgggttctttaaaacgctcgttccgcgcggggctcgggggtctatcgcgcaaagttaa

SEQ ID NO: 66942 - protein, 186 aa, Unknown
  Obtained from environmental sample
  DOMAIN (2)...(176): Inositol monophosphatase family
  misc_feature (1)..(186): Xaa is any amino acid
MDPLDGTRPFIRGIPTHSVLIALEEDGIPTVGVIHLPAMGLTCYAASGAGAFIDGERIHVSSTSDISEAMGSVLGITEYAGAPLGDDLIALTRAWDYTYGFMDAYSYVLLAGGRLDACVNLLDKPWDCAAAACIVTEAGGRFSSVSGEKTVHGGSIVLTNGILHEAALGFFKTLVPRGARGSIAQS

SEQ ID NO: 66943 - DNA, 1011 bp, Unknown
  Obtained from environmental sample
  misc_feature (1)..(1011): n is a, c, g, or t
gtgggacatgagcgggctcgtccgtacggacgacggctcttggaacaaaggcgacagcgcgctgccggctccgcaaaagggtgcggaggccaaaacgcggccatgagcgaacccgtgatcatctcggtcggcggcggtaaaggcggggttgggaagagtacgattagctccaacctcggcgccgcgctctcgcgccaaggctattccgtgggctacatcgacgccgacctcggcggcgccaacctgcacacgtgcctcggtatgcgccgccccgcggtcacgctccagcacttcctcaccggcgaacgccccacgctcgaaagcgtggccgtcaaaaccccggttccccaaagctggctcatctccggcgccggcgagtttttggaactggccaacccgaacttcgctcagaaacaaaagatacttagcggcataaaaacgctgaccgccgactacatactggtagacctcggcgccggcagcagcacgatagtcaccgacttcttcgccgccttcccgaacaacataacggtaacggacagcctgcccacctcgcttgaaaacgcctacgccttcctcaagagcggcatcttccgcgggctgatacgagccttccccggaagggaggatatccagaagctgttaacggcctacacaaacgcaagaggcgccgccgccgctcccactttggacagcatgttcgcgcagattgagcccaagtgcccgaaagaggtggaagcgatgagagagtggttggacagccgccgcctctttcttgtgctaaacatggtaagaggccaagacgaggtgagggtgggcgagggtttcaccggaatagtgcagaagtacctatccgtatcgctgacctacatcgggtacatgctgtacacaccggagatcagggcgtctctgagaaaactgggcccggcggtaatgcagcacgacacgcaggtggccgagtgcttcgacgctatagctagaaatctttcggcggtgcttaaacaaagataa

SEQ ID NO: 66944 - protein, 336 aa, Unknown
  Obtained from environmental sample
  DOMAIN (41)...(236): CobQ/CobB/MinD/ParA nucleotide binding domain
  misc_feature (1)..(336): Xaa is any amino acid
MGHERARPYGRRLLEQRRQRAAGSAKGCGGQNAAMSEPVIISVGGGKGGVGKSTISSNLGAALSRQGYSVGYIDADLGGANLHTCLGMRRPAVTLQHFLTGERPTLESVAVKTPVPQSWLISGAGEFLELANPNFAQKQKILSGIKTLTADYILVDLGAGSSTIVTDFFAAFPNNITVTDSLPTSLENAYAFLKSGIFRGLIRAFPGREDIQKLLTAYTNARGAAAAPTLDSMFAQIEPKCPKEVEAMREWLDSRRLFLVLNMVRGQDEVRVGEGFTGIVQKYLSVSLTYIGYMLYTPEIRASLRKLGPAVMQHDTQVAECFDAIARNLSAVLKQR

SEQ ID NO: 66945 - DNA, 978 bp, Unknown
  Obtained from environmental sample
  misc_feature (1)..(978): n is a, c, g, or t
ttgggaatcggcggtttaagcgctatcgataccagtacaattaccgataaaaaagtcatcgaagaaatgagaaaggatgacgatcagggcattcctcagcgccgtgagatggttaacctgcaggaacgcgaagcccagaaagcggaacagcaggcgcagactaaacgcgaagaaataaaacaggaagaaaaacaaatagcgcaggacaaaaaacaattagaggatgatcaacagcaggggaaagtcactcaggaagaagtaaaaaaggctgaagaagatttgaataaaagagaagtcgcggttgaacagaaaaaagaagaggtcaaaaaacttgaagatttttccgaaaagaaatcagaagaagctcagcagcaaagacaggaaatcgcgaaagatcagcagaccgccattgctcaggatacaagcggagtttacggcgtaacaatagaaaaaacaaccccgacaacaatgggtcgtattgtccgccttaatgcagctgacggaaaggaaataaaaagatctcctcttgattcagttcattcaagaacggtcgcggttatcggcggacgagtccttgccattgccggtgaaaacaaaggtcagggcgcggtacgccttatcgagataaatcccaccagtcttgaaatggcaagacagggcagtgacgatattaaattgggaagcctgttatgggtaaacggaaatgatctttacgcgatagtatttgatcaagcaaaaaaacagcatttcatcggacgctttaacacaaaccttgaattacaggcaaaatcaaccgcgaaggtacatcctgattgcactgtaatagtacagcagggacgcctcttaactcagcgcgaaagcggctcggtattgttgttaaacgcggcggatttatccgaaattggcgctgttagcagcgctcttaaatctgctgttgacgctgctgctaaagatattgaagctgccggtggtaaatag

SEQ ID NO: 66946 - protein, 325 aa, Unknown
  Obtained from environmental sample
  misc_feature (1)..(325): Xaa is any amino acid
MGIGGLSAIDTSTITDKKVIEEMRKDDDQGIPQRREMVNLQEREAQKAEQQAQTKREEIKQEEKQIAQDKKQLEDDQQQGKVTQEEVKKAEEDLNKREVAVEQKKEEVKKLEDFSEKKSEEAQQQRQEIAKDQQTAIAQDTSGVYGVTIEKTTPTTMGRIVRLNAADGKEIKRSPLDSVHSRTVAVIGGRVLAIAGENKGQGAVRLIEINPTSLEMARQGSDDIKLGSLLWVNGNDLYAIVFDQAKKQHFIGRFNTNLELQAKSTAKVHPDCTVIVQQGRLLTQRESGSVLLLNAADLSEIGAVSSALKSAVDAAAKDIEAAGGK

SEQ ID NO: 66947 - DNA, 591 bp, Unknown
  Obtained from environmental sample
  misc_feature (1)..(591): n is a, c, g, or t
atgtcggactggttatactcggatacggttaaagaacatttacaaatcctcgtaacgtgctttggaagacgaggctgcttttgcgccggacgcgaaagggcagacgggaaatataaaatgcggcgatcaaatgttaatgctttaaaaattaaagacgacgttattacggacgtgcgctggaaaacttacggctgcgcgagcgccatcgcttctacaagtatgctctcggaaacaattaagggaatgaaactggaagacgcttataaaatccgccccgaagaccttgtagccaaactaggcgggcttccgagttttaagatacactgctccgtgttaggcgataaagctcttcgcgccgcaatagacgattatcttacaaagaccggacgccccggtctttttgtggaggaaagtgttgttatctgtcattgcataggaattacggataaggatatagaagaagcttttcataacggagcgagaaactgggaacagcttcagcaggcgacaaaaataggaacagtctgcggaagctgtaaagaaaaagccgtggatcttctccacggctttgaacatatttacgggaattaa

SEQ ID NO: 66948 - protein, 196 aa, Unknown
  Obtained from environmental sample
  DOMAIN (139)...(191): BFD-like [2Fe-2S] binding domain
  misc_feature (1)..(196): Xaa is any amino acid
MSDWLYSDTVKEHLQILVTCFGRRGCFCAGRERADGKYKMRRSNVNALKIKDDVITDVRWKTYGCASAIASTSMLSETIKGMKLEDAYKIRPEDLVAKLGGLPSFKIHCSVLGDKALRAAIDDYLTKTGRPGLFVEESVVICHCIGITDKDIEEAFHNGARNWEQLQQATKIGTVCGSCKEKAVDLLHGFEHIYGN

SEQ ID NO: 66949 - DNA, 1170 bp, Unknown
  Obtained from environmental sample
  misc_feature (1)..(1170): n is a, c, g, or t
atgagaaaggtgtacattgattacaacgcgactactccgttaagaaatgaggtaaagtccgcgattacggaagatttggaaatattcggtaacgcttccagtatgcacgcgtcgggaagattagctcacgcgagagtagagcaggcaagaagcgcgattaaagctcttatcggcgcaaaggacgggacgataattttcacgtcgggcgggtcggagtcaaacaatactgtttttcaaacaatgcggcatttaatcgatacatccgcctcaaaaaaccgcgatgaatttattacaacggctattgaacacccatgcgtaatgaattcagcaacgtttttaaaagattcagggtataaagtcgccattctgcccgttgatgaatacggaaaacttaaaattaacgaacttgaaaaagcgcttaacgataaaactttatttgtatctgtaatgacagctaataatgaaatcggcactatacaggatattaagaaaattaccgcgcttgtaaaaaaagcaggcgcttatatgcacgtagacgcggtgcaggctgtcggaaaaatccagataaatgcggaagaccttggagtggattaccttacaatgtcggcgcataaaatttacggtccaaaaggaataggcgcgttatatgtaaagaaaggcgctcccatgtttccgcttatacacggcggacatcaagaagacggtttaagggcgggaacttacaacaacattggaattctcggctttggaaaagccgcggaacttgccgccggcgaagttgaggaatacggcaaaaaactctccgcactgcgcgataagttgcgccgggaacttactgaaaaaatcccgaatataaaaataaacggtcacccgacagacatacttcccaatacgcttaatgtttcttttcccggcgcggaaggggagtctatactgctttccatggacatgcagggaattgaggcgtctacaggctcagcctgcgcatcaggaagccttgagccttctcatgtgcttcttgcgacaggggtgggacctgaacttgctcacggttctatccgttttagtctggggtggggtattacagaagacgatattgattatataatagaggtacttccgccgattatcgcgcggcttcgggcaatgtcaaccttggcggaaacttaa

SEQ ID NO: 66950 - protein, 389 aa, Unknown
  Obtained from environmental sample
  DOMAIN (3)...(373): Aminotransferase class I and II
  misc_feature (1)..(389): Xaa is any amino acid
MRKVYIDYNATTPLRNEVKSAITEDLEIFGNASSMHASGRLAHARVEQARSAIKALIGAKDGTIIFTSGGSESNNTVFQTMRHLIDTSASKNRDEFITTAIEHPCVMNSATFLKDSGYKVAILPVDEYGKLKINELEKALNDKTLFVSVMTANNEIGTIQDIKKITALVKKAGAYMHVDAVQAVGKIQINAEDLGVDYLTMSAHKIYGPKGIGALYVKKGAPMFPLIHGGHQEDGLRAGTYNNIGILGFGKAAELAAGEVEEYGKKLSALRDKLRRELTEKIPNIKINGHPTDILPNTLNVSFPGAEGESILLSMDMQGIEASTGSACASGSLEPSHVLLATGVGPELAHGSIRFSLGWGITEDDIDYIIEVLPPIIARLRAMSTLAET

SEQ ID NO: 66951 - DNA, 321 bp, Unknown
  Obtained from environmental sample
  misc_feature (1)..(321): n is a, c, g, or t
atgttgacaggatgctgcgcattccaagaacagccgccacatggcgataaaatgtttgagtacgatattgcccccgaagtcggagccgataatatgcgctttcttgccggtatccgcgacggcgatgagcggaaagccgccgagagcgcgcttattaaaggcaagagccccgacagtgttaaggttcaggtgcgtaacaagaacaaagaagaagaccccgttgttttgctggaaaaagaaaaaacaagacttgagaggacaattgcaactctcagtaaacgtcttgatgaagttaaaaaggaattaaaagaaaaaaaatga

SEQ ID NO: 66952 - protein, 106 aa, Unknown
  Obtained from environmental sample
  misc_feature (1)..(106): Xaa is any amino acid
MLTGCCAFQEQPPHGDKMFEYDIAPEVGADNMRFLAGIRDGDERKAAESALIKGKSPDSVKVQVRNKNKEEDPVVLLEKEKTRLERTIATLSKRLDEVKKELKEKK

SEQ ID NO: 66953 - DNA, 528 bp, Unknown
  Obtained from environmental sample
  misc_feature (1)..(528): n is a, c, g, or t
atgaatcaggacaatgtaaaacaaaaattactgtcaatcgaagacgcgccgcttgagttctctcttatttattccgggaaaaaaagcaaaaaggtcaacggactttacaaacccgccacaagagaaattataattcataaccgtaatttccaacccgacgacacagggcagaatttactgctctatacggcaatacatgaatacgctcatcatctgcacgcctgctcgcggggaggcacgctttctcctagggcgcataacagcgagttttgggcgatttttcacgcgttacttgaaaaggcggaaaagaaaaaaatctacagtgacgttttttccgtttcgcctgagttgttaaaattgacggatgttatccgcagcaaattcttaaaaaacaacggagagcttgtaaaagaaatgggaaaacacctgctgaaagcccatgatctttgcacgggaataggcgtgcgattcgaggactatgttgacaggatgctgcgcattccaagaacagccgccacatggcgataa

SEQ ID NO: 66954 - protein, 175 aa, Unknown
  Obtained from environmental sample
  misc_feature (1)..(175): Xaa is any amino acid
MNQDNVKQKLLSIEDAPLEFSLIYSGKKSKKVNGLYKPATREIIIHNRNFQPDDTGQNLLLYTAIHEYAHHLHACSRGGTLSPRAHNSEFWAIFHALLEKAEKKKIYSDVFSVSPELLKLTDVIRSKFLKNNGELVKEMGKHLLKAHDLCTGIGVRFEDYVDRMLRIPRTAATWR

SEQ ID NO: 66955 - DNA, 1194 bp, Unknown
  Obtained from environmental sample
  misc_feature (1)..(1194): n is a, c, g, or t
gtgtatgacgtattagaaaataaaatcaagcaaataatgccaattttaaacgaaaaacagttgagacaatacctgggaagtgaagcagaagtaataggccgaggtggaatagcaataatagcaagaataagcggcaaatcgagaaacacgattgtagccgggataaaggaaaacaggagtggaaggaatgccacagaaggaattcgcaaggccggtggtggcaggaagtcgatcaaggaaaaatatcctgatattaccagagagatcgaaaggatagtaagcgattcgacttttgggaatcctgaaaaccctctgtcctatacgacaaaaagtacaaggaagatacagcagatattgaacgagaaaaaatatgaaattggatacgatgtgattgcaaacatactgaaagaactgggatacagcttgcagttgaatcagaagatgctacaagtcgggaaagagcatccggacagggatatgcagtttcagttcatcaatgataaagcgaaaaggtttttaaaggcaggcattccggtcatttcaattgacgcaaagaagaaggaaaatatcggaaactttataaacaacggtagagcatacagaaaaaagaaggatcccacaaaagtggtagatcatgattttccaatcaaagaactgggaaaagtaacgccgtacggggtatatgacataggtagaaatgaagggtttgtcaatctgggaatttcctcagatacatcggaatttgcggtagaaagcatatcaaggtggtggttgacattagggaaaaacacttatccgaaagcaaaaaaaatctatatcaattgtgatggtggtggcagcaatgggagcagaaacaaacttttcaagttccaattgcagcaattagcgaaccagagcggccttgaaatccatatatcacatttcccacctggaacaagcaaatggaataaagtagaacacaggatgttctgctacattaccagccattggaagggtcaaccattaataagtgttgagacggttatacagttgattggcagcacaacaacaacgactgggttgaaaatcatttgtgtgaaagatgatactgtttataagattggcataaaagtcagtgatgaggatttcgcgacaataaatataaaaaatgtgaaaacactacccacttggaactatatcatctcccctttataa

SEQ ID NO: 66956 - protein, 397 aa, Unknown
  Obtained from environmental sample
  DOMAIN (86)...(397): Rhodopirellula transposase
  misc_feature (1)..(397): Xaa is any amino acid
MYDVLENKIKQIMPILNEKQLRQYLGSEAEVIGRGGIAIIARISGKSRNTIVAGIKENRSGRNATEGIRKAGGGRKSIKEKYPDITREIERIVSDSTFGNPENPLSYTTKSTRKIQQILNEKKYEIGYDVIANILKELGYSLQLNQKMLQVGKEHPDRDMQFQFINDKAKRFLKAGIPVISIDAKKKENIGNFINNGRAYRKKKDPTKVVDHDFPIKELGKVTPYGVYDIGRNEGFVNLGISSDTSEFAVESISRWWLTLGKNTYPKAKKIYINCDGGGSNGSRNKLFKFQLQQLANQSGLEIHISHFPPGTSKWNKVEHRMFCYITSHWKGQPLISVETVIQLIGSTTTTTGLKIICVKDDTVYKIGIKVSDEDFATINIKNVKTLPTWNYIISPL

SEQ ID NO: 66957 - DNA, 504 bp, Unknown
  Obtained from environmental sample
  misc_feature (1)..(504): n is a, c, g, or t
atggaacgacctatgatcgcagttcttccccaatgggatcaagaggatgaaaatatacggatgtcgcctaactatacgcgtgccctggaagaagccggtgctgtaccggttattctgaatttaactacttcagaaaccgtactaaaacggtatgcgtgtttttttgacggctttttatttcccggagggcctgatatgcatccaaattactttggacaggaagtagccgcctattgcggagaaattaacgagatgcgggacaaaatggaagcgtacatgttccgtgaagccgttataaatcaaaataaaccagcgctgggaatttgtcgcggtatacaagttttcaatatcatgcttggcggagacttgtatcaggatattcctacgcaacttcccagcacaataaaccataggcaagagccgccatacgatgtccttgtccaccatgtccggctcattcctgaaagcccattgtgtaaacttgcccggaaaagaacatcttga

SEQ ID NO: 66958 - protein, 167 aa, Unknown
  Obtained from environmental sample
  DOMAIN (4)...(167): Peptidase C26
  misc_feature (1)..(167): Xaa is any amino acid
MERPMIAVLPQWDQEDENIRMSPNYTRALEEAGAVPVILNLTTSETVLKRYACFFDGFLFPGGPDMHPNYFGQEVAAYCGEINEMRDKMEAYMFREAVINQNKPALGICRGIQVFNIMLGGDLYQDIPTQLPSTINHRQEPPYDVLVHHVRLIPESPLCKLARKRTS

SEQ ID NO: 66959 - DNA, 912 bp, Unknown
  Obtained from environmental sample
  misc_feature (1)..(912): n is a, c, g, or t
atgattcaagcaggggaaaaggagcggaatatgaaaatagcggtgataggtgcgaccggaaaggctggaagcctcatagcgagggaagcgtcaggacgaggacacgaggtaacggccataataaggccggggagtgcagggaggcttgaacaggcgtacaaggttctggaacgggaaatccacgaggtaaaggcggaggacctgaaaggctttgacgcggtagtaaatgccttcggtacgtcttttaccaagccgggtaacgaatatcagcatcaaacctcgatggaaaacctaattcgggaaatggaaaaaatcccggaagtccggctgctttgcgtaggcggtgcctcaagtctatggacggatgagtcaatgacagaacgcgttctggagagcatccccgtagattggcgggccgggccggaaaaccagtttaaggcctttgaaaaactaaaggccagcaaggtgaactggacttacctgagtccgcctaaaaactttgatttcggcggcggccggtcagggaaatatttccagggaactgattttgtcattcttaacacttccggtgaaagctatgcctcttacgcggactatgcgattgccatggtggacgagatcgagcgaaaagcccatatacgccagcgctttaccattatttcggattcgccgtttttcaatgacgcaaaacaactttacagtatagcggcttatcccttcttcatggcaggaagctatctgggcgtgtacacgagaatcggtactaacgattcttacggatccgcccagctctatttcggctcgcgtcgcggtttagcgccggatgacggcaggctgatagattttgacgcagcctttaacggtaaaaaagtaccatacgctgtccaggccaaaccacagagcttacattaa

SEQ ID NO: 66960 - protein, 303 aa, Unknown
  Obtained from environmental sample
  misc_feature (1)..(303): Xaa is any amino acid
MIQAGEKERNMKIAVIGATGKAGSLIAREASGRGHEVTAIIRPGSAGRLEQAYKVLEREIHEVKAEDLKGFDAVVNAFGTSFTKPGNEYQHQTSMENLIREMEKIPEVRLLCVGGASSLWTDESMTERVLESIPVDWRAGPENQFKAFEKLKASKVNWTYLSPPKNFDFGGGRSGKYFQGTDFVILNTSGESYASYADYAIAMVDEIERKAHIRQRFTIISDSPFFNDAKQLYSIAAYPFFMAGSYLGVYTRIGTNDSYGSAQLYFGSRRGLAPDDGRLIDFDAAFNGKKVPYAVQAKPQSLH

SEQ ID NO: 66961 - DNA, 1422 bp, Unknown
  Obtained from environmental sample
  misc_feature (1)..(1422): n is a, c, g, or t
atgggtttacgggtacgcaggttcccggaaatccatagaatcgtgaagaagcggggagaaaacgcatgggaaagcatgcacggaaataatagcagtttaatatttaagctcttaatgggaaaagctgaagttagcgcgccctggtcctgggaagatggtaacacccccagggtggagatgatgctaaactcaggcgaggacggaaccttcctcctggcagtggaagaattttccggggcgggctatgtgcgcgacagttaccccggctatgaggaatctctggaaaaggccaacgcggaatggaaggcttttttggagaccataccgcactttccttcccccttcgaggaagagcgagaaaaagccgcctacgcgatatggtcccatcttgtgggcccctctggatttatcaagcggacccttatttacatgtttcccaatatagcggcgtcatcctggcagcaggcttacaacgccgtaggcttgggtctaaaagacttaaaaatttccacggaacttttgctcaacccgattgatcagcaaaacgaggtgggacattacgcggatatctacggcgaatccgtgatcaactcgttacagggaaagccgcccatcgaaggctgggcccttaagattcttatgaaaaaacacgatcttggcaaagaaattccccatgaaaagctggagaccttataccagggcataaccaaatggggtctttggttttacaaatgtcgggacgatgatcatgacggcataccccagtatgactcgggagatgaaagcggtaccgatgacgacagtactttcaggatcagcaatcaaatggataccccggatctccaggctttcctcgccttgcttttcgaggttgcgggagatttggcgaaaatcctgggtaaaagccagaccgaagttgacgaacagtaccggcgttccaaagatgcaatcgataagctggtaaaaaatttttggaacggcgaacgctttgtcgcaatggtaccgggaacttttgaaaaggttttgtccaattcctgtttaaactacatacctatcgtactcgggaagcggctaccccaggagatcatcgataaaatggcggcggatctcgccgtggaaggcgaatttttgacaccctacggtatagccagtgaaaaacttacatccgatgaattatcctttggagcagggcggatggccaggggctatatactgccctcgacgaacatgcttatctgtacgggcctctatgatgcgggcaaagtagatctcgcaaaaaagatagccaccaggtactgtagaactctaaaagatggtgggtttatcttcgtaatgaaccccttcagaggaatgatgggaaggcccggcgggagctggtctgcctgtgcttatgtgctcctggcggatctattaaactggtaa

SEQ ID NO: 66962 - protein, 473 aa, Unknown
  Obtained from environmental sample
  misc_feature (1)..(473): Xaa is any amino acid
MGLRVRRFPEIHRIVKKRGENAWESMHGNNSSLIFKLLMGKAEVSAPWSWEDGNTPRVEMMLNSGEDGTFLLAVEEFSGAGYVRDSYPGYEESLEKANAEWKAFLETIPHFPSPFEEEREKAAYAIWSHLVGPSGFIKRTLIYMFPNIAASSWQQAYNAVGLGLKDLKISTELLLNPIDQQNEVGHYADIYGESVINSLQGKPPIEGWALKILMKKHDLGKEIPHEKLETLYQGITKWGLWFYKCRDDDHDGIPQYDSGDESGTDDDSTFRISNQMDTPDLQAFLALLFEVAGDLAKILGKSQTEVDEQYRRSKDAIDKLVKNFWNGERFVAMVPGTFEKVLSNSCLNYIPIVLGKRLPQEIIDKMAADLAVEGEFLTPYGIASEKLTSDELSFGAGRMARGYILPSTNMLICTGLYDAGKVDLAKKIATRYCRTLKDGGFIFVMNPFRGMMGRPGGSWSACAYVLLADLLNW

SEQ ID NO: 66963 - DNA, 453 bp, Unknown
  Obtained from environmental sample
  misc_feature (1)..(453): n is a, c, g, or t
atggagagcgatacaaggccaataagtcccagggaaaatttgaccctcgtctattcgcgtaaaaagccggagtggattccaattggttccgacacaatttttatcgcccccagggtcgatccggataatattgcccgttgttttgtttacgaagcaaatcccctaaagcctgaagaaatgacaggcggcctggatcggaacggcattgaatgggtgtatgtgccgattacaggcggatccatggtcaggcccggcaatcctgttctgaaagatgtcaatgattgggaaaaagttatcggtttccctgaggtggataaatgggattgggaggcgtcaaaagaagcgaataaagattatatcaaacctgaccttttcatttcgtttaccatcctgaccgggtttttgagaggcttatctcttttatggattttgaaaacgccgcgatcgccttaa

SEQ ID NO: 66964 - protein, 150 aa, Unknown
  Obtained from environmental sample
  misc_feature (1)..(150): Xaa is any amino acid
MESDTRPISPRENLTLVYSRKKPEWIPIGSDTIFIAPRVDPDNIARCFVYEANPLKPEEMTGGLDRNGIEWVYVPITGGSMVRPGNPVLKDVNDWEKVIGFPEVDKWDWEASKEANKDYIKPDLFISFTILTGFLRGLSLLWILKTPRSP

SEQ ID NO: 66965 - DNA, 609 bp, Unknown
  Obtained from environmental sample
  misc_feature (1)..(609): n is a, c, g, or t
atggattttgaaaacgccgcgatcgccttaattgacgaggatcagaaaaccgccgttcatgggctttttcaggaactcgtaaagctttataacaagatgatagacaaatacgtgtacgcgtacaaggcgaatctggtgagtcttcacgatgactggggttcccagcgggctccctttttctccctggaaaccgtaatggaaatgattgttccgtatataaaacaggttgtcgatcactgccacgaagtcggtatatttttttcccaacattcttgtggaaaaaacgaacctcttgtccctgcttacattgcgaccggtgcggataactggggctctcagttgattaacgatatggaaagtgtttacaattcttacggtgacaagatcatcctttccatgccatccggtctgcggtttaaggaagacggttggaggatcctttcagggcctgaagaagccgctcaatgcgccaaagcctttgtggcgaagtatgcgcctttatacaggcaaaaaccggttctttgcagtgtttttggtgctcccagggaattctcggaaactatatatgccgaaagcaggaaatatttcaacagcggaaccctgcattga

SEQ ID NO: 66966 - protein, 202 aa, Unknown
  Obtained from environmental sample
  misc_feature (1)..(202): Xaa is any amino acid
MDFENAAIALIDEDQKTAVHGLFQELVKLYNKMIDKYVYAYKANLVSLHDDWGSQRAPFFSLETVMEMIVPYIKQVVDHCHEVGIFFSQHSCGKNEPLVPAYIATGADNWGSQLINDMESVYNSYGDKIILSMPSGLRFKEDGWRILSGPEEAAQCAKAFVAKYAPLYRQKPVLCSVFGAPREFSETIYAESRKYFNSGTLH

SEQ ID NO: 66967 - DNA, 414 bp, Unknown
  Obtained from environmental sample
  misc_feature (1)..(414): n is a, c, g, or t
ttggaagttaaaagaagaattatgctcggctcgtttgtactttcatccgggtactacgacgcttattataaaaaagctttgcaggtacgcgcccttatcaaagacgcttatacgaagttgttcaccaagtatgacatggtactttctcctgtcgcgcctacaacggcgtaccgtatcggggaaaattcaggcgaccctatgaagatgtacatgggcgatatttacaccgtgtcgataaatttggcgggacttccttctgcggcgcttccctgcggatttgattcggcgggtttgcccataggctttcagattataggagacgcattctcggaaagcaagctcatcgacgcggctcgggtttatcaatctcgtaccgactaccatttacaaaaaccaaaaggaataaaagcatga

SEQ ID NO: 66968 - protein, 137 aa, Unknown
  Obtained from environmental sample
  misc_feature (1)..(137): Xaa is any amino acid
MEVKRRIMLGSFVLSSGYYDAYYKKALQVRALIKDAYTKLFTKYDMVLSPVAPTTAYRIGENSGDPMKMYMGDIYTVSINLAGLPSAALPCGFDSAGLPIGFQIIGDAFSESKLIDAARVYQSRTDYHLQKPKGIKA

SEQ ID NO: 66969 - DNA, 1428 bp, Unknown
  Obtained from environmental sample
  misc_feature (1)..(1428): n is a, c, g, or t
atgaagtgggaaacaataatcggtcttgaggttcacgccgagctttcaacgaaatcaaaaattttctgcgcttgcacaaccgcttacggaggagaacctaatacccatgtctgtcccgtctgcgccggaatgcccggcgtattgcctgtgcttaaccgctccgtagtagagtacgctcttcggctcggacttgcgcttggattcaacattaccaaatattgtaagtttgatcgaaaaaattatttttatcccgatctgccgaaagcctatcaagtatcacagctttacgccccaatttgcagggacggtcatcttgacatcgaggttgacggcaagaaaaaaacaatcaacatacgcgagatacatatggaagaagacgcgggaaaattgatacacgacgcaaacggcaggggcactttcatggactttaaccgctgcggagtgccgctgttggaaattgtttcacagcccgatttcagcagcgccgcggaagtaatcgcctaccttgaaaaaatgcgcgaaactcttttgtaccttgatatttgcgactgcaaaatgcaggaaggctccatacgcgccgacatcaatctgtccgtgcgccccgcaggcggcgaacttggcgtgcgtaccgagacaaaaaacatgaactcatttaaagcgattgcgcgcgccattgaatatgaaaccgcgcgtcagattgaaatactggaagacggcggtaagattgttcaggaaacgcgccgctgggacgacgaaaaacttgaatcctacggtatgcgttcaaaagaaaacgcgcaggattaccgctatttccctgagcctgatcttctgccgatggaaattgacgacgaatggcttgcgagcgttaagaaaaatttgccggagttagcgtatcaaaaaagagagcggtactatcgtgactttaagatacctgaatccgagtcgatgattcttaccgttcacaaaaatatttgtgatttgttcgagacaatcgcgcagaaaagcggacagccggttgaagcggcgcacctgttaaccggggaaattatgcggctgatgaacaatgccaatattctgccggaagatttggttatagacgcgggtaatctttcctctctcattacccttgttaccggcggaaaaataaacaggaacgcgtacaaagaaactgttgaggcggtatttacgaataatgttaatcctgaaaaatacatcgccgaaaaaggcttaatgatgattaacgacgacaacgccgttatcgaagcggtgaaagcggttataacggaaaatcaggattcagtggcggattaccgcgcgggcaaggaaaaagttttcgggtttttaatggggcaggtgatgaaaaaactcggcggaaatggaaatcccgacatggcgaagaaattattgacagatatactgaaagtgtaa

SEQ ID NO: 66970 - protein, 475 aa, Unknown
  Obtained from environmental sample
  DOMAIN (256)...(324): PET112 family, C terminal region
  misc_feature (1)..(475): Xaa is any amino acid
MKWETIIGLEVHAELSTKSKIFCACTTAYGGEPNTHVCPVCAGMPGVLPVLNRSVVEYALRLGLALGFNITKYCKFDRKNYFYPDLPKAYQVSQLYAPICRDGHLDIEVDGKKKTINIREIHMEEDAGKLIHDANGRGTFMDFNRCGVPLLEIVSQPDFSSAAEVIAYLEKMRETLLYLDICDCKMQEGSIRADINLSVRPAGGELGVRTETKNMNSFKAIARAIEYETARQIEILEDGGKIVQETRRWDDEKLESYGMRSKENAQDYRYFPEPDLLPMEIDDEWLASVKKNLPELAYQKRERYYRDFKIPESESMILTVHKNICDLFETIAQKSGQPVEAAHLLTGEIMRLMNNANILPEDLVIDAGNLSSLITLVTGGKINRNAYKETVEAVFTNNVNPEKYIAEKGLMMINDDNAVIEAVKAVITENQDSVADYRAGKEKVFGFLMGQVMKKLGGNGNPDMAKKLLTDILKV

SEQ ID NO: 66971 - DNA, 798 bp, Unknown
  Obtained from environmental sample
  misc_feature (1)..(798): n is a, c, g, or t
atgggcgttatgaacgaaacgatgttggtcacattgtattgcattatcgatgattttatcaatgctttggcaaaaactgccgacggccgaaagatgctggattcatggaaagccaaacgggggccgcaaaggcagttaagcctcagcgaggtgcttgcactgaatataatgcgcttttattttcacatattcgatttgaaggcatttgtaagccttgccgaaaatgcctataaagcatattttccccgtttgcccaactacgaaaattttcttaaggcggcaaaccggtcgtttccgtttaccgtattgctgctgcagtattttttgcttttaaaccgccggatgagcagggacgggatattttttcttgactcgaccgcattgagcgtgtgtggcaactggaacataccgacgcatcgcgtaaccaaagggtatgcttcacgcgggaaaacaagcaagggatggtttttcggcttcaaactgcacggggcctgcgatgcggaagggaatctggtgaacctacgtttttcaactggaagcgaacacgacagccaacaaaccgagccgcttactgacgggttgactggaacatttgtcggcgatgcggggtatttgctgagacaggaagtgtttatgcgcctgtttgaaaagcataaacgcattttgtctgccgcccgtaagaatatgaagcgtctgatgacagaagagcaaggacatttattgaggaaacggagcattattgagactgtgtggggcgtgttaaaagaacggcatgggctggtatttcatttggcatga

SEQ ID NO: 66972 - protein, 265 aa, Unknown
  Obtained from environmental sample
  DOMAIN (120)...(265): Transposase DDE domain
  misc_feature (1)..(265): Xaa is any amino acid
MGVMNETMLVTLYCIIDDFINALAKTADGRKMLDSWKAKRGPQRQLSLSEVLALNIMRFYFHIFDLKAFVSLAENAYKAYFPRLPNYENFLKAANRSFPFTVLLLQYFLLLNRRMSRDGIFFLDSTALSVCGNWNIPTHRVTKGYASRGKTSKGWFFGFKLHGACDAEGNLVNLRFSTGSEHDSQQTEPLTDGLTGTFVGDAGYLLRQEVFMRLFEKHKRILSAARKNMKRLMTEEQGHLLRKRSIIETVWGVLKERHGLVFHLA

SEQ ID NO: 66973 - DNA, 1266 bp, Unknown
  Obtained from environmental sample
  misc_feature (1)..(1266): n is a, c, g, or t
atgttttttgttgttattaaactatatggagtgatgggcgttttttcaactcgtaaaaactcgaaattcgaccatttagtctattttgtaatagaagcgatagaacaaataggggtagccggatttaaggtaaactatcgcggcagcgggagcgagcagtacccgccggagatgatgctggcgttattggtatacagttatgtgacagggcggttcggctcaaggacgatagaagcggcgacatatacggacgtggcgctcagatatatatgtggaggaaaagcgcacccggatcattcggtaatctgcgcgttccgcaaggataacaaggaagtatttgaagaaacatttaccaagatacttgttttggccaggcagacgaaaaagttgaaacaaactggcggggccagctgtgacgggacaaagattcatgcgaacgcgagcaaacacaacgcggtaagctacaaacgggccggtgaaatcatagaagaattgaaggaagaagtgaaagagctgacgcggatggcggaagaggcggacgggaaaacggagaagcctgtgatagacataccggaagaaataaagctgaggaaagagcggaagaaggcgctggaagaagcgaaggccgagatggaaaagctgtatgaagcggcaaaggaagaagggactaaaacacggaaaaaactggatgaataccagcataatttcactgatccagaaagccggataatgaaagttggaaacagggaacattatgaacagagctacaacgcgcaggcggtggtggacacggaagggagcatgttgatactgggcgggtatgtaacgcaaaacgtgaacgacaaaaaggaaatggaacccttagtagcgagcgttgataaagaagtgcgggaaataaacacaatatgtttggacagcgggttttacagtgaagaggcggtagctgcggtagaaaaaacaaatgaagaaggaaagcgggaagggcctgaagtattttgcgcggtagagaaaggacaccatgggaagacatgtagaagatttgaaaaacaaagggcccaaggggcggcctccggcacatatgagcgcgaaagaaaagatggggaggaaactgaaaacgaagagagggaaagagatatacaagaaacggaaagagacggtagagccggtattcgggataataaaaagtataatggggtttcgacaatttatgctacgtggaatagagaaagtgaatacggaatgggcattagtgcgagtcgcgtataa

SEQ ID NO: 66974 - protein, 421 aa, Unknown
  Obtained from environmental sample
  misc_feature (1)..(421): Xaa is any amino acid
MFFVVIKLYGVMGVFSTRKNSKFDHLVYFVIEAIEQIGVAGFKVNYRGSGSEQYPPEMMLALLVYSYVTGRFGSRTIEAATYTDVALRYICGGKAHPDHSVICAFRKDNKEVFEETFTKILVLARQTKKLKQTGGASCDGTKIHANASKHNAVSYKRAGEIIEELKEEVKELTRMAEEADGKTEKPVIDIPEEIKLRKERKKALEEAKAEMEKLYEAAKEEGTKTRKKLDEYQHNFTDPESRIMKVGNREHYEQSYNAQAVVDTEGSMLILGGYVTQNVNDKKEMEPLVASVDKEVREINTICLDSGFYSEEAVAAVEKTNEEGKREGPEVFCAVEKGHHGKTCRRFEKQRAQGAASGTYERERKDGEETENEERERDIQETERDGRAGIRDNKKYNGVSTIYATWNRESEYGMGISASRV

SEQ ID NO: 66975 - DNA, 306 bp, Unknown
  Obtained from environmental sample
  misc_feature (1)..(306): n is a, c, g, or t
atgggaagacatgtagaagatttgaaaaacaaagggcccaaggggcggcctccggcacatatgagcgcgaaagaaaagatggggaggaaactgaaaacgaagagagggaaagagatatacaagaaacggaaagagacggtagagccggtattcgggataataaaaagtataatggggtttcgacaatttatgctacgtggaatagagaaagtgaatacggaatgggcattagtgcgagtcgcgtataactttaaaaggctgcacaggctcatgggagggaaacgagtagccgaatgcgtagcatag

SEQ ID NO: 66976 - protein, 101 aa, Unknown
  Obtained from environmental sample
  misc_feature (1)..(101): Xaa is any amino acid
MGRHVEDLKNKGPKGRPPAHMSAKEKMGRKLKTKRGKEIYKKRKETVEPVFGIIKSIMGFRQFMLRGIEKVNTEWALVRVAYNFKRLHRLMGGKRVAECVA

SEQ ID NO: 66977 - DNA, 312 bp, Unknown
  Obtained from environmental sample
  misc_feature (1)..(312): n is a, c, g, or t
atgtgcaaaaggtttggatggtcatttgaaccgcaaattcaccggaaccgccttgaagcacctcagcttattaagaaaccgcaaaatatttttgtatgctctatggccgatttgtttggtgattgggttccctacgaatggatacacaaagtctttaaggcttgcgaaaaagccccacagcaccgatatttatttctaacaaaaaatccccgttatgccgaattccaaatggaaattgcaaaagataatatttgggttggttctacaattaccggcagagatattcctaggcgcctgtcgtgcttgagctaa

SEQ ID NO: 66978 - protein, 103 aa, Unknown
  Obtained from environmental sample
  DOMAIN (1)...(103): Phage protein Gp37/Gp68
  misc_feature (1)..(103): Xaa is any amino acid
MCKRFGWSFEPQIHRNRLEAPQLIKKPQNIFVCSMADLFGDWVPYEWIHKVFKACEKAPQHRYLFLTKNPRYAEFQMEIAKDNIWVGSTITGRDIPRRLSCLS

SEQ ID NO: 66979 - DNA, 411 bp, Unknown
  Obtained from environmental sample
  misc_feature (1)..(411): n is a, c, g, or t
atgccggttgcaccaaaaaatccgcaaataatagatattcccgttgcgcacgacaagcgcgggaatttaagcgttatagaaggaaagcaaaccattccgtttgacataaaacgtgtttattacctatacgacgttcccggaggcacaaaacgcggtgggcacgcacatcgcaaattggagcaattgattatcgccgctagcggcagcttcaccgttgttttgcacaatggcaaaaaaaaggaaagctatattctcaatcgctcaaacatcggtttatacataccaaaaatgacttggcgagaaattgaaaacttttcaagcggtgcggtgtgccttgtgctggccagcgagcattacgacgaaagcgattatataaggaatttcaaggaattcaaaaatgcatgtatttaa

SEQ ID NO: 66980 - protein, 136 aa, Unknown
  Obtained from environmental sample
  DOMAIN (6)...(136): WxcM-like, C-terminal
  misc_feature (1)..(136): Xaa is any amino acid
MPVAPKNPQIIDIPVAHDKRGNLSVIEGKQTIPFDIKRVYYLYDVPGGTKRGGHAHRKLEQLIIAASGSFTVVLHNGKKKESYILNRSNIGLYIPKMTWREIENFSSGAVCLVLASEHYDESDYIRNFKEFKNACI

SEQ ID NO: 66981 - DNA, 699 bp, Unknown
  Obtained from environmental sample
  misc_feature (1)..(699): n is a, c, g, or t
atgaatactccacttatatcaattgttattccagcatataatgcagaaaaatatattgaagaatgtttgaacagcattttaaatcaaacatttcaagaatgggaatgcataattataaacgacggttccacagataatacgcctgcaatcattgagaattttgtagctaaagacaaaagatttatgtgttacacgattcctaatagcggctcggcaaaagttccaagggacaaagcaatatcttatgcaaaggcgcagtggattatcgatatagatgccgatgattttatagataatgatgagctggaaaaactttatgcggaagctatggacactaaagccgatatagtatctctgagaatgaaactttttgatgaagaaaatcctagcaaattcggttatattcctgttcaaaattttgacgtgaaaaaagtattaacagggaaagaggctgtgatgcttactatccctaaatgggtaataggaggaaatggcattgttaaaaaagagctatggactgcttgtgcgacattcactagcgaagaaaattatatacctgtagatgagtacgatactatggaaatgctaataaaatcaaaaagcgttgcatatgaagatgtgatttatccttatatgcaaccttcctcttcagttacgaaaggaatatcaaccaagctttttgacacgctgatatactga

SEQ ID NO: 66982 - protein, 232 aa, Unknown
  Obtained from environmental sample
  DOMAIN (7)...(171): Glycosyl transferase family 2
  misc_feature (1)..(232): Xaa is any amino acid
MNTPLISIVIPAYNAEKYIEECLNSILNQTFQEWECIIINDGSTDNTPAIIENFVAKDKRFMCYTIPNSGSAKVPRDKAISYAKAQWIIDIDADDFIDNDELEKLYAEAMDTKADIVSLRMKLFDEENPSKFGYIPVQNFDVKKVLTGKEAVMLTIPKWVIGGNGIVKKELWTACATFTSEENYIPVDEYDTMEMLIKSKSVAYEDVIYPYMQPSSSVTKGISTKLFDTLIY

SEQ ID NO: 66983 - DNA, 633 bp, Unknown
  Obtained from environmental sample
  misc_feature (1)..(633): n is a, c, g, or t
ttgaacagaaaacctaaaataatttggagttgcaatgcaagagcagatgttcccgcagatttgctcttgttgatgaagcaagcaggttgccgtgagatgtgcgttggttttgaatctgcaaacgcagatgttttgaacagcgttagaaaaggcttaaagctaggcgaagcaatgccatttatgcaaaatgcaaaaaaagccggaatttttgttcacggctgttttatggttggcaacgaaggcgacacaaaagaaactttagaagacactttaaaatacgcaaaaaaactttccccaaacaccgcgcaattttaccccattatggcatacccaggaaccaccgcatacaaagaagccttgcagagcggtgccttaaccagcaatgattatggtcagtggctggataaagacggctatcaccgcacaactattagccgccccgggctttcgcctcaagatttggttgatttttgcgaccgtgctcgcagggaattttatttacgtccaaagtatttaattaagcaaattaaattagctctttttgatagagaagaacgcaagcgtttaacaagaggttttggaactttttataaacacttgttcagaaaacacggttcactaaattacaaataa

SEQ ID NO: 66984 - protein, 210 aa, Unknown
  Obtained from environmental sample
  misc_feature (1)..(210): Xaa is any amino acid
MNRKPKIIWSCNARADVPADLLLLMKQAGCREMCVGFESANADVLNSVRKGLKLGEAMPFMQNAKKAGIFVHGCFMVGNEGDTKETLEDTLKYAKKLSPNTAQFYPIMAYPGTTAYKEALQSGALTSNDYGQWLDKDGYHRTTISRPGLSPQDLVDFCDRARREFYLRPKYLIKQIKLALFDREERKRLTRGFGTFYKHLFRKHGSLNYK

SEQ ID NO: 66985 - DNA, 597 bp, Unknown
  Obtained from environmental sample
  misc_feature (1)..(597): n is a, c, g, or t
atgagtcaggtaagcactgaatttatcccgacccgtattgctattcttacggtttctaatcgtcgcggtgaagaagacgatacctccggtcactatctgcgcgattcggcgcaagaagcgggccatcacgttgtcgataaagccattgtgaaagaaaaccgctacgctattcgcgctcaggtatctgcgtggatcgccagcgacgatgtacaagtggtattgattacgggtggtactggcctgacggaaggtgatcaggctcccgaagcattgctgccgttgttcgaccgtgaagttgaaggttttggtgaagtgttccggatgttgtcgtttgaagagattggcacttccacgttgcaatctcgtgcggtagcgggcgtaatctgccagtgttttcttgttggttgctgcaccatcctcttcctgcaggctcgccagcagcgcactgagatccagctgccagcgggaaatactgatgcgcagcgccgccagcgcataaacgaagcagtcgagtgcctcattgcgtcgctttttgctgtcccacagtatttttttcctgccatccacccattttcgacctgcaggcatgcaagctga

SEQ ID NO: 66986 - protein, 198 aa, Unknown
  Obtained from environmental sample
  DOMAIN (14)...(153): Probable molybdopterin binding domain
  misc_feature (1)..(198): Xaa is any amino acid
MSQVSTEFIPTRIAILTVSNRRGEEDDTSGHYLRDSAQEAGHHVVDKAIVKENRYAIRAQVSAWIASDDVQVVLITGGTGLTEGDQAPEALLPLFDREVEGFGEVFRMLSFEEIGTSTLQSRAVAGVICQCFLVGCCTILFLQARQQRTEIQLPAGNTDAQRRQRINEAVECLIASLFAVPQYFFPAIHPFSTCRHAS

SEQ ID NO: 66987 - DNA, 630 bp, Unknown
  Obtained from environmental sample
  misc_feature (1)..(630): n is a, c, g, or t
atgcctgcaggtcgaaaatgggtggatggcaggaaaaaaatactgtgggacagcaaaaagcgacgcaatgaggcactcgactgcttcgtttatgcgctggcggcgctgcgcatcagtatttcccgctggcagctggatctcagtgcgctgctggcgagcctgcaggaagaggatggtgcagcaaccaacaagaaaacactggcagattacgcccgctaccgcacgagattgcaacgtggaagtgccaatctcttcaaacgacaacatccggaacacttcaccaaaaccttcaacttcacggtcgaacaacggcagcaatgcttcgggagcctgatcaccttccgtcaggccagtaccacccgtaatcaataccacttgtacatcgtcgctggcgatccacgcagatacctgagcgcgaatagcgtagcggttttctttcacaatggctttatcgacaacgtgatggcccgcttcttgcgccgaatcgcgcagatagtgaccggaggtatcgtcttcttcaccgcgacgattagaaaccgtaagaatagcaatacgggtcgggataaattcagtgcttacctgactcatctgatctctccttttgacgttttagccgccaatgtacgataa

SEQ ID NO: 66988 - protein, 209 aa, Unknown
  Obtained from environmental sample
  misc_feature (1)..(209): Xaa is any amino acid
MPAGRKWVDGRKKILWDSKKRRNEALDCFVYALAALRISISRWQLDLSALLASLQEEDGAATNKKTLADYARYRTRLQRGSANLFKRQHPEHFTKTFNFTVEQRQQCFGSLITFRQASTTRNQYHLYIVAGDPRRYLSANSVAVFFHNGFIDNVMARFLRRIAQIVTGGIVFFTATIRNRKNSNTGRDKFSAYLTHLISPFDVLAANVR

SEQ ID NO: 66989 - DNA, 309 bp, Unknown
  Obtained from environmental sample
  misc_feature (1)..(309): n is a, c, g, or t
atggcaggaaaaaaatactgtgggacagcaaaaagcgacgcaatgaggcactcgactgcttcgtttatgcgctggcggcgctgcgcatcagtatttcccgctggcagctggatctcagtgcgctgctggcgagcctgcaggaagaggatggtgcagcaaccaacaagaaaacactggcagattacgcccgctaccgcacgagattgcaacgtggaagtgccaatctcttcaaacgacaacatccggaacacttcaccaaaaccttcaacttcacggtcgaacaacggcagcaatgcttcgggagcctga

SEQ ID NO: 66990 - protein, 102 aa, Unknown
  Obtained from environmental sample
  misc_feature (1)..(102): Xaa is any amino acid
MAGKKYCGTAKSDAMRHSTASFMRWRRCASVFPAGSWISVRCWRACRKRMVQQPTRKHWQITPATARDCNVEVPISSNDNIRNTSPKPSTSRSNNGSNASGA

SEQ ID NO: 66991 - DNA, 411 bp, Unknown
  Obtained from environmental sample
  misc_feature (1)..(411): n is a, c, g, or t
atggaaccgggcgagggcagcgagctcttccgtaagcatcacatctctggtcaggttctgcgtgacgagctattgcgtcgcggctggatccaccaattacgtcaacgcagcgacggtcccgcgcaagtcttttgccatccagattacgccggagagattggccttatcatgccgtatgaaaaagacttctgcgccacttgcaaccgcctgcgcgtttcctccattggtaaactccatctctgcctgtttggtgaaggcggcgttaacctgcgcgatctgctggaagacgatacccagcaacaggcgctggaagcgcgtatttcagcggcgctgcgggagaagaaacagacccatttcctgcatcaaaacaacaccggtattacgcaaaacttatcgtacattggcggctaa

SEQ ID NO: 66992 - protein, 136 aa, Unknown
  Obtained from environmental sample
  DOMAIN (1)...(120): Molybdenum Cofactor Synthesis C
  misc_feature (1)..(136): Xaa is any amino acid
MEPGEGSELFRKHHISGQVLRDELLRRGWIHQLRQRSDGPAQVFCHPDYAGEIGLIMPYEKDFCATCNRLRVSSIGKLHLCLFGEGGVNLRDLLEDDTQQQALEARISAALREKKQTHFLHQNNTGITQNLSYIGG

SEQ ID NO: 66993 - DNA, 2856 bp, Unknown
  Obtained from environmental sample
  misc_feature (1)..(2856): n is a, c, g, or t
atggataaactcatcatcaagggagcgcgcgagcataacctaaaaaacatcgatttggagcttccacgcgacaaattaatcgtaatttcgggactttccggttccggcaaaagttcgctggcgtttgacacgattttcgctgagggacaaaggcggtatgtggaaagcctttccgcctacgcgcgccagtttttggggcgcatggataagcccgaccttgactatatcgaggggctttcccccgcaatttccatcgaacaaaaaacaacccacagaaacccgcgctccaccgtcgggacggttaccgaaatttacgattactaccgcctgctctacgcgcggattggaatcccccactgccccgtctgcggcaaggaaatccgcgaacagccggtcgattcaattatcgagacaatcatgcagttcaaagaaggggcgaaaattcaactgctcgctcccgttatccgcggtaaaaagggggaacaccagaaaataatcgaggacgctcgcaaggcgggattcgcgcgcgcgcggatagacggagttcccgttaaccttgacgaaagcatcaagctggacaagcaaaaaaaacactcaatagaaattatcgtagaccgtcttgtgattggaaaagaaattcgtccgaggcttgcggaatccgttgaaaccgcggtgcagacggccgacggccttatgatcgtgcttgtcaacgaagacggaaaaacagaagagcatgttttttcacagaagaattcctgtccggactgcggcgtttcaatcccggaattgcagccgcgtcttttttcatttaacaaccctttcggcgcgtgtaccggctgttcggggataggcagtaaaatggaatttgatcccgaccttgtaatccccgaccgttccctttcatttaatgagggggcggttatcccgtacaacccggacgcggcgtggaaccgcagccgttttcaaagcctcgccaaacattacgggttcagccttgacactcctttcaaacagctttcaaaaaaaatagtgaacgcgattctttacggctccgacgatgatataaaagtgcgttatgtgaacaaagagggaacaagccattttgagtatcaggcgaggtttcagggaatcctggaagagctgaaaaggcgttatgtggaaacccagtcgccgggcgtaaaagactggctggaaaaattcatgagccagaaaccgtgtgaggactgcgggggcaagcgtttaaaacccgaggtgttaggcgtaactgtcgcaggtaaaaacatctgggagctttcacgcctttccgtgacggattccttaaaattttttgaaaccgtaaaattaaacgccaacgaaaaaaagattgcgtatcaaatcttaaaagagataaacgcccgtcttggttttatgcagaatgtcgggctggattacctaagcctggagcgtaaagcctccactctctccggcggcgaagcccagaggatacggcttgctacgcagatcggctcaagccttgtgggggttctctacattcttgacgaaccttccatcgggcttcaccagagggacaaccagcggctgatagacaccctgctctacctgcgcgacctgggcaacacgctgattgtggtcgagcatgacgaacaaaccttaagaacagccgaccatatcgtggatttggggcccggcgccggcgttcacggaggatacgttgtcgcgcagggcagccccgaaaaaataatgaaagtgaaggaaagccataccgggcagtatttgtcgggcgctataagcatggcgattccgaaaaaaaggcgcgaaggaaacggctcctttttaaaaataaagggagcggctgaacataacttaaaaaatatcaacgtggaaattccgcttggctcctttacctgcataaccggagtttcaggttcgggaaaatccactttgctctccgatgttctttaccccgctttggcaaatcaaattaacggatcaaaccataccgagggcgcgtataaaaaaatagaaggcggcgaattaatcgacaagatcatagacatagatcaaagtccgataggaagaacgccccgttcaaacccgataacttatgttgaaggttttaccgcgataagagaccttttcacgaacctgccggaagcgaaaatgaggggatacagggcggggcgtttttcatttaacgtcaggggcggcaggtgcgagaactgcgagggcggcggtaccataaagatcgagatgaacttcctgcccgacgtgtatatcacctgcgacgtgtgccagggcaagcgcttcaaccgcgagactcttgatatacggtacaaaggaaagaatatcgccgaagtgctggacatgaccatcgaggaggcggcggaatttttcgcgcccataccgcaggtcgcccgcaagatgcagaccctgctttcagtggggttgggttatattaaactcggacagtccgcgcttacgctttcaggcggcgaggcacagcgcgtaaagctggccctggagctttccaggcgttccaccggaagcaccctgtatatccttgacgagccgacaacgggccttcattttgcggatgtcaaacagctaatggacgttattcagcggcttgcggatcagggaaacacggtgattatgatagagcataaccttgatgtgcttttacaggccgatcatattatcgatctgggtcccgagggaggggacaagggcgggcaggtcgtggccacaggcgctcccgaacaggtagccgcctgtgcggcttcctatacggggcattatatcggggaaatgatagcgcgtgaaaaaaagaagaggaaacagtccggacgaaaatga

SEQ ID NO: 66994 - protein, 951 aa, Unknown
  Obtained from environmental sample
  DOMAIN (24)...(563): ABC transporter
  misc_feature (1)..(951): Xaa is any amino acid
MDKLIIKGAREHNLKNIDLELPRDKLIVISGLSGSGKSSLAFDTIFAEGQRRYVESLSAYARQFLGRMDKPDLDYIEGLSPAISIEQKTTHRNPRSTVGTVTEIYDYYRLLYARIGIPHCPVCGKEIREQPVDSIIETIMQFKEGAKIQLLAPVIRGKKGEHQKIIEDARKAGFARARIDGVPVNLDESIKLDKQKKHSIEIIVDRLVIGKEIRPRLAESVETAVQTADGLMIVLVNEDGKTEEHVFSQKNSCPDCGVSIPELQPRLFSFNNPFGACTGCSGIGSKMEFDPDLVIPDRSLSFNEGAVIPYNPDAAWNRSRFQSLAKHYGFSLDTPFKQLSKKIVNAILYGSDDDIKVRYVNKEGTSHFEYQARFQGILEELKRRYVETQSPGVKDWLEKFMSQKPCEDCGGKRLKPEVLGVTVAGKNIWELSRLSVTDSLKFFETVKLNANEKKIAYQILKEINARLGFMQNVGLDYLSLERKASTLSGGEAQRIRLATQIGSSLVGVLYILDEPSIGLHQRDNQRLIDTLLYLRDLGNTLIVVEHDEQTLRTADHIVDLGPGAGVHGGYVVAQGSPEKIMKVKESHTGQYLSGAISMAIPKKRREGNGSFLKIKGAAEHNLKNINVEIPLGSFTCITGVSGSGKSTLLSDVLYPALANQINGSNHTEGAYKKIEGGELIDKIIDIDQSPIGRTPRSNPITYVEGFTAIRDLFTNLPEAKMRGYRAGRFSFNVRGGRCENCEGGGTIKIEMNFLPDVYITCDVCQGKRFNRETLDIRYKGKNIAEVLDMTIEEAAEFFAPIPQVARKMQTLLSVGLGYIKLGQSALTLSGGEAQRVKLALELSRRSTGSTLYILDEPTTGLHFADVKQLMDVIQRLADQGNTVIMIEHNLDVLLQADHIIDLGPEGGDKGGQVVATGAPEQVAACAASYTGHYIGEMIAREKKKRKQSGRK

SEQ ID NO: 66995 - DNA, 2070 bp, Unknown
  Obtained from environmental sample
  misc_feature (1)..(2070): n is a, c, g, or t
gtgcgtatggctttgaacgaagtagaagaaaccatagtaatagcctttttgctcgttgttgccgtgatatttttgttcttgagagattttagaacaacatttatccctatgataaccgtgcctatatctctgattggcgtattttttatcatctggattttggatttttccataaacatattaactcttttgggagtggtgcttgccattggaattgtggttgatgatgccattgttgttttggaaaatatctatgcaaaaattgaaaagggcttggagccaaaagaagccgcataccaaggcgttaatgaaattttctccgctgtgatttcaaccactcttgtactttgcgccgtgttcacgcctttgctttttatggaaggattcacgggtcgtttgttcagggaatttgctatattgataggaggttcggttttaatatctgcttttgttgccgtaacccttggtagtatgctctccagcagaatactaacgcgtggcaaacacaaccgcttttatgcggcaacagaaccatttttcaattccctttcttccaattactcaaaatttttaaacaaggctttgaaccaccccgctttatccattcccgtgattntgatatgcggaggaattgctgttttattatttacaaatatgccaagcgaactcgctccattggaagaccgttcaagggtaacggtgcaaattaccgctcacgaaggtgctccattttcttatatgaacgaaaaaatgaaattcatagagatgttgataagagaaaatgttccagagatagatagaattttgattcaaacatcgcctggttttgcgggtgctgcaaacaacggcaatgctcaaattatgttggttcagcctgcaaagcgcaaacgctcgcagcaacagatagcaaatgatttgcgcaaaatactctcaaaggtagagggggttcgcgtttccattcagcaagagcaaaccataagagttggcacaaggagcggacttcccgtgcaggttgtggtgcaaacaagcgaattggattctctaaaaaaacgcctgccagatttaatggataaaattggaagcagccgtttgctaactatggcagatgtgaatttgaaattcacaaagccgcaactgaatgtggaaatggacagggattttttgcgagcttccggcgttgccccaaaagaggttgctcaggcattgcagcttgcatatagcggtcttcgctacggatattttttaaaagacggcaagcaatatcaaattataggagaaatagatgcgcgcaacaaaaatgaaccagcaagtctccaagctctttatctaaaaaatgcaaccgataaccttgtttccttagaccaaatggtaacgctcaaagagcaagcagttcctccgcaaatttacagatacaatcgctatgtctctgcaacaatttctgcaagccccgcagagggaattgctcttggcgatgccattgcggatatgcacggcataataaaaaaagagctaggcgataatttcaaaacagagcttgctggaacttcgcgcgattttatggaggcaagcggtagcttggcaatggttttcgggcttgctctgctgattgtatatatgcttttagccgcccagtttgagagctttcgccatccttttacaattatgctcaccgtgccgctcgctctttttggtgctcttgtcgcgctctttataggagggcataccataaacatattcagtcaaataggacttgttatgcttgtgggtcttgtgaccaaaaatggaattttgattgttgaatttgcaaaccaacgtcacgctgttggcttatcgctaaaagaagctgtcgcagatgcggcaggtgcaaggcttcgcccaattttgatgacttctctcgcaaccgtttgcggatttatgcccatagcacttgcgcttggagcaggtgcggaatccagggttcctatgggcgttgcggttatagggggaatactcgtttctatggtgttcagtttgcttattgtccctgcggcatatttgttggttagcaagggggagggagtgtctaaatga

SEQ ID NO: 66996 - protein, 689 aa, Unknown
  Obtained from environmental sample
  DOMAIN (1)...(682): AcrB/AcrD/AcrF family
  misc_feature (1)..(689): Xaa is any amino acid
MRMALNEVEETIVIAFLLVVAVIFLFLRDFRTTFIPMITVPISLIGVFFIIWILDFSINILTLLGVVLAIGIVVDDAIVVLENIYAKIEKGLEPKEAAYQGVNEIFSAVISTTLVLCAVFTPLLFMEGFTGRLFREFAILIGGSVLISAFVAVTLGSMLSSRILTRGKHNRFYAATEPFFNSLSSNYSKFLNKALNHPALSIPVIXICGGIAVLLFTNMPSELAPLEDRSRVTVQITAHEGAPFSYMNEKMKFIEMLIRENVPEIDRILIQTSPGFAGAANNGNAQIMLVQPAKRKRSQQQIANDLRKILSKVEGVRVSIQQEQTIRVGTRSGLPVQVVVQTSELDSLKKRLPDLMDKIGSSRLLTMADVNLKFTKPQLNVEMDRDFLRASGVAPKEVAQALQLAYSGLRYGYFLKDGKQYQIIGEIDARNKNEPASLQALYLKNATDNLVSLDQMVTLKEQAVPPQIYRYNRYVSATISASPAEGIALGDAIADMHGIIKKELGDNFKTELAGTSRDFMEASGSLAMVFGLALLIVYMLLAAQFESFRHPFTIMLTVPLALFGALVALFIGGHTINIFSQIGLVMLVGLVTKNGILIVEFANQRHAVGLSLKEAVADAAGARLRPILMTSLATVCGFMPIALALGAGAESRVPMGVAVIGGILVSMVFSLLIVPAAYLLVSKGEGVSK

SEQ ID NO: 66997 - DNA, 465 bp, Unknown
  Obtained from environmental sample
  misc_feature (1)..(465): n is a, c, g, or t
atgcgttttgaagaattattgcactggatcgacggccaatttttacagccccaccatttccaatactttcaacgtcagaaccttgcgtttatgcaaaacaaccgggttctatccatcccctacccctggggtcttattgattttgaagttgacgaacacagcctggccgcgggccggctggtagtcaggcgtttttccgcgattatgggggacggaaccgccttgtccatgcccggcaactgcctcctttcccctcttgatttaacgaaaaccctaaaggctaaccctaacgagataaccgtatatatagcattgccacactggtcggaattcgaggcgaacatggccgaggacggagtttcggcggaacggaggcgcttccttccccaaaaaaaacaactccgtgacgaaaataccggggacaatgaaattatcctgatcacgcggcggctcacgcgtggctga

SEQ ID NO: 66998 - protein, 154 aa, Unknown
  Obtained from environmental sample
  misc_feature (1)..(154): Xaa is any amino acid
MRFEELLHWIDGQFLQPHHFQYFQRQNLAFMQNNRVLSIPYPWGLIDFEVDEHSLAAGRLVVRRFSAIMGDGTALSMPGNCLLSPLDLTKTLKANPNEITVYIALPHWSEFEANMAEDGVSAERRRFLPQKKQLRDENTGDNEIILITRRLTRG

SEQ ID NO: 66999 - DNA, 846 bp, Unknown
  Obtained from environmental sample
  misc_feature (1)..(846): n is a, c, g, or t
ttgaaaaatggtaaagtttccataataggatatatgaataaaatgaactctctcgaccgatccctgatagaaaaagccggttacgataatggctttgagatagtccaaaaaagcgattcttctgttgtcagcttgtgttcatctcttcatccggtaaaggtagatattaccattggaaatcacgaaggcgcttatgttttacaattttccgatactttaagcctgccggaactgaaaagaggcctaaacaacgagctttttctaaacggaaaaattgaagcatggaacagggaacttttgggggttgtattgaaaagagccgctgaacttggtattgccttgccggacggtccgatacgtctttataatgaacggcttgatacttatttaggcaaaaatccagaagaacgcttaagtttcgacggaaccgaaaagtcgatgtttcgaggtacagaacgggaacagttggtaaagttgagaattgggcaggatgtattcagagaggcgcttttcaaatattggaaaaactgctgtgctgtaactactcttgatataccggagatgttaagggcaagccacatcaaaccttgggctgattgtgataacgacagcgacaggctgaatgtttataacggttttttgttatcagccaattatgatgctctttttgataaaggactaatcacatttgatgataaaggtataatcatatattccaacaggttaagcaaaagacaaattattgaaatagggggtgatagatataaatcgctccattggatagatgaacggcacttgccttttttggaatggcatagaacccatgtttttgtaaaaaaccgataa

SEQ ID NO: 67000 - protein, 281 aa, Unknown
  Obtained from environmental sample
  misc_feature (1)..(281): Xaa is any amino acid
MKNGKVSIIGYMNKMNSLDRSLIEKAGYDNGFEIVQKSDSSVVSLCSSLHPVKVDITIGNHEGAYVLQFSDTLSLPELKRGLNNELFLNGKIEAWNRELLGVVLKRAAELGIALPDGPIRLYNERLDTYLGKNPEERLSFDGTEKSMFRGTEREQLVKLRIGQDVFREALFKYWKNCCAVTTLDIPEMLRASHIKPWADCDNDSDRLNVYNGFLLSANYDALFDKGLITFDDKGIIIYSNRLSKRQIIEIGGDRYKSLHWIDERHLPFLEWHRTHVFVKNR

SEQ ID NO: 67001 - DNA, 531 bp, Unknown
  Obtained from environmental sample
  misc_feature (1)..(531): n is a, c, g, or t
atgaaatcggttgccgcattttttggcaagtccgtactaagcgaacttgaaaaagaaactttccttgcccgcgccgccgaagtgcgaaagtcattgggagacagggcatttttacgtgccattcacttttttaacgaaaacgaaagagtggacgcgatgacggaagctttattggaaatggaaaaagccgccacaaccgccgacaaacagcgggtatttagccgctatttagatttagtcaatgaatcgggtgattcctcatgggaacttttacaaaacgtattttcccctacccgccccaaagatcaaggcataggctctgctcttgcgctgacaaaaaattttttccgcaaacaaaaactgcgtggcgcatgcagggtccacggcggcggctttgccggaaccatacaaacttatgtccctgtggacgcaatgaacgcctaccgcgcgtatatcgaagcggtctttggtacaggttcgctgacagtacttagaataaggtccaggggcgcggttgagttggagttttaa

SEQ ID NO: 67002 - protein, 176 aa, Unknown
  Obtained from environmental sample
  misc_feature (1)..(176): Xaa is any amino acid
MKSVAAFFGKSVLSELEKETFLARAAEVRKSLGDRAFLRAIHFFNENERVDAMTEALLEMEKAATTADKQRVFSRYLDLVNESGDSSWELLQNVFSPTRPKDQGIGSALALTKNFFRKQKLRGACRVHGGGFAGTIQTYVPVDAMNAYRAYIEAVFGTGSLTVLRIRSRGAVELEF

SEQ ID NO: 67003 - DNA, 858 bp, Unknown
  Obtained from environmental sample
  misc_feature (1)..(858): n is a, c, g, or t
ttggaagacgtgaacggcaagcgcttaattactccggtacagtatacggttcccgataaatgggaattgccggaaatacgttttgccggaaacggcgctattctgccgacaagccagggagcgcagcttattatcgaaaccaaaaatgttacgggcattttggtggaagcgtttcaaatttacaatcaaaacatggtttattttttgcagactaacaactttgatgacaaaaatgaacttgatcgcgttggcgagcctgtgtggacaaaagcttttgatttccaatgggtcccgtccgatcaaaaccgctggatacgccgagggcttgatatggcggaactaagcaaaaaatttcccggcggaatgttccatgtaaggattactttcaggcaaaggcatgttaaatatgtttgcagcaaaaaccacaatgatttttccgggtatgaatttccggacgactccttctctccgcgttatacgccaagcggtgaaacgtattacaattattatgattctccgaattacgactgggatgaatggtatagttataacaatgatccatgccatcccgccttttatactaacatgtacgatcataatatcacaaagaacaggaatgtgcttgtatctgatttaggacttattgcaaaacgatcctttgacggttcatggattatcgcaacgacaaatattattacagcccgcgccgcgcccaataccgaatacaaggtttacaattatcagggacgccgcttctgcatcagggaaaaacaaactcaaacggcatcgcgtctattcccgcatccgcggatacggcgagcggctcccgtctttttgtgtacgccgaaagcaatttag

SEQ ID NO: 67004 - protein, 285 aa, Unknown
  Obtained from environmental sample
  misc_feature (1)..(285): Xaa is any amino acid
MEDVNGKRLITPVQYTVPDKWELPEIRFAGNGAILPTSQGAQLIIETKNVTGILVEAFQIYNQNMVYFLQTNNFDDKNELDRVGEPVWTKAFDFQWVPSDQNRWIRRGLDMAELSKKFPGGMFHVRITFRQRHVKYVCSKNHNDFSGYEFPDDSFSPRYTPSGETYYNYYDSPNYDWDEWYSYNNDPCHPAFYTNMYDHNITKNRNVLVSDLGLIAKRSFDGSWIIATTNIITARAAPNTEYKVYNYQGRRFCIREKQTQTASRLFPHPRIRRAAPVFLCTPKAI

SEQ ID NO: 67005 - DNA, 1653 bp, Unknown
  Obtained from environmental sample
  misc_feature (1)..(1653): n is a, c, g, or t
atgattactgatctggaaagtttggaaaaagcgcttgctcgtataagagaagcccaaaaggtcttctctacgtttagtcaagagcaagtagatcgaatattcttctccgcggcaagggctgcggcaaaaaaccgtattccgctggcaaaaatggcggtagcggagacaggaatgggcattgtagaggataaagtgattaaaaaccactacgcctcggagtacatttataacgcctacaaagatgaaaaaacctgcggtgtaatcgaagacgaccccgtgtcgggcatcacccggatagccgaacccattggtcttgtggcggcggtaattcccaccaccaaccccacctccacggcgattttcaaggcgctcatctgcctgaaaacacgcaacggcatcatcatctcaccgcacccccgcgccaaggctagcacatgcgcggcggcgaagatagtgctggaagcggcggttgcctgcggagcgccagaggggatcatcggctggatagacgaaccgagccttggaatgacccatacggtaatgaaagaagccgacatcattctggcaacaggcggtccggctatgggcaaggctgcctattcttccggcaaacctgccatcggtgtcgggtcgggcaatacgcccgccattatcgacgatagcgcggacatactcctcgccgtcaactcaataatccactcaaaaacatttgacaacggaatgatttgcgcgtctgagcaatcggtaatcgctttgcaaagcatttactataaagtgaaagccgaattcacccgccgcggctgttacttccttacgcctgaacaaaccgaaaaggtacagaaaacgatcattgtccgcggtgcgctgaacgcgaaaatcgtcaggcagaaagcggcggcgattgcggaaattgccggcgtaaaggttgatccggcgacaaaaatcctcatcggcgaagttgagagcgtggagctttcggaagaattcgcccacgaaaaactttctccggtgctgggtatgtacaaggcaaaagattttaacgaagcgctggaaaaagccgaccgtctggtaaaagacggaggctacggtcataccaccagcgtgttccttaacccgcaaacgggaacggaaaaacttgccgcgttcagttcacgcatgaaaacctgccgtattttgctcaatacgccgtcgtcacacggcggtatcggcgatttgtacaacttccacatgagaccttcgcttactcttggctgcggaagttggggcggcaattcagtttcagaaaacgtcggcgtaaaacatctgttaaatatcaaaacgctggcggcaaggagggaaaatatgctgtggttccgtgcgcctgaaaaggtatatataaagaagggatgtctccctgtggctctggacgagcttaaaaccgttatgggaaaaaaacgcgcatttattgttaccgatacgttcttgtacgaaaacggttacacaaagaccataaccgaaaaattggacagtatgggtattgtccatgaaacttattttgatgtcgctcccgatccgacattgggctgcgcgaaaaaaaggcacggcgcaaatgagcgcattcaagcccgatgttattatcgcgctgggcggaggctcggcaatggacgcgggtaa

SEQ ID NO: 67006 - protein, 550 aa, Unknown
  Obtained from environmental sample
  DOMAIN (2)...(441): Aldehyde dehydrogenase family
  misc_feature (1)..(550): Xaa is any amino acid
MITDLESLEKALARIREAQKVFSTFSQEQVDRIFFSAARAAAKNRIPLAKMAVAETGMGIVEDKVIKNHYASEYIYNAYKDEKTCGVIEDDPVSGITRIAEPIGLVAAVIPTTNPTSTAIFKALICLKTRNGIIISPHPRAKASTCAAAKIVLEAAVACGAPEGIIGWIDEPSLGMTHTVMKEADIILATGGPAMGKAAYSSGKPAIGVGSGNTPAIIDDSADILLAVNSIIHSKTFDNGMICASEQSVIALQSIYYKVKAEFTRRGCYFLTPEQTEKVQKTIIVRGALNAKIVRQKAAAIAEIAGVKVDPATKILIGEVESVELSEEFAHEKLSPVLGMYKAKDFNEALEKADRLVKDGGYGHTTSVFLNPQTGTEKLAAFSSRMKTCRILLNTPSSHGGIGDLYNFHMRPSLTLGCGSWGGNSVSENVGVKHLLNIKTLAARRENMLWFRAPEKVYIKKGCLPVALDELKTVMGKKRAFIVTDTFLYENGYTKTITEKLDSMGIVHETYFDVAPDPTLGCAKKRHGANERIQARCYYRAGRRLGNGRG

SEQ ID NO: 67007 - DNA, 1083 bp, Unknown
  Obtained from environmental sample
  misc_feature (1)..(1083): n is a, c, g, or t
ttgtccatgaaacttattttgatgtcgctcccgatccgacattgggctgcgcgaaaaaaaggcacggcgcaaatgagcgcattcaagcccgatgttattatcgcgctgggcggaggctcggcaatggacgcgggtaaaatcatgtgggtggtctacgaacatcccgaagttgattttgaggatatggcgatgcgcttcgccgacattcgcaaacgggtctacaccttccccaaaatgggagagaaggcgtactttatcgctatacccacctctgccggaacaggcagcgaggtaacgccctttgccgtcatcaccgatgaaaccaaaggtatgaagtatccgctggcggattatgaactgttacccgacatggcgatagtggacgccgacgtgcagatgaacgcgcccaagggactcaccagcgcaagcggcattgacgcggtaacccacgcgctggaagcctacgcctcggttatggcgaccgactacaccgacggtctggcgatacaggcgctcaaggtgattttcgagtggctgcccgccgcctacaacgaaggcgcggcaaatcctgttgcgcgtgaaaaaatggcgaacgccgccaccatcgcgggcatggcatttgccaacgccttcctcggcgtgtgccactcaatggcgcacaaactcggcgcgttccaccacctgccccacggcatcgccaacgccctgatgattagcgaagtgctgcgctacaacgcctgcgaagttccgccgaagatgggctccttcccccagtatgatcatcccaaaacattatcccgttacgcgcaaattgccgacgcgctcaatcttggcggctcaagcgatgaggaaaaacttgagaaactgatcgccgctgttgaaaagctgaaagaacagataggaatcaagaagacaatcaaagattacggcatagatgaaaaagattttcttgcccgcctggacgacatgagcgaacaggcttttgacgatcaatgcacaggcgcgaatccgcggtatccgttaatcgaggaaatcaagaagatgtatattaatgttttctacggtaagaaggagattgtgtaa

SEQ ID NO: 67008 - protein, 360 aa, Unknown
  Obtained from environmental sample
  DOMAIN (1)...(345): Iron-containing alcohol dehydrogenase
  misc_feature (1)..(360): Xaa is any amino acid
MSMKLILMSLPIRHWAARKKGTAQMSAFKPDVIIALGGGSAMDAGKIMWVVYEHPEVDFEDMAMRFADIRKRVYTFPKMGEKAYFIAIPTSAGTGSEVTPFAVITDETKGMKYPLADYELLPDMAIVDADVQMNAPKGLTSASGIDAVTHALEAYASVMATDYTDGLAIQALKVIFEWLPAAYNEGAANPVAREKMANAATIAGMAFANAFLGVCHSMAHKLGAFHHLPHGIANALMISEVLRYNACEVPPKMGSFPQYDHPKTLSRYAQIADALNLGGSSDEEKLEKLIAAVEKLKEQIGIKKTIKDYGIDEKDFLARLDDMSEQAFDDQCTGANPRYPLIEEIKKMYINVFYGKKEIV

SEQ ID NO: 67009 - DNA, 750 bp, Unknown
  Obtained from environmental sample
  misc_feature (1)..(750): n is a, c, g, or t
atgggcgcaaaagtgcttgcttttgacgtttccgctcgggagaagctgctcaagggcgtggacgcgcttgcgaacgccgtcaaggtcacgcttgggcctcgcgggcgcaatgtggttctggagaagagctggggttcgcctaccgtgaccaaggacggcgtgacggtggccaaggaagtggagcttgaagacaagtttgagaacatgggcgcgaagatggtcaaagaggtcgcctccaaaaccagcgacatcgccggcgacggcaccacgacggccaccgttctggcgcaggtcatagcccatttgggtataaagaatgtaacggccggatccgaccccatggcgctcaaacgcggcatagacaaggcggtcaaggcgatcaccgaccagttgaagaaagactcaaaacccatagaaggcaagaaagagatagcgcaggtcggcgccatctccgccaacaacgacgcgagcatcggcgaccttctggccgacgcgatggagaaggtcggcaaggacggcgtgatcaccatcgaggaggccaagagcatagagaccacgctcgacgtggtcgagggcatgcagttcgaccgcggctacctctccgcctacttcgtgaccaacgcagacagccttgagtgcgttctcgaggaaccgctcatcctcatattcgacaagaagatcagcgccatgaaagatctcctgccgctcctcgaaaaggtcgcgcagatgggcaagctcggccgattctga

SEQ ID NO: 67010 - protein, 249 aa, Unknown
  Obtained from environmental sample
  DOMAIN (23)...(249): TCP-1/cpn60 chaperonin family
  misc_feature (1)..(249): Xaa is any amino acid
MGAKVLAFDVSAREKLLKGVDALANAVKVTLGPRGRNVVLEKSWGSPTVTKDGVTVAKEVELEDKFENMGAKMVKEVASKTSDIAGDGTTTATVLAQVIAHLGIKNVTAGSDPMALKRGIDKAVKAITDQLKKDSKPIEGKKEIAQVGAISANNDASIGDLLADAMEKVGKDGVITIEEAKSIETTLDVVEGMQFDRGYLSAYFVTNADSLECVLEEPLILIFDKKISAMKDLLPLLEKVAQMGKLGRF

SEQ ID NO: 67011 - DNA, 594 bp, Unknown
  Obtained from environmental sample
  misc_feature (1)..(594): n is a, c, g, or t
atgccctcgaccacgtcgagcgtggtctctatgctcttggcctcctcgatggtgatcacgccgtccttgccgaccttctccatcgcgtcggccagaaggtcgccgatgctcgcgtcgttgttggcggagatggcgccgacctgcgctatctctttcttgccttctatgggttttgagtctttcttcaactggtcggtgatcgccttgaccgccttgtctatgccgcgtttgagcgccatggggtcggatccggccgttacattctttatacccaaatgggctatgacctgcgccagaacggtggccgtcgtggtgccgtcgccggcgatgtcgctggttttggaggcgacctctttgaccatcttcgcgcccatgttctcaaacttgtcttcaagctccacttccttggccaccgtcacgccgtccttggtcacggtaggcgaaccccagctcttctccagaaccacattgcgcccgcgaggcccaagcgtgaccttgacggcgttcgcaagcgcgtccacgcccttgagcagcttctcccgagcggaaacgtcaaaagcaagcacttttgcgcccatagtatcaactccttaa

SEQ ID NO: 67012 - protein, 197 aa, Unknown
  Obtained from environmental sample
  SIGNAL (1)...(27)
  misc_feature (1)..(197): Xaa is any amino acid
MPSTTSSVVSMLLASSMVITPSLPTFSIASARRSPMLASLLAEMAPTCAISFLPSMGFESFFNWSVIALTALSMPRLSAMGSDPAVTFFIPKWAMTCARTVAVVVPSPAMSLVLEATSLTIFAPMFSNLSSSSTSLATVTPSLVTVGEPQLFSRTTLRPRGPSVTLTAFASASTPLSSFSRAETSKASTFAPIVSTP

SEQ ID NO: 67013 - DNA, 432 bp, Unknown
  Obtained from environmental sample
  misc_feature (1)..(432): n is a, c, g, or t
ttgtttatggttttgttttacggaaaaaaaagccctactccccgcgccgttcgtaaacggcggagagcgtgccgaccacacccacgacgcacatggcgccaacgattgccaaggtcagagtcatggttataccaccgccaggatgtcgctctcgcgcacaatgaggtactccgcgccgtctatggtgacctccgttccggcgtacttgccgtagagcaccttgtcgccgaccttgacggtcatttcattacgcgtccccttgtcattcatcttgcccggccccaccgccacgatctcgcccttctggggcttctccttggcgttgtccggaataatgataccgccggcggttttagcctccgcctccatagacttgagaatcacacggtcttccattggcttgacgttcatgttaccagccctcctttataa

SEQ ID NO: 67014 - protein, 143 aa, Unknown
  Obtained from environmental sample
  misc_feature (1)..(143): Xaa is any amino acid
MFMVLFYGKKSPTPRAVRKRRRACRPHPRRTWRQRLPRSESWLYHRQDVALAHNEVLRAVYGDLRSGVLAVEHLVADLDGHFITRPLVIHLARPHRHDLALLGLLLGVVRNNDTAGGFSLRLHRLENHTVFHWLDVHVTSPPL

SEQ ID NO: 67015 - DNA, 765 bp, Unknown
  Obtained from environmental sample
  misc_feature (1)..(765): n is a, c, g, or t
atgtacttggcggatatgcgagggttattatgcttaaaagacgcgttcgtttttttgatgatagccttgtgttttctattggaatacaaacataaaacgaactatgacgatatattgagcgatttcgcgtttgttttgggtaaagatgtaactataaaacgacagacaaaaacggaatctcgaccgtaccgtaccggaaccggcagtttaagatttacggaaatgcttgtggaagcgcgtgacgcgcaaattgatgaaagagcgaaagaggcgctggcgttttgcgaagccaatggctacaacacggacttttgcatcctcattgacatgaaaatccattcgggaaaacatcgtatgttcgtttatgactttaaaaaactggaggtggaaagagcggctttggttgctcacggttcgggaaagggcgataagagaagcactggggacgcgcctcttttcggcaacgaaaaagggagtttgctgacttcgctcggaaaatataaaataggcgagcgcgattacagtcaatggggtatcaatgtgcattataaactgcacggtttggaagcgggcaacagcaacgcctttgagcgcattgtcgtgcttcattcctatacgcccgttccgtcgttcgaaatatatcctgttcatttgcccttgggctggagtcagggctgccctgttacggacgataatacgatggcttggctggacgcaaaactgcaaaataccgaaaaaccggtattgctgtggattttttattga

SEQ ID NO: 67016 - protein, 254 aa, Unknown
  Obtained from environmental sample
  misc_feature (1)..(254): Xaa is any amino acid
MYLADMRGLLCLKDAFVFLMIALCFLLEYKHKTNYDDILSDFAFVLGKDVTIKRQTKTESRPYRTGTGSLRFTEMLVEARDAQIDERAKEALAFCEANGYNTDFCILIDMKIHSGKHRMFVYDFKKLEVERAALVAHGSGKGDKRSTGDAPLFGNEKGSLLTSLGKYKIGERDYSQWGINVHYKLHGLEAGNSNAFERIVVLHSYTPVPSFEIYPVHLPLGWSQGCPVTDDNTMAWLDAKLQNTEKPVLLWIFY

SEQ ID NO: 67017 - DNA, 978 bp, Unknown
  Obtained from environmental sample
  misc_feature (1)..(978): n is a, c, g, or t
atgagcgtagaaaaaataaaagaaataataaaaaaatgtcttaaagaaactccatgcgaagtaagttttttctataacgagccgcttaaatatcacaccacctttaaagtgggaggttccgtcgactgcctgttatctcctaagggtgatggctttagggctttttgcataaatattttaaatacctgtagagcgcataacgttcccgtatttattctgggcggcggcgcgaatattgtagtctccgacaaggggatacgcggcatagcgctggacatgagtgaatggaaaggtaaattacaatctcaaagagaattctttgccaaaaagaatgaaataatttttaaaagcggaacaagcatagacgaagctgttaacacagcctgcgccgaaggtcttagcggaatagagtttcttgccggaatgcccggtacggtaggcggggctgtctggatgaacgctcgatgttatgaaagtgaagcggcggacgtgtttggctgggctgaagttatattctgtgaacatgaattaaaaagccgatacacggtacataaagtagaaaaaaacgccgccgattttgcttacaaacaaagccctttccaaaaaatggattgcgttattataagcgcgtcattcagattaaaaaaaggcgacaaagaagaaatgttaaacaacataaaaaaatacagggaagacagagaaaaaaaagggcattatcgtttccccagcgccggttccgcttttaagaacaaccgtgatttcgggaaacccacagggcaaatcatcgacgaacttggtttaaaaggcaggcaagtcggcggagcgcaaatagcccccttccatgggaatatcatcattaacacaggcaacgcctgcgcaaatgacatccgcgctcttgtggatgaaaccgccttagaagttaaaaaaaagacaggatttatacttgaaccggaaatactttttgtcggcgaatggtag

SEQ ID NO: 67018 - protein, 325 aa, Unknown
  Obtained from environmental sample
  DOMAIN (41)...(181): FAD binding domain
  misc_feature (1)..(325): Xaa is any amino acid
MSVEKIKEIIKKCLKETPCEVSFFYNEPLKYHTTFKVGGSVDCLLSPKGDGFRAFCINILNTCRAHNVPVFILGGGANIVVSDKGIRGIALDMSEWKGKLQSQREFFAKKNEIIFKSGTSIDEAVNTACAEGLSGIEFLAGMPGTVGGAVWMNARCYESEAADVFGWAEVIFCEHELKSRYTVHKVEKNAADFAYKQSPFQKMDCVIISASFRLKKGDKEEMLNNIKKYREDREKKGHYRFPSAGSAFKNNRDFGKPTGQIIDELGLKGRQVGGAQIAPFHGNIIINTGNACANDIRALVDETALEVKKKTGFILEPEILFVGEW

SEQ ID NO: 67019 - DNA, 1038 bp, Unknown
  Obtained from environmental sample
  misc_feature (1)..(1038): n is a, c, g, or t
atggattatctggggaaaatgaaatccggcgagtcggttcccgttcttatggaacttcttgaaacagaggaaaaaaagtttttaaacgcaggttttcgcgccatcggcagcgcatgctcaggggacaaaaaactggcggacaagacggcggaatttttagttgattattataatgacagagacccgggcaatgataaccgcagcgtagtaataaccgccataggagccacaggctcgtctgccggcgttgagttccttacggaaatcgctacaaaccccgatgagcgcgtaccgcttcgcatggcggcgttaggcgctttgtctcaaatcggagacccaaaaggacttgacgcgatagtaagttgtatcagcgcaaaagatccaaacttgcgctcctcagcggtcgccgcccttggtccgttttcaggttcatctgcggagaacgcgatattcgacgctttcagggattcatactaccgcacaagaatcgccgcggcgcaggcaagccgcgaccgtaaacttgccgccgccgttccctttttaaaattccgcgccgagcgcgacgatgttccaagcgtaaaagacgaatcaatccgcgcgttaggcgctatcgccaatgatgaggcgatagcggcgcttgaaagtttattcacggagcgaaaaaatacagaccgcgtccgcctccttgccgccgatatgttaagtaaaaattcaagccaaaaatatttcagcaaagttgtcgtagaacttgacgaggcaaagaaaagaaatcaaacaaacctttacaacggctttttaaaaattgtaggcgagacggtaatagaaagcgataaatcggaaatagaaaccgtagcccgccgttttttaagcacgggcggcattatggaaaaattgtacggtcttgatatggcgagtaacaataaacttacgggactgaaagaagaaataattacgcttacaaaagataaaaatgaaagtctttcaaaaaaggcaaaaagaacggcggaaaatcttggcatagagattccgagtaattaa

SEQ ID NO: 67020 - protein, 345 aa, Unknown
  Obtained from environmental sample
  misc_feature (1)..(345): Xaa is any amino acid
MDYLGKMKSGESVPVLMELLETEEKKFLNAGFRAIGSACSGDKKLADKTAEFLVDYYNDRDPGNDNRSVVITAIGATGSSAGVEFLTEIATNPDERVPLRMAALGALSQIGDPKGLDAIVSCISAKDPNLRSSAVAALGPFSGSSAENAIFDAFRDSYYRTRIAAAQASRDRKLAAAVPFLKFRAERDDVPSVKDESIRALGAIANDEAIAALESLFTERKNTDRVRLLAADMLSKNSSQKYFSKVVVELDEAKKRNQTNLYNGFLKIVGETVIESDKSEIETVARRFLSTGGIMEKLYGLDMASNNKLTGLKEEIITLTKDKNESLSKKAKRTAENLGIEIPSN

SEQ ID NO: 67021 - DNA, 774 bp, Unknown
  Obtained from environmental sample
  misc_feature (1)..(774): n is a, c, g, or t
atggaaaaactgccagtttggtcggaaagttgtcaggtcaggtttggcgctgttgataaatctgattctatgacactcaattcgatatttaacttttttcaggaagcggcgataagccacgcggaaatcctgggagtggggcgcgaggcaatggcccggacaaaccaggtctggctgctttcgaggatgtcggttcaggttgaccgccggccaaagttcggtgaaaccgttactgtccgcacatggcccaggggcgcggaaaaactatttacacgccgtgattatgatatactcgacgcaaacggccatgcggcggttcgagccagcagcagttggcttatcgttgatattattaaacgccgccccctgcgtcctcagacccttctggagaacatgcccagtaacgaaggccttgacgccctgcctgccgcagcggccagccttaaagagaactcgtctctgcaaaaatccagcgagcatccagcgctgtacagtgatgcggattataacggccatgtaaataatgtcagttatatacggtggatcgaagatgccattgatcccgtcctgctggaacaggcgcggcagttcaggctggatgtcaattatttgaatgaagttatacccggtgaagttaccgatatttggttatcagaaatcgacgcggcgggagaaacgcctcctccttctcatgcttttgcatttgagggaaaaaaacagcaaacgcaggaaaatcaggcggcatttcgggcggaacttcgtatgtggcgctaa

SEQ ID NO: 67022 - protein, 257 aa, Unknown
  Obtained from environmental sample
  DOMAIN (6)...(251): Acyl-ACP thioesterase
  misc_feature (1)..(257): Xaa is any amino acid
MEKLPVWSESCQVRFGAVDKSDSMTLNSIFNFFQEAAISHAEILGVGREAMARTNQVWLLSRMSVQVDRRPKFGETVTVRTWPRGAEKLFTRRDYDILDANGHAAVRASSSWLIVDIIKRRPLRPQTLLENMPSNEGLDALPAAAASLKENSSLQKSSEHPALYSDADYNGHVNNVSYIRWIEDAIDPVLLEQARQFRLDVNYLNEVIPGEVTDIWLSEIDAAGETPPPSHAFAFEGKKQQTQENQAAFRAELRMWR

SEQ ID NO: 67023 - DNA, 996 bp, Unknown
  Obtained from environmental sample
  misc_feature (1)..(996): n is a, c, g, or t
atgatatatcaatatattatgggtaacagaaaaagcctgccgaaaacggcgataccgaggatatactttatcgatcgggaaattgccgccggaaagtatcccaatgccccgggtctggcgaaaaagtatgaaaccagccagtccagcatcaaccgcgacattgcctatatgcgtgatatgctgaacgcgcctatcgagtatgattttttcaaaaaaggcttttactataccgagaaaacgtaccgtctntgcgccgcttatgccaccgaggatgatttgctggctcttggcatggcaaaatcccttatggatttatatcagaatacccccctctacgatacggctttaagcctgctggaaaatatatccgcgcctttacaggaggaaaaaaacgccgactggtttcttgatcgcattgtgattcccaaaacagcttcgtcggcggcggatccaaaaacgtggaatgtcattgtaagcggtttgagggaaaataaaattattacttttcaatacctgagcgccaacaaagaaaaactcaataatcaagggaaaagcccggccccaaaaactacctcccgccgtgtccggccctatcagcttttatttgacaggaacaactggtatctgttcgcttttgacgaggataaaaaagagacgcggatcttcgccctgtcaagaatggcaaacgtagttcttacggaagacgcctttaccataccgcgcggttttgattaccgcagtctggaagggacaagctatttcggcatatacgcgggcgcgaaaacgtacaagttcgtaattttaatcacgggcgacacaagatggataagggagcgcgtttgggccgatgaccagaagataaaggaaacccgcagcgggcttgaactgtcatttacaagcaaccagtatgaaaaagtgctggaatggctgttctcccagtcgccttttgcccgcccgctgccccaaaaaattctcggccaatctgaccctgggtaa

SEQ ID NO: 67024 - protein, 331 aa, Unknown
  Obtained from environmental sample
  misc_feature (1)..(331): Xaa is any amino acid
MIYQYIMGNRKSLPKTAIPRIYFIDREIAAGKYPNAPGLAKKYETSQSSINRDIAYMRDMLNAPIEYDFFKKGFYYTEKTYRLCAAYATEDDLLALGMAKSLMDLYQNTPLYDTALSLLENISAPLQEEKNADWFLDRIVIPKTASSAADPKTWNVIVSGLRENKIITFQYLSANKEKLNNQGKSPAPKTTSRRVRPYQLLFDRNNWYLFAFDEDKKETRIFALSRMANVVLTEDAFTIPRGFDYRSLEGTSYFGIYAGAKTYKFVILITGDTRWIRERVWADDQKIKETRSGLELSFTSNQYEKVLEWLFSQSPFARPLPQKILGQSDPG

SEQ ID NO: 67025 - DNA, 1653 bp, Unknown
  Obtained from environmental sample
  misc_feature (1)..(1653): n is a, c, g, or t
atgaatatacttgaccattttgagaaaattgtcgcccttgcgggcgggaacgggctgaacagcaaattcttcgaggccgcgcgagagcatattgaagccgccggcgccctgctgcacactaacccaatccagacggcgctcttcgccctgattcttgaaaattacggcgaaaattctgtatcagccgatgatatcgccaagaccctgaaatgcggaaaaatgcaatttttaaggtacatggatgaatttgacgcgttaaagcagaaaaggctgataaagacggcgtcttcccgttacagttcgggaaattttcagagatacacgatcccgtccgatgttatacaggctatccgtaataataccgaatatcagtgtacaaaatttgacaacctcagtccggaagactttatttactgcgccaataatctgcttaaagccgcaaagagggatgatctgactacggacgggttaacagaagaaatacggtacctgtatgaacataacgcgaagaataactttgtgaaaaaaacgaaagaatacgatctgaatgagggatcaatcataatattaattatttttacttacgcgttattgcagaatgacgatgagctgataaaagcggaagacctgatggaagatttgcgcgagattatgggatatcccgaagtgcagcatgtcgaaaaccgcttaaaatcgggtaagcataaagttatggaaaaggagcttatccagtttaactgccgggacggcattgcggataccgagcatttcaggcttaccgaaaaagcaagggaagaattcctcgccgatattaattttatggaaaaagaaaaaagccgcggcaaaaattttatcatggcgaagaacctgtccgaaagaaagcttttttacgccgagaaaataaggaatcgcattgacgagctgacggagctgcttacccaggagaattttgccggtattcagaaacggctcgcggaaagcaaaatgaggacgggttttgcctgtattttttcgggcccccccggaacagggaaaaccgagaccgcgtatcagatagcccgtaaaacgggcagggacattatgcttgtaaatatagcggacacgaaaagcatgtggttcggggaaagcgagaagcggattaaacacgtttttgaccgctaccggagcgccgtgaaaaacggcggcctcgcgcccatcctgctctttaacgaggcggacgcggttttgggaaaacgccgggaactttcccaatcgcgtagcggctgtgatcaaaccgagaacgccattcaaaatattatccttcaggaaatggaaaatttgaacggcatccttatcgctacgaccaacatgacggccaaccttgacaaggcctttgagcgccgtttcctttataaaatcgaatttgaaaaaccgaatgtcgcctcaaaaacgcagatgtggcaaagttttattccaagccttgatgaaaacgatgccgcccggcttgcggaaaaatatgatttttcgggaggtcagatagagaacatagcccgaaaaaataccgtcgcctttatcttaaaggggacaaattcagatttgtcaattctggaaaatttttgcaaagaagaattgatggaaaaggccgctgtcagaataggcttctgcagtgagtag

SEQ ID NO: 67026 - protein, 550 aa, Unknown
  Obtained from environmental sample
  DOMAIN (334)...(519): ATPase family associated with various cellular activities (AAA)
  misc_feature (1)..(550): Xaa is any amino acid
MNILDHFEKIVALAGGNGLNSKFFEAAREHIEAAGALLHTNPIQTALFALILENYGENSVSADDIAKTLKCGKMQFLRYMDEFDALKQKRLIKTASSRYSSGNFQRYTIPSDVIQAIRNNTEYQCTKFDNLSPEDFIYCANNLLKAAKRDDLTTDGLTEEIRYLYEHNAKNNFVKKTKEYDLNEGSIIILIIFTYALLQNDDELIKAEDLMEDLREIMGYPEVQHVENRLKSGKHKVMEKELIQFNCRDGIADTEHFRLTEKAREEFLADINFMEKEKSRGKNFIMAKNLSERKLFYAEKIRNRIDELTELLTQENFAGIQKRLAESKMRTGFACIFSGPPGTGKTETAYQIARKTGRDIMLVNIADTKSMWFGESEKRIKHVFDRYRSAVKNGGLAPILLFNEADAVLGKRRELSQSRSGCDQTENAIQNIILQEMENLNGILIATTNMTANLDKAFERRFLYKIEFEKPNVASKTQMWQSFIPSLDENDAARLAEKYDFSGGQIENIARKNTVAFILKGTNSDLSILENFCKEELMEKAAVRIGFCSE

SEQ ID NO: 67027 - DNA, 537 bp, Unknown
  Obtained from environmental sample
  misc_feature (1)..(537): n is a, c, g, or t
ttgcccgccggaaacaacatagctgataaacctttatccttcataaggaacagattgatgttagacttggaccgagaaataaacaagctgttggagaaacaccccgatcccagaaagggcatagacggcaggatagagttcaggaagaggaaagaaacggaagcgggcttaccgaggttcgggactgtggtagacaacaaagacccgcagtgtctgggaagagtaagagtagcgtgcgacacgatagcgcccggagcggtaacgccgtggatacagataatagcgttaggagccacaaataagacaggctggtggcagttacccgacataggaacgcaggtagtattgggctttgtgggcaaagggcacaacaaccccgtagtgctgggctgtatatacgacttaaaacacctgcctcccgagcatacgcccaagaaagaaagcgacagcaaagtatggcagacaaagaaacacagacttgagtttatagacgaggaaggaaaggtgaacctgtccctgtcaagtagacaattataa

SEQ ID NO: 67028 - protein, 178 aa, Unknown
  Obtained from environmental sample
  DOMAIN (61)...(162): Phage-related baseplate assembly protein
  misc_feature (1)..(178): Xaa is any amino acid
MPAGNNIADKPLSFIRNRLMLDLDREINKLLEKHPDPRKGIDGRIEFRKRKETEAGLPRFGTVVDNKDPQCLGRVRVACDTIAPGAVTPWIQIIALGATNKTGWWQLPDIGTQVVLGFVGKGHNNPVVLGCIYDLKHLPPEHTPKKESDSKVWQTKKHRLEFIDEEGKVNLSLSSRQL

SEQ ID NO: 67029 - DNA, 543 bp, Unknown
  Obtained from environmental sample
  misc_feature (1)..(543): n is a, c, g, or t
atgaggaacgaaggaatcgttataaaccacaagaaagtataccgtataatgcgtaaattgggcttaaaagccgttatacgcaaaaaatggataattaggaaatatattaaagaaaacgtggcttgtaatgcattaaatcgcgaatttaaaaccgatgagccgtttaaaatattagtatgcgatgtaacagaaatgaaacgaattaatgataaccgttattatttatttagtataatggatttatataataacgctataatttcagcaagcatgtcagatcataacgattgggggcttgttgctaaagggcttgaaaatattccctatcagcctgagaaaataatacttcattcggatcaagggtcacagtttacttcaaaggcatatcatgaattaactgaacaaaagaatattgtattatcaatgtcacgggtaggaaactgttatgataatgccgctaaagaaagtttctttgggcattttaaagaagaattttatatttattataatcctaaaacaaaagaagaatntattcaaatgtaa

SEQ ID NO: 67030 - protein, 180 aa, Unknown
  Obtained from environmental sample
  DOMAIN (50)...(179): Integrase core domain
  misc_feature (1)..(180): Xaa is any amino acid
MRNEGIVINHKKVYRIMRKLGLKAVIRKKWIIRKYIKENVACNALNREFKTDEPFKILVCDVTEMKRINDNRYYLFSIMDLYNNAIISASMSDHNDWGLVAKGLENIPYQPEKIILHSDQGSQFTSKAYHELTEQKNIVLSMSRVGNCYDNAAKESFFGHFKEEFYIYYNPKTKEEXIQM

SEQ ID NO: 67031 - DNA, 627 bp, Unknown
  Obtained from environmental sample
  misc_feature (1)..(627): n is a, c, g, or t
atggccgaggggacggtcagccccgccggcggtaacttgaaagagccggtcaccgagtccacgaagaaggcggcgcgctgcttctacgcgctcggccagggacgcgccgactctaaacgctatccggcggtcgatcctattgacagctattcgaagtaccttgagtacgacgaggttatcgagtacctcgacaaggagatagagccgggttgggtgaaaaaagtcgaagttctcaagaatacgctgttgcgcggcaaggaagcccgcgaccagatcaacatcttgggcgacgacggcgtgccgctcgactaccatatcatcttcaacaagtccgaggtcatcgacttcgtgattttgcagcaggacgctttcgacaaaatcgactcgtgttcgccgctcaatcgccagcagtatatggtcaacaaggtgctgggtatcgttgacgcgaagtttaacttcgagggttttgaggagataggcaattactttaagaaggcgattaacttgatgcgccagatgaactatctggagtttcagagcgataaatttaacggactcgaaaaagagctcgacagcctgttggctgagcgggtatcggaacccaaggccggcgcggcgcacgcgtag

SEQ ID NO: 67032 - protein, 208 aa, Unknown
  Obtained from environmental sample
  misc_feature (1)..(208): Xaa is any amino acid
MAEGTVSPAGGNLKEPVTESTKKAARCFYALGQGRADSKRYPAVDPIDSYSKYLEYDEVIEYLDKEIEPGWVKKVEVLKNTLLRGKEARDQINILGDDGVPLDYHIIFNKSEVIDFVILQQDAFDKIDSCSPLNRQQYMVNKVLGIVDAKFNFEGFEEIGNYFKKAINLMRQMNYLEFQSDKFNGLEKELDSLLAERVSEPKAGAAHA

SEQ ID NO: 67033 - DNA, 1326 bp, Unknown
  Obtained from environmental sample
  misc_feature (1)..(1326): n is a, c, g, or t
atgaatacaaaagcgtttcagaagatttacactcacatcgaaaacgtgaccaaggccacgtgcacggtgcacgccgacggtgtgaccaacgatgaaatggcaatggtggccgggcgtccggcgcaggtcgtgaagattgtaggcgaccgcgtgacgctccagatattccccggcacgcagggcatcgccacgaacgccgaggtggtgttcctcggcaggccgcccgtcatcaaggtgtcggacgagctcaaggggcgcttcttcaacccctacggccagcctatcgacggcggcccggaggttgagggcaaagagatagagatcggcggcccgtcggttaaccccgtgcggcgcaaacagccgtccgaactcatcgccaccggtatcgccggcatcgacctgaacaatacgctcgttacaggccagaagatcccgttcttcgccgactccgaccagccgtacaacgcggtcatggccgacgtggcgctcagagcgaaagccgacctcattattctgggcggcatgggtatgtccaacgacgactacctgtactataggaagctgttcgaaaacgccggcgcgcttgaccgcatcaccgcgttcgtcaacacgaccgacaacccgccggtggagcgtctgctcgttcccgacatgtgcctgaccacggcggagcacttcgccgtagagcagaagatgaaggtgctggtgctgctcaccgacatgacgctgtacgcagacgcgctctccatcgtgtctaaccgtatggaccagattccctccaaagacagtatgcccggttcgctgtacagcgacttggcgaagatatacgaaaaggccgcccagttcccggacggcggctcgatcacgatcatcgcggtcacgaccctctccggcggcgacatcacgcacgccatccccgacaatacggggtacatcaccgagggccagttgtatttgcgccgcgataccgacgtgtcgaaggtcatcatcgacccgttccgcagcttgtcgcgtctgaagcagctcgttatcgggaagaagacgagaaaggatcacccgcaggttatgaactgcgccatccgactgttcgccgacgccgcgagcgcgaagacgaagttggaaaacgggttcgacctcacggactacgacacgcggtcgcttcagttcgcgaaagagtattcgcgtgaactgctggcgattgacatcaacattgaaatcgagcacatgcttgatacggcttggaagctgttcggcaagtactttacgcaggacgaggtgggtatcaagaagggagtgatggatcagttctggaaagcgtcggcgtaa

SEQ ID NO: 67034 - protein, 441 aa, Unknown
  Obtained from environmental sample
  DOMAIN (127)...(337): ATP synthase alpha/beta family, nucleotide-binding domain
  misc_feature (1)..(441): Xaa is any amino acid
MNTKAFQKIYTHIENVTKATCTVHADGVTNDEMAMVAGRPAQVVKIVGDRVTLQIFPGTQGIATNAEVVFLGRPPVIKVSDELKGRFFNPYGQPIDGGPEVEGKEIEIGGPSVNPVRRKQPSELIATGIAGIDLNNTLVTGQKIPFFADSDQPYNAVMADVALRAKADLIILGGMGMSNDDYLYYRKLFENAGALDRITAFVNTTDNPPVERLLVPDMCLTTAEHFAVEQKMKVLVLLTDMTLYADALSIVSNRMDQIPSKDSMPGSLYSDLAKIYEKAAQFPDGGSITIIAVTTLSGGDITHAIPDNTGYITEGQLYLRRDTDVSKVIIDPFRSLSRLKQLVIGKKTRKDHPQVMNCAIRLFADAASAKTKLENGFDLTDYDTRSLQFAKEYSRELLAIDINIEIEHMLDTAWKLFGKYFTQDEVGIKKGVMDQFWKASA

SEQ ID NO: 67035 - DNA, 627 bp, Unknown
  Obtained from environmental sample
  misc_feature (1)..(627): n is a, c, g, or t
ttgagtttgattttatatacggggaagaaaatggcgataaaatttcagtacaacaaaacgttcctgcaacagctgaaccgcgagcttaaagttcgcgtgaacgccctccccacgctcgtcgcgaaagagtccgctctgcgcgttgaggttgccagggcgaaagatcagatgcacgaagttgagcagcgtatcgcaaaagagcgcgacgcgctcgccgccaccgacaggctttggcctgaaatgccggagggtttgatgaagatcggcaaggtgggcgtcaaagtaaagaagatcgcaggggtgaaaacgcctatcctcgacaatatatcttttgaaatatcccgctacagccttgtcgccgaagcggcgtgggtaccggagggtatagagattctaaaacgtttcgcggagctcaaaataacgcttgaactcgccaagaaaaaggtcgctatcttagagtacgcgcgtaaaaagaccacgcaaaaggtgaacttgtacgagaaggtgcagattcccgaatataaagaggcggtacgcaagattaagcggtttatggaggatgaggacaatttggcaaagtcttcccagaaaattcttaaggtgaagttagccgcggaggccgcatga

SEQ ID NO: 67036 - protein, 208 aa, Unknown
  Obtained from environmental sample
  DOMAIN (11)...(200): ATP synthase subunit D
  misc_feature (1)..(208): Xaa is any amino acid
MSLILYTGKKMAIKFQYNKTFLQQLNRELKVRVNALPTLVAKESALRVEVARAKDQMHEVEQRIAKERDALAATDRLWPEMPEGLMKIGKVGVKVKKIAGVKTPILDNISFEISRYSLVAEAAWVPEGIEILKRFAELKITLELAKKKVAILEYARKKTTQKVNLYEKVQIPEYKEAVRKIKRFMEDEDNLAKSSQKILKVKLAAEAA

SEQ ID NO: 67037 - DNA, 678 bp, Unknown
  Obtained from environmental sample
  misc_feature (1)..(678): n is a, c, g, or t
atgatcgtaaagatgagaaaagttgatattctcctctatcacagggagcaggagaaatttcttgaggaactcaggaacttgggcgtggtgcatatcacctccgagcagccggtggactctcccgccgctcaggagatgagttccaatgtgcagcgcgcgcagcgcgtgatcagcgccttgtccaaattacagagggagaagggcgttaccgcgataagcgtctctcactctgccgttcccgagttgatctccaactttgagagttgcgaggcccagcgcgataggatagaccaagaacttgccacgatcaagaaagatactatcgctctcgaaccgtggggtaaattcgacccgaaagccataaagcgtttatccgaggtcggcattaaatttgctttctacaccgcgccgcagaaaaaatttgcgcagatcgacagaaaagaattgcgcatagaggtcatagccgaacgcggcacgactgtctacttcgtggtggtctacaggggcgacgccccggaggttccgggcgccgaattagtgcgcctcccggacatcggtccggcggagatggccgccaaagcggttgcgcttgagggcgagcgtaaggaagttttggccaatattgagagaatggtaggcagtatctcatccatagagaagtaccggaacgatcagtaa

SEQ ID NO: 67038 - protein, 225 aa, Unknown
  Obtained from environmental sample
  misc_feature (1)..(225): Xaa is any amino acid
MIVKMRKVDILLYHREQEKFLEELRNLGVVHITSEQPVDSPAAQEMSSNVQRAQRVISALSKLQREKGVTAISVSHSAVPELISNFESCEAQRDRIDQELATIKKDTIALEPWGKFDPKAIKRLSEVGIKFAFYTAPQKKFAQIDRKELRIEVIAERGTTVYFVVVYRGDAPEVPGAELVRLPDIGPAEMAAKAVALEGERKEVLANIERMVGSISSIEKYRNDQ

SEQ ID NO: 67039 - DNA, 474 bp, Unknown
  Obtained from environmental sample
  misc_feature (1)..(474): n is a, c, g, or t
gtggggcgttttttattaaggatagccatggaattccaccgtttgagcgccgttttttattcacaattcggtcagtatgaagaaatcctaaaaaaagaagaacgaccatactatgtgttgcttcttgaattggacaggcttacctatgctattcctcttcgttcacatattacgcacccctattgtttcattgcggataattctttcggtcaaaacagcggtcttgactattctaaagctgtggtaattattgattcatctcaatatattgatcctgcccctgtaacaatccgtcaacatgaatacaatgtttacaaacagcgagaacaccttatcagaaaacaattttcatcttatgtggcaatgtataaaaaagaaattcgccgtcgtttaaaaaacccgacgcttccggtttctacattgtgtcgttatgcttcattaaaatattttcacaaggaacttggactggaatga

SEQ ID NO: 67040 - protein, 157 aa, Unknown
  Obtained from environmental sample
  misc_feature (1)..(157): Xaa is any amino acid
MGRFLLRIAMEFHRLSAVFYSQFGQYEEILKKEERPYYVLLLELDRLTYAIPLRSHITHPYCFIADNSFGQNSGLDYSKAVVIIDSSQYIDPAPVTIRQHEYNVYKQREHLIRKQFSSYVAMYKKEIRRRLKNPTLPVSTLCRYASLKYFHKELGLE

SEQ ID NO: 67041 - DNA, 1362 bp, Unknown
  Obtained from environmental sample
  misc_feature (1)..(1362): n is a, c, g, or t
ttggaggctattatggcggattatttcgttggggcaaaggagtacttccccggaatcaaaaaaatcaaatacgacggaccaaagagcaaagaccctctggcgttcaagtattatgacgctgataaagttatcggcggcaagaagatgaaagatcatcttcgctttgcgattgcctactggcacagtttctgcggcgacggcggagacccgttcggtcccggcacacatgtcttcccgtggaatacggaagcaaaagacgcaatggacgtggctgacaaaaaaatggacgccgcttttgaattctttacaaagatcggcgcggaattttacgcgttccacgacagagacgtagcccccgaaggcgcgaacccggcggaaagcgaaaaaaatctgatgacgttagtcgctaaggcgaaaaaacttcaaggcgacacaggggttaaacttctttggggaaccgcaaatgttttcggcaacccgcgctttatgaacggagccgctaccaatcccgaattcggcgttgtcgctcttgccgcaacacaggtaaaagccgctattgacgccaccatcgaacttggcggatcaggctacactttctggggcggacgcgaaggctatatgagccttcttaacacagacatcaagagagagaaagaaaatcttgcccgtttccttacaatggcaagagattacgcgcgcaaacagggctttaaaggcgtgttctacatcgaaccgaaaccgatggagccgacaaagcaccaatacgattttgacacggaaaccgttatcggcttcctgcgccagtggggtcttgataaagatttccgcatgaacatcgaagccaaccacgcggagcttgccggtcacgaattcgcgcacgagcttgaaacagcggcggtatcgggcttcttcggctcggtagacgctaaccgcggcgacgtgcagaacggctgggacacagaccagttcccgatgagctactatgaaaccgcaatggcgatgtatacaatccttaaaatcggcggctttacagtcggcggtcttaacttcgactctaagattcgcagaaactccgtagacccggcagacctctttgtcgcccacatcggcggcatggacgctttcgccgtaggcttgcaggttgcgcagcgtatcatcgacgacggagttattcccaattttgtgaaaaatcgttacgcgtcattctcaagcggcgacggagcgaagttcagcaaaggcgagcttactcttgaacagttggcgaaaatcggcgctgacgcgggatacggaaagacagggctaacaagcggcaagcaggagtatcttgagaacgtactgaacagttacttgcttgggttgtaa

SEQ ID NO: 67042 - protein, 453 aa, Unknown
  Obtained from environmental sample
  DOMAIN (99)...(314): Xylose isomerase-like TIM barrel
  misc_feature (1)..(453): Xaa is any amino acid
MEAIMADYFVGAKEYFPGIKKIKYDGPKSKDPLAFKYYDADKVIGGKKMKDHLRFAIAYWHSFCGDGGDPFGPGTHVFPWNTEAKDAMDVADKKMDAAFEFFTKIGAEFYAFHDRDVAPEGANPAESEKNLMTLVAKAKKLQGDTGVKLLWGTANVFGNPRFMNGAATNPEFGVVALAATQVKAAIDATIELGGSGYTFWGGREGYMSLLNTDIKREKENLARFLTMARDYARKQGFKGVFYIEPKPMEPTKHQYDFDTETVIGFLRQWGLDKDFRMNIEANHAELAGHEFAHELETAAVSGFFGSVDANRGDVQNGWDTDQFPMSYYETAMAMYTILKIGGFTVGGLNFDSKIRRNSVDPADLFVAHIGGMDAFAVGLQVAQRIIDDGVIPNFVKNRYASFSSGDGAKFSKGELTLEQLAKIGADAGYGKTGLTSGKQEYLENVLNSYLLGL

SEQ ID NO: 67043 - DNA, 1068 bp, Unknown
  Obtained from environmental sample
  misc_feature (1)..(1068): n is a, c, g, or t
ttggctgaaaaaccaaatcagccgcgatttgcgaaactgcggcatattcttctgccccacaattacatcaactttttagtgacaggcgagtattgggcggaatacggcgacgcgtcaggaaccgcgctatttgatgtgcgcggacgcaaatggtcgtctgaaatctgtaagctgatttctcccgatgtagaaaaatatttaccgcccttaacaacttccgaaaaaacagcgggaaaggtaagcaaagccgcggcagccctttacggtcttaacgagggcacgcttgtatcttcaggcggcggcgacaatatgatgggcgctatcggcacgggcgcggttaaagacggattcttaacgatgagcttgggcacaagcggcactctttttggtttttcaaacgcgccggttatcgacccgaccggaaaccttgccgcgttctgttcatcttccggcggctggcttccgcttctctgcacgatgaactgcacagtagcgagcgaagaattccgcaaacttatggaccttgaagtaaaagcctttgacgcggaagcggaaaaatctcctatcggcgcggacggcattgttatactgccgttcttcaacggggaacgcactccgaacctgccgaacggaagagcgagcgtaaacggcattaccgccgcaaactttaaccgcaaaaatcttgcgcgcgccgctcttgagtccgccatcttcggaatgagaatcggtcttgacggatttaagtcgctgggctttaaaccaaaagagattcgtttaacaggcggcggcgcaaagagcaaactctggcaaaatattgtagctaacgtaacggatttgcccattcgtattcctacagattcggaagcagccgcgacaggcggagcgattcaggcgctgtggtgtttggaaaaccatgaaggtaaaaaaacactcattgaagatttgaccgacaaacacatcaagttgggcgcgccgataaagcccgacagaaagagcgtagccgcttatcacgaagcatacgcgacatattccaagtatcttggggctttaagcccactatataaatga

SEQ ID NO: 67044 - protein, 355 aa, Unknown
  Obtained from environmental sample
  DOMAIN (1)...(109): FGGY family of carbohydrate kinases, N-terminal domain
  misc_feature (1)..(355): Xaa is any amino acid
MAEKPNQPRFAKLRHILLPHNYINFLVTGEYWAEYGDASGTALFDVRGRKWSSEICKLISPDVEKYLPPLTTSEKTAGKVSKAAAALYGLNEGTLVSSGGGDNMMGAIGTGAVKDGFLTMSLGTSGTLFGFSNAPVIDPTGNLAAFCSSSGGWLPLLCTMNCTVASEEFRKLMDLEVKAFDAEAEKSPIGADGIVILPFFNGERTPNLPNGRASVNGITAANFNRKNLARAALESAIFGMRIGLDGFKSLGFKPKEIRLTGGGAKSKLWQNIVANVTDLPIRIPTDSEAAATGGAIQALWCLENHEGKKTLIEDLTDKHIKLGAPIKPDRKSVAAYHEAYATYSKYLGALSPLYK

SEQ ID NO: 67045 - DNA, 360 bp, Unknown
  Obtained from environmental sample
  misc_feature (1)..(360): n is a, c, g, or t
atgcaagtggcattgtctgccggagatgggactggtacttcacagggagacactggaaaactttccatttctgatcccgaagaagcaaacaaggcaatcggttcaatagataacgcattaaagattgtttccaaacaaagagccgaccttggcgcttaccagaatcgttttgaaagcgcggcacagggtgtcgcagtagcggctgaaaacattcaggctgccgaatcccgcataagggatgcgaacatggcttcaaagatggttgactttacaaagaacaccatcctcagccagagcggaaccgcaatgttggcgcaagccaatctgcgtacgcagtcggtgcttcagcttctttcataa

SEQ ID NO: 67046 - protein, 119 aa, Unknown
  Obtained from environmental sample
  DOMAIN (26)...(97): Bacterial flagellin C-terminus
  misc_feature (1)..(119): Xaa is any amino acid
MQVALSAGDGTGTSQGDTGKLSISDPEEANKAIGSIDNALKIVSKQRADLGAYQNRFESAAQGVAVAAENIQAAESRIRDANMASKMVDFTKNTILSQSGTAMLAQANLRTQSVLQLLS

SEQ ID NO: 67047 - DNA, 417 bp, Unknown
  Obtained from environmental sample
  misc_feature (1)..(417): n is a, c, g, or t
gtggtcaagtggtcggaaaaatttaccatttcctgccagggattggcggaaattgaagggcttaaagccctatacatggaggtatttatgtccgtagcaagtgtgggatattcccctgtctcaccagcgccagttcaggcattgaacaggccggatgcggcagtaacagaaccaagaaaagaaaaagctcccgaagtaaaagcccacgttatcagcgcaaccgcgtcagatctggaaaggctcgtttttaacagaaaattgcagtttgtagtggatcacaattcacatgaggtaatcgtaaaggtcatagacaaggataccgataaggtgattaaggtgcttccgcccgaagaattacagcgtatgcacagcgatttaagggaatctatcgggtttttgtttgacgaactggtttag

SEQ ID NO: 67048 - protein, 138 aa, Unknown
  Obtained from environmental sample
  DOMAIN (39)...(137): FlaG protein
  misc_feature (1)..(138): Xaa is any amino acid
MVKWSEKFTISCQGLAEIEGLKALYMEVFMSVASVGYSPVSPAPVQALNRPDAAVTEPRKEKAPEVKAHVISATASDLERLVFNRKLQFVVDHNSHEVIVKVIDKDTDKVIKVLPPEELQRMHSDLRESIGFLFDELV

SEQ ID NO: 67049 - DNA, 2058 bp, Unknown
  Obtained from environmental sample
  misc_feature (1)..(2058): n is a, c, g, or t
atgtcagatgtttatatgccgggagtaaaaagccggtttaattcagaaaaaatcatagaagatctgatgcgccttgagcgtatcccaaaggaaagaaccgaaaaaaacattgacaacctgcaaactcaaaaaggttattggcaggaagtcggacggcgcattaattcaatgcgggaaagcgcccgctttctttattcttttcaaaatccgtttaacgaaagactcgccgtttctacggatgaatacgcgttaacggctaccgccacgcgtgaagccgaagagcaatcttaccgttttacagttaaacaaacggctcaagcggaccgttttttgtcctcccctcttgatgaaaaaacaaaaattgaagccggcagttataattttactgtaggcaatgataaaatatcaataaatttccgcggcggcacattaaaggattttgttgaggttattaaccgccgcggcaacgataaaatctccgcaaaccttatagcggtacaaagcgggacaaaatctctattaattgaatccaaaaaaaccggatccgataacaggctgggcttccttgacgatgccgctaaactggcgcttaaaacaggcatggttgaacagggtaacgacacccgaaagaatatcgccataacggaaaataacgtaaacagcggcggcgggacaaccagcataaacgacggaattttaaaagtaggtgtacaatcttccgcgacgcttcctgtaggcctttcgttaagttctgattctcccgtgatattaaaacttgaaacttccactttggtggataattccggcgttttaagcgttccccagccgccgcccggtccgtctataccaaaaggctctgttacttacggcggcattacggttgaaaacgagccgtcgtccgcgcctatccccgaatggaaaactccagaagccccgcagcgccgtgacgacatggcggtcttaagccttgttttctcggacggaacttccgccaaattgccgccaatcacggattccaacgcttttgtgccaaggcagtatgttctttccgaaacagcgcagggcaggacgatttcctcaattaaaattgagaataacaatacacaccgcgaagtttcggtaggtaaagttgaaattttagaccctacctccacaacgggcggtttggtaccgcagaactctctttctatcgcccgcgacgcgattataacgatggaaggcatagaaataacacgcccgaccaacaatattgacgaccttattcccggccttactcttaatgtaaggggggtatcagagcgccctgtggatttgaaagtaaaaggcgacacggaaaaagtaaaagaagcaattatcaattttgtcggaaactacaacaggctaatagcggaaataaacgttcttaccgcaagaagcgtatcctcgggatcgggaaccaaaacaagcgtggacgattccgtattaaatgaattgacatatttaaccgcggatgaaagagccgaaatgagatcaagacttggcgcttttaacggggatcttactctgaaccagcttaaaaacaggcttttacagtccgttaccgcgccctaccctaccagccttgagcgcgatctttcccttttggcgcaaatcgggataggaaccaacgcggcaagaggcgcaggttatgagccgtccaaacttcgcggctatcttgaaatagacgagaaaaaacttgactcttcgcttgaaaataaaatcccggctatcagggaacttttcgccagcgacacttcaggcgacatgattgcggataccggagttgcgtataacgtggacgcgattgtaaaaccgtttgtggaagtcggcggaattataacattaaaaacaaataccatagattcgcgcataactcaggatgaaaggcgcgtcagcactatggaacgccagcttgcggcaaaagaacaagaacttaaaattcaatacgcaagaatggaagccgcttacgctcgaatggaatccatgtccacttcccttgacaatttcagccagcaaaaccgtcaaagcaacaacaggtaa

SEQ ID NO: 67050 - protein, 685 aa, Unknown
  Obtained from environmental sample
  DOMAIN (10)...(109): Flagellar hook-associated protein 2 C-terminus
  misc_feature (1)..(685): Xaa is any amino acid
MSDVYMPGVKSRFNSEKIIEDLMRLERIPKERTEKNIDNLQTQKGYWQEVGRRINSMRESARFLYSFQNPFNERLAVSTDEYALTATATREAEEQSYRFTVKQTAQADRFLSSPLDEKTKIEAGSYNFTVGNDKISINFRGGTLKDFVEVINRRGNDKISANLIAVQSGTKSLLIESKKTGSDNRLGFLDDAAKLALKTGMVEQGNDTRKNIAITENNVNSGGGTTSINDGILKVGVQSSATLPVGLSLSSDSPVILKLETSTLVDNSGVLSVPQPPPGPSIPKGSVTYGGITVENEPSSAPIPEWKTPEAPQRRDDMAVLSLVFSDGTSAKLPPITDSNAFVPRQYVLSETAQGRTISSIKIENNNTHREVSVGKVEILDPTSTTGGLVPQNSLSIARDAIITMEGIEITRPTNNIDDLIPGLTLNVRGVSERPVDLKVKGDTEKVKEAIINFVGNYNRLIAEINVLTARSVSSGSGTKTSVDDSVLNELTYLTADERAEMRSRLGAFNGDLTLNQLKNRLLQSVTAPYPTSLERDLSLLAQIGIGTNAARGAGYEPSKLRGYLEIDEKKLDSSLENKIPAIRELFASDTSGDMIADTGVAYNVDAIVKPFVEVGGIITLKTNTIDSRITQDERRVSTMERQLAAKEQELKIQYARMEAAYARMESMSTSLDNFSQQNRQSNNR

SEQ ID NO: 67051 - DNA, 561 bp, Unknown
  Obtained from environmental sample
  misc_feature (1)..(561): n is a, c, g, or t
atgcaaaaaccaaaagtaatcgtaatgtattccggcggcctggacagcacaatcgccatccatctgctgaaatctcaaggccttgatgtgacagcgctccacttcaggatgcccttcaacgtcggcgtcggcacgtccccaaacgaggtcatggagtacgccgacgctttgggcgtttcgttgcgtgtggaagaggagggggaggagtttgtggacatggtccgcaatccgcgtttcggctacggcaagaacgccaacccctgtatagactgccggatacaccgcctgaagagcgcggcaaaaatcatggaggagatgggcgcggtctgcctcgcaacgggcgaggtggccggtcagcgccccatgtcgcagaaaatctacactatgatgaggatagagaaacatgccggcctgaagggaaaattgctacgccccctctccgcaaaattgctgccgcccacggaagcggaggaggcgggaattatcgacagggaaaaattgctcgacatatcgggaagaagcgcgcgccgtccagcttgctactcaaactcggccatctga

SEQ ID NO: 67052 - protein, 186 aa, Unknown
  Obtained from environmental sample
  DOMAIN (1)...(169): Thiamine biosynthesis protein (ThiI)
  misc_feature (1)..(186): Xaa is any amino acid
MQKPKVIVMYSGGLDSTIAIHLLKSQGLDVTALHFRMPFNVGVGTSPNEVMEYADALGVSLRVEEEGEEFVDMVRNPRFGYGKNANPCIDCRIHRLKSAAKIMEEMGAVCLATGEVAGQRPMSQKIYTMMRIEKHAGLKGKLLRPLSAKLLPPTEAEEAGIIDREKLLDISGRSARRPACYSNSAI

SEQ ID NO: 67053 - DNA, 1419 bp, Unknown
  Obtained from environmental sample
  misc_feature (1)..(1419): n is a, c, g, or t
atgatggccgagagttctgccggtgatggacatcccttcggcgggtcgtgggggtatcagacggtcggctacttcgcgcctacgagccgtttcggcacgccgcaggatttcatgtaccttgttgactatctgcaccagcacgatataggcgtgatactcgactgggtgccgtctcacttcccgagcgacgagcacgggcttgtttactacgacgggacgtgcctctatgaacacgccgatcccaaaaagggtttccatccggattggaagagctacatcttcaactacgggcgtaacgaggtgcaggcgtttttgctgagcagcgcgatcttctggctcgacaggtaccacgccgacgccatccgcgtagacgccgtggcctctatgctctatttagactactcccgcaaggagggcgagtggatacccaaccagttcggcggtcgtgagaatttggaggcgatatccttcctgaagcggatgaacgaggagatatacaaggcgttccccgacgtgcagacgatagcggaggagtctacggcgtggccgatggtctcgcgtccggcctacgtgggggggctgggcttcggtatgaagtggaacatgggttggatgcacgacacgctcgtgtatatggccaaagactccatctacaggaaataccaccacagcgagctgacgttcagcatgctgtacgcttttacggaaaactacgtgctgccgctatctcacgacgaagtcgtgcacgggaaaaactctcttgtcaacaagatgcccggggacgattggaggcggctcgcgaatttgcgtttgctgctcagctatcaattcaaccaccctggtaaaaaactgctcttcatgggcggcgagtttgcgcagttcgttgagtggaaccacgaccgcagcctgaactgggagttgacgcagtgggacaggcacaacggcatacagcggatggtgagcgatttgaaccggatttataagagggagccggcgttgcactactacgactttgaacccaagggttttgagtggatagactgcaacgactgggagcagagtattttaggctttataaggaaagggccggatgagttcgaccggttgctgatagtgttgaatttcacgccggagccgcgccgcggttaccatgtgggcgtgcctgtagccggcttttgggaggagatattcaacagcgacgcggcggaatacggcgggagcggcgtcggcaacgcgggcgggatggagacggaggaaaagccttggcacggtcacagccagtcgctgccgctaacgttaccgccgctaggggcggtgctgtttaagataagaaaaccggagccgaaggcgggtgcggtggttgttcaggcggacaagaccggcggaaccggctcaggggctcaggcgtcagatcaataa

SEQ ID NO: 67054 - protein, 472 aa, Unknown
  Obtained from environmental sample
  DOMAIN (1)...(329): Alpha amylase, catalytic domain
  misc_feature (1)..(472): Xaa is any amino acid
MMAESSAGDGHPFGGSWGYQTVGYFAPTSRFGTPQDFMYLVDYLHQHDIGVILDWVPSHFPSDEHGLVYYDGTCLYEHADPKKGFHPDWKSYIFNYGRNEVQAFLLSSAIFWLDRYHADAIRVDAVASMLYLDYSRKEGEWIPNQFGGRENLEAISFLKRMNEEIYKAFPDVQTIAEESTAWPMVSRPAYVGGLGFGMKWNMGWMHDTLVYMAKDSIYRKYHHSELTFSMLYAFTENYVLPLSHDEVVHGKNSLVNKMPGDDWRRLANLRLLLSYQFNHPGKKLLFMGGEFAQFVEWNHDRSLNWELTQWDRHNGIQRMVSDLNRIYKREPALHYYDFEPKGFEWIDCNDWEQSILGFIRKGPDEFDRLLIVLNFTPEPRRGYHVGVPVAGFWEEIFNSDAAEYGGSGVGNAGGMETEEKPWHGHSQSLPLTLPPLGAVLFKIRKPEPKAGAVVVQADKTGGTGSGAQASDQ

SEQ ID NO: 67055 - DNA, 837 bp, Unknown
  Obtained from environmental sample
  misc_feature (1)..(837): n is a, c, g, or t
atgcctaaaatgattgaccagcttattatcaattccccttacgaagaaccaaaagaatattgggattataatgaaaacagccagtcatttgaccgtaaatcaggcagacgctccgcagggtattatatcgcaaatcagggaagcaaccagtttaacgaaaaaggcaattttatacctttacccctcgtcaacgaaatacgcaaacgggtaaaaacatggaagaccaataattaccccggcattaccggcgttacccgaaaactgattgaacactggtacgcaaaagaagtccgcagatacgcctttttcttttgccaactggacgctatagaaaccatcatctggcttgttgaagcccccgaaacagaaaagacaggtattgacattcaaggcgacggaggcgattttaagcgtatctgtacaaaactctgcacaggcggcggcaaaactaccgttatggcaatgctcatagcatggcaaatttgtaacaaggtttcatatccgcatgacaaacgattttcaaaaaatgtttttatcgttgcccccggaataaccgtaagagaccgattagaagtattactccccggcggaggatcaaattactatattgattttagtgttgtcccgacatcgttaatcgacaaactctataaaggaaaagtcatcatcaacaactggcaagctcttgcgtgggaagacgaagaagcgttaaagaaaaagaaatccgtagacaaacgaggacccaaaagcgatgaagcctatgctcgtcaggttttaggttctatggctgacagccaaaatattttagtcatcaatgacgaagcccatcacgcatga

SEQ ID NO: 67056 - protein, 278 aa, Unknown
  Obtained from environmental sample
  misc_feature (1)..(278): Xaa is any amino acid
MPKMIDQLIINSPYEEPKEYWDYNENSQSFDRKSGRRSAGYYIANQGSNQFNEKGNFIPLPLVNEIRKRVKTWKTNNYPGITGVTRKLIEHWYAKEVRRYAFFFCQLDAIETIIWLVEAPETEKTGIDIQGDGGDFKRICTKLCTGGGKTTVMAMLIAWQICNKVSYPHDKRFSKNVFIVAPGITVRDRLEVLLPGGGSNYYIDFSVVPTSLIDKLYKGKVIINNWQALAWEDEEALKKKKSVDKRGPKSDEAYARQVLGSMADSQNILVINDEAHHA

SEQ ID NO: 67057 - DNA, 1035 bp, Unknown
  Obtained from environmental sample
  misc_feature (1)..(1035): n is a, c, g, or t
atggctgatataatccccgctgaagacacgatttatcaaagtatccgtactgttcttaccgccgcgcggcaaaaggtgtataccgcagtaaattccgctatggtcgaaacctattgggatataggacggcaaatcatggaagcccaggaagggcaacgggctgaatatgggaccggattattgaaatatctatcctgtcgtttaaccgtagaatttgggaaaggttttgatgaaactaaccttcgtaaaatgcggcaattttttcaaacctttccaattcgagacacactgtgtctcaatttaagctggtctcattaccggctattaatgaaggttagaaatgaggttgaacgtgagttttaccttaaagaatgtaacgaatgtaattggagcgtacgccagcttgaacgtcaaattacaacattttattacaaacggctccttgccacccgaaaagaaggcaaggaatcggtaaaaaatgaaattcaacaaactgaaccaaaaacagaccccgacttcatactaaaagacccctatattttggaattccttgacctgaaagaaaacaaagattaccacgaaagcgagcttgaacaagcccttatagacaaattacaggaattccttttggagttaggcaaagggttttcatttgtagcgcgccaaaaacgtataactatcgaaggggatcattattatgttgatctggttttttataattatctcttaaaatgctttattataattgacttgaaaaccggaaagctgtcatatcaggatattgggcagatagatttctatgtccgctatttcgatgataaaatcaagtttcccgaagataatcccacattgggtattattctatgcgccgataaaaatgaaactatggcaaaatactctgttctttccgataaagataatctttttgcctcaaaatattttgattatcttcccacagaagaagaattgaaacaagaactggaacgcgagcgggctattatcgaaagcaagctgaaggaagacaataatgcctaa

SEQ ID NO: 67058 - protein, 344 aa, Unknown
  Obtained from environmental sample
  DOMAIN (11)...(330): Protein of unknown function (DUF1016)
  misc_feature (1)..(344): Xaa is any amino acid
MADIIPAEDTIYQSIRTVLTAARQKVYTAVNSAMVETYWDIGRQIMEAQEGQRAEYGTGLLKYLSCRLTVEFGKGFDETNLRKMRQFFQTFPIRDTLCLNLSWSHYRLLMKVRNEVEREFYLKECNECNWSVRQLERQITTFYYKRLLATRKEGKESVKNEIQQTEPKTDPDFILKDPYILEFLDLKENKDYHESELEQALIDKLQEFLLELGKGFSFVARQKRITIEGDHYYVDLVFYNYLLKCFIIIDLKTGKLSYQDIGQIDFYVRYFDDKIKFPEDNPTLGIILCADKNETMAKYSVLSDKDNLFASKYFDYLPTEEELKQELERERAIIESKLKEDNNA

SEQ ID NO: 67059 - DNA, 1605 bp, Unknown
  Obtained from environmental sample
  misc_feature (1)..(1605): n is a, c, g, or t
gtgcagatcagcgatgagaatgtacatttagtcagatgtttatgtgatgaaatttttggaagggataattttgtttctgaaataatttttcgaaaaaaaggtatgactttgggagctaacacaatagaaacaatgaatgattttattatttgttatgcaaaaaatttaccattaataaaatatcgccaaatttatgaagaatataatgttgaaggtgcttcacgctggactatggttgaattgcctgatggtactcggcgacatatgactaatgaagaatactataatcataaacttttgcctgttgacagcaatgtctttaggcttgtttcacagagagctccttcgtattctccaaataatatctttgattttgaatatgaagggaaaacatataaagctcctggatgctgggtaacgaacattgatggtatgaatgttttagctcaaaataaacgattttttccagaagggactaatttaagttatatacaatacattactgatttcccatacaaaaaaataactaatttatggactgatacatcaggtgcaaacgataaaatttatgttgtccaaacatctataaaaccaatccaacgctgtctcctcatgaccaccgaccccggcgacttggtactcgacatcacctgcggaagcggaaccaccgcctacgttgccgaacaatggggacgccgctgggtaacctgcgatacttcccgcattgccatcacccttgcaaaaaaacgcttaatgaccgcaacatttgattattacaaactggcgcacccggaacagggtgtatcaagcggctttgtgtataaaacagtcccgcacatcacgctcaagtcaatagcgaataacgaaccgccggaacaggaaacgctctacgaccagccggaaatagaaaaaagaaaagtccgcatttcaggcccctttaccgtggaagcccttcccgctccggtagtaaaaccgctcgacgatgatactcaccccgctccgtttttccatgaaaacgccgccaaaaaacaatccgactggatgcaggaattaaaagcgtcaggcatattagggcggcagggagaaaaaattcaattttccagagtagaaccattggaaggaacaaaatttctccacgcggaagccgagacaaaagaaacagacagaaaaaaagccgttatttgttttgcgggcgaaacccggcccctcgatattcgcatggttacccaagcgctgaatgaagcggaaaccataaggccgaaacccgtttacatcgttttcgccgctttccaatttgacccaacggcggcaaaacatattgacgatactaaatggcccggagttacattgttaaaagtacaaatgaaccccgaccttatgaccgcagatttaaagaagaaatcatcctcaagccaaagtttctggcttgtcggacagcccgatgtagagcttatccacatcgaaaaaggagccgacaaaggcaagtataaaatcaaagtaaaaggctttgactattacgatataaaacaagggatagtcaattcaggcggaaccgataaaatcgccatgggatgcttgataccgattatgacggtatgtccatag

SEQ ID NO: 67060 - protein, 534 aa, Unknown
  Obtained from environmental sample
  DOMAIN (1)...(249): DNA methylase
  misc_feature (1)..(534): Xaa is any amino acid
MQISDENVHLVRCLCDEIFGRDNFVSEIIFRKKGMTLGANTIETMNDFIICYAKNLPLIKYRQIYEEYNVEGASRWTMVELPDGTRRHMTNEEYYNHKLLPVDSNVFRLVSQRAPSYSPNNIFDFEYEGKTYKAPGCWVTNIDGMNVLAQNKRFFPEGTNLSYIQYITDFPYKKITNLWTDTSGANDKIYVVQTSIKPIQRCLLMTTDPGDLVLDITCGSGTTAYVAEQWGRRWVTCDTSRIAITLAKKRLMTATFDYYKLAHPEQGVSSGFVYKTVPHITLKSIANNEPPEQETLYDQPEIEKRKVRISGPFTVEALPAPVVKPLDDDTHPAPFFHENAAKKQSDWMQELKASGILGRQGEKIQFSRVEPLEGTKFLHAEAETKETDRKKAVICFAGETRPLDIRMVTQALNEAETIRPKPVYIVFAAFQFDPTAAKHIDDTKWPGVTLLKVQMNPDLMTADLKKKSSSSQSFWLVGQPDVELIHIEKGADKGKYKIKVKGFDYYDIKQGIVNSGGTDKIAMGCLIPIMTVCP

SEQ ID NO: 67061 - DNA, 378 bp, Unknown
  Obtained from environmental sample
  misc_feature (1)..(378): n is a, c, g, or t
atgaacggcgtttttgggcaggaggaaaaatgggaaataccaaaaacggttaatcgtcctccttatctgataatcgccatagtttctgtattggcgtttggcggcgttttgttcttcagacggaaaaacaaggcagtttccgccgaaaaaaccgccgccattgaacccgaggttgaactatccgctcgtgaaaaagatattttcggtcttttgttgacggaactttccacaaaggaaatcgccgaaaaaatggatttaacctattcaggagttaattttcatattcaaaaattgtacgccaagctgggagtgcaaaaccgaacggaattattagccaagtttattatacccccccccccccccccactcaatttatag

SEQ ID NO: 67062 - protein, 125 aa, Unknown
  Obtained from environmental sample
  DOMAIN (57)...(114): Bacterial regulatory proteins, luxR family
  misc_feature (1)..(125): Xaa is any amino acid
MNGVFGQEEKWEIPKTVNRPPYLIIAIVSVLAFGGVLFFRRKNKAVSAEKTAAIEPEVELSAREKDIFGLLLTELSTKEIAEKMDLTYSGVNFHIQKLYAKLGVQNRTELLAKFIIPPPPPPLNL

SEQ ID NO: 67063 - DNA, 1185 bp, Unknown
  Obtained from environmental sample
  misc_feature (1)..(1185): n is a, c, g, or t
atgagcagcgaaaaaataaagcgttttttctctcgtcaggaatttatatacacgctgtttatagtccttgcgttcgcgttattggttttcctgtgttcatggttcatgggccacctagagagaaaacatataatgaacgacgctaaatccgcgcttgacactacggaactcaacatcaattcagatcttcaaaaaatggaagatatgcttgtctatttatcggaaactatcaggctgatgatattgcagggtgcaagttacgaaatggtaacaaaatacataacggatataaacgattatatgttcgccaatgaagactataaaatatacaccacaggagtatacggcgtttttgacatattcggcggcaagtttcacgacggcacaggctggataccgccggacagtttcatacccaaagaccgcccatggtacaaggcggcggcagaggcaaacggaaaaaccgcggttaccgagccgtatttgtcggtagcaatgaatgtgtttactctgacattcgcccgccgcatatttaacgaagaaggcagaccgctcggtatagtctgccttgatatagttctggacagggttagagagttggcaatcaatacgcgttttgcccacagcggatacggaatactgctgaacagccaattagaagtgcttgcccaccccaacaatgaaatgtgcggtaaatatttaaaagacattgaaaacagttttatacccatagcggaagacttaaaacaggggctccctgttttagaacgcagaataataaactataaaggcgaagcgtccgtcatatttttccgtcaaattgagaacgactggtacatcgccgttatgatacctgaaaacgcctattttaaagaaatgaggataatgcggttagtaatcattgtgctgggaacagtacttgcggcattattcattacgttagtacagcttctttacaacgcgcaaaagaaacttcaatattacggcgtatcaaaactcaccacccgcgaaatggaaattttcaatctgcttctgacagatatgcctataaaacaaatagccgaaaaaacggcgttaaccaacgccggagtaaacttccacattcaaaacctgtaccgcaaacttggcatacaaagcagaacggaactatttgccaaatttgtaaacagacctaattcggaataa

SEQ ID NO: 67064 - protein, 394 aa, Unknown
  Obtained from environmental sample
  DOMAIN (157)...(237): Cache domain
  misc_feature (1)..(394): Xaa is any amino acid
MSSEKIKRFFSRQEFIYTLFIVLAFALLVFLCSWFMGHLERKHIMNDAKSALDTTELNINSDLQKMEDMLVYLSETIRLMILQGASYEMVTKYITDINDYMFANEDYKIYTTGVYGVFDIFGGKFHDGTGWIPPDSFIPKDRPWYKAAAEANGKTAVTEPYLSVAMNVFTLTFARRIFNEEGRPLGIVCLDIVLDRVRELAINTRFAHSGYGILLNSQLEVLAHPNNEMCGKYLKDIENSFIPIAEDLKQGLPVLERRIINYKGEASVIFFRQIENDWYIAVMIPENAYFKEMRIMRLVIIVLGTVLAALFITLVQLLYNAQKKLQYYGVSKLTTREMEIFNLLLTDMPIKQIAEKTALTNAGVNFHIQNLYRKLGIQSRTELFAKFVNRPNSE

SEQ ID NO: 67065 - DNA, 2001 bp, Unknown
  Obtained from environmental sample
  misc_feature (1)..(2001): n is a, c, g, or t
ttgtataagtggtatggagtttgccgttggcaaactcctagcaatttggcaaagccaaattgcagtcggcggacattaaacgtcaaaaaatattttaggagatttattatgaaaaacaaaaaaaatgtacggagttttgcgtcagtaaaactccaagttaaaatgcgtagcattttatttattgcacttgcggcaataatcgggttttcaatggcaggatgcgataacggctcaacaagtacttcaacaaatgatgacaacaacaacaatggtaacaacaataacaacaacaaccaaacccccggtttttccgtctcgggaaaattcagcaagagcgccagtgaagaggttaagtttactctggcggaaacaaccgtttccgctcctgtttcgtcggtacaaagggcacgatcggcaagagccgtagttgaaagcgccgagaaaaccatcagcggaaagatagaagacggcgattttaccattaagctttccggcacttataacgccgagacaggcagttataccgcgtcggcggcggcttcaattatacgctacaccatcaatggcgctattgacgaaaaaggcgaatcccttggttctaccgctaccctgctggtaaagaatggggatgattggactgcaacttcctatgttattaccgaagcgccgattactatcagcggtaacgctgtagagtctacccccggcggacttcccgcctttgcccgcggactttggaaatacagccgttttgaagataaaggcgaccagtataaatacacctatgaatatacgttcatggtaaacccgtgggatattgatttttatgttggtgttatcgaccacgctgaggataatatttatgttaaaaccagcaataaatccaatgttgtagagatagaaaactcaggcagtacttataatgttattgtcgcttatcctgtttatacagcaactgaagcgcaagttatcgcgtcagtcagagaatactttagctctcgaggaattacactaatacaaaccgatgatcagttgacgggacttaatgatagtaatccccgcttcttcgtaaagaaagccgattattccgatgtctatacgccttacttttataatctttcagatgaacaatggaacatagcgaatggatattacggaagcaacgccctgaaacgctacttaattgcgcaaaatgtcgcgtcttccggtactttgtttgaaaaacacaagtttgtctttagcgacaataataccaaaatggcatggtcgcaatatgccgatatgatggcatctgcttgtgaaactcttgcggaagctaaagcgttaacttggtacgaggaaaacgcggtggtgcttacgcgtgaggctcccccggcaaataacaacaatggtaacaataataacggtaataacaatggtaacagtagtggcaacaataataacaataatcagaatacagaatggtactatataagttatggttatcctatgcgatggaatctccatttacctgatggatgtgaggaggaactcgaatatctctatgatttgaagatgttagaaaaaatgagacctgccattgatacatatctaactactcagggatataccaagctgaccgacgcgcaggcgcaatttgtgtattcgtatggtaataatcagcctacgtatataccgcaagaagatggaaatgcaattcctaccaaatggtattatattaatttaagtgctccctatggatcgacccttaattttaacattttaaaatatagtattgatgcgggtacagtgtcagcaaccgaaaatacaagtgtgacgctaaatggtatttctatagcgaatccccgcaagattgtttatctttctaataatgatattaatacgggaatagatttcatgaacaaattcaattccggggtatggcatcttaccagagatgaggaagaagcaattatagcaaaatattgttcagataatggtattacagcgcaaaagagataa

SEQ ID NO: 67066 - protein, 666 aa, Unknown
  Obtained from environmental sample
  misc_feature (1)..(666): Xaa is any amino acid
MYKWYGVCRWQTPSNLAKPNCSRRTLNVKKYFRRFIMKNKKNVRSFASVKLQVKMRSILFIALAAIIGFSMAGCDNGSTSTSTNDDNNNNGNNNNNNNQTPGFSVSGKFSKSASEEVKFTLAETTVSAPVSSVQRARSARAVVESAEKTISGKIEDGDFTIKLSGTYNAETGSYTASAAASIIRYTINGAIDEKGESLGSTATLLVKNGDDWTATSYVITEAPITISGNAVESTPGGLPAFARGLWKYSRFEDKGDQYKYTYEYTFMVNPWDIDFYVGVIDHAEDNIYVKTSNKSNVVEIENSGSTYNVIVAYPVYTATEAQVIASVREYFSSRGITLIQTDDQLTGLNDSNPRFFVKKADYSDVYTPYFYNLSDEQWNIANGYYGSNALKRYLIAQNVASSGTLFEKHKFVFSDNNTKMAWSQYADMMASACETLAEAKALTWYEENAVVLTREAPPANNNNGNNNNGNNNGNSSGNNNNNNQNTEWYYISYGYPMRWNLHLPDGCEEELEYLYDLKMLEKMRPAIDTYLTTQGYTKLTDAQAQFVYSYGNNQPTYIPQEDGNAIPTKWYYINLSAPYGSTLNFNILKYSIDAGTVSATENTSVTLNGISIANPRKIVYLSNNDINTGIDFMNKFNSGVWHLTRDEEEAIIAKYCSDNGITAQKR

SEQ ID NO: 67067 - DNA, 627 bp, Unknown
  Obtained from environmental sample
  misc_feature (1)..(627): n is a, c, g, or t
atgatgaaacctctgtttatttccgtatttattctcgtttccgcggggctttttgccgccccgcttgaaagtaattttgtcaaggctccggcgtcttccgcttcgcaggctgaaaaagagcaggcttacatggacgcgcggaacagggtaattaaggccgcggcaaagtacgagaatgttccctaccgtcacggcggagtaacaaaaagcggagtggattgttcgggttttgtttacgcaagtttcaaagacgcccttggcgtttccacacctcgttcctctacggggctttatacatgggcggaaattatccctcttgaaaaagcgcagcccggcgatcttttgttttttaagaccacaggcggcagcacaatttcccatgtcggcatttatctcggtaaccgccgttttattcactcggcgtctgccggtccgaataccggcgtcatttattcaactcttgacgaaaagtactggtcccgcgcttacgccgcttccggccgtgttttcccggaaaccgcgggatacaacgccgttttggcaagcgcggaaagaccgtcctcttcgaccgccgccggcggctggagcaatcagcccgccaagcccgcaaaagcctccgcctcctga

SEQ ID NO: 67068 - protein, 208 aa, Unknown
  Obtained from environmental sample
  SIGNAL (1)...(19)
  DOMAIN (59)...(168): NlpC/P60 family
  misc_feature (1)..(208): Xaa is any amino acid
MMKPLFISVFILVSAGLFAAPLESNFVKAPASSASQAEKEQAYMDARNRVIKAAAKYENVPYRHGGVTKSGVDCSGFVYASFKDALGVSTPRSSTGLYTWAEIIPLEKAQPGDLLFFKTTGGSTISHVGIYLGNRRFIHSASAGPNTGVIYSTLDEKYWSRAYAASGRVFPETAGYNAVLASAERPSSSTAAGGWSNQPAKPAKASAS

SEQ ID NO: 67069 - DNA, 741 bp, Unknown
  Obtained from environmental sample
  misc_feature (1)..(741): n is a, c, g, or t
atgctggcggatctgcataaccattcctgcctctccccctgcggttcccttgatctttccccgaggtatcttcttgaattgggcgccgccaaagggcttaagctgatggcgcttaccgatcacaactcaagccttaactgccctgccttcgcgaagctcagtccccaattcggaatcattcccatctttggaatggaggccaccaccaccgaggaaattcacatcctgtgtttgttcaccaatctggaagcgagcatgacttttaatgaatacgcctattcgatactgaccccgtttctgaacaatcccgataaaaccggggatcaggtttacgttgacgaagaagacaacatagagggcgaagtcgagtattatctggtcaatcccatcgatttatcggttgacgcaatcggcgcgaaagtaatcgagtacggcggcattgtaattcccgcccatgtagaccggcacgctttttccatggcaagccagcttggagtaatcgtcaaaggcccctgggccgctcttgagtgcgtccgcattcccccgtcattcaacgaaaacctcttggacactttcggctaccccatgataacctcctcggacgcgcactaccccgaacacgtctgccgccgccccttccaactcgatgttaccgccgaagaattacagcccggcggactaggcaccgaggcggatatggaagcatttaaaaaagcgctgttaaaaagacccagagagtag

SEQ ID NO: 67070 - protein, 246 aa, Unknown
  Obtained from environmental sample
  DOMAIN (3)...(206): PHP domain
  misc_feature (1)..(246): Xaa is any amino acid
MLADLHNHSCLSPCGSLDLSPRYLLELGAAKGLKLMALTDHNSSLNCPAFAKLSPQFGIIPIFGMEATTTEEIHILCLFTNLEASMTFNEYAYSILTPFLNNPDKTGDQVYVDEEDNIEGEVEYYLVNPIDLSVDAIGAKVIEYGGIVIPAHVDRHAFSMASQLGVIVKGPWAALECVRIPPSFNENLLDTFGYPMITSSDAHYPEHVCRRPFQLDVTAEELQPGGLGTEADMEAFKKALLKRPRE

SEQ ID NO: 67071 - DNA, 345 bp, Unknown
  Obtained from environmental sample
  misc_feature (1)..(345): n is a, c, g, or t
gtgaaaatatccgaagtcgccgccgccttaggcgcggaaatctgccaaagcgaatttgaggacgttgaagttaccggcgcgtacacctccgatcttctttccgacgtaatggcgtacgcgaaggacggcggcgctcttattacgattcaagcccacaaaaacaccatcgccgtagcatcccttgttaacatatccgtccttatcatctgcaactcgcgtccgctacccgatgacatgctggaagcggcaaagagtgagggcatcgccgtaatccgcacaaaggaaaaccagtttacggtatccggcaaattatggagtctttttcatgctggcggatctgcataa

SEQ ID NO: 67072 - protein, 114 aa, Unknown
  Obtained from environmental sample
  DOMAIN (5)...(107): DRTGG domain
  misc_feature (1)..(114): Xaa is any amino acid
MKISEVAAALGAEICQSEFEDVEVTGAYTSDLLSDVMAYAKDGGALITIQAHKNTIAVASLVNISVLIICNSRPLPDDMLEAAKSEGIAVIRTKENQFTVSGKLWSLFHAGGSA

SEQ ID NO: 67073 - DNA, 792 bp, Unknown
  Obtained from environmental sample
  misc_feature (1)..(792): n is a, c, g, or t
ttgctcagggagaacagggtggcgggcattcccattgtagacgggaagaggctgatcggcattgtttccaccgaggacattcttaacgctcttgataaaggctatatcgactctcccgtcgcggacaggatgacgcagaatgttatcagtttgcaggacgatatgccccttgcctttgcgatttcctacattaacaaatacaggtacgggcgtttccctgtgcttaacaaggagcaagagctggtgggcattctcacttccaccgacgtgatacgctccttattaatcgaaatgaaccgcgaggttctaaggctggaaaaaatgcaaaaaagcgcggcgccgacttcggtctcaaaatacactgaaatggaatttaccactgctcattatgattttgaactggcgggcagggcttccgcggaaatcaagaaggcgctcaaacagcgcagttttgatcaaaagctgataaggcgcgtcgcgattgcaagttatgagctggagataaatcaggttgtccattccaacggcggcgtaatgaggtgttcaattctgccggacaaggtgattatcacggcttccgacacaggccccggcattgaggacgtaagccttgcgctcaaggaaggctactcaaccgcgaatgaatatgtccgttccatcggcttcggcgcgggaatggggcttgcgaacacaaagcgcgtctcggacgaatttacaattgagtcggcgctgggcaaggggacgacggttcgctccgttgtctttgtaaattcctcaaaggacgaatcgtga

SEQ ID NO: 67074 - protein, 263 aa, Unknown
  Obtained from environmental sample
  DOMAIN (154)...(257): Histidine kinase-, DNA gyrase B-, and HSP90-like ATPase
  misc_feature (1)..(263): Xaa is any amino acid
MLRENRVAGIPIVDGKRLIGIVSTEDILNALDKGYIDSPVADRMTQNVISLQDDMPLAFAISYINKYRYGRFPVLNKEQELVGILTSTDVIRSLLIEMNREVLRLEKMQKSAAPTSVSKYTEMEFTTAHYDFELAGRASAEIKKALKQRSFDQKLIRRVAIASYELEINQVVHSNGGVMRCSILPDKVIITASDTGPGIEDVSLALKEGYSTANEYVRSIGFGAGMGLANTKRVSDEFTIESALGKGTTVRSVVFVNSSKDES

SEQ ID NO: 67075 - DNA, 762 bp, Unknown
  Obtained from environmental sample
  misc_feature (1)..(762): n is a, c, g, or t
atgaacagcgcctaccgcatcgaccgtttaacccacagccggatacaagaacgcctaaccgccagccccgccgttatcctgccgctgggcggttgcgagcccttaggcgctgccggccgtatggggatagagaccctatgcgccgaacgggtggccgacgagctgtccgtccgttgccgcgccgtccgcgccccggccctgccgttcgcctgctccgcccccttcatgtccttccccggagccgccggagtcaaaccgaggactatggtcaacctgctctgcgagatcatccgcgcctacgtcctccaaggcgccaagcaggtatttttgatcaacgccgcccccttcaacaagacgccggcggcggaagcggtcaagaggatagaggcgaaatacgacggggtaaaagtattattattcgacatcaatgcgatcgccggcaataataacggtatagatagggccgacacggcgcttttggcgatggccgcctatcttgacccggaaagcgtcgatatcaataatactgatagacgaaaaggcgtaagtatcgaccgataccgaacttggaaaaaacgcggcgccgacccgcaaaaactaaaaaagctgtttcctgacggattgctgttgacagataacgaagataacgaagtattaaccgacattaccctggaacgcggtaaagagctttttgatcgcgttgttggggtaatagaaaaagatttaaattcaaattcttttttagacgaaagggcgcgataa

SEQ ID NO: 67076 - protein, 253 aa, Unknown
  Obtained from environmental sample
  misc_feature (1)..(253): Xaa is any amino acid
MNSAYRIDRLTHSRIQERLTASPAVILPLGGCEPLGAAGRMGIETLCAERVADELSVRCRAVRAPALPFACSAPFMSFPGAAGVKPRTMVNLLCEIIRAYVLQGAKQVFLINAAPFNKTPAAEAVKRIEAKYDGVKVLLFDINAIAGNNNGIDRADTALLAMAAYLDPESVDINNTDRRKGVSIDRYRTWKKRGADPQKLKKLFPDGLLLTDNEDNEVLTDITLERGKELFDRVVGVIEKDLNSNSFLDERAR

SEQ ID NO: 67077 - DNA, 795 bp, Unknown
  Obtained from environmental sample
  misc_feature (1)..(795): n is a, c, g, or t
gtgaacaacttttggaaaacgcattctaggacgacgttaataattttggcggttgtatgcgccataggagccttagcggccgtcttcgcccaggatccttttacggcgatgatggagcagccgacagttgacgaggcgccggcaagcgccgttcccgcgaacaacgccgacgcgccctacaaaccccactggtcaacgggcgtggagttcttcggcgagaacgattggacgttcgtggcaaagatagcggtccgcttcttcctcaacatcgtattcgcctacatcctaatatgccacatcttcgccaaagagcataggataaaggagtactcgttctgcttcttcatctccaacatactgatattcatggtgacctcgctcttagcctccgtgaaggtgaagaccggcttcgcgttcggactcttcgccatattgtccatactgcgctaccgcacggaacagattcagatacgggagatgacgttcctgttcgcctccatcataatgggcgtcatgaactcgctggccaccgacggcctgacgatcttcgccgtgctcctggccgacatcctgctctgcgtaagcatggagatctgcgacaaggcgtttatgggcatgacggatcaaatggttttggtctacgacaatacggcgctattggccaaggataagaagaatgagctgcacgaggacataaaaaagaggttcgggttcgacgtggtcaaggtcgtggtgaccaagatgaactatctgacagacagcgcggaagtaaagttggtttacaagaggggttga

SEQ ID NO: 67078 - protein, 264 aa, Unknown
  Obtained from environmental sample
  SIGNAL (1)...(26)
  misc_feature (1)..(264): Xaa is any amino acid
MNNFWKTHSRTTLIILAVVCAIGALAAVFAQDPFTAMMEQPTVDEAPASAVPANNADAPYKPHWSTGVEFFGENDWTFVAKIAVRFFLNIVFAYILICHIFAKEHRIKEYSFCFFISNILIFMVTSLLASVKVKTGFAFGLFAILSILRYRTEQIQIREMTFLFASIIMGVMNSLATDGLTIFAVLLADILLCVSMEICDKAFMGMTDQMVLVYDNTALLAKDKKNELHEDIKKRFGFDVVKVVVTKMNYLTDSAEVKLVYKRG

SEQ ID NO: 67079 - DNA, 795 bp, Unknown
  Obtained from environmental sample
  misc_feature (1)..(795): n is a, c, g, or t
atggataacgcgataaccgcctgtttggagccctttaagagggcgactcttgatgacgcggcaagggtgtcgttcctgcaccgctacgataccaagttcgtcttcggtacggacgaagtcccggcgttcctgaacgccataaaggacacatactcgttgcttgagattgaggggataaccgctcaaacctacaacaccttctacttcgacacgcccgacctcctgtgcttcaacctgcaccacaacaagcgcgcgcggcgcttcaagttccgcacccgcaagtacatgagcaacgggaagatttacaacgagataaagcagaagctaaactccggcaaaacgataaagttccgccagcgccgcgacgcattcgtcactgagccgccgatattgccggtaattaacgacttgtcggtctacgacgagagcttcgaggcgttgctaaaagccaacggctacggcaatatcggaaaactcgtcccgagtctgcgcgtcttcttcaaccgcctgacttttttgaacaataacttcgcggagaggatgacgctcgacctcggtctcggttacggctacgaaggcactgagttaaagctcaacgaaacggcgattgtggagctgaaacgcgagcgcggcccggaacagaccgtatcgcagagatacttccgctccatacacaagtgcccgagcggattctcaaagtacactatcggcatatcgctaacacacggcgaggcgaagaaaaaccgcttcctgccgaaaataagacacttagcctttgaaaggagcgcggcgtga

SEQ ID NO: 67080 - protein, 264 aa, Unknown
  Obtained from environmental sample
  misc_feature (1)..(264): Xaa is any amino acid
MDNAITACLEPFKRATLDDAARVSFLHRYDTKFVFGTDEVPAFLNAIKDTYSLLEIEGITAQTYNTFYFDTPDLLCFNLHHNKRARRFKFRTRKYMSNGKIYNEIKQKLNSGKTIKFRQRRDAFVTEPPILPVINDLSVYDESFEALLKANGYGNIGKLVPSLRVFFNRLTFLNNNFAERMTLDLGLGYGYEGTELKLNETAIVELKRERGPEQTVSQRYFRSIHKCPSGFSKYTIGISLTHGEAKKNRFLPKIRHLAFERSAA

SEQ ID NO: 67081 - DNA, 1323 bp, Unknown
  Obtained from environmental sample
  misc_feature (1)..(1323): n is a, c, g, or t
ttgacagattcggccgagaccggcaattgcggcggcggagactcgtccacgcccaatatacccgaaccgagtccgtgggaccctgtttgggcctgcccttccggcgtttcggccggcgggcttgatcttacaaaggacgatttgggggttgacgcgcacagcgtcgttgtaaagttcaaggacggcgcggcgccggaggttactttttcgaaggacggggccatgggcagcgagttcgtggtcaaagagggcgggcacgtcgtgttgattccaagttattattatgataacaaccctgacgtcttcagcataatagtttccggaacggcggcaaacgggtcgctaaaggtgtacggcgggggtaagaagacgctttacctgaacggcgtcaatgttaccaatccgagcgggccggtcataaacatccaaagcaacaagcggacggacgtgcacctcgtgggcgattgccagaggcgcaacatcctgaagggggccggtttcgagacggttcctacggaggagcagggcaaaggggcgatcttcgccgaggggtcgctcgtcttcggcgggacggggacgcttgaactgcgttccacggagaggcacgccgtcgtctcggacgagttcatcgaagtggagagcgggagcatcatcatatacgaatcgaagaacaacggtttccgcgccaacgagcggattacgatatcgggcgggacgctgcagataaagtgcgagggcgacgccatcaagaacgaaaagcgggcggcgggaaaggataagaccccgtgcccgataaccgtaaccggaggcgatataaagattcggaccacaggcattaaggggcacggcatagcgagcgacagcaacgacgtcgttataagcggcagcccgaaaatcgacatatccctcacgggcaacggttccaaggggatcagggcgcgcggcaacgtgacgatagacggcgggacgatagacctttgggcgcacgggtcgcgtgagtcgctcacggaagacacaagctccgcggcgggaatcaagacggacggcgacgtcgtgattaaaagaggcgtgctgaccatcaagagcaacaaggccaatgaaaacggcaaggggctgaatatagacggcgacctcaaggtaagcggcggcaccaccaagatcgcctcagacggcgacggtgtaaaggtgagggggtcgatcaacatgagcgacggcacccttgagacgaaatcggcgaacaagcaggacatagactgcggcgggaagatcaaccgtaccggcgggactttgaaggcagacaatattaaagaagggaatcaataa

SEQ ID NO: 67082 - protein, 440 aa, Unknown
  Obtained from environmental sample
  misc_feature (1)..(440): Xaa is any amino acid
MTDSAETGNCGGGDSSTPNIPEPSPWDPVWACPSGVSAGGLDLTKDDLGVDAHSVVVKFKDGAAPEVTFSKDGAMGSEFVVKEGGHVVLIPSYYYDNNPDVFSIIVSGTAANGSLKVYGGGKKTLYLNGVNVTNPSGPVINIQSNKRTDVHLVGDCQRRNILKGAGFETVPTEEQGKGAIFAEGSLVFGGTGTLELRSTERHAVVSDEFIEVESGSIIIYESKNNGFRANERITISGGTLQIKCEGDAIKNEKRAAGKDKTPCPITVTGGDIKIRTTGIKGHGIASDSNDVVISGSPKIDISLTGNGSKGIRARGNVTIDGGTIDLWAHGSRESLTEDTSSAAGIKTDGDVVIKRGVLTIKSNKANENGKGLNIDGDLKVSGGTTKIASDGDGVKVRGSINMSDGTLETKSANKQDIDCGGKINRTGGTLKADNIKEGNQ

SEQ ID NO: 67083 - DNA, 1470 bp, Unknown
  Obtained from environmental sample
  misc_feature (1)..(1470): n is a, c, g, or t
atgtcgggcagctgggaaaaatcggaagatatcaactggaacgaagtccagtcgatcctgtcaaacttcagcggcaacggcaatattaattttaattttaatcacagcgaaggcttgtttacaaattcattgtcgtttaccggcggcggcacatggcgtgattttaactttctgaatgaggaagccgaggcgtatgacaccgaaaccgaaagagaaaccgcgagaaaacagcaatatgcctttacaaactattcatccgcgtacgcgtataacacaacgctgaaaccgctgtacagggatcccattttcggccagtcgaatatacagtacagtctgggaggcacgctggttaaatcaaaaaaatacgcggacggggacagtcccgaattaacgccgcaatggggcacgttaaaaaaagaacagacaaaggacggagaagaaatactgggattaagaagccacaaactcgcgtcgaatattgcggctaacattatggacaagcagcagaatctttcggtcagcgcggacttgccgcctcttgatccgttaatccaaaccaacgcttctttcagggtctggttttcaacaacaaccgcccgcatagattttaagaaacctgaaatactggataacaagccgaatgacgaatggaaaatcgaccctttatacctgtcggaaacccttgatttcggaaaaatcatcacggtatattccatggcaatggagcccgaagacgactttaaaattaacaacattaccgcgtcattaaaattatgggattttaacgcgtctttttccgcggtaaaattaaataaatggaaattcatgcctgatgatcccaatagtcccacacagggcggaaaatgggtgcaggaaaccggcgaggaacccgcgataaatcccagggatttgacttttagttacaacaaaagactgtccgaacgggaaataattaaaaacaggcttggtttttccataaatgtggataccaggctgttttataaccttcaaaagcataccgattcgaactttcaattttcgacgggtttaacatttaaagtaaataattttttggatttaacgctgtcggcaacgtcagaaaacgcggttgtcttcagatatcttaaaaacgttcccggaatggaagaatatacaaaaatgtatattgacgggccgcaaaataatgtttttacggaccttgttgactcattcaatttctttgacaattcaaaaaggcaaagatcgggctttaagatgaaaaggtttaaccttacggccgttcaccatttaggggactggaacgcgacttttgacattgctatgtctccgtacctggatccgacgtcaaatccgccaaagtacgatattaacgcggaaataagattccttgtagaatggtcggccatttcagagataaaaacagacttaaaatacgaaaaaagatacgaaaaatggacacaaaacaagtaa

SEQ ID NO: 67084 - protein, 489 aa, Unknown
  Obtained from environmental sample
  misc_feature (1)..(489): Xaa is any amino acid
MSGSWEKSEDINWNEVQSILSNFSGNGNINFNFNHSEGLFTNSLSFTGGGTWRDFNFLNEEAEAYDTETERETARKQQYAFTNYSSAYAYNTTLKPLYRDPIFGQSNIQYSLGGTLVKSKKYADGDSPELTPQWGTLKKEQTKDGEEILGLRSHKLASNIAANIMDKQQNLSVSADLPPLDPLIQTNASFRVWFSTTTARIDFKKPEILDNKPNDEWKIDPLYLSETLDFGKIITVYSMAMEPEDDFKINNITASLKLWDFNASFSAVKLNKWKFMPDDPNSPTQGGKWVQETGEEPAINPRDLTFSYNKRLSEREIIKNRLGFSINVDTRLFYNLQKHTDSNFQFSTGLTFKVNNFLDLTLSATSENAVVFRYLKNVPGMEEYTKMYIDGPQNNVFTDLVDSFNFFDNSKRQRSGFKMKRFNLTAVHHLGDWNATFDIAMSPYLDPTSNPPKYDINAEIRFLVEWSAISEIKTDLKYEKRYEKWTQNK

SEQ ID NO: 67085 - DNA, 564 bp, Unknown
  Obtained from environmental sample
  misc_feature (1)..(564): n is a, c, g, or t
atggccgagaacagtgccggaaagtatagacttcaggcaaaactagcagtcaaggatgaatacaattttgactttatcgaaatgggcattgagcacagcgagactgaacttgaagcaggcattataaacaatattcgttcattcttatctgaaatgggtggagatttcagttttattggcaatcaatatcatcttgatgttaccgatgatgattattatattgacttacttttatatcacagaagactgcgatgtctgattgcaattgatttaaagattggcgaattcaaaccggaatatgcaggaaaaatgcaattttacctgaccgcacttgatgaaaaaataaaattacctgaggaaaacccttctattgggattatcatttgtaaaagtaaaaaccgtacaagagttgaatatacattaaaggcggcaaataaacctattggtgttgcgacatattcattttatgacaacttaccggatgaaatacgttctttacttccatcaccggatgaaatagcggcaattattaatgtaatagatgtaaatgacaatgataaatag

SEQ ID NO: 67086 - protein, 187 aa, Unknown
  Obtained from environmental sample
  DOMAIN (2)...(170): Protein of unknown function (DUF1016)
  misc_feature (1)..(187): Xaa is any amino acid
MAENSAGKYRLQAKLAVKDEYNFDFIEMGIEHSETELEAGIINNIRSFLSEMGGDFSFIGNQYHLDVTDDDYYIDLLLYHRRLRCLIAIDLKIGEFKPEYAGKMQFYLTALDEKIKLPEENPSIGIIICKSKNRTRVEYTLKAANKPIGVATYSFYDNLPDEIRSLLPSPDEIAAIINVIDVNDNDK

SEQ ID NO: 67087 - DNA, 1122 bp, Unknown
  Obtained from environmental sample
  misc_feature (1)..(1122): n is a, c, g, or t
ttgccaagtacagattcggccgagttggagacgaagaccccgcaagccgcngctttaaaattaaaaggtcccgatgttatatcgacaattttaatgcttggtttgcaaggttccggaaaaaccacaagttcggcgaaacttgccctgcgtcttaaaaaagaggggcgcaaaccgctgcttgtagcgtgcgacttaatccgtcccgccgctatggaacagcttgctgttctcggcggacaaataggaatccccgttcacaaagaagacggcgcaaaggacagcgtaaaagtttatcaaaacgccttatcgtgggcaaaacaaaatatgatcgataccctcatcatcgacacaacgggacgtatgcaaattgacgaaccgatgatgcaggagctttccaatcttaaaaacgcagcggctcccgatgaaatgcttttagtagccgactcgatgacgggacaagccgccgcggacatagcaaaaacatttgacgaaaaaatcgggcttacgggagtaatcttaagtaagttcgactctgacacacgcggcggcgcggcgctttcgctgaaaacagtaacgggaaaaccattaaagtttacaggcacgggagaaaagccggaagattttgaacctttccaccccgaaagaatcgccggacgcatactcggcatgggcgacgttgtaagtcttgtagaaaaagctcaggaagttatagaccaaaaagaagcgtttgaactccagaaaaaaatggagaaagaaaattttactcttgacgactggctgaaccaaattcgctcccttaaaaaaatgggttctctgcaaaaaatgttagagatgattcccggtatgcagggacagataagcgaagacgatattgataaagccgaattaaaacagcaggaagcgattttaagttctatgacgattaaagagcgcaacaatcacttgattatcggaccgccgcgaagaagcagaatcgcgcgaggatcgggaacgtccgtcgccgaggtggcgaggctgttaaaaaagtttgaaaaaatgcgcggcatgatgaaaaaaatggcaaagggcgcaagaggcggcgggatgcctgggatgccgaatatgccgggaatgtttcagtaa

SEQ ID NO: 67088 - protein, 373 aa, Unknown
  Obtained from environmental sample
  DOMAIN (253)...(350): Signal peptide binding domain
  misc_feature (1)..(373): Xaa is any amino acid
MPSTDSAELETKTPQAAALKLKGPDVISTILMLGLQGSGKTTSSAKLALRLKKEGRKPLLVACDLIRPAAMEQLAVLGGQIGIPVHKEDGAKDSVKVYQNALSWAKQNMIDTLIIDTTGRMQIDEPMMQELSNLKNAAAPDEMLLVADSMTGQAAADIAKTFDEKIGLTGVILSKFDSDTRGGAALSLKTVTGKPLKFTGTGEKPEDFEPFHPERIAGRILGMGDVVSLVEKAQEVIDQKEAFELQKKMEKENFTLDDWLNQIRSLKKMGSLQKMLEMIPGMQGQISEDDIDKAELKQQEAILSSMTIKERNNHLIIGPPRRSRIARGSGTSVAEVARLLKKFEKMRGMMKKMAKGARGGGMPGMPNMPGMFQ

SEQ ID NO: 67089 - DNA, 375 bp, Unknown
  Obtained from environmental sample
  misc_feature (1)..(375): n is a, c, g, or t
atgccgagtatgcgtccggcgattctttcggggtggaaaggttcaaaatcttccggcttttctcccgtgcctgtaaactttaatggttttcccgttactgttttcagcgaaagcgccgcgccgccgcgtgtgtcagagtcgaacttacttaagattactcccgtaagcccgattttttcgtcaaatgtttttgctatgtccgcggcggcttgtcccgtcatcgagtcggctactaaaagcatttcatcgggagccgctgcgtttttaagattggaaagctcctgcatcatcggttcgtcaatttgcatacgtcccgttgtgtcgatgatgagggtatcgatcatattttgttttgcccacgataaggcgttttga

SEQ ID NO: 67090 - protein, 124 aa, Unknown
  Obtained from environmental sample
  misc_feature (1)..(124): Xaa is any amino acid
MPSMRPAILSGWKGSKSSGFSPVPVNFNGFPVTVFSESAAPPRVSESNLLKITPVSPIFSSNVFAMSAAACPVIESATKSISSGAAAFLRLESSCIIGSSICIRPVVSMMRVSIIFCFAHDKAF

SEQ ID NO: 67091 - DNA, 936 bp, Unknown
  Obtained from environmental sample
  misc_feature (1)..(936): n is a, c, g, or t
atgcaaaattatacaaaagtaatggatatgataaattcctctaatggcttttacccattaatgatttcaactattaataaagatttagacggaattatatgtgttgacgaaaaggaacaagcggctcttataattaatagtttagattggatttacttgattggtgatacagcagaaaatgataaattcaaaaatgatgtagtaaatttatttaaagaacataacaaaaataaatatatgtggtgggggcttaacgaaaaatgtgaaaaaataattaaaagtgctttttctgtaaaaataaatgattttccaagatatagatggaaatttaatgaaagtacttttcaagaattagctgaaataaataatacttacaaaataaaaaatataaatgaaaacaatataaacaaggtattaaaaaacgagaataattcaataacagatgtctggaatagtatagaaacatttttgcagaaaggttttggcttttttatcgatgacggaaatgaagttataagttttatttatagtgctggagtctatgaaaaggaagtcgaaatagatatagcaacaaatgaaaattgtcgaaaaaaggggcttggaaaaatactaggaaaaagatttattgaatattgtttgtctaaaaatttaacaccaaaatgggattgttacaaatataatgaagggtctattagcttggctaaaaggcttggttttgaaataatagatgaatatcatgtaaaacaaattgtttttgagaataagacaaataaaaaaataaggcaaaattgtacttcgcataacaggtctgtatgcgcttcgccgccttacggcggctcgggctacacaaaaacacagtcggggcttgcgcccctttgtgtgtttttgctccgccacatttttttgtttgcgagaaactgcttcgcagtttcctaa

SEQ ID NO: 67092 - protein, 311 aa, Unknown
  Obtained from environmental sample
  DOMAIN (163)...(240): Acetyltransferase (GNAT) family
  misc_feature (1)..(311): Xaa is any amino acid
MQNYTKVMDMINSSNGFYPLMISTINKDLDGIICVDEKEQAALIINSLDWIYLIGDTAENDKFKNDVVNLFKEHNKNKYMWWGLNEKCEKIIKSAFSVKINDFPRYRWKFNESTFQELAEINNTYKIKNINENNINKVLKNENNSITDVWNSIETFLQKGFGFFIDDGNEVISFIYSAGVYEKEVEIDIATNENCRKKGLGKILGKRFIEYCLSKNLTPKWDCYKYNEGSISLAKRLGFEIIDEYHVKQIVFENKTNKKIRQNCTSHNRSVCASPPYGGSGYTKTQSGLAPLCVFLLRHIFLFARNCFAVS

SEQ ID NO: 67093 - DNA, 405 bp, Unknown
  Obtained from environmental sample
  misc_feature (1)..(405): n is a, c, g, or t
gtggttatgaacggagaagagttatttcagatggtttatcaacatgatttaataattgaaaaagataatgagttaaaagcaataggttctgtaaaaacttctagcaaggacagaatagacaaaatatttatagataagtttttgtataaccgtttaacaaatattgaaacgcctcattttgccgtatttttacatgatgttcaaagaaaaggaagagaaccaaaatttggtgttaatacaacttttcttacaggacattttaaaggctatacagttaagttaaatcctttggatggcgtatattactgtgatttaagaccagttatgtattcagacccgatattgaaagaaaacattagaacactggattgtttgttaattgatgatatatggagattcctataa

SEQ ID NO: 67094 - protein, 134 aa, Unknown
  Obtained from environmental sample
  misc_feature (1)..(134): Xaa is any amino acid
MVMNGEELFQMVYQHDLIIEKDNELKAIGSVKTSSKDRIDKIFIDKFLYNRLTNIETPHFAVFLHDVQRKGREPKFGVNTTFLTGHFKGYTVKLNPLDGVYYCDLRPVMYSDPILKENIRTLDCLLIDDIWRFL

SEQ ID NO: 67095 - DNA, 840 bp, Unknown
  Obtained from environmental sample
  misc_feature (1)..(840): n is a, c, g, or t
atgagaaacgtcctcggtttaagctgcgggaaatggggcaatgtgtttgacgaatggaacaaagggactttgggaagctaccttatcgaaatcacaagggatattctgcgtttcaaagacagcgacggcaagccccttgttgacaaaattctcgataccgcgggacaaaagggaacaggcaaatggacgggaatcgccgcgcttgagttcggagtgcccctcaccttaatcggcgaggctgtctttggacgctgtctttccgccgcgaaggacgagcgcgtaaaagcggcgaaagttttttccgccccaaaaattacctttcccgcggataaagcggcgtttatcaaggatttggaaaaggctctgtacgcctcaaaaatagtttcttacgctcaaggttatcttttaatgagggaagcggcgaaagaatacaaatggaatcttaactacggcggtatcgcgcttatgtggaggggcggctgtattatccgttcggttttcctcggaaaaattaaagaggcttttgacaaaaaccccaatcttgaaaaccttttactggatcccttcttttcaaaaacgatagaagaagccggcgattcatggcggcacgttgtttcaaccgcggtcataaacgggattcccgcccctgccctttcaagcgccctctcctactttgacgcttaccgcagcgaacgtctgccggcaaacctgcttcaggcgcaaagggattatttcggcgcgcacacttacgagcggctggacaaaccgagaggagaattcttccatacaaactggacgggacacggcggcgcgaccagcgcttccacctattcggtttag

SEQ ID NO: 67096 - protein, 279 aa, Unknown
  Obtained from environmental sample
  DOMAIN (1)...(266): 6-phosphogluconate dehydrogenase, C-terminal domain
  misc_feature (1)..(279): Xaa is any amino acid
MRNVLGLSCGKWGNVFDEWNKGTLGSYLIEITRDILRFKDSDGKPLVDKILDTAGQKGTGKWTGIAALEFGVPLTLIGEAVFGRCLSAAKDERVKAAKVFSAPKITFPADKAAFIKDLEKALYASKIVSYAQGYLLMREAAKEYKWNLNYGGIALMWRGGCIIRSVFLGKIKEAFDKNPNLENLLLDPFFSKTIEEAGDSWRHVVSTAVINGIPAPALSSALSYFDAYRSERLPANLLQAQRDYFGAHTYERLDKPRGEFFHTNWTGHGGATSASTYSV

SEQ ID NO: 67097 - DNA, 948 bp, Unknown
  Obtained from environmental sample
  misc_feature (1)..(948): n is a, c, g, or t
ttggaaaaaacttatgccgctatcggcggcgctgacaaagacataggaaattcggaacttgaggaagtttttttaacggctttgtctaaagcccaagccgacataaactgcgccggaaaggtcatcattctgccgccggacattacccgttatcattcacgcgccggcttttttacggaaatagccgcaaagagccttgacgataaactgggagctgtgcttcccgccctcgggactcatacgcctatgaccgatagcgaaatttcgcgtatgttcggaactacacccaaagagaaattccttgtccacgactggagaggcggcgtcacggagcttggccgccttcaggaagattttgttgaaaaaataaccgggggaaaagttaagtatgactggcccgttcaggtaaataaattattaaaaaaagacggaaaagacagcggcaatttttccctggctgtctccataggacaggttgttccgcatgaagtagcgggtatggcgaaccacgggaaaaatatctttgtggggacaggcggaaaggaagcgatagacaagagccattttgccggagcagcttacggaatggaaagaattatggggagggccgacacgcccgtccgcgcccttttcgacgagggcttaaaacgcttttcttctttaattacgcccattttatgggtactaaccgtaataggcgcgcgaactgacggctctctcgcggttcgcgggcttttcataggctttggccgtgaatgttttgaaaaagccgccgctctgtcgcgggaaattaacgttaacctcatgatagaaccggttaacaaagccgtcgtgtaccttgagcccgaggaataccgcaccacatggcttggaaacaaggcgatttacaggacgcgcatggcgatagccgacggcggggagcttttgatcctcgctccagccccttga

SEQ ID NO: 67098 - protein, 315 aa, Unknown
  Obtained from environmental sample
  misc_feature (1)..(315): Xaa is any amino acid
MEKTYAAIGGADKDIGNSELEEVFLTALSKAQADINCAGKVIILPPDITRYHSRAGFFTEIAAKSLDDKLGAVLPALGTHTPMTDSEISRMFGTTPKEKFLVHDWRGGVTELGRLQEDFVEKITGGKVKYDWPVQVNKLLKKDGKDSGNFSLAVSIGQVVPHEVAGMANHGKNIFVGTGGKEAIDKSHFAGAAYGMERIMGRADTPVRALFDEGLKRFSSLITPILWVLTVIGARTDGSLAVRGLFIGFGRECFEKAAALSREINVNLMIEPVNKAVVYLEPEEYRTTWLGNKAIYRTRMAIADGGELLILAPAP

SEQ ID NO: 67099 - DNA, 999 bp, Unknown
  Obtained from environmental sample
  misc_feature (1)..(999): n is a, c, g, or t
atgacagattcggccgagtattttttttataatttgggggaagcggtgaaggttccttttttgttggctcctatggcggagataagccacagggcgtttagagagctaattgaaggttttgggggctgttgcgacggctatttttccgaaatgttgagcgccggagccgttttagcgggcggtcccaacgaaaaatggtacattgacgccggtccaagacccgaaaaggtcgtttttcaggttgtcggagcggatataggacaggtttccgaggcttcagcccttctggataagctggaatgcgccggaatcgatataaatatgggttgcagcgccccattaatccgaaaaacaggcgcagggtccgcatggatggcgtcaattgaccgcgccggagagctaatttcacatgtaagaccccttgtaaagcgccgattgagcgtaaaattgcgtataggttacaaggatgattatgactatttggttaaattttgccaaaaactagaggcggaaggagtggattttattacgcttcacccccggcttgttacggaaaaatttaaacgacttgcccgttgggattatgtgaggcggttaaagcaggaactgaaaatccctgtagccggaaacggggacatatccacgcctgaggaacttgtccgccgagccgacggctcatgcgacgcggttatggtcgggcgggcggcggtgcgtcagccgtggatttttgcccatgcgcgaaagattgaaggcgctgattccggttcggcaaaactttatcccatccccaatattgaagaaaccggacttcgttttctggaacttttagccaaataccagccgcctgattttcatttatccagggcaatgcgatttttcggttatttctgcgacaacttaaaatgggggaattatctaaagactcagttgaataggcaaaaaactttgtctgacattgagatggtttggaaagggtattttaaagagaatcaggattaa

SEQ ID NO: 67100 - protein, 332 aa, Unknown
  Obtained from environmental sample
  DOMAIN (21)...(331): Dihydrouridine synthase (Dus)
  misc_feature (1)..(332): Xaa is any amino acid
MTDSAEYFFYNLGEAVKVPFLLAPMAEISHRAFRELIEGFGGCCDGYFSEMLSAGAVLAGGPNEKWYIDAGPRPEKVVFQVVGADIGQVSEASALLDKLECAGIDINMGCSAPLIRKTGAGSAWMASIDRAGELISHVRPLVKRRLSVKLRIGYKDDYDYLVKFCQKLEAEGVDFITLHPRLVTEKFKRLARWDYVRRLKQELKIPVAGNGDISTPEELVRRADGSCDAVMVGRAAVRQPWIFAHARKIEGADSGSAKLYPIPNIEETGLRFLELLAKYQPPDFHLSRAMRFFGYFCDNLKWGNYLKTQLNRQKTLSDIEMVWKGYFKENQD

SEQ ID NO: 67101 - DNA, 1062 bp, Unknown
  Obtained from environmental sample
  misc_feature (1)..(1062): n is a, c, g, or t
ttggaacgcggattaactcccgaaaggcttgcggcgattacgtccggtctaaatctgatgaacctgtaccgtttggccgcggaaagttttgaaaatgaaaatcccatttcgcttgagtccatgcggcagaaaaagaaagaaataatcgagaacggagcctgcggtcttttggagtttatggaaacgtcttatgatctttcccatgtgtcggggcatgattttgttaaaaagcggtttaaaaacgccgcaaaggccattaaaaagggacgccccgacgtattgccgatggggtatttaatagccggtcccgtagggacgggtaaaagttttatggtcagcgccttcgcgggcgagattggaattccgatggtgaagttccgcaatttccgcagcaagtggcagggcgagactgaatcgaatcttgaaagagttttaaatattcttacggcgatgtctcccgtaggagtgatgatagacgaagccgacgcttttttgggagaccgctctcaggaaggtgactcaggcacaagcaaccgcgtgtttgcgcagatagcttctttcatgggcaatacggaataccgtggcaaaattatctggtttttaatcacgtgccgtcccgacttaataccgattgaccttaaaaggcagggacgcgccgaagagcatcttgccctattttatcccgcatcaaaaaaagacagggaagatctttttaacacgttagtgcgcaaacttgatttggacattcgcaatttttcagtttccgatctttttagaaagttcgattatgaatattcaggagcggatttggaagcggttcttgtgcgcgctaaacaaatcgcggcaatggcggatcgcgtctatgtaaaacgcgaagatatggaagaggcgatgagcgactttgttcccgccgcctatccgcacgaagttgagctgcaaaatctggtggccgttctggaatgtacgtcaaaggaaatgcttccatcgcgttttcaaaaattaccccgcagtaaaataattaatgatattcaagaacttaaaatgcttttgggagaacggtaa

SEQ ID NO: 67102 - protein, 353 aa, Unknown
  Obtained from environmental sample
  DOMAIN (97)...(284): ATPase family associated with various cellular activities (AAA)
  misc_feature (1)..(353): Xaa is any amino acid
MERGLTPERLAAITSGLNLMNLYRLAAESFENENPISLESMRQKKKEIIENGACGLLEFMETSYDLSHVSGHDFVKKRFKNAAKAIKKGRPDVLPMGYLIAGPVGTGKSFMVSAFAGEIGIPMVKFRNFRSKWQGETESNLERVLNILTAMSPVGVMIDEADAFLGDRSQEGDSGTSNRVFAQIASFMGNTEYRGKIIWFLITCRPDLIPIDLKRQGRAEEHLALFYPASKKDREDLFNTLVRKLDLDIRNFSVSDLFRKFDYEYSGADLEAVLVRAKQIAAMADRVYVKREDMEEAMSDFVPAAYPHEVELQNLVAVLECTSKEMLPSRFQKLPRSKIINDIQELKMLLGER

SEQ ID NO: 67103 - DNA, 774 bp, Unknown
  Obtained from environmental sample
  misc_feature (1)..(774): n is a, c, g, or t
ttgtacccatacaaaaaaagtatcagcatgactaaaacaacacagtaccgttctgtagcttcattaaccaaaaaagaaaataaaataaaacatattgctttaatagtaaaaatatccggcataacaattatttgtgtacttgttgcatatatagttatttcaattttcggtatatattccatgaaaacaacaagcataaaacctgctgtcaacattggaataaataaacttaaaaacgatatggtctttttcgtaaacagactatcaactgaatacggacaattaaaacttatagacggtgaactaatcgggcaggaaggcatttccttaaaaaacaattataaattggtagatgaaataagttccgattataatattgaggcaaccgtctttgcccgtaacggtaatgacttccgcctaataagtaccagtattgtagacaacgccggaaaacgtgcggttgatacttttcttgaaacagacaatgccgcatatcagcgcatacaaaacggtaacggttatataggaaaagatgtcattctcggtaaaaattacattaccaaataccgccctattttcacggaaaacggaaaagaagttatcggtattttgtttatcggaaaggatatgacggaaatcgaaaaagtaattaacagtaatattgttaaatacattataagaatgacaactatcacgtttattattttatcggcttccgttgcaatattcggattgggctataaatataaatatttaagccgtaaagttaaatga

SEQ ID NO: 67104 - protein, 257 aa, Unknown
  Obtained from environmental sample
  misc_feature (1)..(257): Xaa is any amino acid
MYPYKKSISMTKTTQYRSVASLTKKENKIKHIALIVKISGITIICVLVAYIVISIFGIYSMKTTSIKPAVNIGINKLKNDMVFFVNRLSTEYGQLKLIDGELIGQEGISLKNNYKLVDEISSDYNIEATVFARNGNDFRLISTSIVDNAGKRAVDTFLETDNAAYQRIQNGNGYIGKDVILGKNYITKYRPIFTENGKEVIGILFIGKDMTEIEKVINSNIVKYIIRMTTITFIILSASVAIFGLGYKYKYLSRKVK

SEQ ID NO: 67105 - DNA, 606 bp, Unknown
  Obtained from environmental sample
  misc_feature (1)..(606): n is a, c, g, or t
atgctcttaaccatgaagacccttgtaatcattgatgaccacgatgtagtacgctccggtcttaccgccatgctggataaaaattggcaagtcctgggtacagccgccacgcttgatgaagccagaaaactctttagaagcctcgacaacccgcccgacctcattcttttagacctggaattgggcaaggactgggggcttgatattatcggcgataaatcattcgagaggggcaaattcccccctgtgctggttttttcggtttacgatgactttgcccatataaacgccgccttacgttcaggggcaaagggctatgtctgcaaatcccaagacacggcggaactgctggcagcaatggaagacgtatcatcaggaaaattcagttttccccccgatatgctacaacgccatgctttaacatcagataaactgcaaggcttgaacaagcgggaacacactatttttttcatggtacagcaaggcaagaccaacaaggaaatagccgccgaaatgggcgtaaccctccgcacaatcgaaaacaatttaagcatactctacgataaaaccggaactaaagaccgcaaagaattggaaaaaatgtaa

SEQ ID NO: 67106 - protein, 201 aa, Unknown
  Obtained from environmental sample
  DOMAIN (138)...(190): Sigma-70, region 4
  misc_feature (1)..(201): Xaa is any amino acid
MLLTMKTLVIIDDHDVVRSGLTAMLDKNWQVLGTAATLDEARKLFRSLDNPPDLILLDLELGKDWGLDIIGDKSFERGKFPPVLVFSVYDDFAHINAALRSGAKGYVCKSQDTAELLAAMEDVSSGKFSFPPDMLQRHALTSDKLQGLNKREHTIFFMVQQGKTNKEIAAEMGVTLRTIENNLSILYDKTGTKDRKELEKM

SEQ ID NO: 67107 - DNA, 768 bp, Unknown
  Obtained from environmental sample
  misc_feature (1)..(768): n is a, c, g, or t
atggacagccgtaacgaacagcaaattcggtacattacaaatcagcgcaatcgcctatggcaacaacaagtttgtcgcagggggattgttggaggcagaacgacgtcttcaactgacggcacaacatggacagccgtagcggacagcacattcggaacaagcgccatccttgcaatcgcctatatcgctaacagtggcgctaagtttgtcgcagttggcgctagcggcaaaatggcgacttcatcggacggcacaacatggacaaccgtatcgaacagcacattcggaacaagcagcatccgcgcagtcgccggtagtacttctattatcataggttttgtcgcagttggcgatggcggcaaaatggcgtattcaacagggagcggcacaacatggacagccgtatcagacaacacattcggaacaagcagcatccgcgcagtcgccggtggcaccggtagcaataacaggtttgtcataggcggcgatagcggcacaatggtgactacaagggacgcctatacatggacagccatatcggacagcacattcggatcaagcgccatcaacgcaatcgtctatggcaacagcaaatttgtcgcaggcggcgctagcggcacaatggcgacttcaatggacggcgtaacatggatagccataccgaacaccacattcggaacaagcgccatcaacgcaatcgcctatggcaatagcaagtttgtcgcagttggcgccagcggcaaaatggcgtatttatcgaacttttaa

SEQ ID NO: 67108 - protein, 255 aa, Unknown
  Obtained from environmental sample
  misc_feature (1)..(255): Xaa is any amino acid
MDSRNEQQIRYITNQRNRLWQQQVCRRGIVGGRTTSSTDGTTWTAVADSTFGTSAILAIAYIANSGAKFVAVGASGKMATSSDGTTWTTVSNSTFGTSSIRAVAGSTSIIIGFVAVGDGGKMAYSTGSGTTWTAVSDNTFGTSSIRAVAGGTGSNNRFVIGGDSGTMVTTRDAYTWTAISDSTFGSSAINAIVYGNSKFVAGGASGTMATSMDGVTWIAIPNTTFGTSAINAIAYGNSKFVAVGASGKMAYLSNF

SEQ ID NO: 67109 - DNA, 765 bp, Unknown
  Obtained from environmental sample
  misc_feature (1)..(765): n is a, c, g, or t
atgacatggacagctgtaggaactagcacatttgaagacaaaggtttattaaacgtctacgcaatggcctttggaaacaacacgtttgtcgcatgcgctagcaggtatatggcgacttcacctgacggcgtaatatggacagccgtagcggacagcaaattcacatactacatctacgcaatcacctatgctaacagcacgtttgtcgcagggggccttgtcggtacaatagcgacttcatcagacggcacaacatggacagccggaacaattagctcattcggcacaaacaacatcaacgaaatcgcctatggcgatggcaagtttgtcgcggtcggcgataacggcaaaatggcgtattcaactaataacggcgtaacatggtcagccgtatcggacagcacattcggcacatcagccatctacgcaatcgtctatggagatggcaaatttgtcgcagtcggcgatgacggcaaaatggcgacttcaccagacggcgaaacatggacagccgtagcggacagcacattcggcacatcagccatccgcgcaatcgcctatggcaacgacaagtttgtcgcgggcggcagcggaaaaatggcgtattcaactgataacggtacaacatggacagccgtaacgaacagcaaattcggtacattacaaatcagcgcaatcgcctatggcaacaacaagtttgtcgcagggggattgttggaggcagaacgacgtcttcaactgacggcacaacatggacagccgtag

SEQ ID NO: 67110 - protein, 254 aa, Unknown
  Obtained from environmental sample
  misc_feature (1)..(254): Xaa is any amino acid
MTWTAVGTSTFEDKGLLNVYAMAFGNNTFVACASRYMATSPDGVIWTAVADSKFTYYIYAITYANSTFVAGGLVGTIATSSDGTTWTAGTISSFGTNNINEIAYGDGKFVAVGDNGKMAYSTNNGVTWSAVSDSTFGTSAIYAIVYGDGKFVAVGDDGKMATSPDGETWTAVADSTFGTSAIRAIAYGNDKFVAGGSGKMAYSTDNGTTWTAVTNSKFGTLQISAIAYGNNKFVAGGLLEAERRLQLTAQHGQP

SEQ ID NO: 67111 - DNA, 1269 bp, Unknown
  Obtained from environmental sample
  misc_feature (1)..(1269): n is a, c, g, or t
atggaaaatcccttcttttcaccctcatcctccgcgctggcctgggctttcgccgggcctttccgaaagacttccgatgccgctcttgtcggagcgtttgaccgtgaacagcttgtgggcgttgaaggagaacgaacctggtggcggcttgatatgcctgcctgctttgtaaggctctacaacgaaaatcccctgtacggccactggaattatccacttggtgttaccctctacggcctgattgagaccgcccggctttttaagcggaacgaccgccaggcctctggcgacgctatcggcagttacgtgtactcccacgcggcgcagtcgatccgtactttggactatgccctcttcgacaaggaacatttcggcggcgctacagccgtacaccacctgcttacatccatcgacagcctggacgactgcggctcctttggctcgctggtgctggaactcgccaaagacggtggcggcgcgctccctatggaattcggcgcggcggcggattacaccgccggccacattatcaacaagcaggatcgtatgccggagggctgtttttacagacggcagatgatgcaccatttccataacgaaaccctatgggcggacgacctttacatgagcgttccgttcctctgccgttacgcggcatataaaaaagaccccgccattctcgaccttgccgccctgcaatttgagggctttaagaagtatctctttatggaagaaaaaaacctcatggcccatgtgtttgatcttaaacggaacatgaacacgggaattccctggggccggggaaacggctgggccatcttttcacttacagagctgctcatggttctcccacaggagcatccccgccgcgaattcctcctgagctttttcaggcagcatgccgcgggcgttctcgcccgccaggacgagaacgggatgtggcatcaggtgctggatatgccggcctcatatcaggagacatcctgcaccgccatgttcacctgcgctttttgccggggcctccgttacggctggtttgacggcagagaggccgcttaccgcaacgcggcggaaaaagcctggcgcgctctggaaaatcactcgatagacaaaagcggcgccgtttacggcgtgtgcagaggctccgagtttgcgttcaacccgcgttattacgccgagcatttattgccaaggcttaacgatactcacggcatcggcattgtacttcttgccggggtggagcttcttaagtcgagggaggtatcatga

SEQ ID NO: 67112 - protein, 422 aa, Unknown
  Obtained from environmental sample
  SIGNAL (1)...(18)
  DOMAIN (55)...(419): Glycosyl Hydrolase Family 88
  misc_feature (1)..(422): Xaa is any amino acid
MENPFFSPSSSALAWAFAGPFRKTSDAALVGAFDREQLVGVEGERTWWRLDMPACFVRLYNENPLYGHWNYPLGVTLYGLIETARLFKRNDRQASGDAIGSYVYSHAAQSIRTLDYALFDKEHFGGATAVHHLLTSIDSLDDCGSFGSLVLELAKDGGGALPMEFGAAADYTAGHIINKQDRMPEGCFYRRQMMHHFHNETLWADDLYMSVPFLCRYAAYKKDPAILDLAALQFEGFKKYLFMEEKNLMAHVFDLKRNMNTGIPWGRGNGWAIFSLTELLMVLPQEHPRREFLLSFFRQHAAGVLARQDENGMWHQVLDMPASYQETSCTAMFTCAFCRGLRYGWFDGREAAYRNAAEKAWRALENHSIDKSGAVYGVCRGSEFAFNPRYYAEHLLPRLNDTHGIGIVLLAGVELLKSREVS

SEQ ID NO: 67113 - DNA, 1353 bp, Unknown
  Obtained from environmental sample
  misc_feature (1)..(1353): n is a, c, g, or t
atgactgaatacaatatcgtttcatttggcggcgccggagacggcgctaatgacaattccagcgcctttcagacagcgctgaacgcaataaaagaggcgggcggcggcaccctgcgcgtaggcgaaggaatctggcgtaccggaccgcttgaaatttactcgcacacaacactggcgctggatgaaggcgcggtaatttctcttatccccgaaccggcgcgttatccgccggtattgacgcgctgggaagggttggaatgttacgctatgcacccctgcctctttgccaccggacaggaagatataatcatcaaggggaaaggcgtaatagagggcaacgggcagtactggtggaataaaattcgtgaaaaaaagatcgacaggcagcgacagccccagacgccggaagaattggcccttgccgctttaaacccgggatacgaaaaccagccgtcaggcggcggcggcagaaaaaatcagttcctgcgtcccccgctggtgcagttctacaattgctcaaaaatgcggctggaaggtatcaccctccgcaattccccgttttggacccttcatccggtgtattgcacaggccttgtcatctccgctttgactatcatcaacccgcctgacgcgcctaacacggacggaatggacatcgattcctgcgaggacgttttaatcgaaaaatgcaatgtttcggtgggagatgacgctatagcgctgaagtcaggatccggcgaagacgccgttcgcgccggaagaccaagccgccgcgtgactgtgcgggactgtacagtagaaagcggtcacgggggaatcgttataggaagcgaaactgcgggcggcattagcgaggtactggccgagaactgcctgttcaggggaacggatcgggggatcagaataaaaacccgccgcggacggggtggcgcagtccaaaatttggaattcagaaaactcaccatggaaaacaacctctgtcccctggcgattaatatgtactaccgctgtggagcagagcttgcggacggttatttcagcatggaagcccttccgattggcgccactaccccgtcaatcaggaatatccgtatatcggatattaaagctacaggctgtcgggctgccgcagggtttatcgccggcctgcccgaatcgcctgtagaaaacatcagcgtcagtcgctgtgaattttccaccaacgagaatagcggcgtcagtcccgatgagtcggatatgtttttgggaatcccgcatattgcggaaaaaagcatacgcctgctcaatgtcaaaaatgtggaattttcagaagtaaacgtcagcggcccggcggaagcatttatttaccgctag

SEQ ID NO: 67114 - protein, 450 aa, Unknown
  Obtained from environmental sample
  DOMAIN (62)...(425): Glycosyl hydrolases family 28
  misc_feature (1)..(450): Xaa is any amino acid
MTEYNIVSFGGAGDGANDNSSAFQTALNAIKEAGGGTLRVGEGIWRTGPLEIYSHTTLALDEGAVISLIPEPARYPPVLTRWEGLECYAMHPCLFATGQEDIIIKGKGVIEGNGQYWWNKIREKKIDRQRQPQTPEELALAALNPGYENQPSGGGGRKNQFLRPPLVQFYNCSKMRLEGITLRNSPFWTLHPVYCTGLVISALTIINPPDAPNTDGMDIDSCEDVLIEKCNVSVGDDAIALKSGSGEDAVRAGRPSRRVTVRDCTVESGHGGIVIGSETAGGISEVLAENCLFRGTDRGIRIKTRRGRGGAVQNLEFRKLTMENNLCPLAINMYYRCGAELADGYFSMEALPIGATTPSIRNIRISDIKATGCRAAAGFIAGLPESPVENISVSRCEFSTNENSGVSPDESDMFLGIPHIAEKSIRLLNVKNVEFSEVNVSGPAEAFIYR

SEQ ID NO: 67115 - DNA, 1155 bp, Unknown
  Obtained from environmental sample
  misc_feature (1)..(1155): n is a, c, g, or t
atgattgggcagatatatccgtcagaaaaaaagacggccgccgactccaaaacaggatatgaggttattcatcttacaggtggtgattcaaataatacccatctttattttacggaaaattcattttgcaaaggccgccgtgaaatcattttcctgtcggacagggacgacagcaagggaaaaacaaatattttttccatgaacctggacagcggggaaatgatccaacttaccgattttacaggccctatttctcattgcataaaaccgccggatggagaaaatctgttttgctttcatgacaaccaaattgttatgattgaacggaaaaatctttcggtacggacattatatgaatgtccggaaggctggaaactgacgtcaatgtcgctaagtcagagtggacagcgtatcggttttatactcaatgaaaaagctgatgtaatgaccgggtcaaactacaaaggttttaccgaaaggatgtatacgatcaagcgggctaaaattgttgttctcaatattgcaagcggtgacgtatgtacaatttttgaggatacccaccagcttgggcattttcaattctcgccttttgatgagacattagccatgttctgtcatgaaggtccatggaatttggttcatcagcgtatctggctgcttgatttggttgcccgaaccgtgttcccctgcttccgtcaggatgccgatgattcggtgggtcatgaattctggacgcgggataatctggttttttttgacaaccgccgcgccggacatgacggcacaattacccaggataaaacccaagtctataagccgacagaagacctaaaacaaaccccgtatatcgcttttgccgacagattcgggaatcttgtccgcaaggtggatgtgcaattttactgtaaccactatcacgccaataaggacaattctttggtggtaggcgatgatgtagaagatttaatgttgatcaacataaccggacacaacgcgctgattaaacccctgtgttttcatggaacttcgtggcgggatcaagcaagccattgccatcctacatttgattgggaaggccgttatatcctctggggctcagattttggcggcaaaaacaacctgtatatgatcgattcgtttcaggttgactggtaa

SEQ ID NO: 67116 - protein, 384 aa, Unknown
  Obtained from environmental sample
  misc_feature (1)..(384): Xaa is any amino acid
MIGQIYPSEKKTAADSKTGYEVIHLTGGDSNNTHLYFTENSFCKGRREIIFLSDRDDSKGKTNIFSMNLDSGEMIQLTDFTGPISHCIKPPDGENLFCFHDNQIVMIERKNLSVRTLYECPEGWKLTSMSLSQSGQRIGFILNEKADVMTGSNYKGFTERMYTIKRAKIVVLNIASGDVCTIFEDTHQLGHFQFSPFDETLAMFCHEGPWNLVHQRIWLLDLVARTVFPCFRQDADDSVGHEFWTRDNLVFFDNRRAGHDGTITQDKTQVYKPTEDLKQTPYIAFADRFGNLVRKVDVQFYCNHYHANKDNSLVVGDDVEDLMLINITGHNALIKPLCFHGTSWRDQASHCHPTFDWEGRYILWGSDFGGKNNLYMIDSFQVDW

SEQ ID NO: 67117 - DNA, 378 bp, Unknown
  Obtained from environmental sample
  misc_feature (1)..(378): n is a, c, g, or t
atgaaaacaattctctgcatcgtctgtcccaacagctgccgccttagcgccgaaaaaagcgctgatggctctggttttgctatcagcggcaataaatgcaaacgtggcatagatttcgcaatcgcggaaattaccaaccccatgcgcactttaaccaccacgattcgcacatctttcccgaacgtcccagtactgccagtgcgtactgcgggagaaattcccaaaggaaaaatcagggatgttatgaattgccttaatgcaattactgtcagccagcctttgggcatcggggaacccgtagcggaaaatatacttggtttggatgtagatattattgttacaagcgatatcttaaaaggagataacaatggcgcataa

SEQ ID NO: 67118 - protein, 125 aa, Unknown
  Obtained from environmental sample
  DOMAIN (2)...(115): Protein of unknown function (DUF1667)
  misc_feature (1)..(125): Xaa is any amino acid
MKTILCIVCPNSCRLSAEKSADGSGFAISGNKCKRGIDFAIAEITNPMRTLTTTIRTSFPNVPVLPVRTAGEIPKGKIRDVMNCLNAITVSQPLGIGEPVAENILGLDVDIIVTSDILKGDNNGA

SEQ ID NO: 67119 - DNA, 1278 bp, Unknown
  Obtained from environmental sample
  misc_feature (1)..(1278): n is a, c, g, or t
atgcgcttgatgaacgtagtggatgtcgcggtcattggcggcgggccggcgggattggcggcggcaatcgcagcggataggtacggggcaaagacgacgctcatcgagcgggagagccgccttggcggtatactgaaacagtgcatccacgacggctttggtcttatccgttttggcgaaaaactcagcggtcccgaatattcacaccgctatatttccgaactgagaaaaaccggcgtgtcggttcatctgcaaaaattcgtaattcgattaaataaatcagcaaccggatttgaattagtactgagcgggtctggcggcattgaaaaacttttcacaaaggcccttgtcctctccaccggctgccgggaaaggacagcgcggcaagccggtatttacggcacgcggcccgccggggtaatcaccgccggagccgcgcagtattacacaaacatcctgggacagctcccctgccgccgctgcgttgttctaggctcgggagacatcgggcttatcatggccaggcgcttaacactggaaggggcggaagtgctgggggtttacgaggccaaacccaccccgtcgggcctctcgcggaacatcgcgcaatgcctggatgattttaatatccccctctacaccagccggacggtcagccgggtctttggccgcgaacggcttacgggggtggagatcgccgccaccaacaaagcaatgcgacccatccccggcacggaggaaaagatagcctgcgacgggctcatcctttcggtagggctgataccggaaaacgaattggccgaaagtctgggcgttcttctcaatccggcgacaaaaggcccggtatgcgatcagcattgcatgacagaggttccaggcgtgttcagctgcggcaacgccctgctggtaaatgacatggtagactatgtttccgaaagcggggaagaagcgggaagaagcgcagcccgctttgctttatccaacattgagcaacacagactaaatacagcaagttttgagttcgatgaaggcttcctctgcatcagcccccaacggctcgatttggacaaccaggaagatgaaacgatgatattcttccgttcccgcgaagaacgggacaatacccgcgtttcgtttactgtaaacggcagggagcttttcgccaaacaatacacaaagctaagaccgcctgagatggaaaggatcagcctgcgcctgaaagacgcgggtatacaatccggcgacacgataaaagcagtcatggagagctgccaatga

SEQ ID NO: 67120 - protein, 425 aa, Unknown
  Obtained from environmental sample
  SIGNAL (1)...(24)
  DOMAIN (8)...(355): FAD dependent oxidoreductase
  misc_feature (1)..(425): Xaa is any amino acid
MRLMNVVDVAVIGGGPAGLAAAIAADRYGAKTTLIERESRLGGILKQCIHDGFGLIRFGEKLSGPEYSHRYISELRKTGVSVHLQKFVIRLNKSATGFELVLSGSGGIEKLFTKALVLSTGCRERTARQAGIYGTRPAGVITAGAAQYYTNILGQLPCRRCVVLGSGDIGLIMARRLTLEGAEVLGVYEAKPTPSGLSRNIAQCLDDFNIPLYTSRTVSRVFGRERLTGVEIAATNKAMRPIPGTEEKIACDGLILSVGLIPENELAESLGVLLNPATKGPVCDQHCMTEVPGVFSCGNALLVNDMVDYVSESGEEAGRSAARFALSNIEQHRLNTASFEFDEGFLCISPQRLDLDNQEDETMIFFRSREERDNTRVSFTVNGRELFAKQYTKLRPPEMERISLRLKDAGIQSGDTIKAVMESCQ

SEQ ID NO: 67121 - DNA, 843 bp, Unknown
  Obtained from environmental sample
  misc_feature (1)..(843): n is a, c, g, or t
atggcaggggatcgttttttttcgatacatccacggcggggaagcaatattattctggacaaaaaatttacccgggtcctggcgcggacatgttccgcaaaaattggcacggcttcaaaaaaaaagcatactaagggaggcggcgttgtccgtacagttcactggaacatcctggtaggacctgacgccgtggaaaccccggagcgggaaaattttgccgccgaaaggggatcgatagaaaccaccatgaagaaatttaccgccacctgcgcgaagcttaatatggggcagataattaattattttaccggagtacgttcccccacatacgaagaagactttgtggtttgtaagggaagaagatgcgccaacctgatccacgccgctggaatacagtcgccggggcttaccgccgcgccggcaatcgccattgatgtggcgcgatgggctgtggaattgcttgaagcagcggggaaaccggtttcgcctaacgcgcaattcaatccaatccgcaaaagcgttccccatatcgccgccatgagcgatgaggaacgcgccgagatgataaagcaaaatccgaattacgggatcatcctctgccgctgcgaggaagtaagcaagggcgagattatcgacagcctccgccggcttgtgccatgcgacaccgtagacggggtaaaacgccgcgtccgtcccggaatgggacgctgtcagggcagtttctgtgggccccttgtattgcggatcatcgccgaagaaaaaagcatcccgcttgagatggttacaaaaaacggcgggcagggaaatatcctctgcggacctacaaaggagatgataaattag

SEQ ID NO: 67122 - protein, 280 aa, Unknown
  Obtained from environmental sample
  DOMAIN (197)...(254): BFD-like [2Fe-2S] binding domain
  misc_feature (1)..(280): Xaa is any amino acid
MAGDRFFSIHPRRGSNIILDKKFTRVLARTCSAKIGTASKKKHTKGGGVVRTVHWNILVGPDAVETPERENFAAERGSIETTMKKFTATCAKLNMGQIINYFTGVRSPTYEEDFVVCKGRRCANLIHAAGIQSPGLTAAPAIAIDVARWAVELLEAAGKPVSPNAQFNPIRKSVPHIAAMSDEERAEMIKQNPNYGIILCRCEEVSKGEIIDSLRRLVPCDTVDGVKRRVRPGMGRCQGSFCGPLVLRIIAEEKSIPLEMVTKNGGQGNILCGPTKEMIN

SEQ ID NO: 67123 - DNA, 2205 bp, Unknown
  Obtained from environmental sample
  misc_feature (1)..(2205): n is a, c, g, or t
ttggcggccgcaagcatagcgatcggcagcggccgcgacaacaaccccatgaacgccggggaaacgcagtcacgcaacaccagcggaatgacgcttgacggcgctatgggtaacccggcgcttatcggggtcaatcagccgccgcgcagcggactctctctcctccccctctccatcgctctgtggagcgacaaggtcgcgccgccgctagacctgcgcgtccttaccgacccgccgatttccaccacctactacctaacgaagttcctgaacgagagctttctattggggaataacctctcgccggaggaggtctcgaagaggctgacaaaagggttgcgcgacgggataggggtgtacgccgggaccaaggtctccccgttcgtcttcgcgatgcgcggcttcgggctcggcaccgctaccttcgccgacgtctatgcaaggatccccagcggagtcctgctgccgatattctccgatacggcggggccggggttattggccggcaacaaacttgacctgtccgatatgcgccttgaagctatatgggcgtcggaggtcgccataaagctcggttattcgacgaccgtcccatttatcagcgaccatttcggatttgatatcagcgcggtgggggtgggtataaaggggctgttaggccacgcctacttcagcgccgagacggataacggcagcgccgtcttctacgattcggtatcaaacaaatacaaggccgccggccgcttcaacgtgctgagcgcgggtaccggccttcacaacgactttaagtacgataggaactacctattcaacaacaagataaacggcgagggtgtggggttagatatcgggacgctcttccataaccgcaaccacgcgctttccatagacgtacgggacatcggcatgatattttggaacagccgcggggtgcgtatgggaagcatttcgtttaagtcggcggttacggagggaattgacctaagcggcctgccgtcggacttggacagtctcttcgacttcagctccgactcgcttcaatggaggggcaagggccacatcttgtggcttcccgccaatttaaacgtcggatacacccgcaatatacaattcgactatgtgctgggcgtgttcttgggctatatcacagccggcttgggctacaaccagcagttgacgctgggcataggccgcgacacctattggccccgtatctcagccagcacgacgttcgggcttttagcgggctatataccggtgcgctacggcattatctgcggcggcccggagaggctggcctcggccttcggcatgggactggacgcgcagaatctctccatagacttctactacaaggcggtgggaagcccgtttctccaaccgagcaggggttttgagataggcagcggcctgactttccggtgggggcgcagaagggacaaaataaaagacacgccgcaggattcgttactcgcgccggaggcggcggcggccctgaccgatacgacgacgccggaacctgttatgccggtagtatcggagttctttccggacgaagatgatttagcggaggagatctacaaacccatagatataccaccggagatgccgccggaatcgacattggcacaaaaatcgactgcggctccggattcggcgcagataccgaaaccgcctcagcagcccactgatgaagacgcgcggatactgatcatatccctgcacgcaatcaacttcatacccggcagcgcaactttggcgaagagttcatacgacgcgctcaagacgatagccgacattctggcacggtacccggacacccgctacgagatacagggccacaccgactcgcagggcgcggagatgtacaacctcttgctctcggcggaacgcgccgcggtggtgaagcactatctgatgtcgcttggcgctccggaaaccagcctggtagcggtaggctacggaaaaaacatgcccatagccgacaacagcaccgccgtaggccgcgccatgaacagacgcgtagagttcgtgcaaatacacaaccaagagtattacaattgggttaaacgatttgagctggagatggtaccgagacttacaaatagggtaatttcagggaggcggatgttggagataacgaatgaggagaacggcgaggtcacctctccaaccactcctccggattcaacgactccgccctaa

SEQ ID NO: 67124 - protein, 734 aa, Unknown
  Obtained from environmental sample
  DOMAIN (578)...(673): OmpA family
  misc_feature (1)..(734): Xaa is any amino acid
MAAASIAIGSGRDNNPMNAGETQSRNTSGMTLDGAMGNPALIGVNQPPRSGLSLLPLSIALWSDKVAPPLDLRVLTDPPISTTYYLTKFLNESFLLGNNLSPEEVSKRLTKGLRDGIGVYAGTKVSPFVFAMRGFGLGTATFADVYARIPSGVLLPIFSDTAGPGLLAGNKLDLSDMRLEAIWASEVAIKLGYSTTVPFISDHFGFDISAVGVGIKGLLGHAYFSAETDNGSAVFYDSVSNKYKAAGRFNVLSAGTGLHNDFKYDRNYLFNNKINGEGVGLDIGTLFHNRNHALSIDVRDIGMIFWNSRGVRMGSISFKSAVTEGIDLSGLPSDLDSLFDFSSDSLQWRGKGHILWLPANLNVGYTRNIQFDYVLGVFLGYITAGLGYNQQLTLGIGRDTYWPRISASTTFGLLAGYIPVRYGIICGGPERLASAFGMGLDAQNLSIDFYYKAVGSPFLQPSRGFEIGSGLTFRWGRRRDKIKDTPQDSLLAPEAAAALTDTTTPEPVMPVVSEFFPDEDDLAEEIYKPIDIPPEMPPESTLAQKSTAAPDSAQIPKPPQQPTDEDARILIISLHAINFIPGSATLAKSSYDALKTIADILARYPDTRYEIQGHTDSQGAEMYNLLLSAERAAVVKHYLMSLGAPETSLVAVGYGKNMPIADNSTAVGRAMNRRVEFVQIHNQEYYNWVKRFELEMVPRLTNRVISGRRMLEITNEENGEVTSPTTPPDSTTPP

SEQ ID NO: 67125 - DNA, 609 bp, Unknown
  Obtained from environmental sample
  misc_feature (1)..(609): n is a, c, g, or t
atgagcataaaaattattgtttttgattatgggggggttatttgctttacgccttctccggaaatgaggggcgagcttgttaggcttagcgggttgtcggctgatgttctttgggatttggacaggaaatacaggggggagtgggacagggggacttatgacgggatcgggcattaccggttcatgttggcaaaggccggcgtctcacttcctgacgacagactcgcgctgatcgcgaaggccgatattgaaagttggagccatataaatcaggatacggtaaaattaatgcgggacattaaagcctcggggcttcgtgtggggattctttccaatatacctcatgattttcccagaagcagtatgccggcattcgccgaagcggacatcgccgtttattcctgcgaccttggcataataaaaccggaggcgggtatttacgaaaaactgcgggaaaaagcgggttgtttatataaagagattgttttttttgacgataaagttgataatgtaaataaagcgcgggaacttgggatacaggcttttctgtgggagggagcggaacaggcccgtaaaacaatttccggcatgacaggaggggcgatataa

SEQ ID NO: 67126 - protein, 202 aa, Unknown
  Obtained from environmental sample
  DOMAIN (3)...(187): haloacid dehalogenase-like hydrolase
  misc_feature (1)..(202): Xaa is any amino acid
MSIKIIVFDYGGVICFTPSPEMRGELVRLSGLSADVLWDLDRKYRGEWDRGTYDGIGHYRFMLAKAGVSLPDDRLALIAKADIESWSHINQDTVKLMRDIKASGLRVGILSNIPHDFPRSSMPAFAEADIAVYSCDLGIIKPEAGIYEKLREKAGCLYKEIVFFDDKVDNVNKARELGIQAFLWEGAEQARKTISGMTGGAI

SEQ ID NO: 67127 - DNA, 2760 bp, Unknown
  Obtained from environmental sample
  misc_feature (1)..(2760): n is a, c, g, or t
ttgtccgcctgtagcgaattctccgacggcgggaaagccattatcgaggagttgatcacgcggagaagttttgccggcgaggagatgctttttccgttagcacagggaacagggaacagggaacagggaacagggagaaaagaggtggtcactgagcctgtcgaagtgaccaataagaggaattgcccttgttctattctggattatcttggtagtgaaggtactttggttttagttgacagggaaagattggataacgcccaggagagcataagccgcgagtaccatggtttgtatatgagagcccatcgtgaggcggagggccgcgaattccccctgccggaacgtttgctgctgaatttcaaagaattgctcgaagggtgcggcacgcggaaaataatttccttcctttccatcaagagtgaagcgaagcccgatatccgccgtgtcagtatcccctgcgagccgtcgcggagttttttcggcaacatcaactacatgaaggatgaattcgccgcgttacacgcaagcggatggcatatagccgtggcggcggaatccgaagtgcaggccgagcgcataaagtctatgcttgtcccgcatgaatccctttccataatcgccctgccgctttcctcgggtttctccctgccggaaatcaaactcatggtaatccaggagaacgagatattcggcagaagaaaacgtcctccccgttccctgaagaccgtccgctcaagccccatcgacactttcgtggaactcaatccgggcgattacgtcgtgcatgttaaccacggcataggcctgttcaagggaatagagcggatcaacaccctgggctttgagcgcgactacatacagcttgagtacgcgggggacgagactgtttttgttccggtggaacagttgaacatggtacagcgttacatcggcaatgagggcaacgccccgaagctggataccgtcggatcaaaaagctgggaaaaccggaagcagcgggtaaaaaaatcagttgaggacattgcccaaaggctcctggagttgtactcaaagcgcaaacaggcgctgggttacgcctacccgaaagacaccgaatggcagaccatgttcgaggcggcctttccctttgaggaaaccgaggatcagctgcgctgcgtcgaggagatcaagcgggacatggaaagccccagtcccatggacaggcttgtctgcggcgacgtgggctacggaaaaaccgaggtcgcggtccgcgcctgcttcaaggcgatcatgggcggcaagcaggccgcgtttctcgccccgaccacgatcttatcagagcagcattatgaaaacttcaaggaacgtttttcgatttttcccgtgcgtatcgccatgctttcgcgttttgttgaccacaaaaacacccgcgccattctggagcggcttaagaacggcgagatcgacctgttgatcggaacgcacaggattatccagcgggacgtgacgttcaggaacctggggttaatcgtcattgacgaggagcagcgtttcggcgtaaaggacaaggaaaggctcaaggaacttaaaaccaatgttgactgcctcacgctttcggcgactcccatcccccggacgcttcacatgagccttcttaaaatccgcgacatgagtttgctggcaacggccccatccggcaggcagccgattgaaactgtcattgaggaatacagcgacgagaggctggtcaaagccatacgcaatgaagttgagaggggggggcaggtcttctttctccataaccggatcgaaaccctaaaggatacgaggataaaaattgagcgccttgtaccggaaattctggctgaaaccgcgcacgggcagatggacgcgcaggaccttgaggatattatgcaccgtttcgtgcacggcggctttcacgttcttgtatccacgacgataattgagaacggcatagacatccccaatgttaataccatcatcatcgaccgcgcggatatgtacggcgtgtcccagttgtaccagctccggggcagggtaggccgcagcgaccgtgtcgcctacgcctacctgctttacccgcagggcggcgaaattaccgaacttgccatgaaacgcctccaggtgatctccgattttacggagcttggttccggtttcaagatcgccatgaaggacatggagatacgcggcgccgggaatcttttaggccgcgaacagtcaggcgacatttattccgtgggctttgatctgtacctcaagctccttgacgaagcggtaaggcgccttgagaattcaagttacgagggggaaaccgaaacccttctggaactggaatactcgggctttatcccggacagctatattgattcccagcaggaaaaaatggaagtatataagatgatagccgccgtaagggacaaggacgagcttgagcgcgtctacgcggaactgcaggaccgtttcggcccgccgccagacgaagccgcctcgcttttggcgctcgccgagatcaggataatctgccgcgagctcgccgtgtcgtcgctgagggaaagggaaggcatagtaagggcggagttcgcgaaggtttcccatgtaaaagtcgaccgcctcttacggcttatgcaggagtccatgggcaaggttaaacttgatccccaaaaacccaacgtgcttatgctaaccgttgggaacattggcttaaaagagaagagcgagtttataagggaaaagctggcggtgttaacaaaataa

SEQ ID NO: 67128 - protein, 919 aa, Unknown
  Obtained from environmental sample
  DOMAIN (376)...(538): Type III restriction enzyme, res subunit
  misc_feature (1)..(919): Xaa is any amino acid
MSACSEFSDGGKAIIEELITRRSFAGEEMLFPLAQGTGNREQGTGRKEVVTEPVEVTNKRNCPCSILDYLGSEGTLVLVDRERLDNAQESISREYHGLYMRAHREAEGREFPLPERLLLNFKELLEGCGTRKIISFLSIKSEAKPDIRRVSIPCEPSRSFFGNINYMKDEFAALHASGWHIAVAAESEVQAERIKSMLVPHESLSIIALPLSSGFSLPEIKLMVIQENEIFGRRKRPPRSLKTVRSSPIDTFVELNPGDYVVHVNHGIGLFKGIERINTLGFERDYIQLEYAGDETVFVPVEQLNMVQRYIGNEGNAPKLDTVGSKSWENRKQRVKKSVEDIAQRLLELYSKRKQALGYAYPKDTEWQTMFEAAFPFEETEDQLRCVEEIKRDMESPSPMDRLVCGDVGYGKTEVAVRACFKAIMGGKQAAFLAPTTILSEQHYENFKERFSIFPVRIAMLSRFVDHKNTRAILERLKNGEIDLLIGTHRIIQRDVTFRNLGLIVIDEEQRFGVKDKERLKELKTNVDCLTLSATPIPRTLHMSLLKIRDMSLLATAPSGRQPIETVIEEYSDERLVKAIRNEVERGGQVFFLHNRIETLKDTRIKIERLVPEILAETAHGQMDAQDLEDIMHRFVHGGFHVLVSTTIIENGIDIPNVNTIIIDRADMYGVSQLYQLRGRVGRSDRVAYAYLLYPQGGEITELAMKRLQVISDFTELGSGFKIAMKDMEIRGAGNLLGREQSGDIYSVGFDLYLKLLDEAVRRLENSSYEGETETLLELEYSGFIPDSYIDSQQEKMEVYKMIAAVRDKDELERVYAELQDRFGPPPDEAASLLALAEIRIICRELAVSSLREREGIVRAEFAKVSHVKVDRLLRLMQESMGKVKLDPQKPNVLMLTVGNIGLKEKSEFIREKLAVLTK

SEQ ID NO: 67129 - DNA, 1356 bp, Unknown
  Obtained from environmental sample
  misc_feature (1)..(1356): n is a, c, g, or t
atgtatgaaacgattatctcctacaattcattagatggaaagttcgaaccgttgctcggaacgcttgtctcccgcgacaacgataaggtcgtcgtcgaccttaaccccaaggccaagtggagcgacggtcagccggttacctccgtggacgtcaagttcgtctttgagctgggccgccgcttcccgggcgcggccaccgctttcgccatagacttcatctccgaaatcaaagttgagacggttgacgggggagtggagcggctctcgtttatggtcgataagaccaagcgcaacaacccgctcgttatcctcgaccacctgcaggccatccgaatcgtccccgcccacgtgtttgagaagtatttggccgacaacgggaacgatctaagcgcagtccaaaagttgaaaatcgacaaggatccggtagtctccggcccctacaatatagagcactactcaaacgagcgtatcgtaatcaaacgccgcgacgattattggggcaatgaggccctatacggcggcaagctcccctctcccgagttcatcatccatcctatatataagaataatgaccacttcgcgatcgctttgcagcagggcaagctcgacgcttcgcagacctttatgccgcgtatatggttgaagaagaaggacggggtgagcacatggtacgacgacgccccatactttgttccgggcgctatgcccatgttgctgataaacacgaccaaggcgccgcttaacgacccgcagtaccgccgcgccatggccgccgccatcagctacgcggatatcaaggagctggccgtctccggttacgctcccgacgtacagcccggccttataatgaatcaggggcttgagggcaagtatttcaacgccgaggacgctaatgagttcggcgtttcctacgatccggagaacgccaagaagatactgaccgccgccggctacaaatccgtatacaaagccgacggttcgctggattacatgaccgacaaggccgggaacaagctgcccaccctgtcgatcaccgtccccgccggttggtccgactgggaggccatggttaagatcgccgagaagggtctgcgcgccgccggtatggacgtccgcgagggaccggtcgacgccggcctctactggcccgctctgccctccggcaacttcgacttgataatgcacaagcccgcggcttcggtcaccccgtcgcttccgtggaaccgtttcgagtctgtcatgtcgtcacgcaactgggtgcctgttggncgcgacaacaagatgaacgagaatcagggccgctacaacagcccccaagataagggttacaatcccaagggtcgacgagttggctga

SEQ ID NO: 67130 - protein, 451 aa, Unknown
  Obtained from environmental sample
  DOMAIN (14)...(421): Bacterial extracellular solute-binding proteins, family 5 Middle
  misc_feature (1)..(451): Xaa is any amino acid
MYETIISYNSLDGKFEPLLGTLVSRDNDKVVVDLNPKAKWSDGQPVTSVDVKFVFELGRRFPGAATAFAIDFISEIKVETVDGGVERLSFMVDKTKRNNPLVILDHLQAIRIVPAHVFEKYLADNGNDLSAVQKLKIDKDPVVSGPYNIEHYSNERIVIKRRDDYWGNEALYGGKLPSPEFIIHPIYKNNDHFAIALQQGKLDASQTFMPRIWLKKKDGVSTWYDDAPYFVPGAMPMLLINTTKAPLNDPQYRRAMAAAISYADIKELAVSGYAPDVQPGLIMNQGLEGKYFNAEDANEFGVSYDPENAKKILTAAGYKSVYKADGSLDYMTDKAGNKLPTLSITVPAGWSDWEAMVKIAEKGLRAAGMDVREGPVDAGLYWPALPSGNFDLIMHKPAASVTPSLPWNRFESVMSSRNWVPVGRDNKMNENQGRYNSPQDKGYNPKGRRVG

SEQ ID NO: 67131 - DNA, 1134 bp, Unknown
  Obtained from environmental sample
  misc_feature (1)..(1134): n is a, c, g, or t
gtgtcaataacgtatttgttagttgattctaatcgaaaattgattttaaggggagccatgcttaaacagtatccaacactcagatttgttctgatgagggccggttggtacttcctgacatttttagtcgcggtgactattaattttttcctgccgcgtcttgggaagaacaatccggtcgacatcatcatgggcaaggccgccacgggcttaagcaatgaggacgcccgtaagaaggaggagaagtaccttcaggagttcggcctcgccaaagtggggaaagacggccagctgttgcgcgacgccgagggaaggccggtgaaggccggaaggcttgagcagttcgccaactatatcaagatgtgccttgtgggcgatctcgggacgtcgttccagaagtaccccaaaaaggtggttgatgtgatcaaggaggcggtgccttggacgattgccttgcagttgcctactatcctcttcgggtggattgtcggcaatgtgctcggcgcgcttgcggcctataggcgcggcgtgttcgacaaggtcttcttcccgcttgcgttgattttgagctctttcccgttcttcgtgttcgggatgttgctcgtctactacttcgccgtggtgtttccgtggttcccggccatgggcggctacgcgaacagtcttgtgccgtccttctcgatagctttcttctcgtcggcggcctaccactacgtgctgcctttcttctcgatcttcctgattctggccggcggtcaggccataggcatgaggtcgatgggcatatacgagcttgggaccgactacatcaagtacgccaagtggctggggctgaaagaggggaaggttttgggttacctcttccgcaacgccatgctgccgcagatcacgggactggcgcttagcttgggtacgatgatcgggggggcgctcatcacagagatgatcttctcctatccggggctcggcatggctatgctcacggccattcagaacaacgactacccgatgattcaggggtgtacgcttatcgtcaccgtatcggtgctcatagcgaactttacggtcgatatattgatcgggtttcttgatccccgtgttaaggccgggcttcagatgggtaagggggtttaa

SEQ ID NO: 67132 - protein, 377 aa, Unknown
  Obtained from environmental sample
  DOMAIN (146)...(369): Binding-protein-dependent transport system inner membrane component
  misc_feature (1)..(377): Xaa is any amino acid
MSITYLLVDSNRKLILRGAMLKQYPTLRFVLMRAGWYFLTFLVAVTINFFLPRLGKNNPVDIIMGKAATGLSNEDARKKEEKYLQEFGLAKVGKDGQLLRDAEGRPVKAGRLEQFANYIKMCLVGDLGTSFQKYPKKVVDVIKEAVPWTIALQLPTILFGWIVGNVLGALAAYRRGVFDKVFFPLALILSSFPFFVFGMLLVYYFAVVFPWFPAMGGYANSLVPSFSIAFFSSAAYHYVLPFFSIFLILAGGQAIGMRSMGIYELGTDYIKYAKWLGLKEGKVLGYLFRNAMLPQITGLALSLGTMIGGALITEMIFSYPGLGMAMLTAIQNNDYPMIQGCTLIVTVSVLIANFTVDILIGFLDPRVKAGLQMGKGV

SEQ ID NO: 67133 - DNA, 960 bp, Unknown
  Obtained from environmental sample
  misc_feature (1)..(960): n is a, c, g, or t
ttggagacttcaataaatttttcagcagtttcatcgttaaacccccttacccatctgaagcccggccttaacacggggatcaagaaacccgatcaatatatcgaccgtaaagttcgctatgagcaccgatacggtgacgataagcgtacacccctgaatcatcgggtagtcgttgttctgaatggccgtgagcatagccatgccgagccccggataggagaagatcatctctgtgatgagcgcccccccgatcatcgtacccaagctaagcgccagtcccgtgatctgcggcagcatggcgttgcggaagaggtaacccaaaaccttcccctctttcagccccagccacttggcgtacttgatgtagtcggtcccaagctcgtatatgcccatcgacctcatgcctatggcctgaccgccggccagaatcaggaagatcgagaagaaaggcagcacgtagtggtaggccgccgacgagaagaaagctatcgagaaggacggcacaagactgttcgcgtagccgcccatggccgggaaccacggaaacaccacggcgaagtagtagacgagcaacatcccgaacacgaagaacgggaaagagctcaaaatcaacgcaagcgggaagaagaccttgtcgaacacgccgcgcctataggccgcaagcgcgccgagcacattgccgacaatccacccgaagaggatagtaggcaactgcaaggcaatcgtccaaggcaccgcctccttgatcacatcaaccacctttttggggtacttctggaacgacgtcccgagatcgcccacaaggcacatcttgatatagttggcgaactgctcaagccttccggccttcaccggccttccctcggcgtcgcgcaacagctggccgtctttccccactttggcgaggccgaactcctgaaggtacttctcctccttcttacgggcgtcctcattgcttaa

SEQ ID NO: 67134 - protein, 319 aa, Unknown
  Obtained from environmental sample
  misc_feature (1)..(319): Xaa is any amino acid
METSINFSAVSSLNPLTHLKPGLNTGIKKPDQYIDRKVRYEHRYGDDKRTPLNHRVVVVLNGREHSHAEPRIGEDHLCDERPPDHRTQAKRQSRDLRQHGVAEEVTQNLPLFQPQPLGVLDVVGPKLVYAHRPHAYGLTAGQNQEDREERQHVVVGRRREESYREGRHKTVRVAAHGREPRKHHGEVVDEQHPEHEERERAQNQRKREEDLVEHAAPIGRKRAEHIADNPPEEDSRQLQGNRPRHRLLDHINHLFGVLLERRPEIAHKAHLDIVGELLKPSGLHRPSLGVAQQLAVFPHFGEAELLKVLLLLLTGVLIA

SEQ ID NO: 67135 - DNA, 1518 bp, Unknown
  Obtained from environmental sample
  misc_feature (1)..(1518): n is a, c, g, or t
ttgatggccgagatggacttaatttgtactattacttttaatgtcgatggcggcaatgggacaattccttcaattacggcagctagctctacaagtataactttcccaagcggagaaggtctttctaaagagggctttatttttggcggatggtatacccaaaatagcggtaaagaatacaaggcgggcgattcctttaccgttaacgtcaacattacttttatcgcagtttggcgccctattcgtacagtacattttaacaacaacggcggcagcggaacagtttcttcaatttcaacgggctctggttttgctatagaattacctgatggaagcggactttccaaaaacggttatactttcggcggttggacaaatgtctacggtacgattttatataacgcaggttctttatatactgttaacggtgatattaccttgtacgccaaatggaatagcaattttaatgttgacggtactagggaaaatccgattccgcttacattatgcgaatggaaggacggtgaaattactaacaacaccgttagcgaagtttggtactcttttaataccggtaatgatgccagatactttgtctggtggaatgaaaacggatgtaatgaaggcaagacattgaatgttagagttgaagcttataacagcgatggtagtgttatatttaatgaggataccgcatgggataacccgcgtgtagttttacctaaatcaggcggcattataaaattaagggtattttcgtctaccttctctgtaggtacttttgctattgtgtacagcgcaagtaaactaagacccggcagtatcggtactgtcgaaacaaatccgatcccattaacaggaaacgcatggaaaaacggcgaaatagattcaaacgtatccggagccaatgagctttggtattcttttgatgttaccgactatacaaaatacaatatttggttgaatagcgctaatgaaggagacggcagcaaatcattgtatattaaggttgatgcaaagtatagcgccggtgagtcaatttttacaggagaaagttacgcatggaatactccgagatcatttacatcgaatagaaacggtactgtattaattaaagttactgcgaccaacgtaagtaacggcactttcttcggtattgcgtgcagcacttccagcaccagaccgattagaagaggcaatggatcttatgaagacccgtatccattgagtctcagttggactagtagcgaaatccctccatattctaattcagtctatttctcgatcgatgctactgccggaaccacgtattatatctggtggaatgacgctaaaaacggcgatggtaccaaaacattggatattatagttggcgctgatgataacgggtggagttcaccgaggcaaattacagctgcttcaaccggtttattaagaattgaagtgagaccgtatagtcccaacgctaccggtacttttgccatagcatatagtcgaaatgctactcccagaccataa

SEQ ID NO: 67136 - protein, 505 aa, Unknown
  Obtained from environmental sample
  misc_feature (1)..(505): Xaa is any amino acid
MMAEMDLICTITFNVDGGNGTIPSITAASSTSITFPSGEGLSKEGFIFGGWYTQNSGKEYKAGDSFTVNVNITFIAVWRPIRTVHFNNNGGSGTVSSISTGSGFAIELPDGSGLSKNGYTFGGWTNVYGTILYNAGSLYTVNGDITLYAKWNSNFNVDGTRENPIPLTLCEWKDGEITNNTVSEVWYSFNTGNDARYFVWWNENGCNEGKTLNVRVEAYNSDGSVIFNEDTAWDNPRVVLPKSGGIIKLRVFSSTFSVGTFAIVYSASKLRPGSIGTVETNPIPLTGNAWKNGEIDSNVSGANELWYSFDVTDYTKYNIWLNSANEGDGSKSLYIKVDAKYSAGESIFTGESYAWNTPRSFTSNRNGTVLIKVTATNVSNGTFFGIACSTSSTRPIRRGNGSYEDPYPLSLSWTSSEIPPYSNSVYFSIDATAGTTYYIWWNDAKNGDGTKTLDIIVGADDNGWSSPRQITAASTGLLRIEVRPYSPNATGTFAIAYSRNATPRP

SEQ ID NO: 67137 - DNA, 609 bp, Unknown
  Obtained from environmental sample
  misc_feature (1)..(609): n is a, c, g, or t
ttgagtaaatttcggttagaattgtactggggaggttttggaatgtctgatagtgatgatctggatcttgatggcggtgatgctcctgataccggcggcgctcctaaaaaaaagggcggcgggcttggcggtttgcttccgactcttttaaagtttgtggctattggcttgggcgcgttaatctttatagttactgtctgtattattaccgttaatatcattaataaaggcggtaaatctcagactataatggttgatcccaatggtccgtatgtgggaaaaagaccggaatataattattacgatatgattggcgctatgacggtcagaacaagggatttccctgtcagttccacagtcagcgtggaaatgataatcggctacgacttgaacgacttaaacgcgtcttcggaattggtcacccgcaggtatgaattgcgcgactttgtaaggcgctattttgccggaaaatacgcggcggagcttgttcccgaaagagaagaagagctaaaagccgatatccgcgaaatgttaaatacccgctttttggacacggcaagggcgcgtatcatattgttcaataagttcgatgtaatggagaatttttaa

SEQ ID NO: 67138 - protein, 202 aa, Unknown
  Obtained from environmental sample
  DOMAIN (46)...(199): Flagellar basal body-associated protein FliL
  misc_feature (1)..(202): Xaa is any amino acid
MSKFRLELYWGGFGMSDSDDLDLDGGDAPDTGGAPKKKGGGLGGLLPTLLKFVAIGLGALIFIVTVCIITVNIINKGGKSQTIMVDPNGPYVGKRPEYNYYDMIGAMTVRTRDFPVSSTVSVEMIIGYDLNDLNASSELVTRRYELRDFVRRYFAGKYAAELVPEREEELKADIREMLNTRFLDTARARIILFNKFDVMENF

SEQ ID NO: 67139 - DNA, 1401 bp, Unknown
  Obtained from environmental sample
  misc_feature (1)..(1401): n is a, c, g, or t
atgtcaggcagttttactctttccgatggcagtcaactcgacgttccccccactctggtctctttcgccgtttccacagcaaaaatagacaatatcatctctcctgaatttaaaaaggcagacagttatgtctatttattaaaaccgccgttttccgtttacgaaaaaactgattttgaagcgttacgcgaatattttgacgatgttgaagaacttatcacaaacaggaaaattctctcttgttgggcaagcggcagcggcggaacggcggaagctgttgtaaaaatgtgcatgggtaacaaaataggctttaccgcgaaaaatgaactttttacgggagccggtttctgcggatttatcgttgaaaccgaatcgccgttacaagtaaaatacgcagttttaatagggcgcacaacaggcgattatattcttaaaacaaaaacttataacattcccattggtacattacaggacgaatgggaaaaaactcttgagcctgtttatccgtatcttattaagcaagacggaaaacttgaaaatttttcgtggaaacgggaaaaaacagaaaaaaacaagaaaaaaagcatattaagttctttctcaaaacccaagtttgttattcctgtttttcccggaaccaacagcgaatacgacagcgcaagggcggttgaaaaagcgggggggaaagcggaaatatttgttatacgaaacttaactcccgccgccgtcgcccaaagcgttaaagattttgaaaaagcggtgcgtaaatcgcaggtaatatttattcccggaggtttttcaggcggcgatgagcctgacggatcgggaaaatttatcacggcgtttatgcgtaacagcgcgattaaagacgctgttacagaccttttgagaaaccgcgacgggcttatctgcggaatatgcaacgggtttcaggcgcttataaaactcggtcttgtcccttacggcgaaatccgtgatatgacggaagactcccccactcttacatttaacacaataggcaggcatcaatctactctgccgattacaaaagtcgtctccaataaatcgccgtggctctcctgctttgaacagggagaacaatttatagtgccgatttcccacggtgagggacgctttatcgcccaagagagccttatccgctctttagcagccaacggtcaaatagcgactcaatattcagattacgacggcaacgcctcgcaggatatacgttttaaccccaacaattccgacttcgccattgagggaattacatcgcccgacggcagggtcttcggtcgcatggcgcataacgagcggctggacgacggtatttacaggaatattcccggtatcagaaaaatggatatattcgctggggcggtgaggtattttaaataa

SEQ ID NO: 67140 - protein, 466 aa, Unknown
  Obtained from environmental sample
  misc_feature (1)..(466): Xaa is any amino acid
MSGSFTLSDGSQLDVPPTLVSFAVSTAKIDNIISPEFKKADSYVYLLKPPFSVYEKTDFEALREYFDDVEELITNRKILSCWASGSGGTAEAVVKMCMGNKIGFTAKNELFTGAGFCGFIVETESPLQVKYAVLIGRTTGDYILKTKTYNIPIGTLQDEWEKTLEPVYPYLIKQDGKLENFSWKREKTEKNKKKSILSSFSKPKFVIPVFPGTNSEYDSARAVEKAGGKAEIFVIRNLTPAAVAQSVKDFEKAVRKSQVIFIPGGFSGGDEPDGSGKFITAFMRNSAIKDAVTDLLRNRDGLICGICNGFQALIKLGLVPYGEIRDMTEDSPTLTFNTIGRHQSTLPITKVVSNKSPWLSCFEQGEQFIVPISHGEGRFIAQESLIRSLAANGQIATQYSDYDGNASQDIRFNPNNSDFAIEGITSPDGRVFGRMAHNERLDDGIYRNIPGIRKMDIFAGAVRYFK

SEQ ID NO: 67141 - DNA, 942 bp, Unknown
  Obtained from environmental sample
  misc_feature (1)..(942): n is a, c, g, or t
atggcgagtctggcggacgatagcgatccgctctccgggcgcgcctttgtttatcaggcaatgcgcgtaacgggagcggcgaatccgctggcgcacgcaaatgaaactcttgaaggcaaattaccccagcgtaaaatttgccgcaccgccgccgcaggttacagttcttacggaaatcaaataggtcttgcaacaggtcacgttcatgaaatataccaccctggttatgccgctaaacgcatggagataggagcggttatcggagccgcgcctttaaaaaatgttgtacgcattactccgtctcctacggacgttgtaatccttttgggaggcagaacaggacgcgacggtataggcggcgctacaggctcttccaaatcgcatacgtcgtcctcgctggaaacttgcggcgctgatgtacaaaaaggcaatgcgccggaagagcgaaaaatacagcggcttttccgcgatccaaaagccgctcgtcttattaaacgttgtaacgatttcggcgcaggcggggtaagcgtctccgttggggaaatcgctgacgggcttgtaatcgacttaaacaaaatattaaaaaaatacgaagggctggacggaacagagcttgctattagcgaaagtcaagaaagaatgtccgtagttacttccaaaaaaaacgctgaaaagtttatcgctcttgcgcggaaagaaaatcttgaagcggaaataatagcggaagttacaaaagttccgcgtcttgtaatgaaatggaacggaaaaactatcgttgatatttccagagagtttttaaattccaacggagctaaaaaaacagcaaaagttcatataaaaaatattcagctaacaacgcttgaaaacaaaactgtaaacgagcaacaactaaaatcattaatgggcagtcttaatatttgttcacagaaaagggcttgttga

SEQ ID NO: 67142 - protein, 313 aa, Unknown
  Obtained from environmental sample
  DOMAIN (101)...(254): AIR synthase related protein, C-terminal domain
  misc_feature (1)..(313): Xaa is any amino acid
MASLADDSDPLSGRAFVYQAMRVTGAANPLAHANETLEGKLPQRKICRTAAAGYSSYGNQIGLATGHVHEIYHPGYAAKRMEIGAVIGAAPLKNVVRITPSPTDVVILLGGRTGRDGIGGATGSSKSHTSSSLETCGADVQKGNAPEERKIQRLFRDPKAARLIKRCNDFGAGGVSVSVGEIADGLVIDLNKILKKYEGLDGTELAISESQERMSVVTSKKNAEKFIALARKENLEAEIIAEVTKVPRLVMKWNGKTIVDISREFLNSNGAKKTAKVHIKNIQLTTLENKTVNEQQLKSLMGSLNICSQKRAC

SEQ ID NO: 67143 - DNA, 726 bp, Unknown
  Obtained from environmental sample
  misc_feature (1)..(726): n is a, c, g, or t
atgaagggtaaaatgaagcttgacatcgtttatgaagacagttcatgtatagtgatcaacaagcccgccggccttgcggcgcagggggggaagggcataggcgtatccctggacagcatgcttgcagaaagccggccgcagaggcctttgctggtacacaggctggacagggatacttccggattgatccttgtcgcgaaagacaagacggcggccgccctctactcgcgcctgttcggagggaaaagagtccacagcggcttgcctgatatcggtagcgactctaggggacatcgcgccgttattaagcggtatctggcaatgtgcaagggcaaaccggtccggggcgaagggataatcagcttcgatttggaaatccggggcatgaagaaaaagtccgaaacccgctaccgtttaattgagagcttcaaagacgatttttcccttatggaaatggaactggggacgggcaggatgcaccagatacgccgccatctggccctgacaggcaaccccatccttggcgacgacaagcacggcgattttaccctgaaccatctgctgcgcaagacaatgaaactgaacaagctcctcctgcacgcgtctcagttgatcatcccggaaaccaaggatactccccgcattgagcttgaagcgccattgccggggtatttcactcaattcattgagggggtcaggggccagggggcgggggccggggagtag

SEQ ID NO: 67144 - protein, 241 aa, Unknown
  Obtained from environmental sample
  DOMAIN (15)...(168): RNA pseudouridylate synthase
  misc_feature (1)..(241): Xaa is any amino acid
MKGKMKLDIVYEDSSCIVINKPAGLAAQGGKGIGVSLDSMLAESRPQRPLLVHRLDRDTSGLILVAKDKTAAALYSRLFGGKRVHSGLPDIGSDSRGHRAVIKRYLAMCKGKPVRGEGIISFDLEIRGMKKKSETRYRLIESFKDDFSLMEMELGTGRMHQIRRHLALTGNPILGDDKHGDFTLNHLLRKTMKLNKLLLHASQLIIPETKDTPRIELEAPLPGYFTQFIEGVRGQGAGAGE

SEQ ID NO: 67145 - DNA, 945 bp, Unknown
  Obtained from environmental sample
  misc_feature (1)..(945): n is a, c, g, or t
atgagccccaagcagaggcaaggatgcctcgcgtctttcagacggtgcgtctttcagacgcaatgcatattttcaaggaggatctttatgatcatcaatcacaaccttagcgcaatgtttgcggacaggtcactcggtgtaactcaggtttacctgacaaaaaacatggaaaaactgtcttcgggacttcgtatcaaccgtgccggcgatgacgcgtcgggactggcggtttccgagaaattacggagccagattcgtggtcttaatcaggcatcaacaaatgcccaaaacggcatttcattcattcagacttcagaagggtatttgcaggaatcccaagacattcttcaacgtcttagggaattgtcagtccaggcggcaaacggtatctattccgatgaggacagaatgtacatccaggtcgaagtttcacagctcgtcgacgaattggacagaattgcaagccatgcccaatttaacggtatgaacatgcttacaggacgttttgcccgcataacaggggacaatgtagcgacagcctccatgtggttccatatcggcgctaacatggaccagagagaacaggtctttatcggtacaatgaccagtaaaggtctcggagtccgccaaatggacgaatcctttgtaactttacagaccccggatgacgccaacaggaccatcggtgtttgcgatgcggctcttaaaatcatcaacaaacaaagagcagaccttggagcctaccaaaaccgtctggaacacgctgtccgcggcttagacgtaggagccgagaatttgcaggctgctgaatccagaataagggataccaatatggccaaccaaatggttgactatgtaagggaccagattctgaatcaggccggcactgcgatgcttgcgcaggctaaccaaagatcaagttcggtcttgtcattattgcaataa

SEQ ID NO: 67146 - protein, 314 aa, Unknown
  Obtained from environmental sample
  DOMAIN (221)...(292): Bacterial flagellin C-terminus
  misc_feature (1)..(314): Xaa is any amino acid
MSPKQRQGCLASFRRCVFQTQCIFSRRIFMIINHNLSAMFADRSLGVTQVYLTKNMEKLSSGLRINRAGDDASGLAVSEKLRSQIRGLNQASTNAQNGISFIQTSEGYLQESQDILQRLRELSVQAANGIYSDEDRMYIQVEVSQLVDELDRIASHAQFNGMNMLTGRFARITGDNVATASMWFHIGANMDQREQVFIGTMTSKGLGVRQMDESFVTLQTPDDANRTIGVCDAALKIINKQRADLGAYQNRLEHAVRGLDVGAENLQAAESRIRDTNMANQMVDYVRDQILNQAGTAMLAQANQRSSSVLSLLQ

SEQ ID NO: 67147 - DNA, 852 bp, Unknown
  Obtained from environmental sample
  misc_feature (1)..(852): n is a, c, g, or t
atgattattaatcacaacatgagcgcctatttcgccgaccgtcagctcggcgtaacccaggaagctttgaccaagaacatggagaaattaagctccggtttaaggatcaacagagccggggacgatgcatccggactcgctgtctcagaaaaactgagaagccagattcgcggtttgcagcaggcagaacgtaacattcagaatggtgtttcgtttatccaagctactgaaggctatcttcaggaaacacaggatattctgcaccgtttaagagagttagcggttcagtcagctaacggcatttattcagacgaagatcgtatgcagatcccagtcgaagtgtcgcagctgtatgatgaaagtgaacgtattgcgagccatgcccaatttaacggcatgaatgtgctcaccggcgcgtttgcgtttgaatctccgtcaggaaggataatgcaattacaggtcggagcgaacatggatcagaacgctagaatctacgttggcaacatgtcagctgatgcgcttaatttgaagaacgcgcagggcgacggaaagatttctatttccgaccccgcggaagcaaaccgcgctatcggtactgtagacgcagcgttaaaagttgtttcaaaacaacgcgctgatcttggcgcttaccaaaatcgttttgaaatcgcggcacaaggtgttgcgattgcggcggagaacatgcaggcagcggaatcccgcattagggataccaacatggcaaataagatggttgactatacaagagactccatcttgtcccagagcggaaccgcaatgctggcgcaagctaaccttcgcagtcaatcggttttatcactgctttcataa
